United States Patent Application Publication US 2018/0126003 A1 - sequence listing, part 44

SEQ ID NO: 74201 - DNA, 3579 bp, Artificial Sequence
  derived and/or modified sequence
atgcagttaaagataatgcctaaaaagaaacgcctctcagcagggagagtgccgttgatcctctttctgtgtcagatgatttctgctttagaggtgccattagatccgaagttgctggaagacctggttcagcctcccaccattacccaacagagccccaaggattatatcatagaccctcgcgagaatatagtgattcaatgcgaagccaaaggtaaacctcccccaagcttcagttggaccaggaacggcacccactttgatatagacaaagatcctttagtcacaatgaaacccgggaccggaactcttatcatcaatatcatgagtgaaggcaaggcggagacgtatgagggcgtttaccagtgcacagctcgtaatgagagaggggctgccgtgtcaaataacatcgtcgtccgaccttccaggtcacccttatggactaaggagaaactggagccaataactttgcagagtggacaaagcttagttttgccatgcaggcccccgatcggcctgccaccaccaataattttttggatggacaacagctttcagcgcctgccccagagtgaacgggtgtcacagggcttaaatggagatctgtattttagcaatgtgctacccgaagacacccgcgaggactatatatgctacgcgcgattcaaccatacacagacaatccagcagaagcagccaatcagtgtcaaagtaatttccgctaagtcctcgagggaacgccctccaacattccttactcccgagggcaacgcctccaacaaggaagagctgcgcggaaacgtccttagtctagagtgtatcgcagagggtctcccaacacccatcatatattgggccaaagaggacggcatgctgcctaagaaccgcactgtttacaagaattttgagaaaacacttcagattatccacgtcagcgaggccgattcagggaactaccaatgtattgccaagaacgcactaggggcaatccaccataccatatcggtaagagtgaaggctgcaccctactggatcactgccccacagaacctcgtgctcagtccaggcgaggacggcacgttgatttgtcgagcaaatggtaaccctaagccccgtatcagctggctgaccaacggcgtgcctattgagattgctcctgacgacccctcacgcaagatcgatggagataccatcatcttctccaacgtgcaagaaaggtcaagcgccgtgtatcagtgtaatgcctcgaacgaatacggctacctgttggccaacgcttttgtgaacgttctagcagaaccacctcggattctcacacctgctaacacactttatcaggtaattgcaaatagacccgcactgttggattgtgcatttttcggttctcctctgccaactatcgaatggtttaagggcgcaaagggaagtgccttacatgaggacatctacgtgctgcacgaaaacggcacgttggaaatccctgtggcgcagaaggacagcaccgggacctatacttgcgtggcccgcaataaacttgggatggccaaaaatgaagtgcatctggaaatcaaagacccaacatggatcgtcaagcagcctgaatatgccgtggtccagcgcggatctatggtgagttttgagtgcaaggtcaagcatgatcataccctgtctctcaccgttctgtggttaaaagacaatcgagagctcccaagtgatgagcggttcacagttgacaaagatcacttggtggtcgcagacgtgagcgacgacgactctggaacgtacacgtgcgttgcaaacactactttggattccgtgagtgcttcggccgttctgtctgtggtggcacctactcctacccccgcccccgtgtatgatgttccaaatcctccgtttgatcttgaactgaccgatcagcttgataaatctgtgcaactgagttggaccccaggtgatgataacaactcccccatcaccaaatttatcatcgaatatgaggatgcaatgcataaacccggactgtggcaccaccagactgaagtctcaggaacccagaccacagcccagttgaagctatcaccctacgtcaactactcatttcgggtgatggcagtgaactcaattggcaaaagtctgccatcggaagcctccgaacagtacctcacaaaagcctctgaacccgacaagaaccccactgccgtcgagggcctgggaagtgagcctgacaatttggtcattacttggaaaccattgaatggcttcgaatctaacgggccaggacttcagtacaaagtgtcatggagacaaaaggatggtgacgatgaatggacatctgtggtggttgcgaatgtctctaaatacatcgtaagtgggacccccacattcgtgccttatctcatcaaagtgcaggccttaaacgacatgggattcgctcctgaacccgcagtggtaatgggacactcgggggaggaccttccaatggtcgctcccggaaacgtgcgcgttaacgtggtcaactctacactggccgaggtccattgggacccagttcccctgaagtcgattcgcggacatctacagggctacaggatctactattggaagacgcagagttcttccaaacgcaatagacggcatatagagaagaaaatcctcacctttcaggggtcaaagactcacgggatgctgcccgggctagaaccgttttcccactacacgttaaatgtccgggttgttaacggaaaaggggagggtcccgcatcgcccgatcgggtgttcaatactccagagggagttccgtctgcccctagctcacttaaaatcgtcaaccccaccttggactctctcactctggagtgggacccccccagccaccccaatgggattctgactgagtatactctgaaataccagcctattaactcgacccacgagctgggtcccctcgtagatctgaaaatcccagcgaataagactcggtggacactaaagaaccttaatttctccactaggtacaaattctatttctacgcccagacgagcgcaggatcaggtagccagatcaccgaggaggccgtcacgacagtagatgaagcagggatcttgccaccagatgtcggagccggcaaggctatggcttccaggcaggtggacattgccacccagggatggttcatcggccttatgtgcgctgtcgcccttttaatcctcatcctgctgatagtatgcttcatccggcggaataagggcggaaagtatcccgttaaggagaaagaagacgcccatgccgatccggagattcagcccatgaaggaggacgacggtacattcggagaatattccgacgccgaagatcacaagcccctgaagaaaggttccaggactcccagtgatagaactgtgaaaaaggaagattccgacgattcactggtggactacggggagggcgtaaacggtcagttcaatgaagacggcagttttattggtcagtacagcggcaaaaaggaaaaggaacccgcagaggggaacgaatcttctgaggccccatcacctgtaaacgccatgaactcttttgtgtag

SEQ ID NO: 74202 - DNA, 3579 bp, Artificial Sequence
  derived and/or modified sequence
atgcagctgaagatcatgcccaagaagaagaggctgtctgctggccgggtgcccctcatcctcttcctgtgccagatgatcagcgccctggaggtgcccctggaccccaagctgctggaggacctggtgcagccccccaccatcacccagcagagccccaaggactacatcatcgacccccgggagaacatcgtcatccagtgtgaggccaagggcaagcccccacccagcttctcctggaccagaaatggcacccactttgatattgacaaggaccccctggtgaccatgaagccaggcaccggcaccctcatcatcaacatcatgtctgagggcaaggccgagacctatgaaggagtgtaccagtgcacagccagaaatgaaagaggagctgctgtgagcaacaacatcgtggtgcggcccagccgcagccccctgtggaccaaggagaagctggagcccatcaccctgcagagcggccagagcctggtgctgccctgcaggcctcccatcggcctgcccccacccatcatcttctggatggacaacagcttccagaggctgccccagagcgagcgggtgtcccagggcctgaatggagacctgtacttcagcaatgtgctgcctgaggacacccgggaggactacatctgctacgcccgcttcaaccacacccagaccatccagcagaagcagcccatctctgtgaaggtgatcagcgccaagagcagccgggagcggccccccaccttcctgaccccagagggcaatgccagcaacaaggaggagctgcggggaaatgtgctgagcctggagtgcatcgccgagggcctgcccacccccatcatctactgggccaaggaggatggcatgctgcccaagaacagaacagtgtacaagaactttgagaagaccctgcagatcatccacgtgtctgaggccgacagcggcaactaccagtgcatcgccaagaatgccctgggcgccatccaccacaccatctctgtgcgggtgaaggccgccccctactggatcacagccccccagaacctggtgctgagccctggagaagatggcaccctcatctgccgggccaacggcaaccccaagccccgcatctcctggctgaccaacggggtgcccatcgagatcgccccagatgaccccagcaggaagattgatggagacaccatcatcttcagcaatgtgcaggagaggagcagcgctgtgtaccagtgcaatgccagcaatgaatatggctacctgctggccaatgcctttgtgaatgtgctggccgagcccccacgcatcctgaccccagccaacaccctgtaccaggtgattgccaacagacctgccctgctggactgtgccttcttcggcagccccctgcccaccatcgagtggttcaagggggccaagggcagcgccctgcacgaggacatctacgtgctgcatgaaaatggcaccctggagatccctgtggcccagaaggacagcacaggcacctacacctgtgtggccaggaacaagctgggcatggccaagaatgaggtgcacctggagatcaaggaccccacctggatcgtgaagcagccagaatatgctgtggtgcagaggggctccatggtgtcctttgagtgcaaggtgaagcatgaccacaccctgagcctgactgtgctgtggctgaaggacaaccgggagctgcccagtgatgagcgcttcaccgtggacaaggaccacctggtggtggctgatgtgtctgatgatgacagcggcacctacacctgtgtggccaacaccaccctggacagcgtgtctgccagcgctgtgctgtctgtggtggcccccacccccaccccagcccctgtgtatgatgtgcccaaccccccatttgacctggagctgacagaccagctggacaagtctgtgcagctgtcctggaccccaggagatgacaacaacagccccatcaccaagttcatcattgaatatgaagatgccatgcacaagccaggcctgtggcaccaccagacagaggtgtctggcacccagaccacagcccagctgaagctgagcccctacgtgaactacagcttccgggtgatggctgtgaacagcatcggcaagagcctgcccagcgaggccagcgagcagtacctgaccaaggccagcgagccagacaagaaccccacagctgtggagggcctgggcagcgagccagacaacctggtgatcacctggaagcccctgaatggatttgagagcaatggacctggcctgcagtacaaggtgtcctggaggcagaaggatggagatgatgagtggacctctgtggtggtggccaacgtgtccaagtacatcgtgtctggcacccccacctttgtgccctacctgatcaaggtgcaggccctgaatgacatgggctttgcccctgagcctgctgtggtgatgggccacagcggggaggacctgcccatggtggcccctggaaatgtgcgggtgaatgtggtgaacagcaccctggccgaggtgcactgggaccctgtgcccctgaagagcatccggggccacctgcagggctaccgcatctactactggaagacccagagcagcagcaagaggaacagaagacacatcgagaagaagatcctgaccttccagggcagcaagacccacggcatgctgcccggcctggagcccttcagccactacaccctgaatgtgcgggtggtgaatggaaaaggagagggccctgccagcccagacagagtcttcaacaccccagagggcgtgcccagcgcccccagcagcctgaagatcgtgaaccccaccctggacagcctgaccctggagtgggacccccccagccaccccaacggcatcctgacagagtacaccctgaagtaccagcccatcaacagcacccatgagctgggccccctggtggacctgaagatcccagccaacaagacccgctggaccctgaagaacctgaacttcagcacccgctacaagttctacttctacgcccagaccagcgctggcagcggcagccagatcacagaggaggccgtgaccaccgtggatgaggccggcatcctgcccccagatgtgggcgccggcaaggccatggccagccggcaggtggacatcgccacccagggctggttcatcggcctgatgtgtgctgtggccctgctgatcctgatcctgctgattgtgtgcttcatcagaagaaacaagggcggcaagtaccctgtgaaggagaaggaggatgcccacgccgaccctgagatccagcccatgaaggaggatgatggcaccttcggggagtacagtgatgctgaggaccacaagcccctgaagaagggcagcaggacccccagcgacagaacagtgaagaaggaggacagtgatgacagcctggtggactatggagaaggagtgaatggccagttcaatgaagatggcagcttcatcggccagtacagcggcaagaaggagaaggagcctgctgagggcaatgaatcttctgaggcccccagccctgtgaatgccatgaacagctttgtgtag

SEQ ID NO: 74203 - DNA, 3579 bp, Artificial Sequence
  derived and/or modified sequence
atgcagctgaagatcatgcccaagaagaagcggctgagcgccggcagggtgcccctgattctatttctttgccaaatgatcagcgccctcgaagtcccactagaccccaagctgctggaggacctcgtacagccgccaactataacccagcaaagccccaaggactatatcattgatccccgcgaaaatatcgtgatccagtgtgaggccaagggtaagccgccgccctctttctcctggaccaggaatgggacccacttcgacattgacaaggatcctctagtcaccatgaaaccgggcacaggaacccttataattaacataatgtccgaaggaaaagccgaaacctatgaaggggtgtaccagtgtacagctcgtaacgaaaggggagccgctgtcagcaataacatagtcgtgcgcccttcacggagccctctgtggacaaaagagaagctggagcctattacccttcagtcggggcagtcactggtgctgccctgccgcccacccattggactgcctcctcccattatcttctggatggataactcttttcaacgactgccccagtctgagagggtaagtcaggggcttaatggcgacttgtatttctcaaatgttttaccagaagacacaagagaagattacatatgctatgccaggttcaatcacacccagactatacaacagaaacaacctatctccgtgaaggtgatcagtgctaagtcctcaagagaaagacctccaacatttctgactcctgaaggcaatgcatcaaataaggaggagctcagaggtaacgttctgtctctggagtgtattgctgagggcctgccgacacccatcatctattgggcgaaagaggacggaatgctgccaaaaaatcgtaccgtctacaagaatttcgagaagaccttacagatcattcacgtttccgaggccgactccggaaattaccagtgcatcgctaagaacgccctgggcgcaattcatcacactattagcgtgcgcgtaaaggctgcaccctattggatcactgccccacaaaacctggttttgtcccctggggaggacggtaccctcatctgcagggcaaacgggaatccaaaaccgaggatcagctggctcactaacggcgtccccattgagatcgctccggacgacccttcacggaagattgacggcgacactatcatctttagcaacgtgcaggagcggtcaagtgccgtgtaccaatgcaacgcttcaaacgagtacggatatctcctcgcaaatgcatttgtcaatgttttagcagagccccccagaatcttgacaccagctaacacattatatcaggtgattgccaacagaccggccctgctcgactgtgcgtttttcggctctcctctccccaccattgagtggtttaaaggagcaaaagggtctgcccttcacgaggatatctacgttttgcacgagaacggtaccctcgaaatacccgtagcgcagaaagattcaacgggaacctatacttgcgtagctaggaacaagttgggaatggctaaaaacgaagtgcacctggagatcaaggaccccacatggattgtgaagcagcccgaatatgccgtcgtccagcggggttccatggtgtccttcgagtgtaaagtcaagcatgatcacactctgtctctcaccgtcttgtggcttaaagacaatagggagcttccctcggacgaacgctttaccgtggacaaagaccacctggtggtcgctgatgttagcgacgatgattcgggaacgtacacctgcgtggcaaacacgacactggattctgtgtctgcaagcgctgtcctctcggtggttgctcccactcctacgccagcgccagtttatgacgtccctaatccaccgttcgaccttgaactgaccgaccagctcgataaatccgtccaattgtcttggactcccggggatgataacaatagtccaatcacgaaatttatcattgaatacgaagacgccatgcataagcctggcctctggcaccatcaaacagaagttagtggcacacagacgacggcccagctcaagctgtccccttatgtcaattatagtttcagagttatggccgttaattctattgggaagtctctgccttccgaggcctcagagcaatatctgaccaaggcctcggagccagacaaaaatccgaccgccgtggaaggtctcggcagtgaaccggacaatctggttattacttggaagcccctgaatgggttcgagagcaacgggccaggactgcaatacaaggtgagttggcgccagaaagacggggatgacgagtggaccagtgtggtggtggccaatgtctcgaagtatatcgtctcgggcacccccacctttgtgccctacctgatcaaggtacaagccctgaacgatatggggtttgcacctgaaccagccgttgtgatggggcacagcggcgaggatctgcctatggtggctcctgggaacgtgcgggtaaatgtcgtgaattcgacactagctgaggtgcactgggaccccgtgcctttaaagtccattaggggccatctgcaagggtaccggatctattattggaaaacccagtcctcttcaaagcgcaaccgccgacacatcgagaaaaagattctcaccttccagggcagtaaaacacacggcatgctacctggactcgagccattttcacactataccttgaacgtgcgggtcgtcaacggcaagggtgagggtccagcctcccctgaccgcgtgttcaacactcccgagggtgtaccgtctgcaccctcatctttgaagatcgtcaatccgacccttgactctttaacactagaatgggatcctccttcacaccctaacggcattctgactgagtacaccttgaagtaccagcctatcaacagtacccacgaactgggccccttggtggaccttaagattcccgccaacaagacaagatggacccttaaaaatctcaacttcagcactagatataaattctatttttacgctcagacctctgcagggtctggctcgcaaatcaccgaagaagcagtgacgaccgtcgacgaggctggcatcttacccccagacgttggcgcagggaaggcaatggcttccagacaagtggatatcgcgactcaagggtggttcatcggcctgatgtgtgctgtggcactgctcatcctgattttgctgatcgtgtgttttattaggagaaacaaaggcggtaagtatcctgtaaaggaaaaggaggatgctcacgcagaccccgagattcagcccatgaaagaggacgacggaactttcggcgaatattctgacgccgaggaccataaaccacttaagaaaggaagtaggacgcctagcgaccgaaccgtcaaaaaagaggacagtgacgattctctggtggactacggggagggtgtaaacggacagtttaatgaggatggttcttttatcggtcagtattcgggcaaaaaagagaaggagcctgccgagggaaatgaaagcagcgaagctccctcccccgtcaacgcgatgaacagcttcgtgtag

SEQ ID NO: 74204 - DNA, 5782 bp, Artificial Sequence
  derived and/or modified sequence
cgtcgagaacggaggacaccggcggtccagggtcctgggcagtcgcgccagagctgagcggagggcgcggcgcgagaacgaatctttgtgacattctctctcagcattctttatcccctgtttgctgaagacttcgacaaaagctggtcttagctgttggcattctcctgagaaaaggatagcttcagaaatcagaaaaacatttgggaggtgtctagcccagtggaccttctgaagagcaatgctaagaagacgtttggtttaaagaattaaaaggaagaacaacttaagagcttcttcaaagtttcccgcatgaaaattacttaaacgttgcacacaacgtttcacaaaatcttttgtgaaagaagaaaaggaaattcagtgtgtgagtctcagcaggagttaagctaatgcagcttaaaataatgccgaaaaagaagcgcttatctgcgggcagagtgcccctgattctcttcctgtgccagatgattagtgcactggaagtacctcttgatccaaaacttcttgaagacttggtacagcctccaaccatcacccaacagtctccaaaagattacattattgaccctcgggagaatattgtaatccagtgtgaagccaaagggaaaccgcccccaagcttttcctggacccgtaatgggactcattttgacatcgataaagaccctctggtcaccatgaagcctggcacaggaacgctcataattaacatcatgagcgaagggaaagctgagacctatgaaggagtctatcagtgtacagcaaggaacgaacgcggagctgcagtttctaataacattgttgtccgcccatccagatcaccattgtggaccaaagaaaaacttgaaccaatcacacttcaaagtggtcagtctttagtacttccctgcagacccccaattggattaccaccacctataatattttggatggataattcctttcaaagacttccacaaagtgagagagtttctcaaggtttgaatggggacctttatttttccaatgtcctcccagaggacacccgcgaagactatatctgttatgctagatttaatcatactcaaaccatacagcagaagcaacctatttctgtgaaggtgatttcagctaaatcaagtagagagaggccaccaacatttttaactccagaaggcaatgcaagtaacaaagaggaattaagaggaaatgtgctttcactggagtgcattgcagaaggactgcctaccccaattatttactgggcaaaggaagatggaatgctacccaaaaacaggacagtttataagaactttgagaaaaccttgcagatcattcatgtttcagaagcagactctggaaattaccaatgtatagcaaaaaacgcattaggagccatccaccataccatttctgttagagttaaagcggctccatactggatcacagcccctcaaaatcttgtgctgtccccaggagaggatgggaccttgatctgcagagctaatggcaaccccaaacccagaattagctggttaacaaatggagtcccaatagaaattgcccctgatgaccccagcagaaaaatagatggcgataccattattttttcaaatgttcaagaaagatcaagtgcagtctatcagtgcaatgcctctaatgaatatggatatttactggcaaacgcatttgtaaatgtgctggctgagccaccacgaatcctcacacctgcaaacacactctaccaggtcattgcaaacaggcctgctttactagactgtgccttctttgggtctcctctcccaaccatcgagtggtttaaaggagctaaaggaagtgctcttcatgaagatatttatgttttacatgaaaatggaactttggaaattcctgtggcccaaaaggacagtacaggaacttatacgtgtgttgcaaggaataaattagggatggcgaagaatgaagttcacttagaaatcaaagatcctacatggatcgttaaacagcccgaatatgcagttgtgcaaagagggagcatggtgtcctttgaatgcaaagtgaaacatgatcacaccttatccctcactgtcctgtggctgaaggacaacagggaactgcccagtgatgaaaggttcactgttgacaaggatcatctagtggtagctgatgtcagtgacgatgacagcgggacctacacgtgtgtggccaacaccactctggacagcgtctccgccagcgctgtgcttagcgttgttgctcctactccaactccagctcccgtttacgatgtcccaaatcctccctttgacttagaactgacagatcaacttgacaaaagtgttcagctgtcatggaccccaggcgatgacaacaatagccccattacaaaattcatcatcgaatatgaagatgcaatgcacaagccagggctgtggcaccaccaaactgaagtttctggaacacagaccacagcccagctgaagctgtctccttacgtgaactactccttccgcgtgatggcagtgaacagcattgggaagagcttgcccagcgaggcgtctgagcagtatttgacgaaagcctcagaaccagataaaaaccccacagctgtggaaggactgggatcagagcctgataatttggtgattacgtggaagcccttgaatggtttcgaatctaatgggccaggccttcagtacaaagttagctggcgccagaaagatggtgatgatgaatggacatctgtggttgtggcaaatgtatccaaatatattgtctcaggcacgccaacctttgttccatacctgatcaaagttcaggccctgaatgacatggggtttgcccccgagccagctgtagtcatgggacattctggagaagacctcccaatggtggctcctgggaacgtgcgtgtgaatgtggtgaacagtaccttagccgaggtgcactgggacccagtacctctgaaaagcatccgaggacacctacaaggctatcggatttactattggaagacccagagttcatctaaaagaaacagacgtcacattgagaaaaagatcctcaccttccaaggcagcaagactcatggcatgttgccggggctagagccctttagccactacacactgaatgtccgagtggtcaatgggaaaggggagggcccagccagccctgacagagtctttaatactccagaaggagtccccagtgctccctcgtctttgaagattgtgaatccaacactggactctctcactttggaatgggatccaccgagccacccgaatggcattttgacagagtacaccttaaagtatcagccaattaacagcacacatgaattaggccctctggtagatttgaaaattcctgccaacaagacacggtggactttaaaaaatttaaatttcagcactcgatataagttttatttctatgcacaaacatcagcaggatcaggaagtcaaattacagaggaagcagtaacaactgtggatgaagctggtattcttccacctgatgtaggtgcaggcaaagcgatggcaagccggcaggtggatattgcaactcagggctggttcattggtctgatgtgtgctgttgctctccttatcttaattttgctgattgtttgcttcatcagaagaaacaagggtggtaaatatccagttaaagaaaaggaagatgcccatgctgaccctgaaatccagcctatgaaggaagatgatgggacatttggagaatacagtgatgcagaagaccacaagcctttgaaaaaaggaagtcgaactccttcagacaggactgtgaaaaaagaagatagtgacgacagcctagttgactatggagaaggggttaatggccagttcaatgaggatggctcctttattggacaatacagtggtaagaaagagaaagagccggctgaaggaaacgaaagctcagaggcaccttctcctgtcaacgccatgaattcctttgtttaatttttaagctctttgccaatattccatttctctagaatgtttatcctaagcacttgtttgtcagccctctcatactatgaacatatgggtagagagtatattttctgctgtatgttagtattatgagaatagttacagcaaaaacataactcagtcaaatgatatgttaatatgaactggaatgcaaagtgcatactttttcattcaaaatgggtattcttgatttcctcagaactgataaaaaataatgcaacatcaccaacagatcctgttatttcctctgcaggatacagttcaatatgatgcatgaaaaatgctccacatttaaaggacatacccgtgtatgttatgaaaacatggtttgatactttgtttatactaccctcagctgaacccctatatatgaattccgttttcattgtcaagaatgttactgtagtattctctagaacttcaatgtctttgtggacattgttgtgaaattggtgactatgtatagctgtcgttagtctttttgggagactgttaggaacagtttgtacagtatatacttgctaaatgagttcattatgacagtcacattgctgatgcttactgagaactattacctactcttggctcctgttactccgtaggcttcttaatcttccaggcattacagcagcacagtgttctactttttacatcatttctatgttcggttgtttttaggcataaacaatgtgtattgcagtgcatttcggcatttgtgccatactgaaagaatcaaaaacaaatcatccaaattaaatttcaaacattatttcagagaacacagggcaagacacatacagtgccttcagatattaagcattccacaacatcgtgcattctgtatcagctggtccagtccattctgggtcctagattactgtcattgtctaaaagtaacttttaaaaagcagagttcatgaaaactgcaatgctgggaaaagaaggaaacatgaaaataaaaataagacagtttattagaaatagcatttcctcataagcataaaaagaaaatctttgttgccaactgaagcacatgatgattttgtggtcctttatggtttctattacattcagtaagaaagatgtcaacatgctagaaaattaattttaaaactaagttattccaacactaaaagcatacaacagcatgccaacagtaatatattattctccaagactttacctatgtaagtgttcaaaactctgcagcattaaacaacgtgtatgcaaattgttatggatacatttcagaatctaagaaatcaggcaagtgcttaaaaggccaacggtccaagggattacatctgcagtttaaaaagtaaatatatattctatcgtattcataaacaatatctatcaaatgggttacctccaaatatgaaaatctataacaacctatggttgaaggaatgctcagtttcatttgccaataaattggtttctcataacttgcatcaagtttaattttaagtaaagctttttatatgtagatattttgttgaatttgtaaatacacttaaaatgtagatgctatatgcttataggtgttacatacaaataaacatgcaatgtttatgttgtactgtataagaggtaagctaattaatgcagtgaatgggattggaaagcatctacttaaatatctattgggttcccccctccccccaccttttttgctgtgaaactgaaatagtgaacttttctacgtattgacagcagatttttcgatgaaatcttcagagctttgcctatggggcaca

SEQ ID NO: 74205 - DNA, 3579 bp, Artificial Sequence
  derived and/or modified sequence
atgcagcttaaaatcatgcccaaaaagaaacgcctctccgccggacgcgttccactgatactctttctgtgtcagatgatcagcgccttggaggtgcctctggacccgaaactgttggaagacctagtccaacctccaacaatcacacagcagtccccaaaggattatattatcgacccgagggagaacatcgtgatccaatgcgaggccaaagggaaaccacctccatccttttcctggacccggaacggaacacattttgatattgataaagatcctctggtgaccatgaagcccggaactgggactctcatcatcaatattatgtccgaagggaaagccgaaacatacgaaggtgtgtatcagtgtactgcaagaaatgaacggggagctgctgtgtctaataacattgtagtacggccatctcgttccccgctgtggacaaaagagaagctggaacccattaccctccaaagtggccagtccctggtgttgccctgtcggccacccatcggtctgcctccccctatcattttttggatggataactcttttcaaaggttgccccagtccgaacgggtctctcaaggattgaacggcgatctgtacttttccaatgtgctgcccgaagacacacgtgaggactatatttgttatgctcgcttcaaccatacgcagaccattcagcaaaagcaacctatcagcgttaaagtaatttcagcaaagtccagtagagaacgaccaccaacttttcttacacccgagggcaatgctagcaacaaggaagagctgcggggaaacgttctatcactggaatgtatcgctgagggtctccctactcctatcatctactgggccaaggaggacggtatgttgcctaaaaatcgtacagtatacaagaattttgagaagacattacagattattcatgtgtctgaggccgattcagggaattaccagtgtattgccaagaacgcgcttggagccatccaccatacaatttccgtgagagtgaaggccgctccctactggatcactgcgcctcagaatctggtactgagccccggtgaggacggaacactgatttgccgcgcaaatgggaaccctaaacctcgaatctcctggctgacaaacggcgtccctatagaaattgcccctgacgacccttcacgcaagatcgacggggacactatcatcttttccaacgtccaggagaggtctagcgctgtgtaccagtgtaacgcatctaatgaatatggctacttgctggccaacgcttttgtaaatgttctcgccgagcccccacggattctgacgccggctaacactttataccaggtcattgcaaaccgcccagccttgctcgactgcgccttctttgggtccccactgcctacaattgaatggtttaagggcgcaaagggcagcgcactacacgaagacatatacgtgctgcacgaaaacggtacattggagattcctgtcgctcagaaagattctactgggacctacacctgtgttgcaaggaataagctgggcatggcaaagaacgaagtgcacctggaaatcaaagacccaacttggatcgtgaagcagccagaatacgcagtcgtgcaaaggggcagcatggtcagcttcgaatgcaaggttaagcatgatcacactctcagtcttaccgtgctgtggttgaaagacaaccgcgagctgccctccgatgaaaggttcactgtcgataaagatcaccttgtggtcgccgacgtctcagacgacgactcaggcacatatacatgtgtagctaatacgaccctggacagtgtgagtgcatctgcagtactgtctgtagtggctcctacacccacccctgccccagtgtatgatgtacccaacccccctttcgatctcgaacttaccgaccaactggacaaatctgtccagctcagctggacccccggagacgacaataattctccaatcacgaagtttatcattgaatatgaggacgcgatgcataagccaggactgtggcatcaccaaacagaggtctcaggaactcagactaccgcgcagctaaagttatcgccttacgtgaattacagcttcagagtgatggccgtcaattcaattggcaagtcgctgccttccgaagcctctgagcagtacctgactaaggcctccgagccagacaaaaacccaacagctgtggagggcctaggtagcgaaccagacaatttggttattacctggaagccactcaacggctttgagtccaacggacccggtctccaatacaaggtgtcttggagacaaaaggacggcgacgacgagtggacaagtgtggtggtcgctaatgtttctaaatacatagttagcggtacacccacatttgtgccttaccttattaaagtgcaggcattaaatgacatgggcttcgcgccagaacccgctgtggtaatgggccacagcggcgaggatctgccaatggtggcacccggtaatgtgcgcgttaacgtggtgaatagcacactcgctgaagtccattgggaccctgtcccactcaaaagcatccgcggacacctgcaggggtatagaatctattactggaaaacccagtctagtagcaaaagaaatagacgccatatcgagaaaaagatccttactttccaggggagtaaaactcacggaatgctccccggtcttgagccttttagtcactatacactgaatgtgcgggtggtgaatggtaagggcgaaggcccagcctctccggacagggtttttaatactcctgaaggggtgccttccgccccatcctctctaaaaattgtgaatcccacgttagattcactgaccctcgagtgggaccccccttctcacccaaatggaattctgaccgagtacactctgaagtatcaacccatcaactctactcatgaactggggcctctagtggacctgaagatccccgctaataaaacacgttggacactcaagaacctgaacttctcaactcgatacaagttctacttttacgcccagacgagcgcaggctccggcagtcagattactgaggaggccgtgaccactgtggatgaggccggtatactgcctcctgacgtcggggctgggaaggccatggccagccggcaggtcgacatcgcaacacaaggctggtttattgggcttatgtgcgccgtagccctgttaattctcatcttattgatagtttgtttcatcagacgaaacaaaggtggtaagtatccagttaaggaaaaagaagacgctcatgcggacccagagattcagccaatgaaagaagacgatggtacttttggagagtactccgacgcggaagaccacaagcccctgaagaagggatcgaggacaccatcagatcgtaccgtgaagaaagaagacagtgatgactctctggtggattatggtgagggcgttaacgggcagttcaacgaagatggttctttcatcgggcagtattctggtaaaaaggaaaaggagcccgctgaaggaaatgagtcaagcgaggctcccagcccagtgaatgccatgaactcctttgtttag

SEQ ID NO: 74206 - DNA, 3579 bp, Artificial Sequence
  derived and/or modified sequence
atgcagctgaagatcatgcccaagaagaagagactgagcgccggcagagtgcccctgatcctgttcctgtgccagatgatcagcgccctggaggtgcccctggaccccaagctgctggaggacctggtgcagccccccaccatcacccagcagagccccaaggactacatcatcgaccccagagagaacatcgtgatccagtgcgaggccaagggcaagcccccccccagcttcagctggaccagaaacggcacccacttcgacatcgacaaggaccccctggtgaccatgaagcccggcaccggcaccctgatcatcaacatcatgagcgagggcaaggccgagacctacgagggcgtgtaccagtgcaccgccagaaacgagagaggcgccgccgtgagcaacaacatcgtggtgagacccagcagaagccccctgtggaccaaggagaagctggagcccatcaccctgcagagcggccagagcctggtgctgccctgcagaccccccatcggcctgcccccccccatcatcttctggatggacaacagcttccagagactgccccagagcgagagagtgagccagggcctgaacggcgacctgtacttcagcaacgtgctgcccgaggacaccagagaggactacatctgctacgccagattcaaccacacccagaccatccagcagaagcagcccatcagcgtgaaggtgatcagcgccaagagcagcagagagagaccccccaccttcctgacccccgagggcaacgccagcaacaaggaggagctgagaggcaacgtgctgagcctggagtgcatcgccgagggcctgcccacccccatcatctactgggccaaggaggacggcatgctgcccaagaacagaaccgtgtacaagaacttcgagaagaccctgcagatcatccacgtgagcgaggccgacagcggcaactaccagtgcatcgccaagaacgccctgggcgccatccaccacaccatcagcgtgagagtgaaggccgccccctactggatcaccgccccccagaacctggtgctgagccccggcgaggacggcaccctgatctgcagagccaacggcaaccccaagcccagaatcagctggctgaccaacggcgtgcccatcgagatcgcccccgacgaccccagcagaaagatcgacggcgacaccatcatcttcagcaacgtgcaggagagaagcagcgccgtgtaccagtgcaacgccagcaacgagtacggctacctgctggccaacgccttcgtgaacgtgctggccgagccccccagaatcctgacccccgccaacaccctgtaccaggtgatcgccaacagacccgccctgctggactgcgccttcttcggcagccccctgcccaccatcgagtggttcaagggcgccaagggcagcgccctgcacgaggacatctacgtgctgcacgagaacggcaccctggagatccccgtggcccagaaggacagcaccggcacctacacctgcgtggccagaaacaagctgggcatggccaagaacgaggtgcacctggagatcaaggaccccacctggatcgtgaagcagcccgagtacgccgtggtgcagagaggcagcatggtgagcttcgagtgcaaggtgaagcacgaccacaccctgagcctgaccgtgctgtggctgaaggacaacagagagctgcccagcgacgagagattcaccgtggacaaggaccacctggtggtggccgacgtgagcgacgacgacagcggcacctacacctgcgtggccaacaccaccctggacagcgtgagcgccagcgccgtgctgagcgtggtggcccccacccccacccccgcccccgtgtacgacgtgcccaacccccccttcgacctggagctgaccgaccagctggacaagagcgtgcagctgagctggacccccggcgacgacaacaacagccccatcaccaagttcatcatcgagtacgaggacgccatgcacaagcccggcctgtggcaccaccagaccgaggtgagcggcacccagaccaccgcccagctgaagctgagcccctacgtgaactacagcttcagagtgatggccgtgaacagcatcggcaagagcctgcccagcgaggccagcgagcagtacctgaccaaggccagcgagcccgacaagaaccccaccgccgtggagggcctgggcagcgagcccgacaacctggtgatcacctggaagcccctgaacggcttcgagagcaacggccccggcctgcagtacaaggtgagctggagacagaaggacggcgacgacgagtggaccagcgtggtggtggccaacgtgagcaagtacatcgtgagcggcacccccaccttcgtgccctacctgatcaaggtgcaggccctgaacgacatgggcttcgcccccgagcccgccgtggtgatgggccacagcggcgaggacctgcccatggtggcccccggcaacgtgagagtgaacgtggtgaacagcaccctggccgaggtgcactgggaccccgtgcccctgaagagcatcagaggccacctgcagggctacagaatctactactggaagacccagagcagcagcaagagaaacagaagacacatcgagaagaagatcctgaccttccagggcagcaagacccacggcatgctgcccggcctggagcccttcagccactacaccctgaacgtgagagtggtgaacggcaagggcgagggccccgccagccccgacagagtgttcaacacccccgagggcgtgcccagcgcccccagcagcctgaagatcgtgaaccccaccctggacagcctgaccctggagtgggacccccccagccaccccaacggcatcctgaccgagtacaccctgaagtaccagcccatcaacagcacccacgagctgggccccctggtggacctgaagatccccgccaacaagaccagatggaccctgaagaacctgaacttcagcaccagatacaagttctacttctacgcccagaccagcgccggcagcggcagccagatcaccgaggaggccgtgaccaccgtggacgaggccggcatcctgccccccgacgtgggcgccggcaaggccatggccagcagacaggtggacatcgccacccagggctggttcatcggcctgatgtgcgccgtggccctgctgatcctgatcctgctgatcgtgtgcttcatcagaagaaacaagggcggcaagtaccccgtgaaggagaaggaggacgcccacgccgaccccgagatccagcccatgaaggaggacgacggcaccttcggcgagtacagcgacgccgaggaccacaagcccctgaagaagggcagcagaacccccagcgacagaaccgtgaagaaggaggacagcgacgacagcctggtggactacggcgagggcgtgaacggccagttcaacgaggacggcagcttcatcggccagtacagcggcaagaaggagaaggagcccgccgagggcaacgagagcagcgaggcccccagccccgtgaacgccatgaacagcttcgtgtag

SEQ ID NO: 74207 - protein, 1180 aa, Artificial Sequence
  derived and/or modified sequence
MQLKIMPKKKRLSAGRVPLILFLCQMISALEVPLDQKSTEVMVQPPTITQQSPKDYIIDPRENIVIQCEAKGKPPPSFSWTRNGTHFDIDKDPLVTMKPGTGTLIINIMSEGKAETYEGVYQCTARNERGAAVSNNIVVRPSRSPLWTKEKLEPITLQSGQSLVLPCRPPIGLPPPIIFWMDNSFQRLPQSERVSQGLNGDLYFSNVLPEDTREDYICYARFNHTQTIQQKQPISVKVISAKSSRERPPTFLTPEGNASNKEELRGNVLSLECIAEGLPTPIIYWAKEDGMLPKNRTVYKNFEKTLQIIHVSEADSGNYQCIAKNALGAIHHTISVRVKAAPYWITAPQNLVLSPGEDGTLICRANGNPKPRISWLTNGVPIEIAPDDPSRKIDGDTIIFSNVQERSSAVYQCNASNEYGYLLANAFVNVLAEPPRILTPANTLYQVIANRPALLDCAFFGSPLPTIEWFKGAKGSALHEDIYVLHENGTLEIPVAQKDSTGTYTCVARNKLGMAKNEVHLEIKDPTWIVKQPEYAVVQRGSMVSFECKVKHDHTLSLTVLWLKDNRELPSDERFTVDKDHLVVADVSDDDSGTYTCVANTTLDSVSASAVLSVVAPTPTPAPVYDVPNPPFDLELTDQLDKSVQLSWTPGDDNNSPITKFIIEYEDAMHKPGLWHHQTEVSGTQTTAQLKLSPYVNYSFRVMAVNSIGKSLPSEASEQYLTKASEPDKNPTAVEGLGSEPDNLVITWKPLNGFESNGPGLQYKVSWRQKDGDDEWTSVVVANVSKYIVSGTPTFVPYLIKVQALNDMGFAPEPAVVMGHSGEDLPMVAPGNVRVNVVNSTLAEVHWDPVPLKSIRGHLQGYRIYYWKTQSSSKRNRRHIEKKILTFQGSKTHGMLPGLEPFSHYTLNVRVVNGKGEGPASPDRVFNTPEGVPSAPSSLKIVNPTLDSLTLEWDPPSHPNGILTEYTLKYQPINSTHELGPLVDLKIPANKTRWTLKNLNFSTRYKFYFYAQTSAGSGSQITEEAVTTVDEAMASRQVDIATQGWFIGLMCAVALLILILLIVCFIRRNKGGKYPVKEKEDAHADPEIQPMKEDDGTFGEYSDAEDHKPLKKGSRTPSDRTVKKEDSDDSLVDYGEGVNGQFNEDGSFIGQYSGKKEKEPAEGNESSEAPSPVNAMNSFV

SEQ ID NO: 74208 - protein, 148 aa, Artificial Sequence
  derived and/or modified sequence
MASRQVDIATQGWFIGLMCAVALLILILLIVCFIRRNKGGKYPVKEKEDAHADPEIQPMKEDDGTFGEYSDAEDHKPLKKGSRTPSDRTVKKEDSDDSLVDYGEGVNGQFNEDGSFIGQYSGKKEKEPAEGNESSEAPSPVNAMNSFV

SEQ ID NO: 74209 - DNA, 3543 bp, Artificial Sequence
  derived and/or modified sequence
atgcagctcaagattatgccaaagaagaaaaggctgagcgctggccgggtgccactgattttgttcctatgccagatgatttctgccctggaagtcccattggaccagaagagcacagaagttatggtgcagcctccaactatcacccaacaatctcccaaagactacattattgatcctcgcgagaatatcgttatacagtgcgaggccaagggcaagccacccccgagcttcagctggacccgaaacggtacccatttcgatatcgataaggatccactggtgaccatgaagcctggaactggaaccctgatcatcaacatcatgtcggaagggaaagccgaaacttatgaaggcgtgtatcagtgtacagcccgcaatgagcggggtgctgccgtatcgaacaacatcgtggtccgaccgagccggtcacctctgtggactaaggagaaattggagcccataaccctgcagtctggacagtccctagtgctgccatgcagaccgcccatcggactgccaccacccatcatcttttggatggacaactcttttcagagactgccacaaagtgaaagggtgagccaaggactgaatggagacttgtacttctccaatgttctccccgaggacacacgggaggactatatctgttacgcacggttcaatcacactcagaccatccagcaaaagcaacctatctccgtaaaagtcatctctgccaagagctcccgagaaagacctcccacctttctcacacctgagggaaatgccagtaataaggaagagctccgcggaaatgtgctgagtctcgaatgcatcgccgaagggctgccaacccccatcatatactgggctaaggaagacgggatgttgccaaagaatcgcaccgtttataagaacttcgaaaagaccctgcagattattcatgtcagtgaggctgatagcgggaattaccagtgtattgctaagaacgcactcggagcaattcatcacaccatttccgtccgcgtcaaagcggcaccatattggatcaccgccccacagaatctggtgctgagcccgggcgaagacggaactctgatatgtcgagccaatggaaatcccaagccccggattagctggctgactaatggggtcccaattgaaatcgcccctgatgacccctcccgaaagattgatggtgatacaataatattttcaaacgttcaagaaaggagtagtgccgtctaccaatgtaacgcctctaatgagtatggatatctgctggctaatgcatttgtaaatgttctggccgaacctcctcggatcctcacgcctgccaacacactataccaggtgattgcgaataggcccgcactgctggattgtgccttcttcggatccccactgcctacaatcgagtggtttaagggggccaaggggtctgcgctgcatgaggatatctatgtcctgcacgaaaatggcactttagagataccagtcgcgcagaaggactccacaggtacatatacttgcgtagccaggaataagttaggaatggcaaaaaatgaagtgcacttggaaattaaagaccctacttggatcgtcaaacagcccgagtatgccgtggttcaaaggggaagcatggtgagtttcgaatgcaaggttaagcacgatcatacattgagcctgaccgtcctgtggcttaaagataaccgggaactgccttccgatgaacgatttacagtggataaggaccatctggtcgtcgcagatgtgtccgatgacgactccggaacatacacatgcgtggctaatacaaccctggatagcgttagcgcttctgcggtactcagcgtcgtagcacctactcccacacctgccccagtgtacgacgtgcctaaccccccctttgatttggaactgactgatcagcttgataaatcagtacagctgagctggactcccggcgacgataataattcccccataactaagttcataattgagtacgaagacgccatgcacaagcccggcctttggcaccaccagaccgaggtgagtggaacacagactactgctcaactgaagctgtctccttatgtcaactactcttttcgcgtaatggcagtcaatagcatcgggaagtcgctcccctccgaggcctccgagcaatatctaacgaaggcctctgaacccgataaaaacccaacagccgtggagggcctgggcagcgagcctgataatctggtcatcacctggaagcccctgaatggcttcgagtccaatggccctgggctgcagtacaaggtctcatggcggcagaaggatggagacgacgagtggacatctgttgtggtcgctaacgtatcgaagtacatcgttagtggcaccccgacattcgtcccctaccttatcaaggtgcaggcacttaacgatatggggtttgcgccagaacccgctgttgtgatggggcatagcggcgaggacctgccaatggttgcccctggcaatgtccgggtaaatgttgtgaacagcaccttggcggaagtgcattgggacccagtcccactaaagagcatccgcggccacttgcagggttaccggatctattattggaaaacgcagtctagtagtaagagaaatcgcaggcacatcgagaagaaaattctgaccttccaggggagcaagacccacggaatgttacctggattagagcccttcagccactacaccttaaatgtgcgggtcgtcaacggtaagggggaagggcctgcgtctcctgacagagtgtttaacactccagagggcgttccatcagccccaagctcgttaaagatcgttaaccccacacttgactctctgaccttagaatgggatccaccttcccacccaaacggaattctgactgagtatactctgaaataccagccaataaacagtacgcatgagctgggtccactggtggatttgaagattcctgcaaataagacacggtggacattaaaaaacttgaattttagcactcggtacaagttctatttctatgcacagacctccgcaggctctggtagtcagatcacagaggaggccgtcaccactgttgacgaagcaatggcatctcgccaggtggatatcgctacacaagggtggttcatcgggctgatgtgtgctgtggcactattaattttgatcctgctcatcgtgtgcttcatcagaaggaacaagggggggaagtacccggttaaggaaaaggaagacgctcatgcagatcccgaaattcagccaatgaaagaagacgatggaacgttcggagaatattctgatgccgaggaccacaaacccctcaagaaaggttctagaacccccagcgataggacggttaagaaagaggacagcgatgatagccttgtcgactatggagagggcgtgaacggtcagttcaatgaggatggttcctttatcggtcagtactccggcaaaaaggagaaggagcccgccgaggggaatgaatcatccgaggctccttctccagtgaatgcaatgaattctttcgtctag

SEQ ID NO: 74210 - DNA, 447 bp, Artificial Sequence
  derived and/or modified sequence
atggcatcacggcaggtcgacatcgccacccagggctggttcatcgggctcatgtgcgcagtggcccttcttattcttatcctcctcatcgtgtgtttcatcaggagaaacaaaggcgggaagtacccggtaaaggagaaggaagatgctcacgccgatcccgagatacagcctatgaaggaggacgacgggacttttggtgagtacagcgatgcagaggaccacaaacctttgaagaaaggcagccggaccccctcagaccgaacagtcaagaaggaggacagcgacgatagcttagtggactacggagaaggggtaaatggacagtttaacgaagatggtagtttcatcggccagtattctggcaaaaaagaaaaggagccagccgagggtaacgagtcttcagaggctcctagcccggttaacgccatgaattcctttgtatag

SEQ ID NO: 74211 - DNA, 3543 bp, Artificial Sequence
  derived and/or modified sequence
atgcagctgaagatcatgcccaagaagaagaggctgtctgctggccgggtgcccctcatcctcttcctgtgccagatgatcagcgccctggaggtgcccctggaccagaagagcacagaggtgatggtgcagccccccaccatcacccagcagagccccaaggactacatcatcgacccccgggagaacatcgtcatccagtgtgaggccaagggcaagcccccacccagcttctcctggaccagaaatggcacccactttgatattgacaaggaccccctggtgaccatgaagccaggcaccggcaccctcatcatcaacatcatgtctgagggcaaggccgagacctatgaaggagtgtaccagtgcacagccagaaatgaaagaggagctgctgtgagcaacaacatcgtggtgcggcccagccgcagccccctgtggaccaaggagaagctggagcccatcaccctgcagagcggccagagcctggtgctgccctgcaggcctcccatcggcctgcccccacccatcatcttctggatggacaacagcttccagaggctgccccagagcgagcgggtgtcccagggcctgaatggagacctgtacttcagcaatgtgctgcctgaggacacccgggaggactacatctgctacgcccgcttcaaccacacccagaccatccagcagaagcagcccatctctgtgaaggtgatcagcgccaagagcagccgggagcggccccccaccttcctgaccccagagggcaatgccagcaacaaggaggagctgcggggaaatgtgctgagcctggagtgcatcgccgagggcctgcccacccccatcatctactgggccaaggaggatggcatgctgcccaagaacagaacagtgtacaagaactttgagaagaccctgcagatcatccacgtgtctgaggccgacagcggcaactaccagtgcatcgccaagaatgccctgggcgccatccaccacaccatctctgtgcgggtgaaggccgccccctactggatcacagccccccagaacctggtgctgagccctggagaagatggcaccctcatctgccgggccaacggcaaccccaagccccgcatctcctggctgaccaacggggtgcccatcgagatcgccccagatgaccccagcaggaagattgatggagacaccatcatcttcagcaatgtgcaggagaggagcagcgctgtgtaccagtgcaatgccagcaatgaatatggctacctgctggccaatgcctttgtgaatgtgctggccgagcccccacgcatcctgaccccagccaacaccctgtaccaggtgattgccaacagacctgccctgctggactgtgccttcttcggcagccccctgcccaccatcgagtggttcaagggggccaagggcagcgccctgcacgaggacatctacgtgctgcatgaaaatggcaccctggagatccctgtggcccagaaggacagcacaggcacctacacctgtgtggccaggaacaagctgggcatggccaagaatgaggtgcacctggagatcaaggaccccacctggatcgtgaagcagccagaatatgctgtggtgcagaggggctccatggtgtcctttgagtgcaaggtgaagcatgaccacaccctgagcctgactgtgctgtggctgaaggacaaccgggagctgcccagtgatgagcgcttcaccgtggacaaggaccacctggtggtggctgatgtgtctgatgatgacagcggcacctacacctgtgtggccaacaccaccctggacagcgtgtctgccagcgctgtgctgtctgtggtggcccccacccccaccccagcccctgtgtatgatgtgcccaaccccccatttgacctggagctgacagaccagctggacaagtctgtgcagctgtcctggaccccaggagatgacaacaacagccccatcaccaagttcatcattgaatatgaagatgccatgcacaagccaggcctgtggcaccaccagacagaggtgtctggcacccagaccacagcccagctgaagctgagcccctacgtgaactacagcttccgggtgatggctgtgaacagcatcggcaagagcctgcccagcgaggccagcgagcagtacctgaccaaggccagcgagccagacaagaaccccacagctgtggagggcctgggcagcgagccagacaacctggtgatcacctggaagcccctgaatggatttgagagcaatggacctggcctgcagtacaaggtgtcctggaggcagaaggatggagatgatgagtggacctctgtggtggtggccaacgtgtccaagtacatcgtgtctggcacccccacctttgtgccctacctgatcaaggtgcaggccctgaatgacatgggctttgcccctgagcctgctgtggtgatgggccacagcggggaggacctgcccatggtggcccctggaaatgtgcgggtgaatgtggtgaacagcaccctggccgaggtgcactgggaccctgtgcccctgaagagcatccggggccacctgcagggctaccgcatctactactggaagacccagagcagcagcaagaggaacagaagacacatcgagaagaagatcctgaccttccagggcagcaagacccacggcatgctgcccggcctggagcccttcagccactacaccctgaatgtgcgggtggtgaatggaaaaggagagggccctgccagcccagacagagtcttcaacaccccagagggcgtgcccagcgcccccagcagcctgaagatcgtgaaccccaccctggacagcctgaccctggagtgggacccccccagccaccccaacggcatcctgacagagtacaccctgaagtaccagcccatcaacagcacccatgagctgggccccctggtggacctgaagatcccagccaacaagacccgctggaccctgaagaacctgaacttcagcacccgctacaagttctacttctacgcccagaccagcgctggcagcggcagccagatcacagaggaggccgtgaccaccgtggatgaggccatggccagccggcaggtggacatcgccacccagggctggttcatcggcctgatgtgtgctgtggccctgctgatcctgatcctgctgattgtgtgcttcatcagaagaaacaagggcggcaagtaccctgtgaaggagaaggaggatgcccacgccgaccctgagatccagcccatgaaggaggatgatggcaccttcggggagtacagtgatgctgaggaccacaagcccctgaagaagggcagcaggacccccagcgacagaacagtgaagaaggaggacagtgatgacagcctggtggactatggagaaggagtgaatggccagttcaatgaagatggcagcttcatcggccagtacagcggcaagaaggagaaggagcctgctgagggcaatgaatcttctgaggcccccagccctgtgaatgccatgaacagctttgtgtag

SEQ ID NO: 74212 - DNA, 447 bp, Artificial Sequence
  derived and/or modified sequence
atggccagccggcaggtggacatcgccacccagggctggttcatcggcctgatgtgtgctgtggccctgctgatcctgatcctgctgattgtgtgcttcatcagaagaaacaagggcggcaagtaccctgtgaaggagaaggaggatgcccacgccgaccctgagatccagcccatgaaggaggatgatggcaccttcggggagtacagtgatgctgaggaccacaagcccctgaagaagggcagcaggacccccagcgacagaacagtgaagaaggaggacagtgatgacagcctggtggactatggagaaggagtgaatggccagttcaatgaagatggcagcttcatcggccagtacagcggcaagaaggagaaggagcctgctgagggcaatgaatcttctgaggcccccagccctgtgaatgccatgaacagctttgtgtag

SEQ ID NO: 74213 - DNA, 3543 bp, Artificial Sequence
  derived and/or modified sequence
atgcagctgaagatcatgcccaagaagaagcggctgagcgccggcagagttccgctgatccttttcctctgtcagatgatctccgctctcgaagttcccctggaccagaagagtacagaagtcatggtccaacctcctacgatcacccaacagtcccccaaagattacatcattgatccaagagaaaatatcgtcattcagtgcgaggcaaagggaaaacccccaccctcgttctcatggactaggaacgggacccatttcgatatcgataaggatccattagttaccatgaaacccgggaccggcaccctaataattaacattatgagtgagggaaaggccgagacatatgagggcgtttaccagtgtaccgctcgcaatgaaagaggcgccgctgtttctaacaatatcgtagtgcgccctagtcgctccccgctgtggactaaggagaagctggagccaatcactctacaatccggccagtccctcgtcttaccgtgtcgcccccctatcggcctgccaccaccaataatcttctggatggacaatagttttcagcgcctcccccaaagcgaacgcgtcagccaaggtctgaacggagacttgtacttttctaatgtgctgcccgaagacacccgggaggattacatatgctatgctagatttaaccatacccagaccattcagcaaaagcagccaatctccgttaaagttatcagtgccaagagctccagagagcgaccgccaaccttcctgacccctgagggcaatgcatcaaacaaggaggaattgcgcggcaacgtgctgagtctggagtgcatcgctgagggtttaccaacgccaattatttattgggctaaagaggatggcatgttaccaaagaataggactgtctacaaaaacttcgaaaaaaccctccagatcatccacgtctccgaggcggactcagggaactaccagtgcatagctaaaaatgcacttggagccattcaccacaccatcagcgtgcgagtaaaggccgccccatattggatcaccgcgccccaaaaccttgtgctgtctcctggtgaggatggaacactgatctgtagagcgaacggcaacccaaagccccgcatatcttggctaactaatggtgtgcccatcgagattgctcctgacgaccccagcaggaagatcgacggggacactatcatcttctctaacgttcaagagagaagctctgcggtctatcagtgcaacgcctcaaatgagtacggctatctgctagccaacgcctttgtaaatgtgctcgccgagccaccccggatcctgacccctgcaaacactttgtaccaggtgattgccaacaggcccgcgctcctggactgcgcttttttcggctcgccacttcccacaattgagtggtttaaaggcgctaagggcagtgcattgcatgaagatatctacgtcctacacgagaacggcactctcgaaatccctgtcgcccagaaagatagtactggcacatacacctgtgtggcccgcaacaaactggggatggctaaaaacgaggtgcacctggaaataaaagatcctacgtggatcgtgaagcaaccagaatacgcggtcgtgcagcgtgggtccatggtgagcttcgagtgtaaggtgaagcacgaccacacactgtccctgactgtgttgtggctgaaggacaacagagaactgccgagcgacgagcggttcactgttgacaaggaccatctggtagttgccgacgtgtccgacgacgatagtggcacctatacctgtgtcgcaaacactactctcgatagtgtttccgcaagcgcggtattaagtgtagttgcccctacccctacacctgcccctgtgtacgacgttcccaacccgcccttcgatctcgagctgacggaccaattggacaagtctgttcaactgtcatggactcctggggacgacaataattctcccattaccaagtttataattgagtatgaggatgcgatgcataaacccggcctatggcaccatcaaacagaagtgagtggaacccaaactaccgcccagctcaagctctctccctatgtgaattattcctttagagtgatggccgtcaattcgatcgggaagtccctgccaagcgaagcttctgagcaatatcttaccaaggcgagtgaacctgataagaacccgactgccgtggaaggcctgggctccgagcccgacaatctggtgatcacatggaaacctctcaacggctttgaaagcaacggcccagggctgcaatataaggttagttggcgccaaaaggatggagacgatgaatggacctccgtggtcgtagccaacgtctcaaaatatattgtttctggaacccctactttcgtgccttaccttatcaaggtacaagcactgaacgatatgggctttgcccccgagcctgctgtcgtgatggggcacagcggcgaggatttgccaatggtggccccgggaaacgtgagggtgaacgtggtaaacagcaccctggccgaggttcactgggacccggtgcctctgaagtcaatccgtggccacctgcaggggtatcggatctactactggaaaacccagtccagcagcaagcgcaatcggagacatattgaaaagaagatcctaactttccaggggtccaagacccacggaatgcttccgggactggagcccttctcccactataccctgaatgtgcgcgtcgtgaatggcaagggagagggccccgcatctcccgacagagtttttaacaccccagagggtgtaccatctgcaccctcttcactgaagattgtgaatcccactctagattccttaacactcgaatgggacccccctagtcatccgaatgggatattgacggaatatactctgaagtaccagccaataaatagtacacacgaattagggcctctcgtggacctaaagatccccgccaacaaaacgaggtggaccctgaagaatctgaacttctctacccgctacaaattctatttttatgcgcaaacctccgccggtagtggttcgcagatcaccgaggaggctgtcaccactgtggacgaggccatggcctctaggcaggtggacatcgctacacagggctggtttatcgggctaatgtgcgccgttgcccttttaatcttaattctcctgatcgtgtgcttcattcgaagaaataagggcggcaaatatcccgtgaaagagaaggaagatgcccacgctgatccagagatccaacctatgaaggaggatgacgggacctttggcgaatactccgatgccgaagaccataagccactcaagaaaggcagtcggacgccctccgacaggactgtcaagaaggaggactctgatgacagcctggttgactatggagagggggtgaacggacaattcaacgaagacgggagttttattggacagtattccggcaagaaagagaaagagcccgctgaaggcaacgagtcatcagaagcaccatctcccgtaaatgctatgaatagtttcgtttag

SEQ ID NO: 74214 - DNA, 447 bp, Artificial Sequence
  derived and/or modified sequence
atggccagccggcaggtggacatcgccacccagggctggttcatcggtctaatgtgcgcagtcgccctcttgatcctgatactgctgattgtgtgctttatcagaagaaacaaaggtggtaagtatcccgttaaggaaaaagaagatgcccatgctgacccggaaattcaacccatgaaagaggacgatggaacgtttggtgagtatagcgatgcggaagaccataaacctctcaagaaagggagccggacccccagcgaccggacagtgaaaaaagaggatagcgatgatagtctggttgactatggtgaaggcgtgaatgggcagttcaatgaggatggcagcttcatcggacaatacagtggcaagaaggaaaaagaacccgctgaaggaaacgaatcaagtgaggcaccctctcctgttaatgcaatgaatagctttgtttag

SEQ ID NO: 74215 - DNA, 6287 bp, Artificial Sequence
  derived and/or modified sequence
cgcgcgggcgcgggggacggcgcaggggccgcctggctggagcagccagaggggatagcttcgtcgagaacggaggacaccggcggtccagggtcctgggcagtcgcgccagagctgagcggagggcgcggcgcgagaacgaatctttgtgacattctctctcagcattctttatcccctgtttgctgaagacttcgacaaaagctggtcttagctgttggcattctcctgagaaaaggatagcttcagaaatcagaaaaacatttgggaggtgtctagcccagtggaccttctgaagagcaatgctaagaagacgtttggtttaaagaattaaaaggaagaacaacttaagagcttcttcaaagtttcccgcatgaaaattacttaaacgttgcacacaacgtttcacaaaatcttttgtgaaagaagaaaaggaaattcagtgtgtgagtctcagcaggagttaagctaatgcagcttaaaataatgccgaaaaagaagcgcttatctgcgggcagagtgcccctgattctcttcctgtgccagatgattagtgcactggaagtacctcttgatcaaaaatctactgaagtaatggtacagcctccaaccatcacccaacagtctccaaaagattacattattgaccctcgggagaatattgtaatccagtgtgaagccaaagggaaaccgcccccaagcttttcctggacccgtaatgggactcattttgacatcgataaagaccctctggtcaccatgaagcctggcacaggaacgctcataattaacatcatgagcgaagggaaagctgagacctatgaaggagtctatcagtgtacagcaaggaacgaacgcggagctgcagtttctaataacattgttgtccgcccatccagatcaccattgtggaccaaagaaaaacttgaaccaatcacacttcaaagtggtcagtctttagtacttccctgcagacccccaattggattaccaccacctataatattttggatggataattcctttcaaagacttccacaaagtgagagagtttctcaaggtttgaatggggacctttatttttccaatgtcctcccagaggacacccgcgaagactatatctgttatgctagatttaatcatactcaaaccatacagcagaagcaacctatttctgtgaaggtgatttcagctaaatcaagtagagagaggccaccaacatttttaactccagaaggcaatgcaagtaacaaagaggaattaagaggaaatgtgctttcactggagtgcattgcagaaggactgcctaccccaattatttactgggcaaaggaagatggaatgctacccaaaaacaggacagtttataagaactttgagaaaaccttgcagatcattcatgtttcagaagcagactctggaaattaccaatgtatagcaaaaaacgcattaggagccatccaccataccatttctgttagagttaaagcggctccatactggatcacagcccctcaaaatcttgtgctgtccccaggagaggatgggaccttgatctgcagagctaatggcaaccccaaacccagaattagctggttaacaaatggagtcccaatagaaattgcccctgatgaccccagcagaaaaatagatggcgataccattattttttcaaatgttcaagaaagatcaagtgcagtctatcagtgcaatgcctctaatgaatatggatatttactggcaaacgcatttgtaaatgtgctggctgagccaccacgaatcctcacacctgcaaacacactctaccaggtcattgcaaacaggcctgctttactagactgtgccttctttgggtctcctctcccaaccatcgagtggtttaaaggagctaaaggaagtgctcttcatgaagatatttatgttttacatgaaaatggaactttggaaattcctgtggcccaaaaggacagtacaggaacttatacgtgtgttgcaaggaataaattagggatggcgaagaatgaagttcacttagaaatcaaagatcctacatggatcgttaaacagcccgaatatgcagttgtgcaaagagggagcatggtgtcctttgaatgcaaagtgaaacatgatcacaccttatccctcactgtcctgtggctgaaggacaacagggaactgcccagtgatgaaaggttcactgttgacaaggatcatctagtggtagctgatgtcagtgacgatgacagcgggacctacacgtgtgtggccaacaccactctggacagcgtctccgccagcgctgtgcttagcgttgttgctcctactccaactccagctcccgtttacgatgtcccaaatcctccctttgacttagaactgacagatcaacttgacaaaagtgttcagctgtcatggaccccaggcgatgacaacaatagccccattacaaaattcatcatcgaatatgaagatgcaatgcacaagccagggctgtggcaccaccaaactgaagtttctggaacacagaccacagcccagctgaagctgtctccttacgtgaactactccttccgcgtgatggcagtgaacagcattgggaagagcttgcccagcgaggcgtctgagcagtatttgacgaaagcctcagaaccagataaaaaccccacagctgtggaaggactgggatcagagcctgataatttggtgattacgtggaagcccttgaatggtttcgaatctaatgggccaggccttcagtacaaagttagctggcgccagaaagatggtgatgatgaatggacatctgtggttgtggcaaatgtatccaaatatattgtctcaggcacgccaacctttgttccatacctgatcaaagttcaggccctgaatgacatggggtttgcccccgagccagctgtagtcatgggacattctggagaagacctcccaatggtggctcctgggaacgtgcgtgtgaatgtggtgaacagtaccttagccgaggtgcactgggacccagtacctctgaaaagcatccgaggacacctacaaggctatcggatttactattggaagacccagagttcatctaaaagaaacagacgtcacattgagaaaaagatcctcaccttccaaggcagcaagactcatggcatgttgccggggctagagccctttagccactacacactgaatgtccgagtggtcaatgggaaaggggagggcccagccagccctgacagagtctttaatactccagaaggagtccccagtgctccctcgtctttgaagattgtgaatccaacactggactctctcactttggaatgggatccaccgagccacccgaatggcattttgacagagtacaccttaaagtatcagccaattaacagcacacatgaattaggccctctggtagatttgaaaattcctgccaacaagacacggtggactttaaaaaatttaaatttcagcactcgatataagttttatttctatgcacaaacatcagcaggatcaggaagtcaaattacagaggaagcagtaacaactgtggatgaagcgatggcaagccggcaggtggatattgcaactcagggctggttcattggtctgatgtgtgctgttgctctccttatcttaattttgctgattgtttgcttcatcagaagaaacaagggtggtaaatatccagttaaagaaaaggaagatgcccatgctgaccctgaaatccagcctatgaaggaagatgatgggacatttggagaatacagtgatgcagaagaccacaagcctttgaaaaaaggaagtcgaactccttcagacaggactgtgaaaaaagaagatagtgacgacagcctagttgactatggagaaggggttaatggccagttcaatgaggatggctcctttattggacaatacagtggtaagaaagagaaagagccggctgaaggaaacgaaagctcagaggcaccttctcctgtcaacgccatgaattcctttgtttaatttttaagctctttgccaatattccatttctctagaatgtttatcctaagcacttgtttgtcagccctctcatactatgaacatatgggtagagagtatattttctgctgtatgttagtattatgagaatagttacagcaaaaacataactcagtcaaatgatatgttaatatgaactggaatgcaaagtgcatactttttcattcaaaatgggtattcttgatttcctcagaactgataaaaaataatgcaacatcaccaacagatcctgttatttcctctgcaggatacagttcaatatgatgcatgaaaaatgctccacatttaaaggacatacccgtgtatgttatgaaaacatggtttgatactttgtttatactaccctcagctgaacccctatatatgaattccgttttcattgtcaagaatgttactgtagtattctctagaacttcaatgtctttgtggacattgttgtgaaattggtgactatgtatagctgtcgttagtctttttgggagactgttaggaacagtttgtacagtatatacttgctaaatgagttcattatgacagtcacattgctgatgcttactgagaactattacctactcttggctcctgttactccgtaggcttcttaatcttccaggcattacagcagcacagtgttctactttttacatcatttctatgttcggttgtttttaggcataaacaatgtgtattgcagtgcatttcggcatttgtgccatactgaaagaatcaaaaacaaatcatccaaattaaatttcaaacattatttcagagaacacagggcaagacacatacagtgccttcagatattaagcattccacaacatcgtgcattctgtatcagctggtccagtccattctgggtcctagattactgtcattgtctaaaagtaacttttaaaaagcagagttcatgaaaactgcaatgctgggaaaagaaggaaacatgaaaataaaaataagacagtttattagaaatagcatttcctcataagcataaaaagaaaatctttgttgccaactgaagcacatgatgattttgtggtcctttatggtttctattacattcagtaagaaagatgtcaacatgctagaaaattaattttaaaactaagttattccaacactaaaagcatacaacagcatgccaacagtaatatattattctccaagactttacctatgtaagtgttcaaaactctgcagcattaaacaacgtgtatgcaaattgttatggatacatttcagaatctaagaaatcaggcaagtgcttaaaaggccaacggtccaagggattacatctgcagtttaaaaagtaaatatatattctatcgtattcataaacaatatctatcaaatgggttacctccaaatatgaaaatctataacaacctatggttgaaggaatgctcagtttcatttgccaataaattggtttctcataacttgcatcaagtttaattttaagtaaagctttttatatgtagatattttgttgaatttgtaaatacacttaaaatgtagatgctatatgcttataggtgttacatacaaataaacatgcaatgtttatgttgtactgtataagaggtaagctaattaatgcagtgaatgggattggaaagcatctacttaaatatctattgggttcccccctccccccaccttttttgctgtgaaactgaaatagtgaacttttctacgtattgacagcagatttttcgatgaaatcttcagagctttgcctatggggcacagtaggcctagtaacctggcatgtttgatatatgtaggtaaagcataatttaaagtaatcccaggtaaagatggccctaaatactttcatgtctctatattcatttttcacagatccacctgtctcttgaaaatataaaaagacaaaacaggtttgccttggcatcagagagcacaaagattaaaagttactttaaatttgccaatattttgggagaacaataaaactacattttttcctcttccatactggtagatgcgaaatttatctgtgcatgaaagggtcacttctgtaatagtgcaacagatttggtattaaaaattaaatgtggttttaaaagttcctctctcttttgtaatttatgttcccaattgagtgtgaatgtccaagtaatggtgtatgtaatggtacaggcaaatgtgactggatttccctcaaaaaagtaactattaaacagtcttgatctctttgtgacttttaa

SEQ ID NO: 74216 - DNA, 3543 bp, Artificial Sequence
  derived and/or modified sequence
atgcagctgaagatcatgcctaagaagaaacgcttgtccgccggtcgggtgcctttaatcttgtttctgtgtcagatgatctcagctctggaagtgcccctggatcagaagagtaccgaagtgatggttcagccacccacaattacgcagcaatcccccaaggactatattattgatccaagggaaaatatagtgatacagtgcgaagccaagggcaagccccctccttctttttcctggacacgaaacggtactcactttgatattgacaaagaccctctggtgacgatgaagcccggtaccgggaccctgatcattaatattatgtctgaggggaaggccgagacctacgaaggcgtgtatcagtgtaccgcacgcaacgagagaggtgcagccgtatcgaacaatatcgtggtgaggccttcaaggagtcccctctggaccaaggagaaattagagccgatcaccctccagtcgggacagtcgcttgttcttccttgtaggccccctatcggactccctccgccaattattttctggatggacaactcattccagaggttaccccagtctgagcgggtttcacagggtctcaacggagatctgtatttcagtaatgtgctgcccgaggatacacgggaagattatatctgttacgccagatttaatcacactcagacaattcaacagaagcagcccattagcgtgaaagtgatctctgctaagagttccagggagaggcccccaacgtttttgacacctgaaggcaacgcatctaataaagaagagctgcggggtaacgtcttatcgctggaatgcattgcagagggcctaccgacacctattatatattgggcaaaggaggacggaatgctcccaaaaaaccggaccgtctacaagaattttgagaagaccctgcaaatcattcatgtgtccgaggccgattccggtaactatcagtgcatagcaaagaacgctttgggggcaatccaccacacaataagcgtgagggtgaaagccgcaccctattggattactgctccccagaatctggtgttgtccccaggggaggacgggaccctgatctgcagggccaacggaaacccaaaaccccgaatctcctggttaacaaacggtgtacccattgaaatagcaccagacgaccctagccggaagatcgacggcgacaccatcatctttagcaacgttcaggagcgctcctccgcagtgtaccaatgtaatgccagcaacgaatatggttacctgctggccaatgcctttgttaatgtgcttgcagagcctccccgaattttgacacctgccaacacactctatcaagtgattgccaatagacctgccctgcttgactgtgctttttttgggtccccattgcccaccatagagtggttcaagggagctaaaggctccgctctccacgaagatatctatgtgcttcacgagaacggaacacttgagataccagtcgcccagaaagatagcaccggaacttatacttgtgtggcacgcaataagttaggcatggcaaagaatgaagtgcatttggagatcaaggaccctacttggattgttaagcagccagaatatgctgtggtgcagcggggttcaatggtatcctttgagtgcaaggtgaagcacgaccataccctcagtctgactgtactgtggctgaaggacaatcgcgagctcccttcggatgaacgatttaccgtggataaagaccatcttgtggtcgcggatgtgtccgatgacgattcagggacatacacctgtgtagctaacactaccctcgactccgtgtctgcttcagccgtgctctctgtagtcgcccctacgccgactccagctcctgtatacgacgtgcccaatccgccatttgacctggaactgacagaccagctggataagtccgtccagcttagctggacacccggtgacgataacaatagcccaatcactaaattcataatcgagtacgaagacgccatgcacaaacctggactgtggcaccaccaaacagaggtgtccggaacccagactactgcccaactgaagctttcaccctacgtgaactactcttttcgcgtgatggcagtcaacagcatcggaaagagtttacctagtgaagcctcggaacagtacctgaccaaggcgtccgaacctgataagaaccctaccgcagtggaaggcctggggagcgaacctgataacctggtaattacttggaaacctctaaacggattcgagagcaacggcccaggactgcagtacaaggtgagctggagacagaaggacggtgacgatgagtggacctcagttgtcgtcgctaatgttagcaagtatatcgtttcaggtacgcctaccttcgtgccctacctgatcaaggtccaagccctgaacgacatggggttcgcgcctgagcccgcagtagtcatggggcatagcggggaggatctacctatggtggctccaggcaacgtgagagtgaatgtggtgaatagcaccctggccgaggtgcattgggatcctgttccactcaagagcatccgcggtcacctccaggggtataggatctattattggaaaacccagtcttcttccaaacggaataggcggcatatcgagaagaaaatccttaccttccagggaagcaaaacacacggtatgctgccaggcctggagccattcagtcattatacgttgaatgtgcgtgttgttaacgggaagggtgaaggacctgcgtctcccgacagggtgttcaatacacctgagggagtgccaagtgcgccttccagcctcaaaatagtgaacccaacactagacagcctgacactagagtgggacccgcctagtcatccaaatggaatactgacggagtatacacttaaataccaacccattaatagcacccacgaacttggaccccttgtggaccttaagatcccagccaacaaaacaaggtggacgttaaagaaccttaacttcagtacgcgttataagttctacttttatgcccaaacctcagcaggttccgggagccagataactgaggaagccgtgactactgttgacgaagcaatggctagtcgacaggtagacatcgcgactcagggttggttcatcggcctgatgtgtgcagtggcacttctgatcctcattctgctgattgtctgttttatccggagaaataaggggggaaagtatccggtaaaggagaaggaggatgctcacgctgacccagaaattcagccaatgaaggaggatgatgggacctttggggagtactcagacgcggaagatcataagccgcttaagaagggcagccggacaccgtccgatcgaacagtcaagaaggaggattctgatgactcccttgtggattacggggaaggggtgaatggacagttcaacgaggacggcagctttattgggcagtattccgggaaaaaggagaaggagcccgctgaaggtaacgaatcaagtgaggcccctagtcccgtcaatgctatgaacagcttcgtgtag

SEQ ID NO: 74217 - DNA, 447 bp, Artificial Sequence
  derived and/or modified sequence
atggccagcaggcaggtggacattgccactcaaggctggttcattggcctgatgtgcgctgtggcgctgttgatcctaatcctccttatcgtctgcttcatcagacggaataaggggggaaaatatcctgtgaaggagaaggaagatgcccacgcagatcccgaaattcagccaatgaaagaggatgatggcactttcggcgagtattctgatgccgaggaccacaaacccctgaaaaaaggatcgagaacgcctagtgaccgcaccgtgaagaaagaggactccgacgatagtctggtggactacggagaaggtgtgaatggccagtttaatgaggacgggtcattcattggccaatactccggaaagaaggagaaagagcccgctgagggcaacgagtccagcgaagcaccttcccctgttaacgcaatgaattcgttcgtctag

SEQ ID NO: 74218 - DNA, 3543 bp, Artificial Sequence
  derived and/or modified sequence
atgcagctgaagatcatgcccaagaagaagagactgagcgccggcagagtgcccctgatcctgttcctgtgccagatgatcagcgccctggaggtgcccctggaccagaagagcaccgaggtgatggtgcagccccccaccatcacccagcagagccccaaggactacatcatcgaccccagagagaacatcgtgatccagtgcgaggccaagggcaagcccccccccagcttcagctggaccagaaacggcacccacttcgacatcgacaaggaccccctggtgaccatgaagcccggcaccggcaccctgatcatcaacatcatgagcgagggcaaggccgagacctacgagggcgtgtaccagtgcaccgccagaaacgagagaggcgccgccgtgagcaacaacatcgtggtgagacccagcagaagccccctgtggaccaaggagaagctggagcccatcaccctgcagagcggccagagcctggtgctgccctgcagaccccccatcggcctgcccccccccatcatcttctggatggacaacagcttccagagactgccccagagcgagagagtgagccagggcctgaacggcgacctgtacttcagcaacgtgctgcccgaggacaccagagaggactacatctgctacgccagattcaaccacacccagaccatccagcagaagcagcccatcagcgtgaaggtgatcagcgccaagagcagcagagagagaccccccaccttcctgacccccgagggcaacgccagcaacaaggaggagctgagaggcaacgtgctgagcctggagtgcatcgccgagggcctgcccacccccatcatctactgggccaaggaggacggcatgctgcccaagaacagaaccgtgtacaagaacttcgagaagaccctgcagatcatccacgtgagcgaggccgacagcggcaactaccagtgcatcgccaagaacgccctgggcgccatccaccacaccatcagcgtgagagtgaaggccgccccctactggatcaccgccccccagaacctggtgctgagccccggcgaggacggcaccctgatctgcagagccaacggcaaccccaagcccagaatcagctggctgaccaacggcgtgcccatcgagatcgcccccgacgaccccagcagaaagatcgacggcgacaccatcatcttcagcaacgtgcaggagagaagcagcgccgtgtaccagtgcaacgccagcaacgagtacggctacctgctggccaacgccttcgtgaacgtgctggccgagccccccagaatcctgacccccgccaacaccctgtaccaggtgatcgccaacagacccgccctgctggactgcgccttcttcggcagccccctgcccaccatcgagtggttcaagggcgccaagggcagcgccctgcacgaggacatctacgtgctgcacgagaacggcaccctggagatccccgtggcccagaaggacagcaccggcacctacacctgcgtggccagaaacaagctgggcatggccaagaacgaggtgcacctggagatcaaggaccccacctggatcgtgaagcagcccgagtacgccgtggtgcagagaggcagcatggtgagcttcgagtgcaaggtgaagcacgaccacaccctgagcctgaccgtgctgtggctgaaggacaacagagagctgcccagcgacgagagattcaccgtggacaaggaccacctggtggtggccgacgtgagcgacgacgacagcggcacctacacctgcgtggccaacaccaccctggacagcgtgagcgccagcgccgtgctgagcgtggtggcccccacccccacccccgcccccgtgtacgacgtgcccaacccccccttcgacctggagctgaccgaccagctggacaagagcgtgcagctgagctggacccccggcgacgacaacaacagccccatcaccaagttcatcatcgagtacgaggacgccatgcacaagcccggcctgtggcaccaccagaccgaggtgagcggcacccagaccaccgcccagctgaagctgagcccctacgtgaactacagcttcagagtgatggccgtgaacagcatcggcaagagcctgcccagcgaggccagcgagcagtacctgaccaaggccagcgagcccgacaagaaccccaccgccgtggagggcctgggcagcgagcccgacaacctggtgatcacctggaagcccctgaacggcttcgagagcaacggccccggcctgcagtacaaggtgagctggagacagaaggacggcgacgacgagtggaccagcgtggtggtggccaacgtgagcaagtacatcgtgagcggcacccccaccttcgtgccctacctgatcaaggtgcaggccctgaacgacatgggcttcgcccccgagcccgccgtggtgatgggccacagcggcgaggacctgcccatggtggcccccggcaacgtgagagtgaacgtggtgaacagcaccctggccgaggtgcactgggaccccgtgcccctgaagagcatcagaggccacctgcagggctacagaatctactactggaagacccagagcagcagcaagagaaacagaagacacatcgagaagaagatcctgaccttccagggcagcaagacccacggcatgctgcccggcctggagcccttcagccactacaccctgaacgtgagagtggtgaacggcaagggcgagggccccgccagccccgacagagtgttcaacacccccgagggcgtgcccagcgcccccagcagcctgaagatcgtgaaccccaccctggacagcctgaccctggagtgggacccccccagccaccccaacggcatcctgaccgagtacaccctgaagtaccagcccatcaacagcacccacgagctgggccccctggtggacctgaagatccccgccaacaagaccagatggaccctgaagaacctgaacttcagcaccagatacaagttctacttctacgcccagaccagcgccggcagcggcagccagatcaccgaggaggccgtgaccaccgtggacgaggccatggccagcagacaggtggacatcgccacccagggctggttcatcggcctgatgtgcgccgtggccctgctgatcctgatcctgctgatcgtgtgcttcatcagaagaaacaagggcggcaagtaccccgtgaaggagaaggaggacgcccacgccgaccccgagatccagcccatgaaggaggacgacggcaccttcggcgagtacagcgacgccgaggaccacaagcccctgaagaagggcagcagaacccccagcgacagaaccgtgaagaaggaggacagcgacgacagcctggtggactacggcgagggcgtgaacggccagttcaacgaggacggcagcttcatcggccagtacagcggcaagaaggagaaggagcccgccgagggcaacgagagcagcgaggcccccagccccgtgaacgccatgaacagcttcgtgtag

SEQ ID NO: 74219 - DNA, 447 bp, Artificial Sequence
  derived and/or modified sequence
atggccagcagacaggtggacatcgccacccagggctggttcatcggcctgatgtgcgccgtggccctgctgatcctgatcctgctgatcgtgtgcttcatcagaagaaacaagggcggcaagtaccccgtgaaggagaaggaggacgcccacgccgaccccgagatccagcccatgaaggaggacgacggcaccttcggcgagtacagcgacgccgaggaccacaagcccctgaagaagggcagcagaacccccagcgacagaaccgtgaagaaggaggacagcgacgacagcctggtggactacggcgagggcgtgaacggccagttcaacgaggacggcagcttcatcggccagtacagcggcaagaaggagaaggagcccgccgagggcaacgagagcagcgaggcccccagccccgtgaacgccatgaacagcttcgtgtag

SEQ ID NO: 74220 - protein, 398 aa, Artificial Sequence
  derived and/or modified sequence
MSIVTVQLGQCGNQIGFEVFDALLSDSHSSQGLCSMRENEAYQASCKERFFSEEENGVPIARAVLVDMEPKVINQMLSKAAQSGQWKYGQHACFCQKQGSGNNWAYGYSVHGPRHEESIMNIIRKEVEKCDSFSGFFIIMSMAGGTGSGLGAFVTQNLEDQYSNSLKMNQIIWPYGTGEVIVQNYNSILTLSHLYRSSDALLLHENDAIHKICAKLMNIKQISFSDINQVLAHQLGSVFQPTYSAESSFHYRRNPLGIDRHVWPPLSGLPPLSKMSLNKDLHFNTSIANLVILRGKDVQSADVEGFKDPALYTSWLKPVNAFNVWKTQRAFSKYEKSAVLVSNSQFLVKPLDMIVGKAWNMFASKAYIHQYTKFGIEEEDFLDSFTSLEQVVASYCNL

SEQ ID NO: 74221 - DNA, 1197 bp, Artificial Sequence
  derived and/or modified sequence
atgagcatcgtgaccgtgcagctgggccagtgcggcaaccagatcggcttcgaggtgttcgacgccctgctgagcgacagccacagcagccagggcctgtgcagcatgagagagaacgaggcctaccaggccagctgcaaggagagattcttcagcgaggaggagaacggcgtgcccatcgccagagccgtgctggtggacatggagcccaaggtgatcaaccagatgctgagcaaggccgcccagagcggccagtggaagtacggccagcacgcctgcttctgccagaagcagggcagcggcaacaactgggcctacggctacagcgtgcacggccccagacacgaggagagcatcatgaacatcatcagaaaggaggtggagaagtgcgacagcttcagcggcttcttcatcatcatgagcatggccggcggcaccggcagcggcctgggcgccttcgtgacccagaacctggaggaccagtacagcaacagcctgaagatgaaccagatcatctggccctacggcaccggcgaggtgatcgtgcagaactacaacagcatcctgaccctgagccacctgtacagaagcagcgacgccctgctgctgcacgagaacgacgccatccacaagatctgcgccaagctgatgaacatcaagcagatcagcttcagcgacatcaaccaggtgctggcccaccagctgggcagcgtgttccagcccacctacagcgccgagagcagcttccactacagaagaaaccccctgggcatcgacagacacgtgtggccccccctgagcggcctgccccccctgagcaagatgagcctgaacaaggacctgcacttcaacaccagcatcgccaacctggtgatcctgagaggcaaggacgtgcagagcgccgacgtggagggcttcaaggaccccgccctgtacaccagctggctgaagcccgtgaacgccttcaacgtgtggaagacccagagagccttcagcaagtacgagaagagcgccgtgctggtgagcaacagccagttcctggtgaagcccctggacatgatcgtgggcaaggcctggaacatgttcgccagcaaggcctacatccaccagtacaccaagttcggcatcgaggaggaggacttcctggacagcttcaccagcctggagcaggtggtggccagctactgcaacctgtag

SEQ ID NO: 74222 - DNA, 1197 bp, Artificial Sequence
  derived and/or modified sequence
atgagcatcgtcaccgtgcaactggggcaatgcggcaaccagatcgggtttgaagtttttgatgccttgttgtccgacagccactcttcccagggtctgtgtagcatgcgggaaaacgaggcctaccaggcaagttgcaaagagagattcttctccgaggaggagaacggcgttcctattgcccgcgcggtactggtagatatggagccgaaagtcattaaccagatgctaagtaaagccgcccaaagcgggcaatggaagtatgggcaacatgcttgtttctgccagaagcagggtagcggaaataattgggcctatggctactccgttcacgggccccgtcatgaggagtctattatgaacatcatcagaaaggaggtggagaaatgcgattccttttctgggttcttcattattatgtctatggcagggggtaccggtagtggcctgggcgcattcgtcacacaaaaccttgaggatcagtactccaacagcctgaaaatgaaccagattatctggccgtacgggaccggcgaggtgatcgttcagaattataatagcattcttaccctgtcccacttgtaccggtccagcgacgcattgctgctccacgagaacgacgctatccacaaaatttgtgctaagctgatgaacattaagcagatctcttttagtgacattaaccaagtcctcgcccaccagcttggcagcgtgttccagccaacatactcagccgagagctctttccattaccgaagaaacccccttggaatcgaccggcacgtgtggccccctctcagtggcttacccccgctgagcaagatgagcctgaataaggatttgcacttcaacacaagtattgccaacttggtgatactgcggggcaaggatgtgcagtcagcggatgtcgagggattcaaggaccctgcactctacacttcttggctgaaacccgtcaatgcattcaatgtttggaagacacagcgcgctttctccaagtacgaaaagagcgccgtgctcgtgagcaatagtcagttcctggtcaagcccctggatatgatcgtcggaaaagcatggaatatgttcgcgtctaaggcctacatccatcagtatactaaatttgggatcgaggaggaagatttcctcgatagtttcacttctctggagcaggtggtcgcaagctattgcaatctgtag

SEQ ID NO: 74223 - DNA, 1197 bp, Artificial Sequence
  derived and/or modified sequence
atgagcatcgtgacagtgcagctgggccagtgtggcaaccagattggatttgaggtgtttgatgccctgctgagtgacagccacagcagccagggcctgtgcagcatgagagaaaatgaggcctaccaggccagctgcaaggagcgcttcttcagcgaggaggagaatggagtgcccatcgcccgggctgtgctggtggacatggagcccaaggtgatcaaccagatgctgagcaaggccgcccagagcggccagtggaagtatggccagcacgcctgcttctgccagaagcagggcagcggcaacaactgggcctacggctacagcgtgcacggccccaggcatgaggagagcatcatgaacatcatcaggaaggaggtggagaagtgtgacagcttcagcggcttcttcatcatcatgtccatggccggcggcaccggcagcggcctgggcgcctttgtgacccagaacctggaggaccagtacagcaacagcctgaagatgaaccagatcatctggccctatggaactggagaggtgattgtgcagaactacaacagcatcctgaccctgagccacctgtaccgcagcagtgatgccctgctgctgcatgaaaatgatgccatccacaagatctgtgccaagctgatgaacatcaagcagatctccttcagtgacatcaaccaggtgctggcccaccagctgggctctgtgttccagcccacctacagcgctgagagcagcttccactacagaagaaaccccctgggcatcgacagacatgtgtggccacccctgagcggcctgccccccctgagcaagatgagcctgaacaaggacctgcacttcaacaccagcatcgccaacctggtgatcctgcggggcaaggatgtgcagagcgcagatgtggagggcttcaaggaccctgccctgtacacctcctggctgaagcctgtgaatgccttcaacgtgtggaagacccagagggccttcagcaaatatgagaagtctgctgtgctggtgagcaacagccagttcctggtgaagcccctggacatgattgtgggcaaggcctggaacatgtttgccagcaaggcctacatccaccagtacaccaagtttggcatcgaggaggaggacttcctggacagcttcaccagcctggagcaggtggtggccagctactgcaacctgtag

SEQ ID NO: 74224 - DNA, 1197 bp, Artificial Sequence
  derived and/or modified sequence
atgagcatcgtgaccgtgcagctgggccagtgcggcaaccagatcggattcgaggtgttcgatgccctcctctccgatagccacagtagccaaggactgtgctccatgagagagaatgaagcttaccaagcgagctgtaaagagcgttttttttctgaagaagaaaatggcgtgcccattgcgcgggccgtgctcgtggatatggaacccaaggtgatcaatcagatgttatccaaggctgcacagtccggtcagtggaagtacgggcagcacgcttgtttttgccagaagcagggatctggaaacaattgggcatacgggtacagcgtgcatgggcctagacacgaagagtctataatgaatataattagaaaggaggtggagaaatgcgatagcttttctggcttttttattataatgagtatggcagggggtaccggctctgggctcggagctttcgtgacacagaatctggaagaccagtattctaactctttgaagatgaatcagatcatctggccatacggcacaggcgaggtcatcgtacagaattacaactccatactgactctcagtcacctgtaccggagttccgatgcactactgctccatgaaaacgacgctattcataagatatgcgctaaactcatgaatattaagcagatctctttttcagatattaatcaagtgctggcccaccaactgggaagcgtttttcagccaacttacagtgcagagtctagtttccactaccgccggaatcccctgggtattgacaggcacgtgtggcctccactatcgggcctgccccctctgtctaagatgtcccttaataaagacctgcacttcaatacctcaattgcgaacttagtgattctacgggggaaggatgtacagagtgctgacgtggaggggttcaaggaccccgccctatatacctcttggctgaagccagtgaatgcctttaatgtgtggaaaacacagcgcgcattctccaagtatgaaaaatccgccgtcctggtctcgaactcgcaatttctggttaaaccactggacatgatcgtggggaaggcctggaacatgttcgccagcaaagcatatatccaccagtatactaagtttggcatcgaggaagaggactttctcgactctttcacgtccttagagcaagtggtcgcgagctattgtaacctgtag

SEQ ID NO: 74225 - DNA, 1197 bp, Artificial Sequence
  derived and/or modified sequence
atgagtatcgtcactgtccagctgggacaatgtggcaaccagattggcttcgaggtgttcgatgcgctactgagtgatagccactcaagtcagggcctgtgtagcatgcgtgagaacgaggcctatcaagcgtcgtgtaaagagagattctttagtgaagaggagaacggagtgcccatcgctcgcgcagtgctcgtagatatggagcccaaagtcattaaccagatgctctctaaagctgctcagtcagggcagtggaaatacggtcaacatgcttgcttctgccagaaacaggggtccggaaataattgggcctatggctacagcgtgcacggcccacggcacgaagagagtatcatgaatatcatccgaaaagaagtggaaaagtgtgacagcttcagtggtttcttcatcattatgtccatggctggcggaaccggctctggcctcggcgctttcgttacacagaacctagaagaccagtactccaattcactcaagatgaaccaaataatatggccatacggtaccggagaggtcattgtgcagaactacaatagtatcttaactctcagtcacttataccggtcctctgacgctctgctcctgcacgaaaacgacgctatacacaaaatttgcgcgaagctgatgaacatcaagcagatctctttcagtgatataaatcaagtgctggcccatcagctaggcagcgttttccagcccacgtattcagccgaaagctcgttccattatagacgaaatcccttgggaattgaccgccatgtttggcctccgttgtccggcctgccaccgttgtccaaaatgtctttgaacaaagatttacatttcaacacatctatagctaatttggtgatcctgaggggcaaggatgttcagtccgcagatgttgaagggtttaaggatcccgcattgtacaccagttggctaaagcccgtgaatgcttttaacgtgtggaagacacaacgagctttcagcaagtacgagaaatcagccgtgttagtgagcaattctcaattcctggtaaagcctcttgacatgattgtcggaaaggcttggaacatgtttgcctctaaagcatatattcaccagtacaccaagtttggaattgaagaggaggacttcctggactccttcacgtcactggaacaggttgttgcgtcttattgcaatctgtag

SEQ ID NO: 74226 - DNA, 2307 bp, Artificial Sequence
  derived and/or modified sequence
agctggagcgttcggtggacagtgagcatgcgtaccatatctgaagttcgtaaattgaaattgaacatgcgtaattaatctttctgaataggaaaaaatatatacacaacaaaactctccgtttatggaacatgcgcatttgttctcagtaagtttttcgttttgaaagtgagcatgcgcatggtgagtaggttggtccgaagtttgaaccggacagaagcgctggtcggcgtctggcggttgtttttagaggtaatacacctagtttgtggctcagcatgtcaattgtaacagtgcaacttggtcagtgtggcaatcagattggttttgaagtttttgatgctttgcttagtgactcacacagttcccagggactctgctctatgagagagaatgaggcatatcaagcatcttgcaaagaaagattcttcagtgaggaggagaatggagttccaattgcccgggctgttcttgttgacatggaacccaaagttatcaatcaaatgctgtcaaaggctgcccagtctggccaatggaaatatggtcaacatgcatgcttctgtcaaaaacaaggttctggaaacaactgggcatatggttactctgttcatggacccaggcatgaagaatctataatgaacataatccggaaggaagtggagaaatgtgactctttcagtggttttttcatcataatgagtatggctgggggcacaggatcaggattaggagctttcgttacacagaatttagaagatcagtactcaaactcattgaaaatgaatcagattatttggccttatggaactggtgaggttattgttcaaaactacaactccattttgacactttctcacttgtaccgatcttcagacgccctccttcttcatgagaatgatgccatccataagatctgtgcaaaactgatgaatatcaagcagatctcctttagtgatatcaatcaagtcctcgcacatcagctgggaagtgtgttccagcctacttattctgcagaaagctcatttcactacagacgaaatccactaggtattgataggcatgtatggcctcctttatcaggacttcctcctcttagtaaaatgtctctcaacaaggacctgcattttaacacttccattgctaacttggtcattcttcgtgggaaagatgtgcaaagtgcagatgtggagggatttaaagatccagctctgtatacttcctggttgaagcctgttaatgctttcaacgtgtggaaaacccagcgggcctttagcaaatatgagaagtctgcagtgttggtcagcaacagccagttcttagtaaaaccacttgatatgattgttgggaaggcatggaatatgtttgcttcaaaagcctacattcatcagtacacaaaatttggaatcgaagaagaggactttttagacagtttcacgtcattagagcaggttgttgccagttactgtaatctctgatcttgaacaatgggaaaagtataccttaaggcatttctggactaaaatattttcaatactattttctctgtaaagttttcaaagttctccatcctggctaacacggtgaaacaccgtctctaccagaaaatacaaaaaattagccaggcgcggtggcgggtgcctgtagtcccagctactcgggaggctgaggcaggagaatgacgtgaacccaggaggcggagcttgcagtgagccgagatcgcgccactgcactccagcctgggcgacagagcgagactccgtctcaaaaaaaaaaaaaaaaaaaaatgttttcaaagttccattctgttaaagtaaccacgtagaatgctgagtctattctgcatactatgcccacagaaaaggaagaaaactttttaaaatggagaatcgcatgttttcaatgaaaacattcacttggtatttcatttgtaagaaaaaaaaatggtgcttttataaagaactttggggaaacactttgctgaaatgttgggactctggaactagccaagaaaagagaatattctctttgtctacatgttcctaaatctttactccaaaacaactccaaaaacaactcacaaagcatgaaccaaactttcacagcataatttcaagctaaggaattgtaattctgtacttaatatattcatgtttgaaatgaatgctttgaaccacaggagggagatgttgtcaaatgctacagtgtgaacatgtattttgaatattctgtaacagggcaagtttccactctaagcagctatttaaaaataaatatgaggattttggtaataaatgcttatgcttaagt

SEQ ID NO: 74227 - DNA, 1577 bp, Artificial Sequence
  derived and/or modified sequence
attgtcagctggagcgttcggtggacagtgagcatgcgtaccatatctgaagttcgtaaattgaaattgaacatgcgtaattaatctttctgaataggaaaaaatatatacacaacaaaactctccgtttatggaacatgcgcatttgttctcagtaagtttttcgttttgaaagtgagcatgcgcatggtgagtaggttggtccgaagtttgaaccggacagaagcgctggtcggcgtctggcggttgtttttagaggtaatacacctagtttgtggctcagcatgtcaattgtaacagtgcaacttggtcagtgtggcaatcagattggttttgaagtttttgatgctttgcttagtgactcacacagttcccagggactctgctctatgagagagaatgaggcatatcaagcatcttgcaaagaaagattcttcagtgaggaggagaatggagttccaattgcccgggctgttcttgttgacatggaacccaaagttatcaatcaaatgctgtcaaaggctgcccagtctggccaatggaaatatggtcaacatgcatgcttctgtcaaaaacaaggttctggaaacaactgggcatatggtagagacaaggattcagcatgttacccagactggtctggaactcctggcctccagtgatccacctgcctcggcctcccaaagtgctgagattacagttactctgttcatggacccaggcatgaagaatctataatgaacataatccggaaggaagtggagaaatgtgactctttcagtggttttttcatcataatgagtatggctgggggcacaggatcaggattaggagctttcgttacacagaatttagaagatcagtactcaaactcattgaaaatgaatcagattatttggccttatggaactggtgaggttattgttcaaaactacaactccattttgacactttctcacttgtaccgatcttcagacgccctccttcttcatgagaatgatgccatccataagatctgtgcaaaactgatgaatatcaagcagatctcctttagtgatatcaatcaagtcctcgcacatcagctgggaagtgtgttccagcctacttattctgcagaaagctcatttcactacagacgaaatccactaggtattgataggcatgtatggcctcctttatcaggacttcctcctcttagtaaaatgtctctcaacaaggacctgcattttaacacttccattgctaacttggtcattcttcgtgggaaagatgtgcaaagtgcagatgtggagggatttaaagatccagctctgtatacttcctggttgaagcctgttaatgctttcaacgtgtggaaaacccagcgggcctttagcaaatatgagaagtctgcagtgttggtcagcaacagccagttcttagtaaaaccacttgatatgattgttgggaaggcatggaatatgtttgcttcaaaagcctacattcatcagtacacaaaatttggaatcgaagaagaggactttttagacagtttcacgtcattagagcaggttgttgccagttactgtaatctctga

SEQ ID NO: 74228 - protein, 396 aa, Artificial Sequence
  derived and/or modified sequence
MSIVTVQLGQCGNQIGFEVFDALLSDSHSSQGLCSMRENEAYQASCKERFFSEEENGVPIARAVLVDMEPKVINQMLSKAAQSGQWKYGQHACFCQKQGSGNNWAYGYSVHGPRHEESIMNIIRKEVEKCDSFSGFFIIMSMAGGTGSGLGAFVTQNLEDQYSNSLKMNQIIWPYGTGEVIVQNYNSILTLSHLYRSSDALLLHENDAIHKICAKLMNIKQISFSDINQVLAHQLGSVFQPTYSAESSFHYRRNPLGDLMEHLVPHPEFKMLSVRNIPHMSENSLAYTTFTWAGLLKHLRQMLISNAKMEEGIDRHVWPPLSGLPPLSKMSLNKDLHFNTSIANLVILRGKDVQSADVGKKFRAYIHQYTKFGIEEEDFLDSFTSLEQVVASYCNL

SEQ ID NO: 74229 - protein, 125 aa, Artificial Sequence
  derived and/or modified sequence
MSIVTVQLGQCGNQIGFEVFDALLSDSHSSQGLCSMRENEAYQASCKERFFSEEENGVPIARAVLVDMEPKVINQMLSKAAQSGQWKYGQHACFCQKQGSGNNWAYGRDKDSACYPDWSGTPGLQ

SEQ ID NO: 74230 - DNA, 1191 bp, Artificial Sequence
  derived and/or modified sequence
atgagcatcgtgaccgtgcagctgggccagtgcggcaaccagatcggcttcgaggtgttcgacgccctgctgagcgacagccacagcagccagggcctgtgcagcatgagagagaacgaggcctaccaggccagctgcaaggagagattcttcagcgaggaggagaacggcgtgcccatcgccagagccgtgctggtggacatggagcccaaggtgatcaaccagatgctgagcaaggccgcccagagcggccagtggaagtacggccagcacgcctgcttctgccagaagcagggcagcggcaacaactgggcctacggctacagcgtgcacggccccagacacgaggagagcatcatgaacatcatcagaaaggaggtggagaagtgcgacagcttcagcggcttcttcatcatcatgagcatggccggcggcaccggcagcggcctgggcgccttcgtgacccagaacctggaggaccagtacagcaacagcctgaagatgaaccagatcatctggccctacggcaccggcgaggtgatcgtgcagaactacaacagcatcctgaccctgagccacctgtacagaagcagcgacgccctgctgctgcacgagaacgacgccatccacaagatctgcgccaagctgatgaacatcaagcagatcagcttcagcgacatcaaccaggtgctggcccaccagctgggcagcgtgttccagcccacctacagcgccgagagcagcttccactacagaagaaaccccctgggcgacctgatggagcacctggtgccccaccccgagttcaagatgctgagcgtgagaaacatcccccacatgagcgagaacagcctggcctacaccaccttcacctgggccggcctgctgaagcacctgagacagatgctgatcagcaacgccaagatggaggagggcatcgacagacacgtgtggccccccctgagcggcctgccccccctgagcaagatgagcctgaacaaggacctgcacttcaacaccagcatcgccaacctggtgatcctgagaggcaaggacgtgcagagcgccgacgtgggcaagaagttcagagcctacatccaccagtacaccaagttcggcatcgaggaggaggacttcctggacagcttcaccagcctggagcaggtggtggccagctactgcaacctgtag

SEQ ID NO: 74231 - DNA, 1191 bp, Artificial Sequence
  derived and/or modified sequence
atgagcattgttacagtccagctaggacagtgtgggaatcaaattggcttcgaggtcttcgacgccctactgagtgacagtcactcctcccaagggctctgcagcatgagggaaaacgaagcttaccaggcatcctgcaaggaacgtttcttctccgaggaagaaaacggtgtgccaatagcgcgagccgttctggtggacatggagcctaaggtgataaaccagatgttgtcaaaagccgctcagtcaggccagtggaaatacggtcagcacgcatgcttttgtcaaaagcagggctcaggcaacaactgggcctacggctatagtgtgcatgggcccaggcatgaagagtctatcatgaacattatccgcaaggaggtggaaaagtgcgatagcttcagcgggttctttatcatcatgtcaatggctggtggtaccggaagcggattaggcgccttcgtcacacagaatcttgaagatcaatactccaatagtctgaaaatgaaccagattatctggccatacggcaccggtgaagtcattgtccaaaattacaactccatcctcactctgtcacatctctaccggagctccgacgcgctgctgttgcatgagaatgacgcaatacacaaaatatgtgccaagttaatgaacattaagcaaatctccttctcagatataaatcaggtcctggcccaccagcttgggagtgtctttcaaccaacttacagtgccgagagctctttccactaccgcaggaatccgctgggagatctcatggaacatttggtgcctcacccggaattcaagatgctctcagtgaggaacataccccacatgtccgaaaattctctggcttacacaacattcacttgggccgggctgcttaaacacttacgccaaatgcttataagcaacgctaagatggaggaggggatcgataggcacgtctggcctcctctaagcggcctgccacccctgagcaagatgtccttaaacaaggatctgcacttcaatacctccatcgccaacctggtcattttacggggcaaggatgttcaatcagccgatgtgggcaaaaagttccgcgcctacatccaccagtacactaagttcggtatcgaggaggaggacttcctggactcctttacaagcctggagcaagtggtggcctcctattgtaacctttag

SEQ ID NO: 74232 - DNA, 1191 bp, Artificial Sequence
  derived and/or modified sequence
atgagcatcgtgacagtgcagctgggccagtgtggcaaccagattggatttgaggtgtttgatgccctgctgagtgacagccacagcagccagggcctgtgcagcatgagagaaaatgaggcctaccaggccagctgcaaggagcgcttcttcagcgaggaggagaatggagtgcccatcgcccgggctgtgctggtggacatggagcccaaggtgatcaaccagatgctgagcaaggccgcccagagcggccagtggaagtatggccagcacgcctgcttctgccagaagcagggcagcggcaacaactgggcctacggctacagcgtgcacggccccaggcatgaggagagcatcatgaacatcatcaggaaggaggtggagaagtgtgacagcttcagcggcttcttcatcatcatgtccatggccggcggcaccggcagcggcctgggcgcctttgtgacccagaacctggaggaccagtacagcaacagcctgaagatgaaccagatcatctggccctatggaactggagaggtgattgtgcagaactacaacagcatcctgaccctgagccacctgtaccgcagcagtgatgccctgctgctgcatgaaaatgatgccatccacaagatctgtgccaagctgatgaacatcaagcagatctccttcagtgacatcaaccaggtgctggcccaccagctgggctctgtgttccagcccacctacagcgctgagagcagcttccactacagaagaaaccccctgggggacctgatggagcacctggtgccccaccctgagttcaagatgctgtctgtgaggaacatcccccacatgtctgagaacagcctggcctacaccaccttcacctgggccggcctgctgaagcacctgcggcagatgctgatcagcaatgccaagatggaggagggcatcgacagacatgtgtggccacccctgagcggcctgccccccctgagcaagatgagcctgaacaaggacctgcacttcaacaccagcatcgccaacctggtgatcctgcggggcaaggatgtgcagagcgcagatgtgggcaagaagttccgggcctacatccaccagtacaccaagtttggcatcgaggaggaggacttcctggacagcttcaccagcctggagcaggtggtggccagctactgcaacctgtag

SEQ ID NO: 74233 - DNA, 1191 bp, Artificial Sequence
  derived and/or modified sequence
atgagcatcgtgaccgtgcagctgggccagtgcggcaaccagatcggctttgaggtatttgacgctctactctcggactcccactctagtcaggggctgtgtagcatgcgagagaacgaagcctatcaggcctcatgtaaagagaggtttttctccgaggaagaaaacggcgtcccaatcgcaagggctgtgctcgtcgatatggaaccgaaggttatcaaccagatgctgtccaaagccgcccaatccgggcagtggaagtatggccagcacgcatgtttctgtcagaagcagggaagcggtaataactgggcgtacgggtatagtgtgcacggcccacgccacgaagagtccataatgaacatcattcggaaggaggtggagaaatgcgacagttttagcggattttttatcatcatgagcatggccgggggaacaggaagcggactcggggcattcgttactcaaaatctggaggaccaatactctaacagcctgaagatgaatcaaatcatatggccttatggcactggcgaagtcatcgtgcaaaactacaattcaatcctgaccctgagtcacctctaccgttccagtgatgcgctgctccttcatgaaaatgacgccattcacaagatatgcgccaaacttatgaacataaaacagatatccttctctgatatcaatcaggttttggctcatcagctcggctctgtgtttcagcctacttatagcgctgagagctcattccactatcggcggaacccgttaggggatcttatggagcatctcgtgccccatcccgagtttaaaatgctgtccgtacggaatatcccccacatgagtgaaaattcactcgcatacacgacttttacctgggccggcctactgaagcacctgcgtcagatgctgattagcaacgccaagatggaggagggaatcgaccgtcacgtctggcctcctctaagcgggttgcccccactgtccaaaatgagtctcaataaggacttgcactttaacacatccatcgctaacctagtgattctgcgcggcaaggatgtgcaaagtgccgacgtggggaagaaattccgtgcttatatccatcagtacacgaaatttggcatcgaagaggaagacttcttggacagcttcacctcccttgagcaggtggtggctagctattgcaacctgtag

SEQ ID NO: 74234 - DNA, 1191 bp, Artificial Sequence
  derived and/or modified sequence
atgtcaatcgttaccgtgcaactggggcaatgcggcaatcagattggctttgaagtgtttgacgccttactgtctgacagtcattccagtcagggcctgtgttctatgcgcgaaaatgaagcttatcaagcttcctgcaaagagcgcttcttttcagaagaggagaacggtgtcccaatcgctcgcgctgttctggtggatatggaacctaaggtgattaaccagatgctcagtaaggcagctcagagcggacagtggaaatacggtcagcatgcgtgtttctgccagaaacagggttctggaaataattgggcctatgggtattctgtccatggccctcgacatgaggaaagtatcatgaatatcattagaaaggaagttgagaagtgtgacagttttagtgggttcttcattataatgagtatggcgggagggacaggtagcggcctcggggcattcgtcacacaaaatctcgaggaccagtatagtaattcccttaaaatgaatcagataatttggccctacgggactggtgaagttattgttcagaactataattccattctcacgctttcacacctgtatcgcagcagcgacgctctgctgttgcatgagaatgacgcgatccacaagatctgcgcaaagctaatgaacatcaaacagattagcttctccgacatcaaccaagtgctggcccatcaattaggctcggtgtttcagccaacctactccgcggagtcttccttccactaccggaggaatcctcttggagacctgatggagcacctcgtccctcaccctgagtttaagatgctcagtgtgcgaaatatccctcatatgagtgagaattcactcgcctacacgacattcacctgggccggactcttgaagcacctgcggcagatgctgatttccaacgccaaaatggaagaaggaatcgatcgacacgtgtggcctcccttatcaggcttaccccctctgagcaaaatgagcctaaacaaggatcttcacttcaacacctcaatcgccaacctcgttatcttacggggtaaggatgttcagagcgctgatgtgggtaagaagttccgggcttacatccaccagtacacgaaatttggaatcgaggaagaagacttcctggatagcttcactagtttggaacaagttgtggcatcttactgtaacctgtag

SEQ ID NO: 74235 - DNA, 1680 bp, Artificial Sequence
  derived and/or modified sequence
atctttctgaataggaaaaaatatatacacaacaaaactctccgtttatggaacatgcgcatttgttctcagtaagtttttcgttttgaaagtgagcatgcgcatggtgagtaggttggtccgaagtttgaaccggacagaagcgctggtcggcgtctggcggttgtttttagaggtaatacacctagtttgtggctcagcatgtcaattgtaacagtgcaacttggtcagtgtggcaatcagattggttttgaagtttttgatgctttgcttagtgactcacacagttcccagggactctgctctatgagagagaatgaggcatatcaagcatcttgcaaagaaagattcttcagtgaggaggagaatggagttccaattgcccgggctgttcttgttgacatggaacccaaagttatcaatcaaatgctgtcaaaggctgcccagtctggccaatggaaatatggtcaacatgcatgcttctgtcaaaaacaaggttctggaaacaactgggcatatggttactctgttcatggacccaggcatgaagaatctataatgaacataatccggaaggaagtggagaaatgtgactctttcagtggttttttcatcataatgagtatggctgggggcacaggatcaggattaggagctttcgttacacagaatttagaagatcagtactcaaactcattgaaaatgaatcagattatttggccttatggaactggtgaggttattgttcaaaactacaactccattttgacactttctcacttgtaccgatcttcagacgccctccttcttcatgagaatgatgccatccataagatctgtgcaaaactgatgaatatcaagcagatctcctttagtgatatcaatcaagtcctcgcacatcagctgggaagtgtgttccagcctacttattctgcagaaagctcatttcactacagacgaaatccactaggagacttaatggagcatttagttccccatcctgaattcaagatgctgagtgttcgtaacattcctcacatgtctgagaattcattggcatacaccacatttacttgggctggcctcctcaagcatttgagacagatgctcatttctaatgcaaagatggaagaaggtattgataggcatgtatggcctcctttatcaggacttcctcctcttagtaaaatgtctctcaacaaggacctgcattttaacacttccattgctaacttggtcattcttcgtgggaaagatgtgcaaagtgcagatgtgggtaagaaattcagagcctacattcatcagtacacaaaatttggaatcgaagaagaggactttttagacagtttcacgtcattagagcaggttgttgccagttactgtaatctctgatcttgaacaatgggaaaagtataccttaaggcatttctggactaaaatattttcaatactattttctctgtaaagttttcaaagttctccatcctggctaacacggtgaaacaccgtctctaccagaaaatacaaaaaattagccaggcgcggtggcgggtgcctgtagtcccagctactcgggaggctgaggcaggagaatgacgtgaacccaggaggcggagcttgcagtgagccgagatcgcgccactgcactccagcctgggcgacagagcgagactccgtctc

SEQ ID NO: 74236 - protein, 351 aa, Artificial Sequence
  derived and/or modified sequence
MSIVTVQLGQCGNQIGFEVFDALLSDSHSSQGLCSMRENEAYQASCKERFFSEEENGVPIARAVLVDMEPKVINQMLSKAAQSGQWKYGQHACFCQKQGSGNNWAYGYSVHGPRHEESIMNIIRKEVEKCDSFSGFFIIMSMAGGTGSGLGAFVTQNLEDQYSNSLKMNQIIWPYGTGEVIVQNYNSILTLSHLYRSSDALLLHENDAIHKICAKLMNIKQISFSDINQVLAHQLGSVFQPTYSAESSFHYRRNPLEGFKDPALYTSWLKPVNAFNVWKTQRAFSKYEKSAVLVSNSQFLVKPLDMIVGKAWNMFASKAYIHQYTKFGIEEEDFLDSFTSLEQVVASYCNL

SEQ ID NO: 74237 - DNA, 1056 bp, Artificial Sequence
  derived and/or modified sequence
atgagcatcgtgaccgtgcagctgggccagtgcggcaaccagatcggcttcgaggtgttcgacgccctgctgagcgacagccacagcagccagggcctgtgcagcatgagagagaacgaggcctaccaggccagctgcaaggagagattcttcagcgaggaggagaacggcgtgcccatcgccagagccgtgctggtggacatggagcccaaggtgatcaaccagatgctgagcaaggccgcccagagcggccagtggaagtacggccagcacgcctgcttctgccagaagcagggcagcggcaacaactgggcctacggctacagcgtgcacggccccagacacgaggagagcatcatgaacatcatcagaaaggaggtggagaagtgcgacagcttcagcggcttcttcatcatcatgagcatggccggcggcaccggcagcggcctgggcgccttcgtgacccagaacctggaggaccagtacagcaacagcctgaagatgaaccagatcatctggccctacggcaccggcgaggtgatcgtgcagaactacaacagcatcctgaccctgagccacctgtacagaagcagcgacgccctgctgctgcacgagaacgacgccatccacaagatctgcgccaagctgatgaacatcaagcagatcagcttcagcgacatcaaccaggtgctggcccaccagctgggcagcgtgttccagcccacctacagcgccgagagcagcttccactacagaagaaaccccctggagggcttcaaggaccccgccctgtacaccagctggctgaagcccgtgaacgccttcaacgtgtggaagacccagagagccttcagcaagtacgagaagagcgccgtgctggtgagcaacagccagttcctggtgaagcccctggacatgatcgtgggcaaggcctggaacatgttcgccagcaaggcctacatccaccagtacaccaagttcggcatcgaggaggaggacttcctggacagcttcaccagcctggagcaggtggtggccagctactgcaacctgtag

SEQ ID NO: 74238 - DNA, 378 bp, Artificial Sequence
  derived and/or modified sequence
atgagcatcgtgaccgtgcagctgggccagtgcggcaaccagatcggcttcgaggtgttcgacgccctgctgagcgacagccacagcagccagggcctgtgcagcatgagagagaacgaggcctaccaggccagctgcaaggagagattcttcagcgaggaggagaacggcgtgcccatcgccagagccgtgctggtggacatggagcccaaggtgatcaaccagatgctgagcaaggccgcccagagcggccagtggaagtacggccagcacgcctgcttctgccagaagcagggcagcggcaacaactgggcctacggcagagacaaggacagcgcctgctaccccgactggagcggcacccccggcctgcagtag

SEQ ID NO: 74239 - DNA, 1056 bp, Artificial Sequence
  derived and/or modified sequence
atgtccattgtgaccgtccagcttgggcagtgtgggaatcagatcgggttcgaggtttttgacgcattgctctcagacagccattcgtcacagggcctgtgcagcatgcgagagaatgaggcataccaggcctcctgtaaggagaggtttttctctgaggaagaaaatggggtgccaatcgccagagccgttctggtagacatggaaccaaaagtcattaaccagatgttgagcaaagctgcgcagtcgggccaatggaaatatgggcagcacgcttgcttctgtcagaaacagggcagcggaaacaattgggcttacggctattcagtacatgggcctagacatgaggagtcaataatgaatatcattagaaaggaagtagaaaagtgtgactcctttagcggcttctttatcatcatgagtatggcggggggcaccggaagtggtctgggtgcgtttgtcacacagaacttggaagatcagtactccaacagcttgaagatgaatcagattatttggccttacggcacaggcgaagtgatagtacagaactataactcaatccttaccctatcccacctgtacagatcgagcgacgcactactcctacatgaaaatgacgcaatacataaaatctgcgccaagctgatgaatattaagcagatttctttcagcgatatcaaccaggtgttagcacatcagctaggctcagttttccagccgacgtactccgcagagtcctcattccactataggcgaaatcctctcgagggcttcaaggaccccgccctttatacttcttggctgaaaccggttaacgcattcaacgtgtggaaaacgcagcgcgctttctctaagtacgagaagagcgccgttttagtttccaattcccagttccttgtgaagcccctagatatgattgtaggcaaagcatggaacatgtttgcttccaaggcctatatccatcagtatactaagtttgggattgaggaggaagacttccttgacagcttcacgtccttggaacaggtcgtggccagctactgtaacctatag

SEQ ID NO: 74240 - DNA, 378 bp, Artificial Sequence
  derived and/or modified sequence
atgagcattgtcacagtgcagctgggacagtgtgggaatcaaataggattcgaggtgttcgacgcactgctgagcgattcccattcctcacagggcctgtgctccatgcgagaaaatgaagcctatcaagccagctgcaaagaacgcttttttagcgaagaagaaaatggggtcccaattgcgcgagccgttctggtcgacatggagcccaaggtgattaatcagatgctgagcaaagccgcgcaaagtggtcagtggaaatacggacaacacgcctgcttttgccagaagcagggaagcgggaacaactgggcttatgggcgcgacaaggactccgcctgttacccggattggagtggcaccccgggacttcaatag

SEQ ID NO: 74241 - DNA, 1056 bp, Artificial Sequence
  derived and/or modified sequence
atgagcatcgtgacagtgcagctgggccagtgtggcaaccagattggatttgaggtgtttgatgccctgctgagtgacagccacagcagccagggcctgtgcagcatgagagaaaatgaggcctaccaggccagctgcaaggagcgcttcttcagcgaggaggagaatggagtgcccatcgcccgggctgtgctggtggacatggagcccaaggtgatcaaccagatgctgagcaaggccgcccagagcggccagtggaagtatggccagcacgcctgcttctgccagaagcagggcagcggcaacaactgggcctacggctacagcgtgcacggccccaggcatgaggagagcatcatgaacatcatcaggaaggaggtggagaagtgtgacagcttcagcggcttcttcatcatcatgtccatggccggcggcaccggcagcggcctgggcgcctttgtgacccagaacctggaggaccagtacagcaacagcctgaagatgaaccagatcatctggccctatggaactggagaggtgattgtgcagaactacaacagcatcctgaccctgagccacctgtaccgcagcagtgatgccctgctgctgcatgaaaatgatgccatccacaagatctgtgccaagctgatgaacatcaagcagatctccttcagtgacatcaaccaggtgctggcccaccagctgggctctgtgttccagcccacctacagcgctgagagcagcttccactacagaagaaaccccctggagggcttcaaggaccctgccctgtacacctcctggctgaagcctgtgaatgccttcaacgtgtggaagacccagagggccttcagcaaatatgagaagtctgctgtgctggtgagcaacagccagttcctggtgaagcccctggacatgattgtgggcaaggcctggaacatgtttgccagcaaggcctacatccaccagtacaccaagtttggaattgaggaggaggacttcctggacagcttcaccagcctggagcaggtggtggccagctactgcaacctgtag

SEQ ID NO: 74242 - DNA, 378 bp, Artificial Sequence
  derived and/or modified sequence
atgagcatcgtgacagtgcagctgggccagtgtggcaaccagattggatttgaggtgtttgatgccctgctgagtgacagccacagcagccagggcctgtgcagcatgagagaaaatgaggcctaccaggccagctgcaaggagcgcttcttcagcgaggaggagaatggagtgcccatcgcccgggctgtgctggtggacatggagcccaaggtgatcaaccagatgctgagcaaggccgcccagagcggccagtggaagtatggccagcacgcctgcttctgccagaagcagggcagcggcaacaactgggcctacggccgggacaaggacagcgcctgctacccagactggagcggcaccccaggcctgcagtag

SEQ ID NO: 74243 - DNA, 1056 bp, Artificial Sequence
  derived and/or modified sequence
atgagcatcgtgaccgtgcagctgggccagtgcggcaaccagatcggattcgaagtctttgatgccttgctctctgattcacattcttcccaagggctctgtagtatgcgggagaacgaggcctaccaagccagctgcaaggagcggttctttagtgaggaagagaacggggtgccaatcgcccgcgctgtgttagtagacatggaacctaaggtgatcaatcagatgttatccaaggccgcacagtctggtcagtggaagtacgggcagcacgcttgtttctgtcagaagcagggttcagggaacaattgggcctacgggtacagcgtgcacggtcccagacacgaagagtccatcatgaacatcattaggaaagaagtggaaaaatgcgactctttctcggggtttttcatcataatgtcaatggcggggggcacaggcagcggattaggagcctttgtgacccagaacctggaagaccaatactctaattctcttaagatgaatcaaattatctggccttatggcactggagaagtgatcgtccaaaattacaattcaatccttaccctgtctcacctataccggagctcagacgccttgctgttacacgagaacgacgcgatacacaaaatctgcgcaaagctaatgaatatcaagcagataagcttctccgacataaaccaggtcctcgcacaccagctgggatccgtgtttcaacccacgtattccgcagaatccagctttcactatagacggaacccattggagggattcaaggatccagccctctacacctcatggctaaagccggttaatgcatttaacgtttggaagacacagcgcgccttttctaaatatgaaaaatctgccgtcctggtcagtaactctcagtttctagttaaaccactcgacatgatagtaggaaaagcatggaatatgttcgcttcaaaggcatatatacaccagtatactaagttcggcatcgaggaagaggacttcttggactccttcacatccctcgaacaagtggtggcctcatactgcaacctctag

SEQ ID NO: 74244 - DNA, 378 bp, Artificial Sequence
  derived and/or modified sequence
atgagcatcgtgaccgtgcagctgggccagtgcggcaaccagatcggtttcgaggtctttgatgctctgttgagcgactctcactctagccaggggctgtgtagcatgagagaaaatgaggcatatcaggcctcttgcaaggaacgcttcttttctgaggaagaaaacggcgtaccaatagctcgtgctgtcctggtcgacatggaaccaaaggtaatcaatcagatgttatcaaaggccgcacagagcgggcagtggaaatacggccaacatgcttgtttctgtcagaagcagggctcaggaaataattgggcctacggaagggacaaggattcagcctgttatcctgactggtctggcaccccagggctacagtag

SEQ ID NO: 74245 - DNA, 1056 bp, Artificial Sequence
  derived and/or modified sequence
atgtctatcgtcactgtccaactaggacagtgcggaaatcagattggctttgaggtgttcgatgcgctgttgtccgattcacattccagtcaggggctgtgctccatgcgtgaaaacgaggcataccaggcatcttgcaaagaaagatttttttccgaggaagaaaacggggtaccgattgctcgggcagtgcttgttgacatggagcctaaagttattaaccaaatgctctcaaaagcagcacaaagcggccagtggaaatatgggcagcacgcctgcttttgtcagaaacaagggagcggcaacaactgggcgtatgggtactcagtgcacgggccacggcacgaggaaagtattatgaatatcattcggaaggaagttgaaaaatgcgatagtttcagcgggtttttcattattatgtctatggccggtggcactggttctggtctcggcgcttttgtgactcagaacctggaagaccagtattctaatagccttaagatgaaccagatcatttggccatacggaacaggggaggtcatcgttcaaaattataactccatcctcaccttatcccatctttatcgttctagcgacgcgctgctcctgcacgagaatgacgccattcataagatttgtgctaaactgatgaacattaagcagatcagcttctctgatatcaaccaagtcctggcccaccaactcgggtcagtctttcagccgacctatagtgctgaaagctcatttcattacagacggaaccctctggaaggctttaaggaccccgcactctacacatcttggctgaagccagtgaacgcattcaatgtgtggaagacacagagggctttctcaaagtacgaaaagagcgccgttttagtgtctaattctcaatttctggtgaagccgttggatatgatcgtaggcaaagcttggaacatgtttgccagtaaggcatatattcaccagtataccaagttcggaatagaagaggaggactttctcgatagtttcacaagtctggaacaggtggtggcctcatattgcaatctctag

SEQ ID NO: 74246 - DNA, 378 bp, Artificial Sequence
  derived and/or modified sequence
atgagcatcgtaactgttcagctcggacaatgtggtaaccagattggcttcgaggtgttcgatgccttgctcagcgattcgcacagtagccaggggctctgtagtatgagagaaaacgaagcatatcaggcctcttgcaaggagcggttcttttccgaggaagagaacggcgtacccatcgcaagggcagtattggttgatatggaacctaaggttattaaccagatgctcagcaaggcggctcagtccggtcagtggaaatacggacagcacgcttgcttctgtcagaagcagggcagcggcaacaactgggcctacgggagggacaaagattctgcgtgttacccagactggtcaggcacaccaggtctgcagtag

SEQ ID NO: 74247 - DNA, 1154 bp, Artificial Sequence
  derived and/or modified sequence
catgtcaattgtaacagtgcaacttggtcagtgtggcaatcagattggttttgaagtttttgatgctttgcttagtgactcacacagttcccagggactctgctctatgagagagaatgaggcatatcaagcatcttgcaaagaaagattcttcagtgaggaggagaatggagttccaattgcccgggctgttcttgttgacatggaacccaaagttatcaatcaaatgctgtcaaaggctgcccagtctggccaatggaaatatggtcaacatgcatgcttctgtcaaaaacaaggttctggaaacaactgggcatatggttactctgttcatggacccaggcatgaagaatctataatgaacataatccggaaggaagtggagaaatgtgactctttcagtggttttttcatcataatgagtatggctgggggcacaggatcaggattaggagctttcgttacacagaatttagaagatcagtactcaaactcattgaaaatgaatcagattatttggccttatggaactggtgaggttattgttcaaaactacaactccattttgacactttctcacttgtaccgatcttcagacgccctccttcttcatgagaatgatgccatccataagatctgtgcaaaactgatgaatatcaagcagatctcctttagtgatatcaatcaagtcctcgcacatcagctgggaagtgtgttccagcctacttattctgcagaaagctcatttcactacagacgaaatccactagagggatttaaagatccagctctgtatacttcctggttgaagcctgttaatgctttcaacgtgtggaaaacccagcgggcctttagcaaatatgagaagtctgcagtgttggtcagcaacagccagttcttagtaaaaccacttgatatgattgttgggaaggcatggaatatgtttgcttcaaaagcctacattcatcagtacacaaaatttggaatcgaagaagaggactttttagacagtttcacgtcattagagcaggttgttgccagttactgtaatctctgatcttgaacaatgggaaaagtataccttaaggcatttctggactaaaatattttcaatactattttctctgtaaagttttcaaagttctccatcctgg

SEQ ID NO: 74248 - protein, 199 aa, Artificial Sequence
  derived and/or modified sequence
MSIVTVQLGQCGNQIGFEVFDALLSDSHSSQGLCSMRENEAYQASCKERFFSEEENGGIDRHVWPPLSGLPPLSKMSLNKDLHFNTSIANLVILRGKDVQSADVEGFKDPALYTSWLKPVNAFNVWKTQRAFSKYEKSAVLVSNSQFLVKPLDMIVGKAWNMFASKAYIHQYTKFGIEEEDFLDSFTSLEQVVASYCNL

SEQ ID NO: 74249 - DNA, 600 bp, Artificial Sequence
  derived and/or modified sequence
atgagcatcgtgaccgtgcagctgggccagtgcggcaaccagatcggcttcgaggtgttcgacgccctgctgagcgacagccacagcagccagggcctgtgcagcatgagagagaacgaggcctaccaggccagctgcaaggagagattcttcagcgaggaggagaacggcggcatcgacagacacgtgtggccccccctgagcggcctgccccccctgagcaagatgagcctgaacaaggacctgcacttcaacaccagcatcgccaacctggtgatcctgagaggcaaggacgtgcagagcgccgacgtggagggcttcaaggaccccgccctgtacaccagctggctgaagcccgtgaacgccttcaacgtgtggaagacccagagagccttcagcaagtacgagaagagcgccgtgctggtgagcaacagccagttcctggtgaagcccctggacatgatcgtgggcaaggcctggaacatgttcgccagcaaggcctacatccaccagtacaccaagttcggcatcgaggaggaggacttcctggacagcttcaccagcctggagcaggtggtggccagctactgcaacctgtag

SEQ ID NO: 74250 - DNA, 714 bp, Artificial Sequence
  derived and/or modified sequence
atgaacatcaagcagatcagcttcagcgacatcaaccaggtgctggcccaccagctgggcagcgtgttccagcccacctacagcgccgagagcagcttccactacagaagaaaccccctgggcgacctgatggagcacctggtgccccaccccgagttcaagatgctgagcgtgagaaacatcccccacatgagcgagaacagcctggcctacaccaccttcacctgggccggcctgctgaagcacctgagacagatgctgatcagcaacgccaagatggaggagggcatcgacagacacgtgtggccccccctgagcggcctgccccccctgagcaagatgagcctgaacaaggacctgcacttcaacaccagcatcgccaacctggtgatcctgagaggcaaggacgtgcagagcgccgacgtggagggcttcaaggaccccgccctgtacaccagctggctgaagcccgtgaacgccttcaacgtgtggaagacccagagagccttcagcaagtacgagaagagcgccgtgctggtgagcaacagccagttcctggtgaagcccctggacatgatcgtgggcaaggcctggaacatgttcgccagcaaggcctacatccaccagtacaccaagttcggcatcgaggaggaggacttcctggacagcttcaccagcctggagcaggtggtggccagctactgcaacctgtag

SEQ ID NO: 74251 - DNA, 600 bp, Artificial Sequence
  derived and/or modified sequence
atgtccattgtgaccgtgcagttaggccagtgcgggaaccagattggattcgaggtttttgatgccctactgagcgactcccactcatcgcaaggtctgtgttctatgagggaaaacgaagcctatcaagccagttgcaaagagagattttttagtgaggaggagaacggcgggattgatcggcacgtttggccaccactcagcgggcttccccccctctctaagatgtctctgaataaggacctgcatttcaacacgtcaatcgccaaccttgtaattttgcggggcaaggacgtgcagagtgccgatgtggaaggcttcaaagacccagcattatataccagctggctcaaacctgtaaatgctttcaacgtgtggaaaacccagcgggcctttagcaaatacgaaaagagtgcagtgttggtatccaattctcaattcctggtcaagcccctcgacatgatcgtggggaaagcttggaacatgtttgcttctaaggcatacatccatcagtataccaagtttggtattgaggaagaagattttctggatagcttcacatcgttagagcaggttgtggccagctactgcaacctgtag

SEQ ID NO: 74252 - DNA, 714 bp, Artificial Sequence
  derived and/or modified sequence
atgaacatcaagcaaatctctttttctgacattaaccaggtccttgctcatcagctaggatctgtgttccagcctacctatagtgcagagagcagttttcactaccgacgcaacccacttggcgacctcatggaacaccttgtaccacacccagaatttaagatgctgtccgtgcggaacattccacatatgagcgagaattcactggcgtacacaacattcacctgggccgggttactgaagcatctgaggcagatgctcatatcaaacgcgaagatggaagagggaatagacaggcacgtctggcctcctcttagcgggttacctcctctgtccaagatgtctctgaacaaagacctgcactttaacacatccatcgctaacctcgtaattttgcggggaaaggatgtgcaaagtgctgatgttgaaggtttcaaagatcctgcactgtatacctcctggctgaagccagtgaatgccttcaatgtttggaagacccagcgcgcgttctcaaaatatgagaagtcagctgttctggtaagtaattcccagttcctggttaagccattggacatgatagtgggcaaagcctggaatatgttcgccagcaaggcctacatccaccagtacacgaaattcggcattgaagaggaggacttcttagacagtttcaccagccttgagcaggttgtggcctcatactgcaatctctag

SEQ ID NO: 74253 - DNA, 600 bp, Artificial Sequence
  derived and/or modified sequence
atgagcatcgtgacagtgcagctgggccagtgtggcaaccagattggatttgaggtgtttgatgccctgctgagtgacagccacagcagccagggcctgtgcagcatgagagaaaatgaggcctaccaggccagctgcaaggagcgcttcttcagcgaggaggagaatggaggcatcgacagacatgtgtggccacccctgagcggcctgccccccctgagcaagatgagcctgaacaaggacctgcacttcaacaccagcatcgccaacctggtgatcctgcggggcaaggatgtgcagagcgcagatgtggagggcttcaaggaccctgccctgtacacctcctggctgaagcctgtgaatgccttcaacgtgtggaagacccagagggccttcagcaaatatgagaagtctgctgtgctggtgagcaacagccagttcctggtgaagcccctggacatgattgtgggcaaggcctggaacatgtttgccagcaaggcctacatccaccagtacaccaagtttggaattgaggaggaggacttcctggacagcttcaccagcctggagcaggtggtggccagctactgcaacctgtag

SEQ ID NO: 74254 - DNA, 714 bp, Artificial Sequence
  derived and/or modified sequence
atgaacatcaagcagatctccttcagtgacatcaaccaggtgctggcccaccagctgggctctgtgttccagcccacctacagcgctgagagcagcttccactacagaagaaaccccctgggggacctgatggagcacctggtgccccaccctgagttcaagatgctgtctgtgaggaacatcccccacatgtctgagaacagcctggcctacaccaccttcacctgggccggcctgctgaagcacctgcggcagatgctgatcagcaatgccaagatggaggagggcatcgacagacatgtgtggccacccctgagcggcctgccccccctgagcaagatgagcctgaacaaggacctgcacttcaacaccagcatcgccaacctggtgatcctgcggggcaaggatgtgcagagcgcagatgtggagggcttcaaggaccctgccctgtacacctcctggctgaagcctgtgaatgccttcaacgtgtggaagacccagagggccttcagcaaatatgagaagtctgctgtgctggtgagcaacagccagttcctggtgaagcccctggacatgattgtgggcaaggcctggaacatgtttgccagcaaggcctacatccaccagtacaccaagtttggaattgaggaggaggacttcctggacagcttcaccagcctggagcaggtggtggccagctactgcaacctgtag

SEQ ID NO: 74255 - DNA, 600 bp, Artificial Sequence
  derived and/or modified sequence
atgagcatcgtgaccgtgcagctgggccagtgcggcaaccagatcggtttcgaggtgttcgatgctctcctctccgatagtcactcaagccagggactgtgctctatgagggaaaacgaggcctatcaagcatcctgcaaagagcggtttttctccgaggaggaaaatggaggaatagacagacatgtgtggccacctttaagcggtctccctccactttccaagatgtcactcaataaagatctccacttcaacacatcaatagccaacttagtaatcctgagaggaaaagatgttcagagcgctgatgtggagggattcaaagaccctgctctatacacttcatggctcaagccagtcaacgccttcaatgtttggaagacacagagagccttttcaaaatacgagaaatctgccgtcctggtctccaacagccagttcctggttaagccgcttgatatgatcgtcggaaaggcatggaatatgttcgcgagcaaggcatacatccaccagtataccaagttcggaattgaggaagaagacttcctcgactcctttacgtccctggagcaggttgttgcctcttattgtaatctgtag

SEQ ID NO: 74256 - DNA, 714 bp, Artificial Sequence
  derived and/or modified sequence
atgaacatcaagcagatcagcttcagcgacatcaaccaggtgctggctcaccaactgggttccgtttttcagcccacctactcagccgagagctctttccattacagacggaaccccctgggtgacctgatggaacacctggttccccaccctgaattcaaaatgttgagtgtacggaacatcccccacatgtctgagaatagccttgcttatacaacttttacttgggcggggctgctgaagcacctgagacaaatgctgatttctaacgcgaagatggaagagggcatcgatcgacacgtgtggccaccactgtccgggttgccccctctgtccaaaatgtccttgaataaggacctgcattttaatactagtatagctaacctggtgatactcagaggcaaagacgtgcaatctgctgatgtggagggtttcaaggatccagccctttataccagctggctgaaacctgtcaatgccttcaacgtgtggaagactcagagagccttcagcaaatacgaaaaaagtgccgtcctagtgtctaatagccagtttcttgtgaagcctctagatatgatcgtgggtaaagcgtggaacatgttcgcttcaaaggcttacatccatcagtatactaaattcggcatcgaggaggaggactttcttgactcttttaccagcttggaacaggtcgtggcctcctactgcaacctatag

SEQ ID NO: 74257 - DNA, 600 bp, Artificial Sequence
  derived and/or modified sequence
atgagcattgtgaccgtgcagctgggccaatgtggtaaccaaatcggctttgaggtcttcgatgccctgttgtcagactctcatagcagccaaggactctgttccatgcgggagaatgaggcataccaggcaagctgtaaggagcggttcttttcggaagaggagaacggaggcatagatagacacgtatggccaccactctccgggctgcctccactatctaagatgtcccttaataaggacctgcatttcaacacctccatcgcaaacctggtgatcctgcgcggaaaagacgtccagtctgctgatgtcgagggctttaaagacccggcactttatacctcatggctgaagccagtcaacgcctttaacgtttggaagacccagagggcattttcgaaatatgagaagtcggctgtcctggtgtcaaactcgcagtttctagtcaagcccctcgatatgatcgtcggtaaggcttggaatatgttcgcttcgaaggcttacatacaccagtataccaagtttggtatcgaggaggaggattttttggactcattcacaagcttggaacaggtcgttgccagctactgcaatctgtag

SEQ ID NO: 74258 - DNA, 714 bp, Artificial Sequence
  derived and/or modified sequence
atgaacataaaacagatctctttttccgatatcaatcaggtgctagcccaccaactgggcagcgtcttccagcccacgtacagtgctgagtcatccttccactaccggagaaaccctcttggcgatttaatggagcatctcgtcccacatcccgaattcaagatgttgtcagtgaggaacattcctcacatgagtgaaaacagccttgcctatactacttttacttgggcgggtctgctgaaacacctgaggcagatgctcatatcaaacgccaagatggaagagggcatcgaccgacacgtgtggcctccccttagtggattaccgcctctcagcaagatgtcgctgaacaaagacttgcatttcaatacatctatcgccaatttggtcatcctaagagggaaggacgttcagtcagcagacgtcgaaggctttaaggacccagctctgtatacaagctggcttaagccagtgaatgcctttaatgtctggaagacccagagggcattcagtaaatacgaaaagagtgccgtgctcgtgtccaactctcaatttctcgtcaaacctctggacatgattgtgggcaaggcctggaacatgtttgcttcaaaagcgtatatccatcagtacactaagttcggtattgaagaggaggattttctcgattcgttcacttcgctggagcaagtggtggcctcgtattgcaacttgtag

SEQ ID NO: 74259 - DNA, 1710 bp, Artificial Sequence
  derived and/or modified sequence
agctggagcgttcggtggacagtgagcatgcgtaccatatctgaagttcgtaaattgaaattgaacatgcgtaattaatctttctgaataggaaaaaatatatacacaacaaaactctccgtttatggaacatgcgcatttgttctcagtaagtttttcgttttgaaagtgagcatgcgcatggtgagtaggttggtccgaagtttgaaccggacagaagcgctggtcggcgtctggcggttgtttttagaggtaatacacctagtttgtggctcagcatgtcaattgtaacagtgcaacttggtcagtgtggcaatcagattggttttgaagtttttgatgctttgcttagtgactcacacagttcccagggactctgctctatgagagagaatgaggcatatcaagcatcttgcaaagaaagattcttcagtgaggaggagaatggaggtattgataggcatgtatggcctcctttatcaggacttcctcctcttagtaaaatgtctctcaacaaggacctgcattttaacacttccattgctaacttggtcattcttcgtgggaaagatgtgcaaagtgcagatgtggagggatttaaagatccagctctgtatacttcctggttgaagcctgttaatgctttcaacgtgtggaaaacccagcgggcctttagcaaatatgagaagtctgcagtgttggtcagcaacagccagttcttagtaaaaccacttgatatgattgttgggaaggcatggaatatgtttgcttcaaaagcctacattcatcagtacacaaaatttggaatcgaagaagaggactttttagacagtttcacgtcattagagcaggttgttgccagttactgtaatctctgatcttgaacaatgggaaaagtataccttaaggcatttctggactaaaatattttcaatactattttctctgtaaagttttcaaagttctccatcctggctaacacggtgaaacaccgtctctaccagaaaatacaaaaaattagccaggcgcggtggcgggtgcctgtagtcccagctactcgggaggctgaggcaggagaatgacgtgaacccaggaggcggagcttgcagtgagccgagatcgcgccactgcactccagcctgggcgacagagcgagactccgtctcaaaaaaaaaaaaaaaaaaaaatgttttcaaagttccattctgttaaagtaaccacgtagaatgctgagtctattctgcatactatgcccacagaaaaggaagaaaactttttaaaatggagaatcgcatgttttcaatgaaaacattcacttggtatttcatttgtaagaaaaaaaaatggtgcttttataaagaactttggggaaacactttgctgaaatgttgggactctggaactagccaagaaaagagaatattctctttgtctacatgttcctaaatctttactccaaaacaactccaaaaacaactcacaaagcatgaaccaaactttcacagcataatttcaagctaaggaattgtaattctgtacttaatatattcatgtttgaaatgaatgctttgaaccacaggagggagatgttgtcaaatgctacagtgtgaacatgtattttgaatattctgtaacagggcaagtttccactctaagcagctatttaaaaataaatatgaggattttggtaataaatgcttatgcttaagt

SEQ ID NO: 74260 - protein, 941 aa, Artificial Sequence
  derived and/or modified sequence
MIRNSLCQPSRCLDGYLFFNRKMFGARTHGFHILMAMLIGIHCEEDVNECSSNPCQNGGTCENLPGNYTCHCPFDNLSRTFYGGRDCSDILLGCTHQQCLNNGTCIPHFQDGQHGFSCLCPSGYTGSLCEIATTLSFEGDGFLWVKSGSVTTKGSVCNIALRFQTVQPMALLLFRSNRDVFVKLELLSGYIHLSIQVNNQSKVLLFISHNTSDGEWHFVEVIFAEAVTLTLIDDSCKEKCIAKAPTPLESDQSICAFQNSFLGGLPVGMTSNGVALLNFYNMPSTPSFVGCLQDIKIDWNHITLENISSGSSLNVKAGCVRKDWCESQPCQSRGRCINLWLSYQCDCHRPYEGPNCLREYVAGRFGQDDSTGYVIFTLDESYGDTISLSMFVRTLQPSGLLLALENSTYQYIRVWLERGRLAMLTPNSPKLVVKFVLNDGNVHLISLKIKPYKIELYQSSQNLGFISASTWKIEKGDVIYIGGLPDKQETELNGGFFKGCIQDVRLNNQNLEFFPNPTNNASLNPVLVNVTQGCAGDNSCKSNPCHNGGVCHSRWDDFSCSCPALTSGKACEEVQWCGFSPCPHGAQCQPVLQGFECIANAVFNGQSGQILFRSNGNITRELTNITFGFRTRDANVIILHAEKEPEFLNISIQDSRLFFQLQSGNSFYMLSLTSLQSVNDGTWHEVTLSMTDPLSQTSRWQMEVDNETPFVTSTIATGSLNFLKDNTDIYVGDRAIDNIKGLQGCLSTIEIGGIYLSYFENVHGFINKPQEEQFLKISTNSVVTGCLQLNVCNSNPCLHGGNCEDIYSSYHCSCPLGWSGKHCELNIDECFSNPCIHGNCSDRVAAYHCTCEPGYTGVNCEVDIDNCQSHQCANGATCISHTNGYSCLCFGNFTGKFCRQSRLPSTVCGNEKTNLTCYNGGNCTEFQTELKCMCRPGFTGE

SEQ ID NO: 74261 - protein, 1294 aa, Artificial Sequence
  derived and/or modified sequence
MALKNINYLLIFYLSFSLLIYIKNSFCNKNNTRCLSNSCQNNSTCKDFSKDNDCSCSDTANNLDKDCDNMKDPCFSNPCQGSATCVNTPGERSFLCKCPPGYSGTICETTIGSCGKNSCQHGGICHQDPIYPVCICPAGYAGRFCEIDHDECASSPCQNGAVCQDGIDGYSCFCVPGYQGRHCDLEVDECASDPCKNEATCLNEIGRYTCICPHNYSGYTGAQCEIDLNECNSNPCQSNGECVELSSEKQYGRITGLPSSFSYHEASGYVCICQPGFTGIHCEEDVNECSSNPCQNGGTCENLPGNYTCHCPFDNLSRTFYGGRDCSDILLGCTHQQCLNNGTCIPHFQDGQHGFSCLCPSGYTGSLCEIATTLSFEGDGFLWVKSGSVTTKGSVCNIALRFQTVQPMALLLFRSNRDVFVKLELLSGYIHLSIQVNNQSKVLLFISHNTSDGEWHFVEVIFAEAVTLTLIDDSCKEKCIAKAPTPLESDQSICAFQNSFLGGLPVGMTSNGVALLNFYNMPSTPSFVGCLQDIKIDWNHITLENISSGSSLNVKAGCVRKDWCESQPCQSRGRCINLWLSYQCDCHRPYEGPNCLREYVAGRFGQDDSTGYVIFTLDESYGDTISLSMFVRTLQPSGLLLALENSTYQYIRVWLERGRLAMLTPNSPKLVVKFVLNDGNVHLISLKIKPYKIELYQSSQNLGFISASTWKIEKGDVIYIGGLPDKQETELNGGFFKGCIQDVRLNNQNLEFFPNPTNNASLNPVLVNVTQGCAGDNSCKSNPCHNGGVCHSRWDDFSCSCPALTSGKACEEVQWCGFSPCPHGAQCQPVLQGFECIANAVFNGQSGQILFRSNGNITRELTNITFGFRTRDANVIILHAEKEPEFLNISIQDSRLFFQLQSGNSFYMLSLTSLQSVNDGTWHEVTLSMTDPLSQTSRWQMEVDNETPFVTSTIATGSLNFLKDNTDIYVGDRAIDNIKGLQGCLSTIEIGGIYLSYFENVHGFINKPQEEQFLKISTNSVVTGCLQLNVCNSNPCLHGGNCEDIYSSYHCSCPLGWSGKHCELNIDECFSNPCIHGNCSDRVAAYHCTCEPGYTGVNCEVDIDNCQSHQCANGATCISHTNGYSCLCFGNFTGKFCRQSRLPSTVCGNEKTNLTCYNGGNCTEFQTELKCMCRPGFTGEWCEKDIDECASDPCVNGGLCQDLLNKFQCLCDVAFAGERCEVDLADDLISDIFTTIGSVTVALLLILLLAIVASVVTSNKRATQGTYSPSRQEKEGSRVEMWNLMPPPAMERLI

SEQ ID NO: 74262 - DNA, 3885 bp, Artificial Sequence
  derived and/or modified sequence
atggcgctcaagaacataaactacttgttgattttttatctgagctttagtttgttaatttatatcaagaacagcttctgcaacaagaacaacacccgctgtctgtctaacagctgccaaaacaactcgacctgtaaagatttcagtaaagacaacgactgctcatgctccgacaccgccaataaccttgataaggattgtgacaatatgaaagacccttgctttagcaacccttgccagggctcggcgacatgcgtgaatacacctggggaacggtccttcctttgcaagtgtcctcctggatattccgggacaatctgcgaaaccacaattggctcgtgcggcaagaattcttgtcagcatggggggatctgccaccaggatcctatctaccccgtttgcatctgcccagcgggctacgccggtcggttctgcgagattgatcacgacgaatgcgctagcagcccatgccagaatggtgctgtctgccaggacgggattgatggctacagctgcttctgtgtgcctggttaccagggacgccactgtgatctcgaggtggacgaatgtgctagtgacccgtgtaagaacgaagccacgtgcctgaacgagatcgggaggtatacatgtatttgcccacataactactcaggctatactggcgcccaatgtgagatcgacctgaacgagtgtaatagcaacccttgtcagtctaacggagagtgtgtggagctgtccagcgaaaagcagtacggacgtattaccggcctgcctagctcatttagctaccatgaagcaagtggatatgtgtgcatatgccagccaggattcaccggtatccactgtgaagaagacgtcaacgagtgctcctccaacccttgccaaaacgggggcacctgcgaaaaccttcccgggaactacacctgccattgcccgttcgataatttaagcaggacattttatggggggcgagattgttcggatatcttgctcggttgtacacaccagcagtgcttgaacaacggaacgtgcatcccacattttcaggatggacagcacggtttctcatgcctctgcccatctggttataccggatccctatgtgaaattgccactaccctttcttttgagggagacgggttcctttgggttaaaagtggcagcgttaccaccaaagggtccgtgtgcaacattgcactgaggttccagaccgttcaaccaatggctctcttactctttcgcagcaaccgggacgtattcgtaaaactggagttgttgtcgggatatattcacctaagcattcaggttaataatcagtccaaagtcctccttttcatctcccacaatactagtgatggtgagtggcattttgtggaggtcattttcgctgaggctgtcaccctcacactcatcgatgacagttgtaaggaaaagtgcattgccaaagctcctactcctctcgagtcagaccagtccatatgtgcctttcagaatagctttctcggcgggctgcccgtaggtatgacgtcaaacggagtcgctttgttaaacttttacaacatgccctcaaccccctcatttgtcggttgcttgcaggatatcaagatagactggaaccacattactctcgaaaacatctcaagtggcagctctcttaacgtcaaagcaggttgcgtgcgcaaggattggtgcgagagccagccatgccagtctagaggtagatgtattaatctctggctgtcttatcagtgcgattgccaccggccttatgaaggcccaaattgtttgagggaatacgtggccggtaggtttggccaggacgattcaaccgggtacgtgatcttcacactggatgaaagctatggagataccatttcactgtccatgtttgtccgaacccttcagccatctggtcttctattagccttggagaattcaacataccagtacattagggtgtggctcgaaaggggaaggctcgctatgctaactcccaattcgccaaaactggtggttaagttcgttctaaatgacggaaatgtacacttaatcagtcttaagatcaagccctataagatcgagttgtatcagtcttctcagaatctcggcttcatcagcgccagtacctggaagatagagaagggggacgtgatatacatcggaggccttccggataagcaggagactgagctgaacggggggttttttaaaggctgcatccaggatgtccgtctaaacaatcagaatttggaattctttcctaaccctactaacaatgcttctttgaatccggttctggtcaacgtcactcagggctgtgccggcgacaacagctgtaaaagcaatccttgccacaacgggggcgtctgtcacagtcgttgggacgactttagttgttcctgtccagctctgacctccggtaaggcttgcgaagaagtgcagtggtgcggcttctcgccgtgcccacacggcgcccagtgtcaacctgtcctgcagggatttgaatgtatcgctaatgcggttttcaatgggcagtctggccagatcttatttaggtccaacggaaatatcacccgcgagctgactaatataacttttgggttccggactagagacgcaaacgtcattattcttcatgcggaaaaggaaccggaattcctgaatatctccattcaggactcaaggttgtttttccagctgcagtctggcaattctttctatatgttgtccttgacctctctgcagtccgtgaatgatgggacctggcatgaagtgacactgtctatgacagacccactgtcccagaccagccggtggcagatggaggtagacaatgagaccccgtttgtgactagcactattgcgactggttcactgaactttctgaaagataacactgacatttacgtgggagaccgagccatcgataacattaagggcttgcaggggtgcctaagcacaatagaaatcggaggaatttatctctcttatttcgagaacgtgcacgggtttataaataagccgcaggaagaacagttcctgaaaatctcaacgaattctgttgtgaccggctgcttgcagctaaacgtttgtaattccaacccctgtctgcacggaggcaattgcgaggacatatatagctcctatcattgttcttgccccctgggctggagcggcaaacactgcgagcttaacattgatgagtgcttctctaacccctgtatccatgggaattgcagcgatagagttgctgcctatcattgcacctgcgagcctggttatactggagtgaattgcgaggtggacatcgacaactgccaatctcatcagtgcgcaaatggcgcgacatgcatcagccatacaaatggatacagttgcctttgtttcggaaactttactggtaaattctgtcgccaaagtagattgccctcaacagtttgtgggaatgagaagacgaaccttacctgctacaacggggggaactgtaccgaattccagaccgagctgaagtgtatgtgccggcccggtttcactggcgagtggtgtgagaaggacattgacgagtgcgccagcgatccctgcgtcaatggtggcctgtgccaggatctgctgaataagttccagtgtttgtgcgacgtggcatttgccggtgagaggtgcgaggtcgacctggcggacgacctcatcagcgacatcttcacaactattggaagcgttactgtcgctctactgctcatcttgctgctggctatcgtggcgtcagttgtgactagcaacaagcgggcgacacaaggcacatactcaccttctaggcaggaaaaggagggcagccgcgtcgagatgtggaatctgatgccccctcccgcaatggagcgactgatctag

SEQ ID NO: 74263 - DNA, 3885 bp, Artificial Sequence
  derived and/or modified sequence
atggccctgaagaacatcaactacctgctgatcttctacctgtccttcagcctgctgatctacatcaagaacagcttctgcaacaagaacaacacccgctgcctgagcaacagctgccagaacaacagcacctgcaaggacttcagcaaggacaatgactgcagctgcagcgacacagccaacaacctggacaaggactgtgacaacatgaaggacccctgcttcagcaacccctgccagggcagcgccacctgtgtgaacaccccaggagagaggagcttcctgtgcaagtgccccccaggctacagcggcaccatctgtgagaccaccatcggcagctgtgggaagaacagctgccagcacggcggcatctgccaccaggaccccatctaccctgtgtgcatctgcccagctggctacgccggccgcttctgtgaaattgaccatgatgaatgtgccagcagcccctgccagaatggagctgtgtgccaggacggcattgatggctacagctgcttctgtgtgcccggctaccagggccgccactgtgacctggaggtggatgaatgtgccagtgacccctgcaagaatgaggccacctgcctgaatgaaattggccgctacacctgcatctgcccccacaactacagcggctacaccggggcccagtgtgaaattgacctgaatgaatgcaacagcaacccctgccagagcaatggagaatgtgtggagctgagcagcgagaagcagtatggccgcatcaccggcctgcccagcagcttctcctaccacgaggccagcggctacgtgtgcatctgccagcccggcttcaccggcatccactgtgaggaggatgtgaatgaatgtagcagcaacccctgccagaatggaggcacctgtgagaacctgcccggcaactacacctgccactgcccctttgacaacctgagcaggaccttctatggaggccgggactgcagcgacatcctgctgggctgcacccaccagcagtgcctgaacaacggcacctgcatcccccacttccaggacggccagcacggcttcagctgcctgtgccccagcggctacacaggcagcctgtgtgagatcgccaccaccctgagctttgaaggagatggcttcctgtgggtgaagagcggctctgtgaccaccaagggctctgtgtgcaacatcgccctgcgcttccagacagtgcagcccatggccctgctgctcttccgcagcaacagagatgtgtttgtgaagctggagctgctgagcggctacatccacctgagcatccaggtgaacaaccagagcaaggtgctgctcttcatcagccacaacaccagtgatggagagtggcactttgtggaggtgatctttgctgaggccgtgaccctgaccctgattgatgacagctgcaaggagaagtgcatcgccaaggcccccacccccctggagagtgaccagagcatctgtgccttccagaacagcttcctgggcggcctgcctgtgggcatgaccagcaatggagtggccctgctgaacttctacaacatgcccagcacccccagctttgtgggctgcctgcaggacatcaagattgactggaaccacatcaccctggagaacatcagcagcggcagcagcctgaatgtgaaggccggctgtgtgaggaaggactggtgtgagagccagccctgccagagccggggccgctgcatcaacctgtggctgagctaccagtgtgactgccaccggccctatgagggccccaactgcctgcgggagtatgtggccggccgcttcggccaggatgacagcacaggctacgtgatcttcaccctggatgagagctatggagacaccatcagcctgtccatgtttgtgaggaccctgcagcccagcggcctgctgctggccctggagaacagcacctaccagtacatccgggtgtggctggagcggggccgcctggccatgctgacccccaacagccccaagctggtggtgaagtttgtgctgaatgatggaaatgtgcacctgatcagcctgaagatcaagccctacaagattgagctgtaccagagcagccagaacctgggcttcatcagcgccagcacctggaagattgagaagggagatgtgatctacatcggcggcctgcctgacaagcaggagacagagctgaatggaggcttcttcaagggctgcatccaggatgtgcggctgaacaaccagaacctggagttcttccccaaccccaccaacaatgccagcctgaaccctgtgctggtgaatgtgacccagggctgtgccggggacaacagctgcaagagcaacccctgccacaacggcggcgtgtgccacagccgctgggatgacttcagctgcagctgcccagccctgaccagcggcaaggcctgtgaggaggtgcagtggtgtggcttcagcccctgcccccatggagcccagtgccagcctgtgctgcagggctttgaatgtattgccaatgctgtgttcaacggccagagcggccagatcctcttccgcagcaatggaaacatcacccgggagctgaccaacatcaccttcggcttccgcaccagagatgccaacgtcatcatcctgcacgccgagaaggagcctgagttcctgaacatcagcatccaggacagccgcctcttcttccagctgcagagcggcaacagcttctacatgctgagcctgaccagcctgcagagcgtgaatgatggcacctggcatgaggtgaccctgtccatgacagaccccctgagccagaccagccgctggcagatggaggtggacaatgagaccccatttgtgaccagcaccatcgccaccggcagcctgaacttcctgaaggacaacacagacatctacgtgggggaccgggccatcgacaacatcaagggcctgcagggctgcctgagcaccatcgagatcggcggcatctacctgagctactttgaaaatgtgcacggcttcatcaacaagccccaggaggagcagttcctgaagatcagcaccaacagcgtggtgacaggctgcctgcagctgaatgtgtgcaacagcaacccctgcctgcacggcggcaactgtgaggacatctacagcagctaccactgcagctgccccctgggctggagcggcaagcactgtgagctgaacattgatgagtgcttcagcaacccctgcatccacggcaactgcagcgacagagtggccgcctaccactgcacctgtgagcccggctacacaggagtgaactgtgaggtggacatcgacaactgccagagccaccagtgtgccaatggagccacctgcatcagccacaccaacggctacagctgcctgtgctttggaaacttcaccgggaagttctgccggcagagccggctgcccagcacagtgtgtggaaatgagaagaccaacctgacctgctacaacggcggcaactgcacagagttccagacagagctgaagtgcatgtgcaggcctggcttcaccggggagtggtgtgagaaggacattgatgaatgtgccagtgacccctgtgtgaatggaggcctgtgccaggacctgctgaacaagttccagtgcctgtgtgatgtggcctttgctggggagcgctgtgaggtggacctggctgatgacctgatcagtgacatcttcaccaccatcggctctgtgacagtggccctgctgctgatcctgctgctggccatcgtggcctctgtggtgaccagcaacaagagggccacccagggcacctacagccccagccggcaggagaaggagggcagccgggtggagatgtggaacctgatgcctcctccagccatggagcggctcatctag

SEQ ID NO: 74264 - DNA, 3885 bp, Artificial Sequence
  derived and/or modified sequence
atggccctgaagaacatcaactacctgctgatcttctacctgagcttctccctgctaatctatatcaagaactctttctgtaataaaaataacactcggtgtctcagcaattcatgccagaataattccacctgtaaggacttctctaaggataacgactgctcatgcagtgatactgcaaacaacctcgacaaggattgcgataacatgaaggacccctgtttctctaatccgtgccagggaagcgctacctgtgtgaatactcccggcgaacgatcttttctgtgtaagtgcccacccggatactccgggactatttgtgagactaccatcgggtcatgtgggaagaacagttgccagcatgggggaatctgtcatcaggatccaatttacccagtatgtatatgtccggcgggctatgctggcaggttctgtgaaattgaccatgatgagtgtgctagctcaccctgtcagaacggcgctgtgtgtcaagacggcattgatggctatagctgcttctgtgttcctggctaccagggacggcactgcgatctcgaagtggatgaatgcgcctccgatccatgcaagaacgaggcaacatgcctgaacgaaataggccggtatacctgcatttgtccgcacaattatagcggatataccggagcacagtgtgagattgatctgaacgagtgcaatagcaatccatgccaatctaatggggagtgcgtggaacttagcagtgagaagcagtacggaagaattaccgggttgccctcctcattctcgtaccacgaggcgtccggctacgtttgtatctgccagcctgggtttacgggcatccactgtgaagaggacgtcaacgagtgttcctccaacccctgtcagaacggcggcacatgtgagaatctaccaggcaattatacatgtcactgcccattcgacaacctgagcagaaccttttacggcggccgagactgttcagacatcttgctgggatgcacacatcagcagtgcctgaacaatggaacttgtatccctcactttcaggatggccagcacggattcagctgtttgtgcccctccgggtatacaggctccctttgcgagatcgctaccaccctatcctttgagggcgatgggtttctttgggtcaagtctggctcagtgacgaccaagggcagcgtgtgcaacattgcgctgcgttttcagactgttcagccgatggctctattgctgtttaggagtaaccgggacgtctttgtgaagttggagttgctcagtgggtatattcacctgtcaattcaagtcaacaatcaatctaaggtgctcctgttcatatctcataatacctctgatggtgagtggcacttcgtcgaggtgatttttgctgaagctgttacactcacactaattgatgatagttgcaaggaaaagtgtatcgctaaggcaccaacaccgttggagagcgaccaatccatttgcgcctttcaaaattcgttcttgggaggactgcctgtggggatgacgtctaatggagtggcactgctgaacttttataacatgcccagcacccccagttttgtaggctgtctgcaggacatcaaaatcgactggaatcacataaccctggagaacattagttctggcagcagtttaaacgtaaaggccggttgcgtgcgaaaagactggtgcgaatctcagccctgtcaaagcagggggagatgtattaatctgtggctgtcttatcagtgcgattgtcatcggccttacgaggggcccaattgcctgcgggagtacgtggcaggccggtttggtcaggatgattcaaccggatacgtaatttttactttggatgagagttatggcgatacaatctctctgtctatgtttgtcaggacactccaaccatcggggctgctgttagcactagaaaacagcacatatcagtacatccgagtgtggctggagagaggaaggctggctatgctcactcctaactcacccaagctggtagtcaaatttgtccttaacgacgggaacgtgcatcttatctcccttaaaattaaaccctacaagatcgagttgtatcagtcatcccagaatctcggtttcattagcgcttcaacgtggaagatcgaaaaaggcgacgtgatctacataggaggactgcccgataagcaggaaactgaactgaatgggggatttttcaagggctgcatccaggacgtgagactcaacaatcagaacctcgaattcttccctaatccaactaacaatgctagcctgaacccagtgctcgtgaatgtgacccaaggatgcgcgggcgacaatagctgcaagtccaatccttgtcacaacgggggtgtgtgtcactcaaggtgggacgacttttcttgttcctgccctgccttgacaagcgggaaggcgtgtgaggaagtccagtggtgtgggtttagcccctgccctcacggagcccagtgccagcccgttctgcagggattcgagtgtattgctaacgccgtgtttaacggccaatctggccagattttgtttcggtccaacgggaatataaccagggaactgaccaatataacattcggcttccgcactagggatgccaatgtcatcattctgcacgcggagaaagaaccagaatttctgaacatctcaatccaggacagccggttgttttttcagcttcagtctggtaattccttttacatgttgtctctgaccagcctgcagagcgtcaatgatgggacttggcacgaagtaaccctcagtatgactgaccctctcagtcagacttctcgttggcagatggaagtggataacgaaaccccgttcgtgacttccaccattgcaacaggctctctgaacttcctaaaggacaataccgatatttacgtcggagatcgcgcgattgataatattaagggactgcagggatgcctgagcaccatcgaaattgggggcatttatctgagttattttgaaaacgtccacggatttatcaataagccccaagaagaacagtttttaaagatctccacaaattctgtggtgaccggctgccttcagctaaacgtatgtaattctaatccatgcctgcatggtgggaactgtgaggacatatattccagttatcattgctcttgccctctgggctggtccggcaagcactgcgagctgaacatcgatgaatgtttttcgaatccatgtatccacggcaactgctcagatcgcgtcgccgcgtaccactgcacatgcgaaccaggctatactggagtgaactgcgaggtggacatcgataactgtcagtcgcatcagtgtgctaatggtgcaacatgcatcagccacaccaatgggtacagctgtttatgcttcggaaattttaccggaaagttctgccgccagtcccggttgccctcaacagtctgcgggaacgaaaaaactaacctgacctgctacaacggcgggaattgcacagaattccagacagaactgaaatgcatgtgccgtccaggattcaccggagaatggtgtgaaaaggacatagatgagtgcgctagcgatccatgcgtaaatggcggactgtgccaggacctgcttaataaattccagtgtctctgcgatgtggcctttgccggggagagatgtgaagttgatctggcggacgacctgattagtgatatattcaccactattggctcggtgaccgttgccctcctcctgatcctgctgctcgctatcgtggcttctgtcgtgacttccaacaaacgggccacccaggggacttattcgccgtcccggcaggagaaagagggctctagagttgagatgtggaatctcatgcccccacccgcaatggagaggctgatctag

SEQ ID NO: 74265 - DNA, 3885 bp, Artificial Sequence
  derived and/or modified sequence
atggctctgaagaatatcaattatttgttgatcttttaccttagtttttctctcctgatctacatcaagaattcattctgtaacaagaacaacacgcgttgtctgagtaactcttgccagaacaatagcacgtgcaaagatttctccaaggataatgactgcagctgttcggataccgctaacaatttggacaaagattgcgataacatgaaagatccttgcttcagcaatccttgtcagggatctgccacctgcgtcaatactcccggagagaggtccttcctgtgcaaatgcccgccagggtattccggcaccatctgtgagacgacaatcggcagttgcggcaagaacagctgccagcatgggggtatctgccaccaggatccgatatacccagtctgtatttgccctgcaggatacgcaggcaggttttgcgagattgaccatgacgaatgcgcatcgagtccgtgtcagaacggggctgtgtgtcaggatggcattgacggatattcttgtttttgtgtccctggttaccaggggcgtcactgcgacctggaagtggatgagtgcgcctccgacccctgtaagaatgaggccacctgcctcaacgagatcggcagatacacctgcatctgtccccacaattactcaggctataccggggctcagtgcgagatcgacctgaacgaatgtaactccaatccctgtcagtccaatggcgagtgcgtcgagctgtcatctgaaaagcaatacggcagaatcacagggctccctagtagcttttcctaccacgaagctagcggatatgtatgtatttgtcagcctgggttcaccggaatccactgtgaagaagatgtaaatgagtgcagctctaacccttgtcagaacggagggacttgtgaaaacctacctggtaactacacctgccactgcccatttgacaacctttctaggacattctacggcggacgcgattgcagcgatatcctgttaggttgcacacatcaacagtgtctcaacaacggaacgtgcatcccccactttcaggacgggcaacatggatttagctgcttatgtcccagcgggtataccggctccctatgcgagattgccaccactctgtcatttgagggcgacggatttttatgggtaaagtctggttctgtaactaccaagggatcagtctgcaatatcgcccttaggttccaaacggtgcagcctatggccctattgctgtttcggagcaatagggatgtctttgtgaagctcgagttgctgagcggatacatacacctcagcattcaggtcaataatcagtccaaagtgctcctgtttatcagtcataacacaagtgacggcgagtggcacttcgtcgaagtcatattcgcggaggctgtgactctgaccttgattgatgactcctgcaaggaaaaatgtattgcaaaggcgccaaccccacttgagtcagatcagtcaatctgtgccttccagaactcatttctcggagggttgcctgtgggaatgacctccaacggcgtcgcactcctgaatttctacaacatgcctagcacaccgtccttcgtgggatgcctgcaggatatcaaaattgactggaaccacataaccctggagaatataagcagtgggagttccctcaatgtcaaggcaggttgcgtgcggaaggactggtgcgaaagtcagccatgccagtctcggggacggtgcattaatttgtggttgtcataccagtgtgactgccaccgcccatacgaggggccaaattgtctccgtgagtatgtggctgggcgatttgggcaggatgacagcacaggctatgtgatctttaccctggacgaaagctacggggacacaatatcattgtcaatgtttgtccggacactgcagccctctgggctgctgttggcgctagagaacagcacataccagtacattagagtgtggctggaacgtggtcggttggctatgctcacaccaaactcaccgaagctggttgtcaagttcgtgctgaacgatggcaacgtgcatctgataagcctgaaaataaaaccctataagatagaactctatcagtcctcccagaacttggggttcatcagtgcctccacatggaagattgagaagggtgacgtgatttatatagggggactgcctgacaagcaggagacagaactgaatggtggattcttcaaaggatgtatccaggatgttagactaaataaccagaatctggagttcttcccaaatcctactaacaacgcctctctgaaccctgttctcgttaatgtgacgcaaggttgcgccggtgataactcatgcaaatctaacccttgtcacaatggaggtgtgtgtcactcaaggtgggacgatttttcctgctcgtgtcctgcgttgacatccggtaaggcctgcgaagaggtccagtggtgtggcttctcaccatgccctcatggcgctcaatgccaacccgtgctgcagggatttgaatgtatagcaaatgctgtcttcaacgggcagtctggccaaatactcttcaggtccaatggcaatattacacgggaactgaccaacattacttttgggttccggacacgagacgccaacgttataattttacacgcagagaaggagccagagttcctgaacatctcaatccaggattcacggctcttttttcaactccaaagcggcaatagtttctatatgctgtctctaacatccctgcagtcagttaacgacgggacgtggcatgaggtcacgctgtctatgacagatccacttagccagacatctagatggcaaatggaagtcgataacgaaacaccctttgttaccagcacaatcgctacagggtctctgaattttctgaaagataacacggacatctacgttggggaccgggcaatagacaacattaagggactgcaagggtgtctctccactatcgaaatcggcggtatctatttgtcttactttgaaaacgtgcacggattcatcaacaagccccaagaggagcagtttcttaagatcagcactaactcggttgttacgggttgtctgcaactcaatgtctgcaattcaaacccgtgtctgcacggaggaaactgcgaggacatctattcctcctaccattgctcttgccctctgggctggtccgggaaacactgcgagctgaatattgatgaatgcttctcaaatccctgcattcacggaaattgtagtgacagggtggctgcgtatcactgtacctgtgaacctggatacaccggggttaattgcgaagttgacattgacaattgtcaaagccatcagtgtgcgaacggggctacctgtatcagccacaccaacgggtactcatgcctttgtttcgggaatttcacaggcaagttttgtaggcaatctcgtctcccttccacagtttgtggcaacgaaaagacaaatctgacctgctataatggtggaaattgtaccgaattccagaccgagttaaaatgtatgtgccgcccagggtttaccggagagtggtgcgagaaagacatagatgaatgcgcctccgacccatgtgttaatggaggcctatgtcaggatctgcttaataaatttcagtgtctgtgcgacgtggccttcgccggagaaagatgtgaggtggatctggccgacgatcttatcagtgatatctttacaacaataggctccgtgactgtcgcactgctgcttattctgctcctggccatcgttgccagcgtcgtgacttcaaataaaagagctacacagggaacctactcgccctctcgccaggaaaaggagggtagccgcgttgaaatgtggaacctaatgcccccacccgctatggagagactcatttag

SEQ ID NO: 74266 - DNA, 3885 bp, Artificial Sequence
  derived and/or modified sequence
atggcacttaagaacattaactaccttctcatcttctacctcagtttctcactgcttatctacataaaaaattccttttgcaataaaaacaacaccaggtgcctctcaaattcttgccaaaacaattctacatgcaaagatttttcaaaagacaatgattgttcttgttcagacacagccaataatttggacaaagactgtgacaacatgaaagacccttgcttctccaatccctgtcaaggaagtgccacttgtgtgaacaccccaggagaaaggagctttctgtgcaaatgtcctcctgggtacagtgggacaatctgtgaaactaccattggttcctgtggcaagaactcctgccaacatggaggtatttgccatcaggaccctatttatcctgtctgcatctgccctgctggatatgctggaagattctgtgagatagatcacgatgagtgtgcttccagcccttgccaaaatggggccgtgtgccaggatggaattgatggttactcctgcttctgtgtcccaggatatcaaggcagacactgcgacttggaagtggatgaatgtgcttcagatccctgcaagaacgaggctacatgcctcaatgaaataggaagatatacttgtatctgtccccacaattattctggatacacaggtgcccagtgtgagatcgacctcaatgaatgcaatagtaacccctgccagtccaatggggaatgtgtggagctgtcctcagagaaacaatatggacgcatcactggactgccttcttctttcagctaccatgaagcctcaggttatgtctgtatctgtcagcctggattcacaggaatccactgcgaagaagacgtcaatgaatgttcttcaaacccttgccaaaatggtggtacttgtgagaacttgcctgggaattatacttgccattgcccatttgataacctttctagaactttttatggaggaagggactgttctgatattctcctgggctgtacccatcagcaatgtctaaataatggaacatgcatccctcacttccaagatggccagcatggattcagctgcctatgtccatctggctacaccgggtccctgtgtgaaatcgcaaccacactttcatttgagggcgatggcttcctgtgggtcaaaagtggctcagtgacaaccaagggctcagtttgtaacatagccctcaggtttcagactgttcagccaatggctcttctacttttccgaagcaacagggatgtgtttgtgaagctggagctgctaagtggctacattcacttatcaattcaggtcaataatcagtcaaaggtgcttctgttcatttcccacaacaccagcgatggagagtggcatttcgtggaggtaatatttgcagaggctgtgacccttaccttaatcgacgactcctgtaaggagaaatgcatcgcgaaagctcctactccacttgaaagtgatcaatcaatatgtgcttttcagaactcctttttgggtggtttaccagtgggaatgaccagcaatggtgttgctctgcttaacttctataatatgccatccacaccttcgtttgtaggctgtctccaagacattaaaattgattggaatcacattaccctggagaacatctcgtctggctcatcattaaatgtcaaggcaggctgtgtgagaaaggattggtgtgaaagccaaccttgtcaaagcagaggacgctgcatcaacttgtggctgagttaccagtgtgactgccacaggccctatgaaggccccaactgtctgagagagtatgtggcaggcagatttggccaggatgactccactggttatgtcatctttactcttgatgagagctatggagacaccatcagcctctccatgtttgtccgaacgcttcaaccatcaggcttacttctagctttggaaaacagcacttatcaatatatccgtgtctggctagagcgcggcagactagcaatgctgactccaaactctcccaaattagtagtaaaatttgttcttaatgatggaaatgtccacttgatatctttgaaaatcaagccatataaaattgaactgtatcagtcttcacaaaacctaggatttatttctgcttctacgtggaaaatcgaaaagggagatgtcatctacattggtggcctacctgacaagcaagagactgaacttaatggtggattcttcaaaggctgtatccaagatgtaagactaaacaaccaaaatctggaattctttccaaatccaacaaacaatgcatctctcaatccagttcttgtcaatgtaacccaaggctgtgctggagacaacagctgcaagtccaacccctgtcacaatggaggtgtttgccattcccggtgggatgacttctcctgttcctgtcctgccctcacaagtgggaaagcctgtgaggaggttcagtggtgtggattcagcccgtgtcctcacggagcccagtgccagccggtgcttcaaggatttgaatgtattgcaaatgctgtttttaatggacaaagcggtcaaatattattcagaagcaatgggaatattaccagagaactcaccaatatcacatttggtttcagaacaagggatgcaaatgtaataatattgcatgcagaaaaagagcctgaatttcttaatattagcattcaagattccagattattctttcaattgcaaagtggcaacagcttttatatgctaagtctgacaagtttgcagtcagtgaatgatggcacatggcacgaagtgaccctttccatgacagacccactgtcccagacctccaggtggcaaatggaagtggacaacgaaacaccttttgtgaccagcacaattgctactggaagcctcaactttttgaaggataatacagatatttatgtgggagacagagctattgacaatataaagggcctgcaagggtgtctaagtacaatagaaatcggaggcatttatctctcttactttgaaaatgttcatggtttcattaataaacctcaggaagagcaatttctcaaaatctctaccaattcagtggtcactggctgtttgcagttaaatgtctgcaactccaacccctgtttgcatggaggaaactgtgaagacatctatagctcttatcattgctcctgtcccttgggatggtcagggaaacactgtgaactcaacatcgatgaatgcttttcaaacccctgtatccatggcaactgctctgacagagttgcagcctaccactgcacatgtgagcctggatacactggtgtgaactgtgaagtggatatagacaactgccagagtcaccagtgtgcaaatggagccacctgcattagtcatactaatggctattcttgcctctgttttggaaattttacaggaaaattttgcagacagagcagattaccctcaacagtctgtgggaatgagaagacaaatctcacttgctacaatggaggcaactgcacagagttccagactgaattaaaatgtatgtgccggccaggttttactggagaatggtgtgaaaaggacattgatgagtgtgcctctgatccgtgtgtcaatggaggtctgtgccaggacttactcaacaaattccagtgcctctgtgatgttgcctttgctggcgagcgctgcgaggtggacttggcagatgacttgatctccgacattttcaccactattggctcagtgactgtcgccttgttactgatcctcttgctggccattgttgcttctgttgtcacctccaacaaaagggcaactcagggaacctacagccccagccgtcaggagaaggagggctcccgagtggaaatgtggaacttgatgccaccccctgcaatggagagactgatttag

SEQ ID NO: 74267 - DNA, 3885 bp, Artificial Sequence
  derived and/or modified sequence
atggccctgaagaacatcaactacctgctgatcttctacctgagcttcagcctgctgatctacatcaagaacagcttctgcaacaagaacaacaccagatgcctgagcaacagctgccagaacaacagcacctgcaaggacttcagcaaggacaacgactgcagctgcagcgacaccgccaacaacctggacaaggactgcgacaacatgaaggacccctgcttcagcaacccctgccagggcagcgccacctgcgtgaacacccccggcgagagaagcttcctgtgcaagtgcccccccggctacagcggcaccatctgcgagaccaccatcggcagctgcggcaagaacagctgccagcacggcggcatctgccaccaggaccccatctaccccgtgtgcatctgccccgccggctacgccggcagattctgcgagatcgaccacgacgagtgcgccagcagcccctgccagaacggcgccgtgtgccaggacggcatcgacggctacagctgcttctgcgtgcccggctaccagggcagacactgcgacctggaggtggacgagtgcgccagcgacccctgcaagaacgaggccacctgcctgaacgagatcggcagatacacctgcatctgcccccacaactacagcggctacaccggcgcccagtgcgagatcgacctgaacgagtgcaacagcaacccctgccagagcaacggcgagtgcgtggagctgagcagcgagaagcagtacggcagaatcaccggcctgcccagcagcttcagctaccacgaggccagcggctacgtgtgcatctgccagcccggcttcaccggcatccactgcgaggaggacgtgaacgagtgcagcagcaacccctgccagaacggcggcacctgcgagaacctgcccggcaactacacctgccactgccccttcgacaacctgagcagaaccttctacggcggcagagactgcagcgacatcctgctgggctgcacccaccagcagtgcctgaacaacggcacctgcatcccccacttccaggacggccagcacggcttcagctgcctgtgccccagcggctacaccggcagcctgtgcgagatcgccaccaccctgagcttcgagggcgacggcttcctgtgggtgaagagcggcagcgtgaccaccaagggcagcgtgtgcaacatcgccctgagattccagaccgtgcagcccatggccctgctgctgttcagaagcaacagagacgtgttcgtgaagctggagctgctgagcggctacatccacctgagcatccaggtgaacaaccagagcaaggtgctgctgttcatcagccacaacaccagcgacggcgagtggcacttcgtggaggtgatcttcgccgaggccgtgaccctgaccctgatcgacgacagctgcaaggagaagtgcatcgccaaggcccccacccccctggagagcgaccagagcatctgcgccttccagaacagcttcctgggcggcctgcccgtgggcatgaccagcaacggcgtggccctgctgaacttctacaacatgcccagcacccccagcttcgtgggctgcctgcaggacatcaagatcgactggaaccacatcaccctggagaacatcagcagcggcagcagcctgaacgtgaaggccggctgcgtgagaaaggactggtgcgagagccagccctgccagagcagaggcagatgcatcaacctgtggctgagctaccagtgcgactgccacagaccctacgagggccccaactgcctgagagagtacgtggccggcagattcggccaggacgacagcaccggctacgtgatcttcaccctggacgagagctacggcgacaccatcagcctgagcatgttcgtgagaaccctgcagcccagcggcctgctgctggccctggagaacagcacctaccagtacatcagagtgtggctggagagaggcagactggccatgctgacccccaacagccccaagctggtggtgaagttcgtgctgaacgacggcaacgtgcacctgatcagcctgaagatcaagccctacaagatcgagctgtaccagagcagccagaacctgggcttcatcagcgccagcacctggaagatcgagaagggcgacgtgatctacatcggcggcctgcccgacaagcaggagaccgagctgaacggcggcttcttcaagggctgcatccaggacgtgagactgaacaaccagaacctggagttcttccccaaccccaccaacaacgccagcctgaaccccgtgctggtgaacgtgacccagggctgcgccggcgacaacagctgcaagagcaacccctgccacaacggcggcgtgtgccacagcagatgggacgacttcagctgcagctgccccgccctgaccagcggcaaggcctgcgaggaggtgcagtggtgcggcttcagcccctgcccccacggcgcccagtgccagcccgtgctgcagggcttcgagtgcatcgccaacgccgtgttcaacggccagagcggccagatcctgttcagaagcaacggcaacatcaccagagagctgaccaacatcaccttcggcttcagaaccagagacgccaacgtgatcatcctgcacgccgagaaggagcccgagttcctgaacatcagcatccaggacagcagactgttcttccagctgcagagcggcaacagcttctacatgctgagcctgaccagcctgcagagcgtgaacgacggcacctggcacgaggtgaccctgagcatgaccgaccccctgagccagaccagcagatggcagatggaggtggacaacgagacccccttcgtgaccagcaccatcgccaccggcagcctgaacttcctgaaggacaacaccgacatctacgtgggcgacagagccatcgacaacatcaagggcctgcagggctgcctgagcaccatcgagatcggcggcatctacctgagctacttcgagaacgtgcacggcttcatcaacaagccccaggaggagcagttcctgaagatcagcaccaacagcgtggtgaccggctgcctgcagctgaacgtgtgcaacagcaacccctgcctgcacggcggcaactgcgaggacatctacagcagctaccactgcagctgccccctgggctggagcggcaagcactgcgagctgaacatcgacgagtgcttcagcaacccctgcatccacggcaactgcagcgacagagtggccgcctaccactgcacctgcgagcccggctacaccggcgtgaactgcgaggtggacatcgacaactgccagagccaccagtgcgccaacggcgccacctgcatcagccacaccaacggctacagctgcctgtgcttcggcaacttcaccggcaagttctgcagacagagcagactgcccagcaccgtgtgcggcaacgagaagaccaacctgacctgctacaacggcggcaactgcaccgagttccagaccgagctgaagtgcatgtgcagacccggcttcaccggcgagtggtgcgagaaggacatcgacgagtgcgccagcgacccctgcgtgaacggcggcctgtgccaggacctgctgaacaagttccagtgcctgtgcgacgtggccttcgccggcgagagatgcgaggtggacctggccgacgacctgatcagcgacatcttcaccaccatcggcagcgtgaccgtggccctgctgctgatcctgctgctggccatcgtggccagcgtggtgaccagcaacaagagagccacccagggcacctacagccccagcagacaggagaaggagggcagcagagtggagatgtggaacctgatgcccccccccgccatggagagactgatctag

SEQ ID NO: 74268 - protein, 235 aa, Artificial Sequence
  derived and/or modified sequence
MESGALDDFDKAKPSPAPPSTTTAPDASGPQKRSPGDTAKDALFASQEKFFQELFDSELASQATAEFEKAMKELAEEEPHLVEQFQKLSEAAGRVGSDMTSQQEFTSCLKETLSGLAKNATDLQNSSMSEEELTKAMEGLGMDEGDGEGNILPIMQSIMQNLLSKDVLYPSLKEITEKYPEWLQSHRESLPPEQFEKYQEQHSVMCKICEQFEAETPTDSETTQKARFEMVLDLM

SEQ ID NO: 74269 - protein, 186 aa, Artificial Sequence
  derived and/or modified sequence
MAAAEEGCSVGAEADRELEELLESALDDFDKAKPSPAPPSTTTAPDASGPQKRSPGDTAKDALFASQEKFFQELFDSELASQATAEFEKAMKELAEEEPHLVEQFQKLSEAAGRVELQHVGRRADQGHGGARHGRRGWGREHPPHHAEYYAEPTLQGCAVPITEGDHRKVSRMVAESSGISTSRAV

SEQ ID NO: 74270 - DNA, 708 bp, Artificial Sequence
  derived and/or modified sequence
atggagtcaggtgcccttgatgacttcgacaaagctaagccttcccctgctccgcccagcaccacaactgccccggatgcaagtggaccacaaaagcgcagccctggcgacaccgctaaggacgcactctttgcttctcaggagaaattcttccaagagttatttgattctgaactcgctagccaggccacggcagagttcgagaaggccatgaaggagctggctgaagaagagccacacctcgtcgaacagtttcagaaactaagcgaggccgctggtcgggtgggttctgatatgacgtcccagcaagagttcacctcttgcctgaaggagactctgtccggcctggctaaaaacgcaacagaccttcaaaatagctccatgagcgaggaggagctgaccaaggctatggagggtctcggcatggatgagggcgatggtgaagggaatattctgccgattatgcagtccatcatgcaaaacctcttgtccaaagacgtcctctatcccagcctgaaggagattaccgaaaagtatccagagtggttacagtcacatcgagaaagtctgccgccggagcagtttgagaaataccaggagcagcactccgttatgtgcaaaatctgcgaacagtttgaagccgaaacaccaacggacagcgagacaactcagaaggctcgattcgagatggtgctggacctcatgtag

SEQ ID NO: 74271 - DNA, 561 bp, Artificial Sequence
  derived and/or modified sequence
atggccgcggccgaagagggctgttccgttggagcggaagctgatcgcgaattagaggaactgctggaatccgcactcgatgacttcgataaggccaaaccaagtcctgccccaccttcgactaccactgcacctgatgccagtggaccacagaaaagatctccgggggataccgctaaggacgctttatttgcatcacaggagaagttttttcaagaactgtttgattctgagctggcctctcaagccaccgcagaatttgagaaggcaatgaaggagctcgcggaggaggagccacatctggttgaacagtttcagaagcttagcgaagcggccggcagagtggagctgcagcacgtggggcgtagggccgatcaaggccacggtggcgcgaggcatgggaggcgcggctggggccgtgaacaccccccgcatcatgccgagtattacgcagagcctaccctgcaaggctgcgccgttcctatcaccgaaggggaccacagaaaagtcagcagaatggttgcagagagctccggcatttccactagtcgcgcagtatag

SEQ ID NO: 74272 - DNA, 708 bp, Artificial Sequence
  derived and/or modified sequence
atggagagcggggccctggatgactttgacaaggccaagcccagccctgccccacccagcaccaccacagccccagatgccagcggcccccagaagaggagccctggggacacagccaaggatgccctgtttgccagccaggagaagttcttccaggagctgtttgattctgagctggccagccaggccacagctgagtttgagaaggccatgaaggagctggccgaggaggagccccacctggtggagcagttccagaagctgtctgaggccgccggccgggtgggcagtgacatgaccagccagcaggagttcaccagctgcctgaaggagaccctgagcggcctggccaagaatgccacagacctgcagaacagctccatgtctgaggaggagctgaccaaggccatggagggcctgggcatggatgaaggagatggagagggcaacatcctgcccatcatgcagagcatcatgcagaacctgctgagcaaggatgtgctgtaccccagcctgaaggagatcacagagaagtacccagagtggctgcagagccaccgggagagcctgcccccagagcagtttgagaagtaccaggagcagcacagcgtgatgtgcaagatctgtgagcagtttgaggccgagacccccacagacagcgagaccacccagaaggccaggtttgagatggtgctggacctgatgtag

SEQ ID NO: 74273 - DNA, 561 bp, Artificial Sequence
  derived and/or modified sequence
atggctgctgctgaggagggctgcagcgtgggcgctgaggccgaccgggagctggaggagctgctggagagcgccctggatgactttgacaaggccaagcccagccctgccccacccagcaccaccacagccccagatgccagcggcccccagaagaggagccctggggacacagccaaggatgccctgtttgccagccaggagaagttcttccaggagctgtttgattctgagctggccagccaggccacagctgagtttgagaaggccatgaaggagctggccgaggaggagccccacctggtggagcagttccagaagctgtctgaggccgccggccgggtggagctgcagcacgtgggccggcgggctgaccagggccacggcggggcccggcatggaagaagaggctggggccgggagcaccccccccaccacgccgagtactatgcagagcccaccctgcagggctgtgctgtgcccatcacagaaggagaccacaggaaggtgtccaggatggtggccgagagcagcggcatcagcaccagcagagctgtgtag

SEQ ID NO: 74274 - DNA, 708 bp, Artificial Sequence
  derived and/or modified sequence
atggagagcggcgccctggacgacttcgacaaggccaagcccagcccagctcctcccagtactactacagcccccgatgcttccggtccccaaaagaggagtccaggagacactgctaaggacgccctttttgcatcacaggagaagttcttccaagagctgtttgattcggagttggcctcccaggcaactgctgaatttgagaaagcaatgaaagagctggctgaggaggagcctcatttggtcgaacagtttcagaagttatccgaggctgctggcagggtaggctctgacatgacgtctcagcaagaattcacaagttgcctaaaggaaactttatcagggctcgccaagaacgctactgatttgcagaattctagtatgtcagaggaagagctgacaaaagccatggaaggcttaggtatggatgagggagacggggaggggaacatcttaccaatcatgcagtcaattatgcaaaatctgctgtctaaggatgtgctctatcctagcctgaaagaaataactgagaaataccctgaatggctccaatctcaccgagagagcctgccccccgagcagttcgagaagtatcaggaacagcacagcgtgatgtgtaagatttgtgaacagtttgaagctgaaaccccgacagatagcgagacgacgcaaaaggcccggttcgagatggttctggatctcatgtag

SEQ ID NO: 74275 - DNA, 561 bp, Artificial Sequence
  derived and/or modified sequence
atggccgccgccgaggagggctgcagcgtgggcgccgaggccgacagggaactcgaggaactgctggagtccgccctggacgactttgacaaggcgaaaccatcgcctgcgccaccaagtacgacgaccgcaccagacgcttctggccctcagaaacgaagccccggcgatacagccaaggatgcactcttcgcatcacaggagaagttcttccaggagctgtttgactccgaactggcatcccaggccaccgctgaatttgaaaaagccatgaaagaactggcagaggaagaaccgcacctagtggagcagttccagaagctttcagaggcagctgggcgggtggagctccagcacgtgggcagacgggccgaccaaggacatggcggcgccagacatgggcgtcggggatgggggcgcgagcatccaccccaccacgctgaatactacgcagagcccacgctgcaaggatgtgccgttccgattacagagggagaccaccgaaaggtaagcaggatggtcgctgaatccagcggaatcagtacttcccgtgcagtgtag

SEQ ID NO: 74276 - DNA, 796 bp, Artificial Sequence
  derived and/or modified sequence
ttatctgcagagatcaggccaaagggagctctagaaggttgttggggagcactaaactggagaataagagaagatagtttaatgccgtaccatggagtctggtgctcttgatgatttcgataaagccaaaccctccccagcacccccttctaccaccacggcccctgatgcttcggggccccagaagagatcgccaggagacactgccaaagatgccctcttcgcttcccaagagaagtttttccaggaactattcgacagtgaactggcttcccaagccactgcggagttcgagaaggcaatgaaggagttggctgaggaagaaccccacctggtggagcagttccaaaagctctcagaggctgcagggagagtgggcagtgatatgacctcccaacaagaattcacttcttgcctaaaggaaacactaagtggattagccaaaaatgccactgaccttcagaactccagcatgtcggaagaagagctgaccaaggccatggaggggctaggcatggacgaaggggatggggaagggaacatcctccccatcatgcagagtattatgcagaacctactctccaaggatgtgctgtacccatcactgaaggagatcacagaaaagtatccagaatggttgcagagtcatcgggaatctctacctccagagcagtttgaaaaatatcaggagcagcacagcgtcatgtgcaaaatatgtgagcagtttgaggcagagacccccacagacagtgaaaccactcaaaaggctcgttttgagatggtgctggatcttatg

SEQ ID NO: 74277 - DNA, 708 bp, Artificial Sequence
  derived and/or modified sequence
atggagagcggagctctcgatgactttgacaaggcgaaaccaagtcccgcaccaccgtctacaaccacagcccctgatgcatccggaccccagaagcgatcccctggagatactgcaaaagacgccctctttgctagtcaggagaagtttttccaggaattgtttgactccgaactggcttcacaggccactgcagaatttgaaaaggcaatgaaagagctggctgaggaggagccccacttggtcgaacagttccagaagcttagcgaggccgctggcagggttggctccgacatgacctcccagcaggagttcacttcttgtctgaaggaaaccctcagcggactagctaagaacgctacagacctgcaaaactccagcatgagcgaagaagagcttacgaaagcgatggaggggttgggaatggatgagggcgacggtgaaggcaacattctaccaatcatgcagtccattatgcagaatctgttgtcaaaggatgttctttacccaagcttaaaggaaataacagagaagtaccccgagtggcttcagagccatagagagagcctgccacctgagcagttcgaaaaataccaggagcagcattccgtcatgtgcaaaatttgcgagcagttcgaagctgagactcctacggatagtgaaacgacccagaaagcgcgattcgagatggttctcgacttgatgtag

SEQ ID NO: 74278 - DNA, 561 bp, Artificial Sequence
  derived and/or modified sequence
atggccgcagccgaagagggctgctctgttggggctgaagccgaccgcgagttggaagaactgctggaatccgctcttgacgactttgacaaagctaaacccagccccgcacccccttccactacgaccgccccagacgcatccggtcctcagaaaagatcacccggagataccgccaaggatgcattgttcgcttctcaggaaaaattcttccaggagctgtttgacagcgagctcgccagccaggctacagcggagttcgagaaagcaatgaaggagttggccgaggaagagccccatcttgtcgagcagttccagaaactatctgaagccgcagggagagtcgaactccagcacgtgggtagacgggcagatcaggggcacgggggagcccgacatggcagaagaggatggggacgcgaacatccacctcatcacgcagaatattatgccgaaccaacacttcaggggtgtgctgtgcccatcactgagggtgatcatagaaaggtttcaagaatggtggccgaatcgagtgggatctcgacatccagagccgtgtag

SEQ ID NO: 74279 - DNA, 708 bp, Artificial Sequence
  derived and/or modified sequence
atggagagcggcgccctggacgacttcgacaaggccaagcccagccccgccccccccagcaccaccaccgcccccgacgccagcggcccccagaagagaagccccggcgacaccgccaaggacgccctgttcgccagccaggagaagttcttccaggagctgttcgacagcgagctggccagccaggccaccgccgagttcgagaaggccatgaaggagctggccgaggaggagccccacctggtggagcagttccagaagctgagcgaggccgccggcagagtgggcagcgacatgaccagccagcaggagttcaccagctgcctgaaggagaccctgagcggcctggccaagaacgccaccgacctgcagaacagcagcatgagcgaggaggagctgaccaaggccatggagggcctgggcatggacgagggcgacggcgagggcaacatcctgcccatcatgcagagcatcatgcagaacctgctgagcaaggacgtgctgtaccccagcctgaaggagatcaccgagaagtaccccgagtggctgcagagccacagagagagcctgccccccgagcagttcgagaagtaccaggagcagcacagcgtgatgtgcaagatctgcgagcagttcgaggccgagacccccaccgacagcgagaccacccagaaggccagattcgagatggtgctggacctgatgtag

SEQ ID NO: 74280 - DNA, 561 bp, Artificial Sequence
  derived and/or modified sequence
atggccgccgccgaggagggctgcagcgtgggcgccgaggccgacagagagctggaggagctgctggagagcgccctggacgacttcgacaaggccaagcccagccccgccccccccagcaccaccaccgcccccgacgccagcggcccccagaagagaagccccggcgacaccgccaaggacgccctgttcgccagccaggagaagttcttccaggagctgttcgacagcgagctggccagccaggccaccgccgagttcgagaaggccatgaaggagctggccgaggaggagccccacctggtggagcagttccagaagctgagcgaggccgccggcagagtggagctgcagcacgtgggcagaagagccgaccagggccacggcggcgccagacacggcagaagaggctggggcagagagcaccccccccaccacgccgagtactacgccgagcccaccctgcagggctgcgccgtgcccatcaccgagggcgaccacagaaaggtgagcagaatggtggccgagagcagcggcatcagcaccagcagagccgtgtag

SEQ ID NO: 74281 - protein, 1606 aa, Artificial Sequence
  derived and/or modified sequence
MNKAPQSTGPPPAPSPGLPQPAFPPGQTAPVVFSTPQATQMNTPSQPRQGGFRSLQHFYPSRAQPPSSAASRVQSAAPARPGPAAHVYPAGSQVMMIPSQISYPASQGAYYIPGQGRSTYVVPTQQYPVQPGAPGFYPGASPTEFGTYAGAYYPAQGVQQFPTGVAPTPVLMNQPPQIAPKRERKTIRIRDPNQGGKDITEEIMSGARTASTPTPPQTGGGLEPQANGETPQVAVIVRPDDRSQGAIIADRPGLPGPEHSPSESQPSSPSPTPSPSPVLEPGSEPNLAVLSIPGDTMTTIQMSVEESTPISRETGEPYRLSPEPTPLAEPILEVEVTLSKPVPESEFSSSPLQAPTPLASHTVEIHEPNGMVPSEDLEPEVESSPELAPPPACPSESPVPIAPTAQPEELLNGAPSPPAVDLSPVSEPEEQAKEVTASMAPPTIPSATPATAPSATSPAQEEEMEEEEEEEEGEAGEAGEAESEKGGEELLPPESTPIPANLSQNLEAAAATQVAVSVPKRRRKIKELNKKEAVGDLLDAFKEANPAVPEVENQPPAGSNPGPESEGSGVPPRPEEADETWDSKEDKIHNAENIQPGEQKYEYKSDQWKPLNLEEKKRYDREFLLGFQFIFASMQKPEGLPHISDVVLDKANKTPLRPLDPTRLQGINCGPDFTPSFANLGRTTLSTRGPPRGGPGGELPRGPAGLGPRRSQQGPRKEPRKIIATVLMTEDIKLNKAEKAWKPSSKRTAADKDRGEEDADGSKTQDLFRRVRSILNKLTPQMFQQLMKQVTQLAIDTEERLKGVIDLIFEKAISEPNFSVAYANMCRCLMALKVPTTEKPTVTVNFRKLLLNRCQKEFEKDKDDDEVFEKKQKEMDEAATAEERGRLKEELEEARDIARRRSLGNIKFIGELFKLKMLTEAIMHDCVVKLLKNHDEESLECLCRLLTTIGKDLDFEKAKPRMDQYFNQMEKIIKEKKTSSRIRFMLQDVLDLRGSNWVPRRGDQGPKTIDQIHKEAEMEEHREHIKVQQLMAKGSDKRRGGPPGPPISRGLPLVDDGGWNTVPISKGSRPIDTSRLTKITKPGSIDSNNQLFAPGGRLSWGKGSSGGSGAKPSDAASEAARPATSTLNRFSALQQAVPTESTDNRRVVQRSSLSRERGEKAGDRGDRLERSERGGDRGDRLDRARTPATKRSFSKEVEERSRERPSQPEGLRKAASLTEDRDRGRDAVKREAALPPVSPLKAALSEEELEKKSKAIIEEYLHLNDMKEAVQCVQELASPSLLFIFVRHGVESTLERSAIAREHMGQLLHQLLCAGHLSTAQYYQGLYEILELAEDMEIDIPHVWLYLAELVTPILQEGGVPMGELFREITKPLRPLGKAASLLLEILGLLCKSMGPKKVGTLWREAGLSWKEFLPEGQDIGAFVAEQKVEYTLGEESEAPGQRALPSEELNRQLEKLLKEGSSNQRVFDWIEANLSEQQIVSNTLVRALMTAVCYSAIIFETPLRVDVAVLKARAKLLQKYLCDEQKELQALYALQALVVTLEQPPNLLRMFFDALYDEDVVKEDAFYSWESSKDPAEQQGKGVALKSVTAFFKWLREAEEESDHN

SEQ ID NO: 74282 - DNA, 4821 bp, Artificial Sequence
  derived and/or modified sequence
atgaacaaggccccccagagcaccggccccccccccgcccccagccccggcctgccccagcccgccttcccccccggccagaccgcccccgtggtgttcagcaccccccaggccacccagatgaacacccccagccagcccagacagggcggcttcagaagcctgcagcacttctaccccagcagagcccagccccccagcagcgccgccagcagagtgcagagcgccgcccccgccagacccggccccgccgcccacgtgtaccccgccggcagccaggtgatgatgatccccagccagatcagctaccccgccagccagggcgcctactacatccccggccagggcagaagcacctacgtggtgcccacccagcagtaccccgtgcagcccggcgcccccggcttctaccccggcgccagccccaccgagttcggcacctacgccggcgcctactaccccgcccagggcgtgcagcagttccccaccggcgtggcccccacccccgtgctgatgaaccagcccccccagatcgcccccaagagagagagaaagaccatcagaatcagagaccccaaccagggcggcaaggacatcaccgaggagatcatgagcggcgccagaaccgccagcacccccacccccccccagaccggcggcggcctggagccccaggccaacggcgagaccccccaggtggccgtgatcgtgagacccgacgacagaagccagggcgccatcatcgccgacagacccggcctgcccggccccgagcacagccccagcgagagccagcccagcagccccagccccacccccagccccagccccgtgctggagcccggcagcgagcccaacctggccgtgctgagcatccccggcgacaccatgaccaccatccagatgagcgtggaggagagcacccccatcagcagagagaccggcgagccctacagactgagccccgagcccacccccctggccgagcccatcctggaggtggaggtgaccctgagcaagcccgtgcccgagagcgagttcagcagcagccccctgcaggcccccacccccctggccagccacaccgtggagatccacgagcccaacggcatggtgcccagcgaggacctggagcccgaggtggagagcagccccgagctggcccccccccccgcctgccccagcgagagccccgtgcccatcgcccccaccgcccagcccgaggagctgctgaacggcgcccccagcccccccgccgtggacctgagccccgtgagcgagcccgaggagcaggccaaggaggtgaccgccagcatggccccccccaccatccccagcgccacccccgccaccgcccccagcgccaccagccccgcccaggaggaggagatggaggaggaggaggaggaggaggagggcgaggccggcgaggccggcgaggccgagagcgagaagggcggcgaggagctgctgccccccgagagcacccccatccccgccaacctgagccagaacctggaggccgccgccgccacccaggtggccgtgagcgtgcccaagagaagaagaaagatcaaggagctgaacaagaaggaggccgtgggcgacctgctggacgccttcaaggaggccaaccccgccgtgcccgaggtggagaaccagccccccgccggcagcaaccccggccccgagagcgagggcagcggcgtgccccccagacccgaggaggccgacgagacctgggacagcaaggaggacaagatccacaacgccgagaacatccagcccggcgagcagaagtacgagtacaagagcgaccagtggaagcccctgaacctggaggagaagaagagatacgacagagagttcctgctgggcttccagttcatcttcgccagcatgcagaagcccgagggcctgccccacatcagcgacgtggtgctggacaaggccaacaagacccccctgagacccctggaccccaccagactgcagggcatcaactgcggccccgacttcacccccagcttcgccaacctgggcagaaccaccctgagcaccagaggcccccccagaggcggccccggcggcgagctgcccagaggccccgccggcctgggccccagaagaagccagcagggccccagaaaggagcccagaaagatcatcgccaccgtgctgatgaccgaggacatcaagctgaacaaggccgagaaggcctggaagcccagcagcaagagaaccgccgccgacaaggacagaggcgaggaggacgccgacggcagcaagacccaggacctgttcagaagagtgagaagcatcctgaacaagctgaccccccagatgttccagcagctgatgaagcaggtgacccagctggccatcgacaccgaggagagactgaagggcgtgatcgacctgatcttcgagaaggccatcagcgagcccaacttcagcgtggcctacgccaacatgtgcagatgcctgatggccctgaaggtgcccaccaccgagaagcccaccgtgaccgtgaacttcagaaagctgctgctgaacagatgccagaaggagttcgagaaggacaaggacgacgacgaggtgttcgagaagaagcagaaggagatggacgaggccgccaccgccgaggagagaggcagactgaaggaggagctggaggaggccagagacatcgccagaagaagaagcctgggcaacatcaagttcatcggcgagctgttcaagctgaagatgctgaccgaggccatcatgcacgactgcgtggtgaagctgctgaagaaccacgacgaggagagcctggagtgcctgtgcagactgctgaccaccatcggcaaggacctggacttcgagaaggccaagcccagaatggaccagtacttcaaccagatggagaagatcatcaaggagaagaagaccagcagcagaatcagattcatgctgcaggacgtgctggacctgagaggcagcaactgggtgcccagaagaggcgaccagggccccaagaccatcgaccagatccacaaggaggccgagatggaggagcacagagagcacatcaaggtgcagcagctgatggccaagggcagcgacaagagaagaggcggcccccccggcccccccatcagcagaggcctgcccctggtggacgacggcggctggaacaccgtgcccatcagcaagggcagcagacccatcgacaccagcagactgaccaagatcaccaagcccggcagcatcgacagcaacaaccagctgttcgcccccggcggcagactgagctggggcaagggcagcagcggcggcagcggcgccaagcccagcgacgccgccagcgaggccgccagacccgccaccagcaccctgaacagattcagcgccctgcagcaggccgtgcccaccgagagcaccgacaacagaagagtggtgcagagaagcagcctgagcagagagagaggcgagaaggccggcgacagaggcgacagactggagagaagcgagagaggcggcgacagaggcgacagactggacagagccagaacccccgccaccaagagaagcttcagcaaggaggtggaggagagaagcagagagagacccagccagcccgagggcctgagaaaggccgccagcctgaccgaggacagagacagaggcagagacgccgtgaagagagaggccgccctgccccccgtgagccccctgaaggccgccctgagcgaggaggagctggagaagaagagcaaggccatcatcgaggagtacctgcacctgaacgacatgaaggaggccgtgcagtgcgtgcaggagctggccagccccagcctgctgttcatcttcgtgagacacggcgtggagagcaccctggagagaagcgccatcgccagagagcacatgggccagctgctgcaccagctgctgtgcgccggccacctgagcaccgcccagtactaccagggcctgtacgagatcctggagctggccgaggacatggagatcgacatcccccacgtgtggctgtacctggccgagctggtgacccccatcctgcaggagggcggcgtgcccatgggcgagctgttcagagagatcaccaagcccctgagacccctgggcaaggccgccagcctgctgctggagatcctgggcctgctgtgcaagagcatgggccccaagaaggtgggcaccctgtggagagaggccggcctgagctggaaggagttcctgcccgagggccaggacatcggcgccttcgtggccgagcagaaggtggagtacaccctgggcgaggagagcgaggcccccggccagagagccctgcccagcgaggagctgaacagacagctggagaagctgctgaaggagggcagcagcaaccagagagtgttcgactggatcgaggccaacctgagcgagcagcagatcgtgagcaacaccctggtgagagccctgatgaccgccgtgtgctacagcgccatcatcttcgagacccccctgagagtggacgtggccgtgctgaaggccagagccaagctgctgcagaagtacctgtgcgacgagcagaaggagctgcaggccctgtacgccctgcaggccctggtggtgaccctggagcagccccccaacctgctgagaatgttcttcgacgccctgtacgacgaggacgtggtgaaggaggacgccttctacagctgggagagcagcaaggaccccgccgagcagcagggcaagggcgtggccctgaagagcgtgaccgccttcttcaagtggctgagagaggccgaggaggagagcgaccacaactag

SEQ ID NO: 74283 - DNA, 432 bp, Artificial Sequence
  derived and/or modified sequence
atgagcggcgccagaaccgccagcacccccacccccccccagaccggcggcggcctggagccccaggccaacggcgagaccccccaggtggccgtgatcgtgagacccgacgacagaagccagggcgccatcatcgccgacagacccggcctgcccggccccgagcacagccccagcgagagccagcccagcagccccagccccacccccagccccagccccgtgctggagcccggcagcgagcccaacctggccgtgctgagcatccccggcgacaccatgaccaccatccagatgagcgtggaggagagcacccccatcagcagagagaccggcgagccctacagactgagccccgagcccacccccctggccgagcccatcctggaggtggaggtgaccctgagcaagcccgtgcccgagagcgagtag

SEQ ID NO: 74284 - DNA, 384 bp, Artificial Sequence
  derived and/or modified sequence
atgagcggcgccagaaccgccagcacccccacccccccccagaccggcggcggcctggagccccaggccaacggcgagaccccccaggtggccgtgatcgtgagacccgacgacagaagccagggcgccatcatcgccgacagacccggcctgcccggccccgagcacagccccagcgagagccagcccagcagccccagccccacccccagccccagccccgtgctggagcccggcagcgagcccaacctggccgtgctgagcatccccggcgacaccatgaccaccatccagatgagcgtggaggagagcacccccatcagcagagagaccggcgagccctacagactgagccccgagcccacccccctggccgagccctag

SEQ ID NO: 74285 - DNA, 4821 bp, Artificial Sequence
  derived and/or modified sequence
atgaacaaagcgccacaaagtacaggacccccacccgctccgtcccctggtctacctcagccagccttcccacccggacaaacggctccggttgtgttctctacaccacaagcaacgcagatgaacacgccctcgcagcctcgccaaggcgggttcaggagtctgcagcacttttacccttcccgcgctcagccgccttcctctgctgcttcaagggtgcaatccgctgctcccgccaggcccggtcccgctgcccacgtctacccagccgggtcacaggttatgatgattccatcccagatctcttaccccgcctcccagggcgcatattatatcccaggccaggggcgttccacatacgtggtccctacccagcagtatcctgtccagcctggcgcccccggtttctaccccggggccagccctactgagtttggaacgtatgctggtgcctattatccagcccagggggtgcagcagttccccactggggtggcccctacgccagtgctcatgaaccagccacctcagatcgcccctaaaagagaacggaagaccataagaattagggaccccaaccagggtggcaaagacattaccgaggaaatcatgtcgggcgcacgcaccgccagcacgccaacgccacctcagacaggagggggacttgaaccccaagccaatggggagacaccccaggtagcggtcatcgtgcgcccggacgaccgctcacagggagctattatcgctgaccgcccaggacttccaggccctgagcacagcccatctgagtcccagccttcttcaccctcgcctacacccagcccctcaccagtccttgaacccggatctgagccgaatctggcggtgttgagcatacctggggacactatgacaaccatacagatgtccgtggaggaatctacgcccatctctagggagaccggcgagccatatagattgagccccgaaccaaccccactggctgagcccattttagaggtcgaagtgactttatccaaaccagtccccgagtccgaatttagcagctccccgctgcaggctcccaccccactcgcatctcacaccgttgaaatccacgaaccgaatggcatggtgccaagcgaggatcttgagcctgaggtcgagagcagccccgaattggcccctccgccggcgtgccctagtgaaagccccgttccaatcgcaccgacggcccagccagaagagctgctgaacggcgcacccagcccaccggccgtggatttaagccctgtgtctgagccagaggaacaagcaaaggaggtgaccgcctcaatggccccaccgactattccgtcggctactcctgcaaccgcaccctcagcgaccagcccagctcaagaggaggaaatggaagaagaggaggaagaggaggagggcgaagccggcgaggccggtgaggctgagtcagagaaaggaggggaggaactgctgcccccagagtctacaccgatccccgccaacttgtcacagaacttagaggccgccgctgcaactcaggtggctgtatctgtccctaaacgcaggagaaagatcaaggagctcaataaaaaggaagccgttggcgatctcctggacgcctttaaggaggccaatcctgctgtcccggaagtcgagaaccagcctccagccgggagcaatcctggacctgagtctgaggggtctggggtaccaccacgccccgaagaggctgatgaaacatgggactctaaggaagacaagattcataatgcggaaaacatccagccgggcgagcagaagtatgagtacaagagcgatcagtggaaaccacttaatttggaggagaaaaaacgatacgatagagagtttcttttaggattccagttcatatttgcatccatgcagaaacccgaaggtctgccacacatttccgacgtcgtattggataaggcgaataaaacaccattgcggcctctggaccccacgaggctccagggtataaattgtggacccgacttcactccctcattcgcaaacctggggcgcaccacactctccactcgcggtcctcctagaggggggcctggaggggaattgcccaggggtcccgccggcctgggtcctcgccgcagtcagcagggaccgaggaaagagccacggaagattatcgccacagtgttaatgacagaggacatcaaactcaacaaagcagagaaggcctggaaacccagctcaaaacgaacggcggcagacaaagatcgtggtgaagaagatgctgacgggagcaagactcaagatctgtttaggcgggtccgcagtatcctgaacaaattgactcctcaaatgttccagcagctaatgaaacaggtgacacagctggcaattgacaccgaagagaggctgaagggggtgatagacttgatatttgaaaaggctatatccgagccgaatttctctgttgcctacgcaaatatgtgccgctgccttatggccctgaaggtgccaactacagaaaagcccacggtgaccgttaactttcgcaaactgctgttaaatcgctgtcagaaagagttcgagaaggataaagatgatgatgaagtgtttgaaaaaaagcaaaaagagatggatgaggccgcgaccgcagaagagaggggtagactgaaagaagagcttgaagaggctcgcgacatcgcccgtcgacgatctctggggaatatcaagttcattggcgagttgtttaaactgaaaatgcttacagaggctatcatgcacgactgcgtggtgaagttgctaaagaatcacgatgaagagtctcttgaatgcctgtgcagacttctgaccacaatcgggaaggacctcgattttgagaaagctaaacctcgaatggaccagtacttcaaccagatggagaagataattaaagagaaaaagacttcaagcaggattagattcatgttacaggacgtcctagatctccgagggagtaattgggtgccacgaagaggggatcagggtccaaaaactattgatcagatacacaaggaagccgaaatggaggaacatagggagcacatcaaagtgcagcagttgatggccaaaggctcggataaacgtcggggcggccccccagggcccccaattagccgcggtctgcctctggtggacgatggggggtggaataccgtccctatcagcaagggctctcgcccaatcgatacctcccgcttaaccaagattacaaaacctgggtctatagacagtaataatcagttgttcgcacccggtgggcgacttagctggggtaaaggatccagcgggggtagtggcgccaaaccaagcgacgctgcctcagaagctgcccgacctgccacttcaactttaaatcgcttcagtgctcttcaacaggcggtgccaacagagtcaacagataatcgcagagttgtccaaaggtctagtctgagtagagaaagaggcgaaaaagcaggagaccggggggatcggttggaacggtctgagagagggggcgatcggggagaccggcttgaccgggcacgcacccctgccaccaagcgaagttttagcaaagaggtcgaggagagaagtcgcgaacggccctcccagcctgaaggtctgaggaaggcagcctctctgaccgaagatcgagatcgcggtcgcgacgcagtcaagagggaggctgctctaccgccagtcagccctctgaaagccgccctgagcgaggaggaactggaaaagaaatccaaggccattattgaagagtatctgcaccttaacgacatgaaggaggcggtgcagtgcgttcaagagctagcatcaccgagtctgcttttcatctttgtgcgtcatggcgtggaaagtacactggagaggagcgccatcgcgcgcgagcacatggggcaactactgcaccagctgctgtgcgccggccatctaagtactgcccagtactatcaaggtttatatgagatactggagttggcggaggatatggagatagacatacctcatgtgtggttatacttggccgagttggtgacacctattctgcaagaagggggggtgcccatgggggaattgtttagggagataacaaagccactcaggcccttgggcaaggccgctagtctgctgctcgagatcttaggcctgctttgtaaatctatgggcccgaaaaaggtggggacgttgtggcgagaagcagggctgtcatggaaagagttcctgccagaaggtcaggacattggggcgttcgtggccgaacaaaaggtggaatatacgctaggagaggaatccgaggcacctggccagcgggccctgcccagcgaggagctgaatcgtcagctggagaagctgttaaaggaaggatcctctaatcaacgagtatttgattggattgaagctaacctcagcgagcagcagattgtgtcgaataccttagtgcgagcactgatgacagctgtgtgctattccgccattatctttgagaccccactgagagtcgacgtcgcagtcctcaaagccagggccaaacttctccagaagtacttgtgcgacgagcagaaggaattacaagccttatacgctcttcaagccctggtggtgaccctggagcaaccccccaatctgcttcgtatgttcttcgatgccctgtacgatgaggatgttgtgaaagaggacgcattttactcctgggagtccagtaaggatccagccgaacagcaaggtaagggggttgccctgaagtccgttactgcttttttcaagtggttgcgggaagctgaagaggagagtgatcacaattag

SEQ ID NO: 74286 - DNA, 4821 bp, Artificial Sequence
  derived and/or modified sequence
atgaataaagcccctcagtccaccgggcctccccccgcgccctcacctgggctcccacagccggcctttcccccaggccagactgcgccggtcgtgtttagcacaccgcaggctacccagatgaatacgccatctcagcccaggcagggtggctttcggtccttgcaacacttctatccttctcgcgcccagcccccaagctccgccgcttcacgggtccagtcggccgctccagcacgacccggcccggcagcacacgtgtaccctgctggctcccaggttatgatgattccctcgcagatcagttatcctgccagccagggcgcatattacatccccgggcagggacgaagcacctacgtggtgcccacccagcaataccctgtgcagccaggagcaccgggcttctaccctggggcgtcccccactgaatttggcacatatgccggagcttattatcctgcccagggggtccagcagtttccaaccggcgtggcgcccacccctgttctgatgaatcagccacctcaaatcgcacccaagagggaacgcaagacgatccggattagggatcctaaccagggcggaaaagatatcaccgaggagatcatgtctggagccaggaccgcatctactcccactccccctcaaactggtggaggcctggaaccccaggccaatggagagactcctcaggtagcggtcatagtgagaccggacgaccggagtcaaggtgctatcatagcagatcggccaggcctccccggacctgagcactccccaagcgaatcacagccttcgagtccgtctcctacaccttctccctcacctgtcctagagccggggagcgagcccaatcttgccgtgctgagcatcccaggagacaccatgacaactattcaaatgtcagtggaggagagtacacctatctctagagaaactggtgaaccctaccgactttccccagaacctacacccctcgcagagcccattctggaggtggaggtaactctttccaagcccgtgcctgagtccgagttctcaagtagtcctctacaggccccgacacctctagcatcacacaccgttgagatacacgagcccaatggcatggttccatcagaggatctcgaaccagaggtcgagtcatcacctgaactggcaccacctcctgcatgtccttcggagagccctgtcccaatcgcccccacagcccagccagaagagctccttaacggcgccccgtcaccgcccgcagtggacctgtctcccgtatctgagccagaagagcaggcaaaagaggtgaccgcgagcatggccccacccaccattcccagtgccacacctgctacagccccatctgctactagtcctgctcaggaggaagagatggaggaagaggaagaggaagaggagggggaggccggcgaggccggtgaagccgagtctgaaaaaggcggggaagagctccttccacccgagtctacccctatccctgcaaacctctcccaaaatttggaagcggccgccgcgacccaggtcgccgtgtccgtacctaagcgaaggcgaaaaatcaaagagttaaataaaaaagaagccgtgggtgacctgctggacgcattcaaggaggcgaaccccgccgtgcccgaggtggagaaccagcccccggctggcagtaatcctggaccggaaagcgaagggtctggggtgccaccacggcctgaggaagccgatgagacctgggattctaaggaagacaagatccataatgcggagaatatccaacctggggaacaaaaatacgagtacaagtccgatcaatggaagccccttaacttggaagaaaaaaagcgatatgatcgcgaattcttgctcggttttcaatttatcttcgccagtatgcagaagcccgaaggtctgccgcacatcagtgacgtggtgctggacaaagccaataagacccccctgaggcccctggaccctactcggttgcagggaattaattgtggcccggacttcacaccttccttcgccaacctgggcagaacgaccttgagtacacgaggccctcctcgtggagggccaggtggagagctccctcgcgggcccgccggcctcggacctaggcgcagccagcaggggccccgaaaagaaccacgcaagataatcgcaaccgtcctcatgacagaagatattaaactgaataaggctgaaaaggcctggaaaccttcctccaagcgaacggccgctgataaggaccgcggcgaggaggacgctgacgggagtaagacgcaggatctgttcaggcgggtgcggagtatcctcaataagctgacaccgcagatgttccagcaactaatgaagcaggtgactcagttggcaatagatacagaggagaggctgaagggagtcatcgacctaattttcgagaaagccatctcagaacccaatttctccgtggcctacgccaatatgtgcaggtgtctcatggcgcttaaggtgcctactacagaaaagcccacagtcaccgtcaactttagaaagctgctgctgaaccgatgccaaaaagagttcgagaaagacaaagacgatgacgaagttttcgagaagaaacagaaagaaatggacgaagcagctactgccgaagagcgcggtcgtctcaaggaggagctcgaggaggctcgagacattgcgcggcgaagatccttaggcaatatcaaattcatcggggagctctttaagcttaaaatgttaaccgaggccattatgcatgattgcgtggtaaaactgctcaagaatcatgatgaagagtccctcgagtgtctctgcaggctccttactaccatagggaaggatcttgacttcgagaaggccaagccccgcatggatcaatattttaatcagatggagaaaattattaaggaaaaaaagacctcaagcaggatcagatttatgctacaagacgttctcgatctacggggatctaattgggttccaaggaggggggatcaggggcccaaaaccatagaccagatccacaaggaagccgaaatggaagaacatagggagcacataaaagttcagcagcttatggccaaaggatctgacaaacgaagggggggccctcccggacccccaatttcccggggcctaccactagttgatgacggcggctggaatacagttccaatctccaaagggagtcggccaatcgacacaagcaggctgaccaaaatcacaaagccagggtcaatagactcgaataatcagttatttgcccctggcggcaggcttagctggggaaaggggtcttcaggaggatccggcgccaaacccagcgacgcggcctctgaagccgcacgacccgcgacaagcacactcaatagattttctgcactgcaacaagctgtgcccactgagagcaccgataacagaagagttgttcaaaggtctagccttagccgggagcgcggcgagaaggcaggcgatcgcggcgatcgattggagaggtcagagcgcgggggcgaccgtggtgacaggctggatcgggctcggaccccggcaacaaagaggtctttcagcaaagaagttgaagaaaggtctcgggagcgaccttcccagcccgaaggactgaggaaggccgcttctctgacggaggaccgggacagagggagagacgccgtgaagcgagaagccgcactgccccctgtgtctcccctgaaggccgctctgtctgaagaagaacttgagaagaaaagcaaggctattatagaggagtacctccacctgaatgatatgaaggaagctgtgcaatgcgttcaggaactcgcgtctccctccctgctgttcatcttcgtacgccatggagttgagtccactctggagagaagtgctatcgccagagagcacatgggtcaactgttgcaccagttgctttgtgccgggcacctgagcacggctcaatattaccagggcttgtatgaaatcctggaactggctgaggatatggaaatcgacatccctcacgtgtggttgtatcttgctgagctggtgactccaatactccaggaaggaggtgtgcccatgggggagctatttcgggagattaccaagccgcttcgacctcttggaaaggccgcttctttgctccttgagatcctggggctgctgtgtaaaagcatgggtcctaaaaaagtgggtaccctttggagagaagcagggctttcgtggaaggagtttctgccggagggtcaggacatcggagcttttgtcgctgaacaaaaagtcgaatacactctgggcgaggaatctgaagctccggggcagagggctttacccagtgaggagttaaaccggcagctggagaagctcttgaaagaaggaagtagcaatcaaagggttttcgattggatagaggccaaccttagtgagcaacagattgtgagcaatactctcgtccgtgcacttatgaccgctgtttgctatagtgctatcatctttgagactcccttaagagtggacgtagcagtgttaaaggcccgggctaaactcttacagaagtatctttgtgatgagcagaaggaactgcaggctctgtatgccttgcaggcgcttgttgtcaccctggagcaaccccccaacctgctgcgaatgttctttgacgccctctacgacgaggatgtggtgaaggaggacgctttttactcatgggagagtagcaaggacccagctgaacaacaaggcaaaggtgtcgctctgaaatctgttactgctttcttcaaatggctcagagaagccgaagaagagtccgatcacaattag

SEQ ID NO: 74287 - DNA, 4821 bp, Artificial Sequence
  derived and/or modified sequence
atgaacaaggccccccagagtaccggcccccctcccgcgccatcacccggcctcccccagcccgcttttcctcccggccagacagctccagtggtgttctccactccccaggccacacagatgaataccccctctcaacccaggcagggcggattccgatccctacagcacttttaccccagccgagcacagccaccaagttctgcagcttctcgggtccaaagcgcagcacctgcgaggcccggtcctgccgcccatgtataccctgccgggtcacaggtgatgatgatcccttcgcagatatcctaccccgccagccagggagcatactacattccggggcaaggaagatccacctacgttgtgcctactcagcaataccccgtgcaacccggggcaccgggattctacccgggtgcgtcccctacagagtttggaacgtacgccggggcttactacccagctcagggcgtgcagcagtttccgacgggagtggcgcccactcctgtgctcatgaatcagccaccgcagattgctcctaaacgcgagagaaagactatccgcatccgcgacccaaaccaaggcggcaaagacatcacagaggagattatgagcggtgcgaggactgcgagcaccccgacgccaccccagactggcggcggactggaaccacaggctaacggcgaaacaccccaggtggccgttatcgtacggcctgatgacagatcccagggagctatcatcgcagaccgcccaggactcccggggccagagcattctccctccgagtcccagccctccagcccctcccctaccccgtctccgtcgcctgtcctcgaaccgggatccgagcccaacctggccgtcttgagtattcccggcgatacaatgacaactatccagatgtctgtggaggagtctacacccatatctagggagactggcgaaccttatcggctctcgccagagcctactcccctcgccgagcccatccttgaagtcgaggtcacgctttccaaaccagtacccgagtccgagttcagctcttctccactgcaagcccccacacccctcgcaagtcacaccgtggaaatacacgagccaaatgggatggttccgtccgaagacctcgagcctgaggtggagtcgtcaccagaactggcaccaccccctgcatgtccttcagaatctccagttccaatcgcacctaccgctcaaccagaagaactactaaatggtgccccttctccccctgccgtcgatctgagcccagtttctgaacccgaagagcaggcgaaagaggtcactgcctccatggccccgcccactattcctagcgcgacgccggcgaccgctccctctgccacttcacccgcgcaggaggaagaaatggaagaggaggaagaagaggaggagggtgaggcgggagaagctggcgaggccgagtcagaaaaaggcggggaagaactgctgccgcccgaatctactcccattccagccaacctcagtcaaaacctcgaagccgccgcagctactcaagttgccgtttccgttcctaagagacgtcggaagatcaaagaactaaataaaaaggaagcagtcggagaccttttagacgctttcaaggaggctaatcccgcagtccccgaagtcgaaaatcagccacctgccggttcaaaccccggacccgaatcagagggcagtggggttcctccacgacccgaagaggcggacgaaacatgggactcgaaggaggataaaattcacaatgctgagaacatccagcctggggagcagaagtacgagtataagtcagaccagtggaagcccctgaatttagaagagaagaaacgctacgaccgcgagtttctgttgggattccagtttatcttcgccagcatgcagaagcccgaaggtttgccgcatatttcggacgtcgtgctcgacaaagccaacaaaacccctttgcggccactggatccaacccgtcttcagggaataaattgtgggccagattttaccccctcttttgccaaccttggaagaactaccttgtcaactcgaggaccaccccggggaggaccaggaggggagctgccaagagggcccgcgggcctcggcccacgccgaagccagcagggacctcggaaagaaccaagaaaaattatcgccactgtgctgatgactgaggacatcaaactgaataaggcagagaaagcctggaagccatcctccaaacgcaccgccgctgataaggaccggggggaagaagacgccgatggaagtaagacccaggaccttttccggcgtgtgaggtcaattctgaataagctgacgccacagatgtttcagcaactcatgaagcaagtgacacaactggccatcgataccgaagaacggcttaagggggttatcgacctcatcttcgaaaaggctattagtgagccaaatttcagcgtggcgtatgcaaatatgtgcaggtgcctgatggcactaaaggtacccaccactgagaagcccacagtgactgttaatttccgcaagctgctgctgaaccgatgtcagaaagagtttgagaaggacaaagacgacgacgaggtgttcgaaaagaagcagaaagagatggatgaagcggctacagcagaagagcgtggtcgcctcaaggaggagctcgaggaagctcgggatatagctcgcagacggtctctcggaaatatcaagtttatcggagaattgttcaagctgaagatgttgaccgaagccattatgcacgactgcgtagttaagcttctgaaaaaccacgacgaagagagtctggagtgtctctgccggctactgactactattggtaaagacctggattttgagaaggcgaagccacgaatggatcagtacttcaatcagatggaaaagattatcaaggagaagaaaacctccagccgaattcgtttcatgctccaagacgtgcttgacttacgcggctccaactgggtccccagaaggggagaccaggggccaaaaacaatcgatcaaatccacaaggaagcagagatggaggagcatagagagcatatcaaagtccagcagctcatggctaagggcagtgacaaacgcagggggggtccaccgggaccgcctatatctagaggactacccctcgtggatgatggaggctggaataccgttcctatcagtaaaggctcaaggccgatcgatacttccaggctcactaagatcaccaagcctgggagcattgactcaaataaccagcttttcgcgcctggcgggaggctatcttggggcaaagggtctagcggaggatctggggctaaaccctccgatgcggcatccgaggccgcacgacctgccacctccactctgaacaggttcagcgcgctccagcaggccgtgcctactgaatcgaccgacaatcggagggtggtccagcgatcttctctttccagggagcgaggggagaaagccggggaccggggggaccggctggagagatccgagcgggggggcgaccggggagatagactggatagagctagaacgcccgctacaaaacgcagtttttccaaggaagtcgaggagagaagtagggaaaggccctcacagccggaggggcttaggaaagctgcaagtttgacagaagaccgggaccgcggtagagacgctgtaaaacgagaagctgctctgcccccagtgagccccttgaaggccgctctatctgaggaggaactggagaagaaatcgaaggccattattgaggagtatctgcacttgaacgacatgaaagaagccgtccagtgcgtccaagaattggcatccccatccttactgttcatcttcgtgcgacacggagtggagagcacactggaacggtcagcaatcgcaagggagcatatgggccagttacttcaccaactcctctgcgctggacacctgtcaacagctcaatactaccaaggactttacgagatactggagctcgcagaggatatggagattgatataccgcacgtttggctctaccttgccgaactggtaaccccgattttacaagaaggcggagtgccgatgggcgaactatttcgggagatcaccaagcctctccgacccctggggaaagctgctagcttgttgttagagatcctgggcctgctttgtaaaagtatgggacctaaaaaggtggggacattgtggcgggaggctggcttgagttggaaggaatttttgcctgaagggcaggacatcggagcgtttgtcgcagagcagaaagtggaatacacactaggggaggaatcagaggctcctggccagagagccttaccctctgaagaactaaaccgccagctggaaaaacttctgaaagaagggtcatctaatcagagagtcttcgattggatcgaagccaacctctccgagcagcagattgtatcaaacacgcttgttagagcacttatgacagccgtatgctacagcgccatcatctttgagacccctctgagagtggacgtggccgtcctcaaggcgcgcgccaagctcctgcaaaagtacctatgtgacgaacagaaggagcttcaggctctgtatgccctgcaggccctcgtcgtgacgcttgaacagcctccaaatctcctgagaatgttcttcgacgcgctgtacgatgaggacgtagtgaaggaggacgccttttacagctgggagagcagcaaggatccagcggaacaacagggtaagggggtggccctaaaatccgtgaccgctttttttaaatggctccgggaggcagaggaagagtccgatcacaactag

SEQ ID NO: 74288 - DNA, 432 bp, Artificial Sequence
  derived and/or modified sequence
atgtccggtgcaaggaccgcttcgactcctacacccccacagacaggcggggggctggaacctcaggccaacggggagaccccccaggttgccgttatcgtgcgccctgacgatagaagtcagggcgcaatcatcgctgatcggcctgggcttcccggaccagaacattctccctctgagagtcagccgagctccccttcccccacaccatctccctcgccggtgctagagcctggttctgaacctaacctcgccgtcttgagcatccctggggataccatgaccacaatacagatgtccgtcgaagagtctacacccataagtcgagaaacaggagagccatatcgcttgtcccctgaacccactcccctggctgagcctatcctagaagtggaagttactctgtctaagccagtacctgagagcgagtag

SEQ ID NO: 74289 - DNA, 384 bp, Artificial Sequence
  derived and/or modified sequence
atgtcaggagccagaacggcttcaaccccaaccccaccccagaccggcggaggtttggaaccccaggccaatggagagacaccacaggtagcagtaatcgtgcggccagatgacaggagtcagggagccataattgccgatcggcctggactgcctggacccgaacattcgccgagcgagagccagccatccagtccctcccccaccccatccccatccccagtgctggaaccaggaagtgaacccaacttggccgtgttgagcatccctggcgatacaatgacaacaatacaaatgagcgtggaggagtcaacaccgatttccagggagaccggggaaccgtatcgcctgagtcctgaaccgacccctcttgccgagccttag

SEQ ID NO: 74290 - DNA, 4986 bp, Artificial Sequence
  derived and/or modified sequence
cgcggactgaaggagactgaaggtgctggggggaccctgatgtggcaccaaatgaaatgaacaaagctccacagtccacaggccccccacccgccccatcccccggactcccacagccagcgtttcccccggggcagacagcgccggtggtgttcagtacgccacaagcgacacaaatgaacacgccttctcagccccgccagggaggattcaggtctctgcagcacttctaccctagccgggcccagcccccgagcagtgcagcctcccgagtgcagagtgcagcccctgcccgccctggcccagctgcccatgtctaccctgctggatcccaagtaatgatgatcccttcccagatctcctacccagcctcccagggggcctactacatccctggacaggggcgttccacatacgttgtcccgacacagcagtaccctgtgcagccaggagccccaggcttctatccaggtgcaagccctacagaatttgggacctacgctggcgcctactatccagcccaaggggtgcagcagtttcccactggcgtggcccccaccccagttttgatgaaccagccaccccagattgctcccaagagggagcgtaagacgatccgaattcgagatccaaaccaaggaggaaaggatatcacagaggagatcatgtctggggcccgcactgcctccacacccacccctccccagacgggaggcggtctggagcctcaagctaatggggagacgccccaggttgctgtcattgtccggccagatgaccggtcacagggagcaatcattgctgaccggccagggctgcctggcccagagcatagcccttcagaatcccagccttcgtcgccttctccgaccccatcaccatccccagtcttggaaccggggtctgagcctaatctcgcagtcctctctattcctggggacactatgacaactatacaaatgtctgtagaagaatcaacccccatctcccgtgaaactggggagccatatcgcctctctccagaacccactcctctcgccgaacccatactggaagtagaagtgacacttagcaaaccggttccagaatctgagttttcttccagtcctctccaggctcccacccctttggcatctcacacagtggaaattcatgagcctaatggcatggtcccatctgaagatctggaaccagaggtggagtcaagcccagagcttgctcctcccccagcttgcccctccgaatcccctgtgcccattgctccaactgcccaacctgaggaactgctcaacggagccccctcgccaccagctgtggacttaagcccagtcagtgagccagaggagcaggccaaggaggtgacagcatcaatggcgccccccaccatcccctctgctactccagctacggctccttcagctacttccccagctcaggaggaggaaatggaagaagaagaagaagaggaagaaggagaagcaggagaagcaggagaagctgagagtgagaaaggaggagaggaactgctccccccagagagtacccctattccagccaacttgtctcagaatttggaggcagcagcagccactcaagtggcagtatctgtgccaaagaggagacggaaaattaaggagctaaataagaaggaggctgttggagaccttctggatgccttcaaggaggcgaacccggcagtaccagaggtggaaaatcagcctcctgcaggcagcaatccaggcccagagtctgagggcagtggtgtgcccccacgtcctgaggaagcagatgagacctgggactcaaaggaagacaaaattcacaatgctgagaacatccagcccggggaacagaagtatgaatataagtcagatcagtggaagcctctaaacctagaggagaaaaaacgttacgaccgtgagttcctgcttggttttcagttcatctttgccagtatgcagaagccagagggattgccacatatcagtgacgtggtgctggacaaggccaataaaacaccactgcggccactggatcccactagactacaaggcataaattgtggcccagacttcactccatcctttgccaaccttggccggacaacccttagcacccgtgggcccccaaggggtgggccaggtggggagctgccccgtgggccggctggcctgggaccccggcgctctcagcagggaccccgaaaagaaccacgcaagatcattgccacagtgttaatgaccgaagatataaaactgaacaaagcagagaaagcctggaaacccagcagcaagcggacggcggctgataaggatcgaggggaagaagatgctgatggcagcaaaacccaggacctattccgcagggtgcgctccatcctgaataaactgacaccccagatgttccagcagctgatgaagcaagtgacgcagctggccatcgacaccgaggaacgcctcaaaggggtcattgacctcatttttgagaaggccatttcagagcccaacttctctgtggcctatgccaacatgtgccgctgcctcatggcgctgaaagtgcccactacggaaaagccaacagtgactgtgaacttccgaaagctgttgttgaatcgatgtcagaaggagtttgagaaagacaaagatgatgatgaggtttttgagaagaagcaaaaagagatggatgaagctgctacggcagaggaacgaggacgcctgaaggaagagctggaagaggctcgggacatagcccggcggcgctctttagggaatatcaagtttattggagagttgttcaaactgaagatgttaacagaggcaataatgcatgactgtgtggtcaaactgcttaagaaccatgatgaagagtcccttgagtgcctttgtcgtctgctcaccaccattggcaaagacctggactttgaaaaagccaagccccgaatggatcagtatttcaaccagatggaaaaaatcattaaagaaaagaagacgtcatcccgcatccgctttatgctgcaggacgtgctggatctgcgagggagcaattgggtgccacgccgaggggatcagggtcccaagaccattgaccagatccataaggaggctgagatggaagaacatcgagagcacatcaaagtgcagcagctcatggccaagggcagtgacaagcgtcggggcggtcctccaggccctcccatcagccgtggacttccccttgtggatgatggtggctggaacacagttcccatcagcaaaggtagccgccccattgacacctcacgactcaccaagatcaccaagcctggctccatcgattctaacaaccagctctttgcacctggagggcgactgagctggggcaagggcagcagcggaggctcaggagccaagccctcagacgcagcatcagaagctgctcgcccagctactagtactttgaatcgcttctcagcccttcaacaagcggtacccacagaaagcacagataatagacgtgtggtgcagaggagtagcttgagccgagaacgaggcgagaaagctggagaccgaggagaccgcctagagcggagtgaacggggaggggaccgtggggaccggcttgatcgtgcgcggacacctgctaccaagcggagcttcagcaaggaagtggaggagcggagtagagaacggccctcccagcctgaggggctgcgcaaggcagctagcctcacggaggatcgggaccgtgggcgggatgccgtgaagcgagaagctgccctacccccagtgagccccctgaaggcggctctctctgaggaggagttagagaagaaatccaaggctatcattgaggaatatctccatctcaatgacatgaaagaggcagtccagtgcgtgcaggagctggcctcaccctccttgctcttcatctttgtacggcatggtgtcgagtctacgctggagcgcagtgccattgctcgtgagcatatggggcagctgctgcaccagctgctctgtgctgggcatctgtctactgctcagtactaccaagggttgtatgaaatcttggaattggctgaggacatggaaattgacatcccccacgtgtggctctacctagcggaactggtaacacccattctgcaggaaggtggggtgcccatgggggagctgttcagggagattacaaagcctctgagaccgttgggcaaagctgcttccctgttgctggagatcctgggcctcctgtgcaaaagcatgggtcctaaaaaggtggggacgctgtggcgagaagccgggcttagctggaaggaatttctacctgaaggccaggacattggtgcattcgtcgctgaacagaaggtggagtataccctgggagaggagtcggaagcccctggccagagggcactcccctccgaggagctgaacaggcagctggagaagctgctgaaggagggcagcagtaaccagcgggtgttcgactggatagaggccaacctgagtgagcagcagatagtatccaacacgttagttcgagccctcatgacggctgtctgctattctgcaattatttttgagactcccctccgagtggacgttgcagtgctgaaagcgcgagcgaagctgctgcagaaatacctgtgtgacgagcagaaggagctacaggcgctctacgccctccaggcccttgtagtgaccttagaacagcctcccaacctgctgcggatgttctttgacgcactgtatgacgaggacgtggtgaaggaggatgccttctacagttgggagagtagcaaggaccccgctgagcagcagggcaagggtgtggcccttaaatctgtcacagccttcttcaagtggctccgtgaagcagaggaggagtctgaccacaactgagggctggtggggccggggacctggagccccatggacacacagatggcccggctagccgcctggactgcaggggggcggcagcagcggcggtggcagtgggtgcctgtag

SEQ ID NO: 74291 - DNA, 5129 bp, Artificial Sequence
  derived and/or modified sequence
agaagcggtggccgccgagcgggatctgtgcggggagccggaaatggttgtggactacgtctgtgcggctgcgtggggctcggccgcgcggactgaaggagactgaaggccctcggatgcccagaacctgtaggccgcaccgtggacttgttcttaatcgagggggtgctggggggaccctgatgtggcaccaaatgaaatgaacaaagctccacagtccacaggccccccacccgccccatcccccggactcccacagccagcgtttcccccggggcagacagcgccggtggtgttcagtacgccacaagcgacacaaatgaacacgccttctcagccccgccagggaggattcaggtctctgcagcacttctaccctagccgggcccagcccccgagcagtgcagcctcccgagtgcagagtgcagcccctgcccgccctggcccagctgcccatgtctaccctgctggatcccaagtaatgatgatcccttcccagatctcctacccagcctcccagggggcctactacatccctggacaggggcgttccacatacgttgtcccgacacagcagtaccctgtgcagccaggagccccaggcttctatccaggtgcaagccctacagaatttgggacctacgctggcgcctactatccagcccaaggggtgcagcagtttcccactggcgtggcccccaccccagttttgatgaaccagccaccccagattgctcccaagagggagcgtaagacgatccgaattcgagatccaaaccaaggaggaaaggatatcacagaggagatcatgtctggggcccgcactgcctccacacccacccctccccagacgggaggcggtctggagcctcaagctaatggggagacgccccaggttgctgtcattgtccggccagatgaccggtcacagggagcaatcattgctgaccggccagggctgcctggcccagagcatagcccttcagaatcccagccttcgtcgccttctccgaccccatcaccatccccagtcttggaaccggggtctgagcctaatctcgcagtcctctctattcctggggacactatgacaactatacaaatgtctgtagaagaatcaacccccatctcccgtgaaactggggagccatatcgcctctctccagaacccactcctctcgccgaacccatactggaagtagaagtgacacttagcaaaccggttccagaatctgagttttcttccagtcctctccaggctcccacccctttggcatctcacacagtggaaattcatgagcctaatggcatggtcccatctgaagatctggaaccagaggtggagtcaagcccagagcttgctcctcccccagcttgcccctccgaatcccctgtgcccattgctccaactgcccaacctgaggaactgctcaacggagccccctcgccaccagctgtggacttaagcccagtcagtgagccagaggagcaggccaaggaggtgacagcatcaatggcgccccccaccatcccctctgctactccagctacggctccttcagctacttccccagctcaggaggaggaaatggaagaagaagaagaagaggaagaaggagaagcaggagaagcaggagaagctgagagtgagaaaggaggagaggaactgctccccccagagagtacccctattccagccaacttgtctcagaatttggaggcagcagcagccactcaagtggcagtatctgtgccaaagaggagacggaaaattaaggagctaaataagaaggaggctgttggagaccttctggatgccttcaaggaggcgaacccggcagtaccagaggtggaaaatcagcctcctgcaggcagcaatccaggcccagagtctgagggcagtggtgtgcccccacgtcctgaggaagcagatgagacctgggactcaaaggaagacaaaattcacaatgctgagaacatccagcccggggaacagaagtatgaatataagtcagatcagtggaagcctctaaacctagaggagaaaaaacgttacgaccgtgagttcctgcttggttttcagttcatctttgccagtatgcagaagccagagggattgccacatatcagtgacgtggtgctggacaaggccaataaaacaccactgcggccactggatcccactagactacaaggcataaattgtggcccagacttcactccatcctttgccaaccttggccggacaacccttagcacccgtgggcccccaaggggtgggccaggtggggagctgccccgtgggccggctggcctgggaccccggcgctctcagcagggaccccgaaaagaaccacgcaagatcattgccacagtgttaatgaccgaagatataaaactgaacaaagcagagaaagcctggaaacccagcagcaagcggacggcggctgataaggatcgaggggaagaagatgctgatggcagcaaaacccaggacctattccgcagggtgcgctccatcctgaataaactgacaccccagatgttccagcagctgatgaagcaagtgacgcagctggccatcgacaccgaggaacgcctcaaaggggtcattgacctcatttttgagaaggccatttcagagcccaacttctctgtggcctatgccaacatgtgccgctgcctcatggcgctgaaagtgcccactacggaaaagccaacagtgactgtgaacttccgaaagctgttgttgaatcgatgtcagaaggagtttgagaaagacaaagatgatgatgaggtttttgagaagaagcaaaaagagatggatgaagctgctacggcagaggaacgaggacgcctgaaggaagagctggaagaggctcgggacatagcccggcggcgctctttagggaatatcaagtttattggagagttgttcaaactgaagatgttaacagaggcaataatgcatgactgtgtggtcaaactgcttaagaaccatgatgaagagtcccttgagtgcctttgtcgtctgctcaccaccattggcaaagacctggactttgaaaaagccaagccccgaatggatcagtatttcaaccagatggaaaaaatcattaaagaaaagaagacgtcatcccgcatccgctttatgctgcaggacgtgctggatctgcgagggagcaattgggtgccacgccgaggggatcagggtcccaagaccattgaccagatccataaggaggctgagatggaagaacatcgagagcacatcaaagtgcagcagctcatggccaagggcagtgacaagcgtcggggcggtcctccaggccctcccatcagccgtggacttccccttgtggatgatggtggctggaacacagttcccatcagcaaaggtagccgccccattgacacctcacgactcaccaagatcaccaagcctggctccatcgattctaacaaccagctctttgcacctggagggcgactgagctggggcaagggcagcagcggaggctcaggagccaagccctcagacgcagcatcagaagctgctcgcccagctactagtactttgaatcgcttctcagcccttcaacaagcggtacccacagaaagcacagataatagacgtgtggtgcagaggagtagcttgagccgagaacgaggcgagaaagctggagaccgaggagaccgcctagagcggagtgaacggggaggggaccgtggggaccggcttgatcgtgcgcggacacctgctaccaagcggagcttcagcaaggaagtggaggagcggagtagagaacggccctcccagcctgaggggctgcgcaaggcagctagcctcacggaggatcgggaccgtgggcgggatgccgtgaagcgagaagctgccctacccccagtgagccccctgaaggcggctctctctgaggaggagttagagaagaaatccaaggctatcattgaggaatatctccatctcaatgacatgaaagaggcagtccagtgcgtgcaggagctggcctcaccctccttgctcttcatctttgtacggcatggtgtcgagtctacgctggagcgcagtgccattgctcgtgagcatatggggcagctgctgcaccagctgctctgtgctgggcatctgtctactgctcagtactaccaagggttgtatgaaatcttggaattggctgaggacatggaaattgacatcccccacgtgtggctctacctagcggaactggtaacacccattctgcaggaaggtggggtgcccatgggggagctgttcagggagattacaaagcctctgagaccgttgggcaaagctgcttccctgttgctggagatcctgggcctcctgtgcaaaagcatgggtcctaaaaaggtggggacgctgtggcgagaagccgggcttagctggaaggaatttctacctgaaggccaggacattggtgcattcgtcgctgaacagaaggtggagtataccctgggagaggagtcggaagcccctggccagagggcactcccctccgaggagctgaacaggcagctggagaagctgctgaaggagggcagcagtaaccagcgggtgttcgactggatagaggccaacctgagtgagcagcagatagtatccaacacgttagttcgagccctcatgacggctgtctgctattctgcaattatttttgagactcccctccgagtggacgttgcagtgctgaaagcgcgagcgaagctgctgcagaaatacctgtgtgacgagcagaaggagctacaggcgctctacgccctccaggcccttgtagtgaccttagaacagcctcccaacctgctgcggatgttctttgacgcactgtatgacgaggacgtggtgaaggaggatgccttctacagttgggagagtagcaaggaccccgctgagcagcagggcaagggtgtggcccttaaatctgtcacagccttcttcaagtggctccgtgaagcagaggaggagtctgaccacaactgagggctggtggggccggggacctggagccccatggacacacagatggcccggctagccgcctggactgcaggggggcggcagcagcggcggtggcagtgggtgcctgtag

SEQ ID NO: 74292 - DNA, 5229 bp, Artificial Sequence
  derived and/or modified sequence
gtgggggcgccggctgcgcctgcggagaagcggtggccgccgagcgggatctgtgcggggagccggaaatggttgtggactacgtctgtgcggctgcgtggggctcggccgcgcggactgaaggagactgaagcacttctaccctagccgggcccagcccccgagcagtgcagcctcccgagtgcagagtgcagcccctgcccgccctggcccagctgcccatgtctaccctgctggatcccaagtaatgatgatcccttcccagatctcctacccagcctcccagggggcctactacatccctggacaggggcgttccacatacgttgtcccgacacagcagtaccctgtgcagccaggagccccaggcttctatccaggtgcaagccctacagaatttgggacctacgctggcgcctactatccagcccaaggggtgcagcagtttcccactggcgtggcccccaccccagttttgatgaaccagccaccccagattgctcccaagagggagcgtaagacgatccgaattcgagatccaaaccaaggaggaaaggatatcacagaggagatcatgtctggggcccgcactgcctccacacccacccctccccagacgggaggcggtctggagcctcaagctaatggggagacgccccaggttgctgtcattgtccggccagatgaccggtcacagggagcaatcattgctgaccggccagggctgcctggcccagagcatagcccttcagaatcccagccttcgtcgccttctccgaccccatcaccatccccagtcttggaaccggggtctgagcctaatctcgcagtcctctctattcctggggacactatgacaactatacaaatgtctgtagaagaatcaacccccatctcccgtgaaactggggagccatatcgcctctctccagaacccactcctctcgccgaacccatactggaagtagaagtgacacttagcaaaccggttccagaatctgagttttcttccagtcctctccaggctcccacccctttggcatctcacacagtggaaattcatgagcctaatggcatggtcccatctgaagatctggaaccagaggtggagtcaagcccagagcttgctcctcccccagcttgcccctccgaatcccctgtgcccattgctccaactgcccaacctgaggaactgctcaacggagccccctcgccaccagctgtggacttaagcccagtcagtgagccagaggagcaggccaaggaggtgacagcatcaatggcgccccccaccatcccctctgctactccagctacggctccttcagctacttccccagctcaggaggaggaaatggaagaagaagaagaagaggaagaaggagaagcaggagaagcaggagaagctgagagtgagaaaggaggagaggaactgctccccccagagagtacccctattccagccaacttgtctcagaatttggaggcagcagcagccactcaagtggcagtatctgtgccaaagaggagacggaaaattaaggagctaaataagaaggaggctgttggagaccttctggatgccttcaaggaggcgaacccggcagtaccagaggtggaaaatcagcctcctgcaggcagcaatccaggcccagagtctgagggcagtggtgtgcccccacgtcctgaggaagcagatgagacctgggactcaaaggaagacaaaattcacaatgctgagaacatccagcccggggaacagaagtatgaatataagtcagatcagtggaagcctctaaacctagaggagaaaaaacgttacgaccgtgagttcctgcttggttttcagttcatctttgccagtatgcagaagccagagggattgccacatatcagtgacgtggtgctggacaaggccaataaaacaccactgcggccactggatcccactagactacaaggcataaattgtggcccagacttcactccatcctttgccaaccttggccggacaacccttagcacccgtgggcccccaaggggtgggccaggtggggagctgccccgtgggccggctggcctgggaccccggcgctctcagcagggaccccgaaaagaaccacgcaagatcattgccacagtgttaatgaccgaagatataaaactgaacaaagcagagaaagcctggaaacccagcagcaagcggacggcggctgataaggatcgaggggaagaagatgctgatggcagcaaaacccaggacctattccgcagggtgcgctccatcctgaataaactgacaccccagatgttccagcagctgatgaagcaagtgacgcagctggccatcgacaccgaggaacgcctcaaaggggtcattgacctcatttttgagaaggccatttcagagcccaacttctctgtggcctatgccaacatgtgccgctgcctcatggcgctgaaagtgcccactacggaaaagccaacagtgactgtgaacttccgaaagctgttgttgaatcgatgtcagaaggagtttgagaaagacaaagatgatgatgaggtttttgagaagaagcaaaaagagatggatgaagctgctacggcagaggaacgaggacgcctgaaggaagagctggaagaggctcgggacatagcccggcggcgctctttagggaatatcaagtttattggagagttgttcaaactgaagatgttaacagaggcaataatgcatgactgtgtggtcaaactgcttaagaaccatgatgaagagtcccttgagtgcctttgtcgtctgctcaccaccattggcaaagacctggactttgaaaaagccaagccccgaatggatcagtatttcaaccagatggaaaaaatcattaaagaaaagaagacgtcatcccgcatccgctttatgctgcaggacgtgctggatctgcgagggagcaattgggtgccacgccgaggggatcagggtcccaagaccattgaccagatccataaggaggctgagatggaagaacatcgagagcacatcaaagtgcagcagctcatggccaagggcagtgacaagcgtcggggcggtcctccaggccctcccatcagccgtggacttccccttgtggatgatggtggctggaacacagttcccatcagcaaaggtagccgccccattgacacctcacgactcaccaagatcaccaagcctggctccatcgattctaacaaccagctctttgcacctggagggcgactgagctggggcaagggcagcagcggaggctcaggagccaagccctcagacgcagcatcagaagctgctcgcccagctactagtactttgaatcgcttctcagcccttcaacaagcggtacccacagaaagcacagataatagacgtgtggtgcagaggagtagcttgagccgagaacgaggcgagaaagctggagaccgaggagaccgcctagagcggagtgaacggggaggggaccgtggggaccggcttgatcgtgcgcggacacctgctaccaagcggagcttcagcaaggaagtggaggagcggagtagagaacggccctcccagcctgaggggctgcgcaaggcagctagcctcacggaggatcgggaccgtgggcgggatgccgtgaagcgagaagctgccctacccccagtgagccccctgaaggcggctctctctgaggaggagttagagaagaaatccaaggctatcattgaggaatatctccatctcaatgacatgaaagaggcagtccagtgcgtgcaggagctggcctcaccctccttgctcttcatctttgtacggcatggtgtcgagtctacgctggagcgcagtgccattgctcgtgagcatatggggcagctgctgcaccagctgctctgtgctgggcatctgtctactgctcagtactaccaagggttgtatgaaatcttggaattggctgaggacatggaaattgacatcccccacgtgtggctctacctagcggaactggtaacacccattctgcaggaaggtggggtgcccatgggggagctgttcagggagattacaaagcctctgagaccgttgggcaaagctgcttccctgttgctggagatcctgggcctcctgtgcaaaagcatgggtcctaaaaaggtggggacgctgtggcgagaagccgggcttagctggaaggaatttctacctgaaggccaggacattggtgcattcgtcgctgaacagaaggtggagtataccctgggagaggagtcggaagcccctggccagagggcactcccctccgaggagctgaacaggcagctggagaagctgctgaaggagggcagcagtaaccagcgggtgttcgactggatagaggccaacctgagtgagcagcagatagtatccaacacgttagttcgagccctcatgacggctgtctgctattctgcaattatttttgagactcccctccgagtggacgttgcagtgctgaaagcgcgagcgaagctgctgcagaaatacctgtgtgacgagcagaaggagctacaggcgctctacgccctccaggcccttgtagtgaccttagaacagcctcccaacctgctgcggatgttctttgacgcactgtatgacgaggacgtggtgaaggaggatgccttctacagttgggagagtagcaaggaccccgctgagcagcagggcaagggtgtggcccttaaatctgtcacagccttcttcaagtggctccgtgaagcagaggaggagtctgaccacaactgagggctggtggggccggggacctggagccccatggacacacagatggcccggctagccgcctggactgcaggggggcggcagcagcggcggtggcagtgggtgcctgtagtgtgatgtgtctgaactaataaagtggctgaagaggcaggatggcttggggctgcctgggcccccctccaggatgccgccaggtgtccctctcctccccctggggcacagagatatattatatataaagtcttgaaatttggtgtgtcttggggtggggaggggcaccaacgcctgcccctggggtccttttttttattttctgaaaatcactctcgggactgccgtcctcgctgctgggggcatatgccccagcccctgtaccacccctgctgttgcctgggcagggggaagggggggcacggtgcctgtaattattaaacatgaattcaatt

SEQ ID NO: 74293 - DNA, 5653 bp, Artificial Sequence
  derived and/or modified sequence
gccagcgagacctggaatttccggtctggttggtctggggccccgcggagccaggttgataccctcacctcccaaccccaggccctcggatgcccagaacctgtaggccgcaccgtggacttgttcttaatcgagggggtgagtgaggggtctgtttcagtaggtcaggggttggttggaagtgatgcgggtttgacagcatgttggtggggacaggctgtatcttttctgcttcaccctcttggcatctctgggactccgtatgggacccagcccttgcatcaaccctttcaccgccccatttgccttaagcttgggtcccttcctcttcctgagcgccactctttcccaacaggtgctggggggaccctgatgtggcaccaaatgaaatgaacaaagctccacagtccacaggccccccacccgccccatcccccggactcccacagccagcgtttcccccggggcagacagcgccggtggtgttcagtacgccacaagcgacacaaatgaacacgccttctcagccccgccagggaggattcaggtctctgcagcacttctaccctagccgggcccagcccccgagcagtgcagcctcccgagtgcagagtgcagcccctgcccgccctggcccagctgcccatgtctaccctgctggatcccaagtaatgatgatcccttcccagatctcctacccagcctcccagggggcctactacatccctggacaggggcgttccacatacgttgtcccgacacagcagtaccctgtgcagccaggagccccaggcttctatccaggtgcaagccctacagaatttgggacctacgctggcgcctactatccagcccaaggggtgcagcagtttcccactggcgtggcccccaccccagttttgatgaaccagccaccccagattgctcccaagagggagcgtaagacgatccgaattcgagatccaaaccaaggaggaaaggatatcacagaggagatcatgtctggggcccgcactgcctccacacccacccctccccagacgggaggcggtctggagcctcaagctaatggggagacgccccaggttgctgtcattgtccggccagatgaccggtcacagggagcaatcattgctgaccggccagggctgcctggcccagagcatagcccttcagaatcccagccttcgtcgccttctccgaccccatcaccatccccagtcttggaaccggggtctgagcctaatctcgcagtcctctctattcctggggacactatgacaactatacaaatgtctgtagaagaatcaacccccatctcccgtgaaactggggagccatatcgcctctctccagaacccactcctctcgccgaacccatactggaagtagaagtgacacttagcaaaccggttccagaatctgagttttcttccagtcctctccaggctcccacccctttggcatctcacacagtggaaattcatgagcctaatggcatggtcccatctgaagatctggaaccagaggtggagtcaagcccagagcttgctcctcccccagcttgcccctccgaatcccctgtgcccattgctccaactgcccaacctgaggaactgctcaacggagccccctcgccaccagctgtggacttaagcccagtcagtgagccagaggagcaggccaaggaggtgacagcatcaatggcgccccccaccatcccctctgctactccagctacggctccttcagctacttccccagctcaggaggaggaaatggaagaagaagaagaagaggaagaaggagaagcaggagaagcaggagaagctgagagtgagaaaggaggagaggaactgctccccccagagagtacccctattccagccaacttgtctcagaatttggaggcagcagcagccactcaagtggcagtatctgtgccaaagaggagacggaaaattaaggagctaaataagaaggaggctgttggagaccttctggatgccttcaaggaggcgaacccggcagtaccagaggtggaaaatcagcctcctgcaggcagcaatccaggcccagagtctgagggcagtggtgtgcccccacgtcctgaggaagcagatgagacctgggactcaaaggaagacaaaattcacaatgctgagaacatccagcccggggaacagaagtatgaatataagtcagatcagtggaagcctctaaacctagaggagaaaaaacgttacgaccgtgagttcctgcttggttttcagttcatctttgccagtatgcagaagccagagggattgccacatatcagtgacgtggtgctggacaaggccaataaaacaccactgcggccactggatcccactagactacaaggcataaattgtggcccagacttcactccatcctttgccaaccttggccggacaacccttagcacccgtgggcccccaaggggtgggccaggtggggagctgccccgtgggccggctggcctgggaccccggcgctctcagcagggaccccgaaaagaaccacgcaagatcattgccacagtgttaatgaccgaagatataaaactgaacaaagcagagaaagcctggaaacccagcagcaagcggacggcggctgataaggatcgaggggaagaagatgctgatggcagcaaaacccaggacctattccgcagggtgcgctccatcctgaataaactgacaccccagatgttccagcagctgatgaagcaagtgacgcagctggccatcgacaccgaggaacgcctcaaaggggtcattgacctcatttttgagaaggccatttcagagcccaacttctctgtggcctatgccaacatgtgccgctgcctcatggcgctgaaagtgcccactacggaaaagccaacagtgactgtgaacttccgaaagctgttgttgaatcgatgtcagaaggagtttgagaaagacaaagatgatgatgaggtttttgagaagaagcaaaaagagatggatgaagctgctacggcagaggaacgaggacgcctgaaggaagagctggaagaggctcgggacatagcccggcggcgctctttagggaatatcaagtttattggagagttgttcaaactgaagatgttaacagaggcaataatgcatgactgtgtggtcaaactgcttaagaaccatgatgaagagtcccttgagtgcctttgtcgtctgctcaccaccattggcaaagacctggactttgaaaaagccaagccccgaatggatcagtatttcaaccagatggaaaaaatcattaaagaaaagaagacgtcatcccgcatccgctttatgctgcaggacgtgctggatctgcgagggagcaattgggtgccacgccgaggggatcagggtcccaagaccattgaccagatccataaggaggctgagatggaagaacatcgagagcacatcaaagtgcagcagctcatggccaagggcagtgacaagcgtcggggcggtcctccaggccctcccatcagccgtggacttccccttgtggatgatggtggctggaacacagttcccatcagcaaaggtagccgccccattgacacctcacgactcaccaagatcaccaagcctggctccatcgattctaacaaccagctctttgcacctggagggcgactgagctggggcaagggcagcagcggaggctcaggagccaagccctcagacgcagcatcagaagctgctcgcccagctactagtactttgaatcgcttctcagcccttcaacaagcggtacccacagaaagcacagataatagacgtgtggtgcagaggagtagcttgagccgagaacgaggcgagaaagctggagaccgaggagaccgcctagagcggagtgaacggggaggggaccgtggggaccggcttgatcgtgcgcggacacctgctaccaagcggagcttcagcaaggaagtggaggagcggagtagagaacggccctcccagcctgaggggctgcgcaaggcagctagcctcacggaggatcgggaccgtgggcgggatgccgtgaagcgagaagctgccctacccccagtgagccccctgaaggcggctctctctgaggaggagttagagaagaaatccaaggctatcattgaggaatatctccatctcaatgacatgaaagaggcagtccagtgcgtgcaggagctggcctcaccctccttgctcttcatctttgtacggcatggtgtcgagtctacgctggagcgcagtgccattgctcgtgagcatatggggcagctgctgcaccagctgctctgtgctgggcatctgtctactgctcagtactaccaagggttgtatgaaatcttggaattggctgaggacatggaaattgacatcccccacgtgtggctctacctagcggaactggtaacacccattctgcaggaaggtggggtgcccatgggggagctgttcagggagattacaaagcctctgagaccgttgggcaaagctgcttccctgttgctggagatcctgggcctcctgtgcaaaagcatgggtcctaaaaaggtggggacgctgtggcgagaagccgggcttagctggaaggaatttctacctgaaggccaggacattggtgcattcgtcgctgaacagaaggtggagtataccctgggagaggagtcggaagcccctggccagagggcactcccctccgaggagctgaacaggcagctggagaagctgctgaaggagggcagcagtaaccagcgggtgttcgactggatagaggccaacctgagtgagcagcagatagtatccaacacgttagttcgagccctcatgacggctgtctgctattctgcaattatttttgagactcccctccgagtggacgttgcagtgctgaaagcgcgagcgaagctgctgcagaaatacctgtgtgacgagcagaaggagctacaggcgctctacgccctccaggcccttgtagtgaccttagaacagcctcccaacctgctgcggatgttctttgacgcactgtatgacgaggacgtggtgaaggaggatgccttctacagttgggagagtagcaaggaccccgctgagcagcagggcaagggtgtggcccttaaatctgtcacagccttcttcaagtggctccgtgaagcagaggaggagtctgaccacaactgagggctggtggggccggggacctggagccccatggacacacagatggcccggctagccgcctggactgcaggggggcggcagcagcggcggtggcagtgggtgcctgtagtgtgatgtgtctgaactaataaagtggctgaagaggcaggatggcttggggctgcctgggcccccctccaggatgccgccaggtgtccctctcctccccctggggcacagagatatattatatataaagtcttgaaatttggtgtgtcttggggtggggaggggcaccaacgcctgcccctggggtccttttttttattttctgaaaatcactctcgggactgccgtcctcgctgctgggggcatatgccccagcccctgtaccacccctgctgttgcctgggcagggggaagggggggcacggtgcctgtaattattaaacatgaattcaatt

SEQ ID NO: 74294 - DNA, 558 bp, Artificial Sequence
  derived and/or modified sequence
gccggctgcgcctgcggagaagcggtggccgccgagcgggatctgtgcggggagccggaaatggttgtggactacgtctgtgcggctgcgtggggctcggccgcgcggactgaaggagactgaagatccgaattcgagatccaaaccaaggaggaaaggatatcacagaggagatcatgtctggggcccgcactgcctccacacccacccctccccagacgggaggcggtctggagcctcaagctaatggggagacgccccaggttgctgtcattgtccggccagatgaccggtcacagggagcaatcattgctgaccggccagggctgcctggcccagagcatagcccttcagaatcccagccttcgtcgccttctccgaccccatcaccatccccagtcttggaaccggggtctgagcctaatctcgcagtcctctctattcctggggacactatgacaactatacaaatgtctgtagaagaatcaacccccatctcccgtgaaactggggagccatatcgcctctctccagaacccactcctctcgccgaaccca

SEQ ID NO: 74295 - DNA, 4821 bp, Artificial Sequence
  derived and/or modified sequence
atgaacaaggccccccagagcacaggccccccaccagcccccagccctggcctgccccagcctgccttccccccaggccagacagcccctgtggtgttcagcaccccccaggccacccagatgaacacccccagccagccccggcagggcggcttccgcagcctgcagcacttctaccccagccgggcccagccccccagcagcgctgccagccgggtgcagagcgctgccccagcccggcccggccctgctgcccacgtgtacccagctggcagccaggtgatgatgatccccagccagatctcctacccagccagccagggcgcctactacatccctggccagggccgcagcacctacgtggtgcccacccagcagtaccctgtgcagcccggggcccctggcttctacccaggggccagccccacagaatttggcacctacgccggggcctactacccagcccagggcgtgcagcagttccccactggagtggcccccacccctgtgctgatgaaccagcccccccagatcgcccccaagcgggagaggaagaccatccgcatccgggaccccaaccagggcggcaaggacatcacagaggagatcatgtctggggccaggacagccagcacccccaccccaccccagacaggaggcggcctggagccccaggccaatggagagaccccccaggtggccgtcatcgtgcggccagatgacaggagccagggcgccatcatcgctgaccggcccggcctgcccggccctgagcacagccccagcgagagccagcccagcagccccagccccacccccagccccagccctgtgctggagcccggcagcgagcccaacctggccgtgctgagcatccctggggacaccatgaccaccatccagatgtctgtggaggagagcacccccatcagccgggagaccggggagccctaccgcctgagccctgagcccacccccctggccgagcccatcctggaggtggaggtgaccctgagcaagcctgtgcctgagagcgagttcagcagcagccccctgcaggcccccacccccctggccagccacacagtggagatccacgagcccaacggcatggtgcccagcgaggacctggagcctgaggtggagagcagccctgagctggcccctcctccagcctgccccagcgagagccctgtgcccatcgcccccacagcccagcctgaggagctgctgaatggagcccccagccccccagctgtggacctgagccctgtgtctgagcctgaggagcaggccaaggaggtgacagcctccatggccccacccaccatccccagcgccaccccagccacagcccccagcgccaccagccctgcccaggaggaggagatggaggaggaggaggaggaggaggagggggaggccggggaggccggggaggccgagagcgagaagggcggggaggagctgctgcccccagagagcacccccatcccagccaacctgagccagaacctggaggccgccgccgccacccaggtggccgtgtctgtgcccaagagaagaaggaagatcaaggagctgaacaagaaggaggccgtgggggacctgctggatgccttcaaggaggccaacccagctgtgcctgaggtggagaaccagcccccagctggcagcaaccctggccctgagagcgagggcagcggcgtgccccccaggcctgaggaggctgatgagacctgggacagcaaagaagacaagatccacaatgctgagaacatccagcccggggagcagaagtatgagtacaagagtgaccagtggaagcccctgaacctggaggagaagaagagatatgaccgggagttcctgctgggcttccagttcatctttgcctccatgcagaagccagagggcctgccccacatcagtgatgtggtgctggacaaggccaacaagacccccctgcggcccctggaccccacccggctgcagggcatcaactgtggccctgacttcacccccagctttgccaacctgggccgcaccaccctgagcacccggggccccccccggggcggccctggaggagagctgccccggggccctgctggcctgggccccaggaggagccagcagggccccaggaaggagcccaggaagatcatcgccaccgtgctgatgacagaggacatcaagctgaacaaggccgagaaggcctggaagcccagcagcaagaggacagctgctgacaaggacagaggagaagaagatgctgatggcagcaagacccaggacctcttcagaagagtgcgcagcatcctgaacaagctgaccccccagatgttccagcagctgatgaagcaggtgacccagctggccatcgacacagaggagcggctgaagggcgtgattgacctgatctttgagaaggccatcagcgagcccaacttctctgtggcctatgccaacatgtgccgctgcctgatggccctgaaggtgcccaccacagagaagcccaccgtgacagtgaacttcaggaagctgctgctgaaccgctgccagaaggagtttgagaaggacaaggatgatgatgaggtgtttgagaagaagcagaaggagatggatgaggccgccacagctgaggagcggggccgcctgaaggaggagctggaggaggcccgggacatcgcccggcggcgcagcctgggcaacatcaagttcatcggggagctgttcaagctgaagatgctgacagaggccatcatgcatgactgtgtggtgaagctgctgaagaaccatgatgaggagagcctggagtgcctgtgccgcctgctgaccaccatcggcaaggacctggactttgagaaggccaagcccaggatggaccagtacttcaaccagatggagaagatcatcaaggagaagaagaccagcagccgcatccgcttcatgctgcaggatgtgctggacctgcggggcagcaactgggtgccccggcggggggaccagggccccaagaccatcgaccagatccacaaggaggccgagatggaggagcaccgggagcacatcaaggtgcagcagctgatggccaagggcagtgacaagaggcggggcggccccccaggcccccccatcagccggggcctgcccctggtggatgatggcggctggaacacagtgcccatcagcaagggcagccggcccatcgacaccagccggctgaccaagatcaccaagccaggcagcattgacagcaacaaccagctgtttgcccctgggggccgcctgtcctggggcaagggcagcagcggcggcagcggggccaagcccagtgatgctgccagcgaggccgcccggcctgccaccagcaccctgaaccgcttcagcgccctgcagcaggccgtgcccacagagagcacagacaacagaagagtggtgcagaggagcagcctgagccgggagcggggggagaaggccggggacagaggagaccggctggagaggtctgagcggggcggggacagaggagaccggctggaccgggcccggaccccagccaccaagaggagcttcagcaaggaggtggaggagaggagccgggagcggcccagccagcctgagggcctgaggaaggccgccagcctgacagaagatcgggaccggggcagagatgctgtgaagcgggaggccgccctgccccctgtgagccccctgaaggccgccctgtctgaggaggagctggagaagaagagcaaggccatcatcgaggagtacctgcacctgaatgacatgaaggaggccgtgcagtgtgtgcaggagctggccagccccagcctgctcttcatctttgtgagacatggagtggagagcaccctggagaggtctgccatcgcccgggagcacatgggccagctgctgcaccagctgctgtgtgccggccacctgagcacagcccagtactaccagggcctgtatgagatcctggagctggccgaggacatggagattgacatcccccacgtgtggctgtacctggccgagctggtgacccccatcctgcaggagggcggcgtgcccatgggagagctgttccgggagatcaccaagcccctgcggcccctgggcaaggccgccagcctgctgctggagatcctgggcctgctgtgcaagtccatgggccccaagaaggtgggcaccctgtggagggaggccggcctgtcctggaaggagttcctgcctgagggccaggacatcggggcctttgtggccgagcagaaggtggagtacaccctgggggaggagagcgaggcccctggccagagggccctgcccagcgaggagctgaaccggcagctggagaagctgctgaaggagggcagcagcaaccagagggtgtttgactggattgaggccaacctgtctgagcagcagatcgtgagcaacaccctggtgcgggccctgatgacagctgtgtgctacagcgccatcatctttgagacccccctgcgggtggatgtggccgtgctgaaggcccgggccaagctgctgcagaagtacctgtgtgatgagcagaaggagctgcaggccctgtatgccctgcaggccctggtggtgaccctggagcagccccccaacctgctgaggatgttctttgatgccctgtatgatgaagatgtggtgaaggaggatgccttctacagctgggagagcagcaaggaccctgctgagcagcagggcaagggcgtggccctgaagtctgtgacagccttcttcaagtggctgcgggaggccgaggaggagagtgaccacaactag

SEQ ID NO: 74296 - DNA, 432 bp, Artificial Sequence
  derived and/or modified sequence
atgtctggggccaggacagccagcacccccaccccaccccagacaggaggcggcctggagccccaggccaacggggagaccccccaggtggccgtgattgtgcggccagatgacaggagccagggcgccatcatcgctgacaggcctggcctgcccggccctgagcacagccccagcgagagccagcccagcagccccagccccacccccagccccagccctgtgctggagcccggcagcgagcccaacctggccgtgctgagcatccctggggacaccatgaccaccatccagatgtctgtggaggagagcacccccatcagccgggagactggagagccctaccgcctgagccctgagcccacccccctggccgagcccatcctggaggtggaggtgaccctgagcaagcctgtgcctgagagcgagtag

SEQ ID NO: 74297 - DNA, 384 bp, Artificial Sequence
  derived and/or modified sequence
atgtctggggccaggacagccagcacccccaccccaccccagacaggaggcggcctggagccccaggccaacggggagaccccccaggtggccgtgattgtgcggccagatgacaggagccagggcgccatcatcgctgacaggcctggcctgcccggccctgagcacagccccagcgagagccagcccagcagccccagccccacccccagccccagccctgtgctggagcccggcagcgagcccaacctggccgtgctgagcatccctggggacaccatgaccaccatccagatgtctgtggaggagagcacccccatcagccgggagactggagagccctaccgcctgagccctgagcccacccccctggccgagccctag

SEQ ID NO: 74298 - DNA, 4821 bp, Artificial Sequence
  derived and/or modified sequence
atgaacaaggccccccagagcaccggccccccccccgcccccagccctggcttgcctcagcccgccttcccgcctggccagacagcacctgtcgtattcagcactccacaagccacacagatgaatactccatctcagcccaggcaaggcggtttccggtcactccagcacttttatccctcccgagcccagcccccttctagcgctgcaagtcgggttcaatccgcagcaccagctagacctggccccgccgcacatgtgtaccctgctggaagccaggtcatgatgattccatcccagatatcttaccctgctagtcaaggagcctactacatacccggccaaggccggtccacatatgttgtgccgacgcagcagtaccctgtacaacctggcgccccagggttctacccaggcgctagtccgacagagtttggaacatatgccggagcctattatccggcacagggggtgcagcaattccctaccggtgtagcacccacgcccgtgctgatgaaccagcctccccagatagcaccgaaacgcgagagaaaaactattagaattcgcgatccaaatcagggcggaaaagacatcaccgaagaaatcatgtctggagcacggacggcgagcacaccgacccctccccagacaggcgggggcctggaaccccaggcaaacggagaaacccctcaggtagccgttatcgtccgacccgatgacagaagtcaaggcgctatcattgcggatcgaccaggactgcccggtcctgagcattccccatcagaaagtcagccctccagcccaagcccgactccttcacctagcccagttctggagcccgggtcagaaccaaacttggccgtgctttccattcctggggacactatgacaactatccaaatgagcgtagaagaaagcaccccaattagtcgggaaacaggggaaccgtatcgtttgtctcccgagcctacacctctggctgagcccatcttagaagtggaagtgactcttagcaagcccgttcctgaatctgaattttcatcgagcccgcttcaagcacctactcctcttgcctcccataccgttgagatccacgagcctaacgggatggtgccatcggaggacctggagcctgaagtggagagctccccagaactggcccctccccctgcctgcccctctgaatcccccgtccctattgctcctactgcacagcccgaagagttactcaacggcgcccccagccctcccgcggtcgacctaagccccgttagcgaacccgaggaacaggctaaagaggtgacagcatctatggccccgccgaccattccttctgctactcctgcaacggcccccagtgccacctcaccagcccaggaggaagagatggaagaagaggaggaagaggaggagggagaggcaggcgaagccggcgaagctgaatcagagaagggaggagaagagctgctccctccagaatccacccccatccctgccaatctgagccagaacttagaggccgctgcagccactcaggtggcggtgtccgttcctaagaggaggcggaagatcaaggaacttaataaaaaggaagcggttggggatctcttggacgcctttaaggaggccaaccccgccgtacctgaagtggaaaaccagccgccagccggcagcaacccagggcctgagtccgagggaagcggggtaccaccaagaccagaggaggcagacgagacctgggattctaaggaggataagatacacaatgctgagaacatccaacccggggagcaaaaatacgagtataagtccgaccaatggaagcctctgaatctggaagaaaaaaaacggtacgaccgggagttcttgctaggtttccagtttatttttgcctccatgcaaaaacccgaggggctgcctcacattagtgacgtcgtgctcgacaaggctaataaaaccccgcttcgcccgctggatccaacgcgcctacagggcatcaactgtgggcccgatttcaccccctctttcgcaaacctgggtaggactaccctgtcaacaaggggccctccacgggggggccccggtggcgagctgccgaggggaccagcgggacttgggccacggagaagtcagcaggggcctcgaaaggagcccaggaaaatcatagctaccgtcctgatgaccgaggacattaagcttaataaggccgagaaggcctggaaaccctcatctaagagaacagcagctgacaaggataggggagaagaagacgcagacggtagcaaaactcaggacctgttcagaagagttcgctctatacttaacaaactgaccccccagatgttccagcagttgatgaagcaggttacccaactcgcgatcgatacagaagagagactgaaaggtgtaatcgatctgatttttgagaaagccatctcagaaccgaacttcagtgtggcctatgcgaatatgtgccgctgtctgatggcactaaaagtgccgaccactgagaagccaacagtgacagttaatttccgcaagctactcctcaatcgctgtcagaaagagtttgagaaggacaaggacgatgacgaagtcttcgagaagaagcagaaggagatggatgaggcggccactgcggaggaacgggggcggctcaaggaggaacttgaagaagcccgagacatcgccagaagacggtcgttaggcaatattaaatttattggggagttgtttaagctgaaaatgttaaccgaagctataatgcatgattgtgttgtcaaactgcttaagaaccacgacgaagaaagcctcgaatgtctctgtcgcctgctgactactatcgggaaggatcttgactttgagaaagccaaaccaaggatggatcaatactttaaccagatggagaagatcataaaggagaagaagacctctagcagaatccgcttcatgctgcaagacgtgctggatttgcgcgggagtaactgggtccctcgcagaggagatcagggtcctaaaacaattgaccagatccataaggaggccgaaatggaggagcacagggagcatatcaaagttcagcagcttatggcaaagggaagcgacaagaggagaggcggtccgccaggtcccccgatctcaaggggcttgcccttagtggacgacggaggctggaatacggtcccaatcagtaaaggcagcaggccaattgacacctcacggctgaccaaaatcactaagcccggctctatcgattccaataatcaattgtttgcaccagggggtcggctgtcctgggggaaaggctccagcggaggctcaggggctaagccctccgatgccgccagcgaggccgctaggcctgccacttcaacgctgaacagattttccgcactacagcaagctgtgcccaccgagagcactgataacagaagggtcgtgcagagaagctctctgtcgcgagagcggggtgaaaaggccggagatcgcggtgaccgcctggaaaggtccgagcgaggaggagaccgcggggaccgactagaccgcgccaggactcctgctaccaaaaggagtttctcaaaggaagtcgaggaaagatccagggagcggccctcgcagccagaggggctgcgaaaagccgcgtcactaacagaagatagggataggggccgagatgccgtcaaacgcgaagcagcgcttccaccggtaagtcccctcaaggcagctctttccgaggaggagttggagaagaagagcaaagccatcattgaggagtatctgcatctcaatgatatgaaggaggctgtacaatgcgttcaggaactcgcaagtccttcgctcctttttatctttgtgaggcacggcgtggagtctactcttgagcgatccgccatcgcaagagagcatatgggtcagttgctgcaccagctgttatgcgctggccatctctccacagcacaatattatcagggtctttatgaaatcctggaactcgccgaggacatggagatcgatattccacatgtgtggctctacctggccgagctcgttacacccatattgcaggaggggggcgtcccgatgggggagctgttccgagaaattacaaaaccgctcaggcctctgggaaaggccgcctccctgttgctggaaattctgggactgctctgtaaaagcatgggaccaaaaaaagtgggcaccctgtggcgggaggctggcttgtcatggaaggagtttttaccagaaggacaggacatcggggcctttgtcgccgaacagaaagttgagtacactttaggcgaggagagcgaagcacccgggcaacgggctttacccagtgaggaactgaaccggcagctcgaaaagttgctgaaggagggctcatcaaatcaacgagtcttcgattggatagaggccaatttatcagaacagcagattgtctccaacacactggtcagagctctcatgactgccgtctgttatagcgccataatcttcgagactcccttgagagtggacgtagcagtgctcaaggcccgtgccaagctgctgcagaaatacctgtgcgatgagcagaaggagctacaggcactctacgccctccaggctctggttgtcacgttggaacaaccaccaaatctgctgcgtatgttcttcgacgctttgtatgacgaggatgttgtcaaagaggacgccttttactcctgggagagctccaaagaccctgccgaacagcaaggaaaaggggtggcgctgaagtctgtgaccgcttttttcaagtggctgcgcgaagcagaagaagaatcagatcataactag

SEQ ID NO: 74299 - DNA, 4821 bp, Artificial Sequence
  derived and/or modified sequence
atgaacaaggccccccagagcaccggccccccccccgcccccagccccggacttcctcaaccagcctttccaccaggacagaccgcccctgtggtctttagcacacctcaagccacacagatgaatactcccagccaacccagacagggtggattcagatccctgcagcacttctacccctcccgagcccagccccccagttctgctgctagtcgggtgcagtcggcagcccctgcaaggccgggcccagccgcccacgtgtacccagccggaagccaggttatgatgatacctagccagatttcctaccccgcctcacaaggtgcctattatattcccggacagggccgatcgacctatgtagtgcctacgcagcagtaccccgtccagcccggggctcccgggttctatcccggcgcgagtcctacagagtttggaacctacgccggtgcctattaccccgcccagggagtgcaacagttccctacaggtgtggcacctaccccggttctaatgaaccagccaccccagattgcacccaaacgagagaggaagacaattcgtattcgcgatcccaatcagggtggcaaggatataaccgaggaaattatgtcaggtgccagaacggcatctacacccacccccccccagacgggcggaggcctggagccccaggctaatggggagaccccccaggtggccgtcatcgtccggccagacgatcgctcccagggcgcaattattgctgatcggccaggtcttcccggaccagagcattctccatcagagagccagccttcgagcccatcccctacacctagcccatcgcccgtgctggaacccggaagcgagcccaatctcgctgtgctgtccatacccggagacaccatgacaaccattcagatgagcgttgaggaatcaacccccatctctcgcgaaactggcgaaccctacaggctgtctccagagcctacccccttggcagaaccaatactcgaggtcgaagtgactctttctaaacctgtgccagaaagcgaattttcgagcagtccccttcaagctcccaccccactcgcctcgcataccgttgagatacacgaaccaaacggcatggttccaagcgaagacctggaacccgaggtggaaagttcccctgagcttgctccccccccagcttgtccttcagagagtcctgtcccaatcgctccaactgctcagcctgaggagctcctaaatggtgctccctctccccctgcagtagatctaagccccgtaagcgaaccagaagagcaagccaaggaggtgactgcaagtatggccccaccaactattccatccgccactcccgctaccgctccgagtgctacatctccagctcaagaggaggaaatggaggaggaagaagaggaggaagagggggaggccggtgaagcaggggaggctgaatccgagaaaggcggcgaagagctactacctcccgaaagcactcccatccccgccaacctcagccagaatttggaagcagcagcagcgacccaggtcgcagtctccgtgccaaaaaggaggaggaagatcaaggagcttaataagaaagaggctgtaggggacttactggacgcgttcaaagaagcaaaccccgctgtaccagaagtggagaatcagcctccggctggatcaaatcctggcccagagtctgaaggatccggagtgccccctaggcctgaggaagccgacgagacatgggactccaaggaggacaaaatacacaatgcagagaatattcagcctggagagcagaagtacgagtacaagagcgaccagtggaagcctctgaacctggaggagaagaagcggtacgatagagaatttctgctgggtttccagtttattttcgctagtatgcaaaagcccgaaggactgccccacatttctgatgtggtgctagacaaggccaataagacgccacttaggcccctcgatcctacacgtttgcaagggataaactgtggcccagacttcaccccctcttttgcgaatctcgggagaacaactttaagtaccagaggcccacccaggggtggaccaggcggggaactacctcgcggcccggcgggcctcgggcctcgtcggtcacaacagggccctcggaaggagccaagaaagattatcgcaaccgtactaatgaccgaagacatcaagcttaataaggctgagaaggcatggaaacccagttctaagaggactgccgccgataaggacaggggcgaggaggatgctgacggctcaaagacccaggacctattcaggagggtacgatccatcctcaataaattaacaccacagatgttccagcaactgatgaagcaagtgacccagctggccatcgacacggaggaacgactgaaaggcgtcattgacctaatctttgaaaaggcgatctctgagcctaatttctcagttgcttacgctaatatgtgtcgctgtcttatggctttgaaggtgccaacaaccgaaaagccaactgtgacagtgaatttcaggaaactgctgctcaatcggtgtcagaaggagttcgaaaaagacaaggatgacgacgaggtctttgaaaaaaagcagaaggagatggacgaagccgcgacggctgaagagagggggcgtttgaaagaggaactggaggaagccagggacatcgccaggcgacggtccctggggaatatcaaattcattggcgagttgttcaaactgaagatgttaactgaggcaatcatgcacgactgcgtggtgaaactgctgaaaaaccacgacgaggaatcactggaatgtctatgtcgactgctgacgaccataggaaaggacctggactttgaaaaagctaaacctcgcatggatcagtactttaatcagatggaaaaaattattaaggagaagaaaaccagttcccggatcagatttatgctacaagatgtactcgacctcagaggatccaactgggtgccccgaaggggcgaccaggggccaaagacaatcgaccagatccacaaggaagctgaaatggaagaacacagagagcacatcaaggtgcagcagctgatggctaaggggtctgataagagacgtgggggacccccaggccctcccatatcccgtggtctcccgctcgtggatgacggcgggtggaacacggtgccaattagtaaagggtctcgacccattgacacttcgcggctgactaaaatcacaaaaccaggctcaatcgactccaataatcagctgtttgcgccaggcgggcgcctgtcctggggcaaaggaagcagtggggggagcggggctaagccaagtgacgccgctagcgaagcggctagaccagcaacaagcacccttaacagatttagcgccctccagcaggccgtgcccaccgagagcacagacaatcgaagggtcgtccaaagatcaagtttgtctcgtgagcggggagaaaaagctggggatcggggtgatcggctcgaacggtctgagcgaggtggcgacagaggcgatagactggaccgtgctagaactcccgccacaaaacgatctttttctaaggaggtggaggagcgttctcgggagagacctagccagcctgaaggcctaaggaaagcagcctccttgactgaggatagagacagaggacgcgatgccgtgaagagagaggccgcgcttccgcccgtctcacctttgaaggccgctctgagtgaggaggaactggagaaaaaatccaaagccattatcgaggagtatctgcatttgaacgatatgaaagaggccgtgcagtgcgtgcaggagttggcttcacccagtcttctgttcatatttgtgcgtcacggagtagagtctacactagagcggagcgcgatagcgagagaacacatggggcagctcctccaccaattactgtgtgctgggcatctttctacagcccagtactatcaggggctgtacgaaatcctggaacttgccgaagatatggagatagatatacctcatgtgtggctgtacctcgcagaactcgtaactccaattctgcaggagggaggagtgcccatgggcgaactttttagggaaataacaaagcccctgaggccattaggcaaggcagcttctttactgttggagatcctgggcctcttatgcaagtcaatgggacctaagaaagtaggcaccctctggagagaagccggcctgtcatggaaggagttcctacccgagggacaggacattggcgccttcgttgcggagcagaaggtggaatacaccctgggtgaggaatctgaggcccctgggcagcgggcgctgccttccgaggagctgaatcgccagctggaaaagctgctgaaggagggatcaagtaaccagcgggtttttgattggattgaggcaaatctgagcgagcagcagatcgtgtccaatacactcgtccgggcactgatgaccgcagtctgctattctgctattattttcgaaacaccgctgcgagttgacgtggctgttctgaaagcccgcgcaaagctgctgcaaaagtatctatgcgatgagcaaaaagaattgcaggcactctacgctctgcaggctttagttgtcactctggagcagccccctaaccttttgaggatgttcttcgacgcgttgtatgacgaggatgtggtcaaagaagacgctttctattcctgggagtcgtcaaaggaccctgccgaacaacaaggcaaaggtgtcgccctgaaaagcgtgacagccttcttcaaatggcttagggaagctgaggaagaatccgaccacaactag

SEQ ID NO: 74300 - DNA, 4821 bp, Artificial Sequence
  derived and/or modified sequence
atgaacaaggccccccagagcaccggccccccccccgcccccagcccgggactgccgcagcccgcttttccgcccggacagaccgctccagtggtgtttagcacaccacaggctactcaaatgaatactccttctcaaccacgacagggcgggtttcgttccctgcagcatttttatccctcccgggcccagcccccctctagcgcagcaagtagagtacaatccgctgcaccagccaggcccggtcccgcagctcacgtgtacccggccggctcacaggtcatgatgattccaagccagatctcatatccggcatcccagggcgcctactacatccctgggcagggcaggtcgacatacgtggtccctacacagcagtatccagtgcagcctggagctcccggcttctatcccggcgcatcccctaccgagttcgggacctacgcgggggcctactacccagcgcagggcgtgcaacagttccccactggcgttgcgccaacccccgtgctgatgaaccagccacctcagatcgctcctaaacgagagcgaaagacaattcgcattagggatccgaaccaagggggcaaagatatcactgaggagattatgagcggggccagaacagcatccacccctacgccgcctcagactggcggaggtctggaacctcaggccaacggagagacaccccaggtagccgtgattgtcagacctgatgatcgcagccagggggctattatcgctgatagaccggggctgccggggcctgaacacagtccatccgaatcccagccttccagcccttcgccaacaccaagcccaagccctgttctggaaccagggagcgagccaaacctggccgtcttgtcaatccctggagataccatgaccacaatccagatgtctgtggaagagtccaccccaatcagcagagagaccggagagccttaccgactgtcccccgaacccacacccctagctgaacccatcctcgaggtggaggttaccctgagcaaacctgtacctgagtctgagttctcgtcttctccgctccaggcaccaacacccctggcttctcataccgtagagatccacgagcccaacggtatggtcccgtctgaagatctggagcctgaagtcgagtcatctcccgaactcgctccacccccagcatgcccctctgaaagccccgtgccaatcgcccctacagcccagccagaagagctattgaacggcgctccctcccccccggccgtggacctctcgcctgtgagcgaacctgaagaacaggccaaggaggtgaccgccagtatggcaccccccacaattcctagtgcaaccccagccaccgctccttctgccacgtcccctgcccaggaagaggagatggaggaagaggaggaagaggaagaaggcgaagccggcgaagccggggaggccgaatctgagaaaggcggcgaggagttacttcctcctgaatccacaccaatcccagcgaatttatcacagaatttggaagcagccgccgcaacccaagtggctgtgagcgtgcccaaaaggcgaagaaagataaaggaactgaataagaaggaggccgtgggagatttgctcgatgccttcaaagaggctaaccctgcagtgcctgaagttgaaaaccagccccccgcggggtctaatcccggaccggagagtgaggggtcaggcgtgcctccacgaccagaagaggctgatgaaacatgggacagcaaggaagacaaaatccacaatgccgaaaacatccaaccgggagaacagaagtatgagtacaaatcagatcagtggaaaccactaaacctcgaggagaagaagcgatacgaccgtgagttcctgctggggtttcagtttatctttgccagcatgcagaaacccgaagggctgcctcatatttctgatgtggtcttagacaaggcaaacaagacgcctctccggccgttagaccccacccgcctgcaaggtattaactgcggtccagatttcactccatcatttgctaacctgggccgcactacgctctctactcgcgggcccccccgtggagggcctgggggtgagctccccagaggacctgcgggcctgggtcctagaagatcacagcagggaccgcgcaaagagcccagaaaaataatcgcgacagtcctcatgacagaagacatcaagcttaataaggccgaaaaggcgtggaagcctagttcaaaacggacagccgccgacaaagacagaggtgaggaagacgcggatggttcgaagactcaagacctatttaggcgcgtgaggagtatcctgaacaagctcacaccacagatgttccagcagctcatgaagcaagttacccagctggccatagacactgaggaacgattgaaaggagtgattgatctcatctttgaaaaagccatctctgaacctaacttctctgtggcctatgctaatatgtgccggtgcctaatggccttgaaggtgcccacaactgaaaagcctaccgtcacggtcaactttaggaagctactgcttaaccggtgtcagaaggagttcgagaaagataaagacgacgacgaggtcttcgaaaaaaagcagaaggagatggacgaagcagcaacggctgaagaaaggggtcgactcaaagaggaactcgaggaggcccgtgacatcgcccgtagaaggtcactgggaaacattaagtttattggcgagttgttcaagcttaagatgctgaccgaagccattatgcacgattgcgtggtcaaactgctcaagaaccacgatgaggagtctctggaatgtctgtgtcggctgttgactactattggcaaggatctcgatttcgagaaagctaaaccgcgcatggaccaatactttaaccagatggagaaaatcatcaaagagaagaagacctcaagtagaatacggtttatgctacaggacgtgctcgatctccgcggcagcaattgggttccccgcaggggagatcaagggcccaagactatcgatcagatccacaaggaggccgaaatggaggagcatcgggagcacataaaagtccagcaactaatggctaaaggcagtgacaagcggcggggcggcccccctggtccccccatttcaagagggctccccctggttgatgacggcggatggaacaccgtgccgatatctaaagggtcacgacctatcgatacctcaaggctgacaaaaataaccaagcctggcagtatagactctaataaccaattattcgcgcctgggggtagactgagctgggggaaaggcagcagtggaggtagtggcgcaaagccatcagatgcagcgagtgaggccgcccgccccgccactagtactcttaaccggttttccgcactccagcaggcggtgccaacagaatctaccgataacaggcgggtggtgcagcggtccagcctgtccagggaacggggcgagaaggctggcgatagaggcgacaggctggagcgcagtgaaagagggggcgaccgcggcgaccgcttggatcgcgcgcgcacaccagctacaaaacgtagcttcagcaaggaagtggaagaaaggtccagggagcgacctagtcagcctgagggcctgcgaaaagctgctagcctcactgaggatcgtgacaggggaagagatgcagtgaagcgcgaagctgcattgccgccagtatcccctctgaaagccgcactgagcgaagaagagctggagaagaagtctaaagccatcattgaggagtatttacacctcaatgacatgaaggaagcggtacaatgtgtgcaggaactggcctcaccatcccttctatttatctttgtgcgccatggggtggagtcaaccctggaaaggagtgccattgctcgagagcacatggggcagctgctgcaccagttactatgcgccgggcacctgtctactgcgcaatactatcaaggactgtacgagattctggagttagccgaagacatggagattgatattcctcacgtctggttatatctagcagagttggtcaccccaatcttacaagaaggcggggtgcccatgggtgaactgttccgggaaataacaaagcctctacgacctctcggaaaagcagcatctcttttgctggaaattctggggctgttgtgtaaaagcatgggaccgaaaaaagtggggacactttggcgcgaagccggactgagctggaaggagttcctaccagagggtcaagacatcggtgccttcgtggccgaacaaaaggtcgagtatactctgggtgaggagagtgaggccccaggccagagggcactgccttctgaagagttaaacagacagctcgagaaattgctgaaggagggctcgtccaaccagcgggtatttgactggatcgaagctaacctgtccgaacagcagatcgtgagcaacactcttgttcgcgcccttatgaccgccgtgtgttactctgccatcatcttcgagacaccactaagagtagacgtggctgtcttgaaagcccgggcaaagctgctgcagaaatacctgtgcgatgaacagaaagagctgcaggcgctctatgcactccaggctcttgttgtaaccctcgaacagcctcccaacctgctgcgaatgttctttgatgctctgtatgatgaagatgttgtgaaagaggatgccttctacagttgggagtctagcaaagatccagctgagcagcagggtaagggtgtcgcattgaagtcggtcacagcgtttttcaaatggttgcgagaggccgaggaggagtctgaccacaactag

SEQ ID NO: 74301 - DNA, 432 bp, Artificial Sequence
  derived and/or modified sequence
atgagcggcgcccggaccgccagcacccccacccccccccagaccgggggcgggcttgagcctcaggccaacggtgaaactccccaggtggcagttatagtccgcccagacgaccgctcacaaggagctataatcgccgaccgccccggtttgcccggacccgagcactccccaagcgaaagccagccatcctccccttctcccacccccagtcccagccccgtacttgagccaggtagcgagcctaatctggctgttctgagcatcccgggtgacactatgaccacaatccagatgtccgtggaggagtccacgcccataagtcgcgagacaggcgaaccataccggctttcccctgagcctactcccctggccgaacccatcctcgaggtggaggtaacactcagcaagccagtgcccgagtctgagtag

SEQ ID NO: 74302 - DNA, 384 bp, Artificial Sequence
  derived and/or modified sequence
atgagcggcgcccggaccgccagcacccccacccccccccagaccggcggagggctcgagccacaggcaaacggggagactccccaggtggccgtgattgtgagacccgacgaccgcagccagggggctataattgccgataggccaggtctcccagggcccgaacacagtccctccgagtcccagccctctagccctagccccaccccctcaccctcgcctgtcttggagcctggtagcgaacccaatttggctgtgctgtcgatccctggggacaccatgacgacaatccaaatgtcagtggaggagagcaccccgatttctcgggagaccggcgagccataccgcctgagtccagagcctactccacttgccgagccttag

SEQ ID NO: 74303 - DNA, 4821 bp, Artificial Sequence
  derived and/or modified sequence
atgaataaggcgcctcagtctaccggaccacctcccgcaccctcgccaggcctgccccagccggcatttccgcctggccagacagccccagttgttttctctacacctcaggcgacacagatgaacactccttcacagcctcgacagggtgggtttcgcagcctgcaacacttctacccatccagagcccagccaccttcctcagcggcttcacgagtgcaatcagctgctcctgccaggccgggacctgccgctcacgtgtaccctgccggtagccaggttatgatgatccctagtcaaatctcgtatcctgctagccagggggcatactatataccaggccagggacggtccacctacgtagtacccacacagcagtacccggtccaacccggtgcccctgggttctacccaggggcttcccccacagagttcgggacctacgccggagcatattatccagcacagggggtccaacagttcccaactggcgtggcccctacgccagtgcttatgaaccagccaccacagatagccccaaagagagagagaaaaactatccggataagggacccaaaccaggggggtaaagatatcaccgaagaaattatgtccggggcacgcaccgccagtacacctactcctccacagactggtggcggattggagccacaggctaatggtgagacaccacaggtggctgtaattgtgcgccctgacgaccggtctcaaggggcaatcatcgctgatcgccctgggctccctggacccgagcactccccttccgaatcccagcccagcagtccctctccaactcccagccctagcccagtgctggagcctggatctgagcctaacttagcagtgctgtctatccccggagacaccatgactaccattcagatgagtgttgaggagtcgacgccaatcagcagggagacaggcgagccataccggctgagccctgagcctacacctctcgccgagcccattctggaagtggaggttactctctcgaaacccgtgcctgagtcggagttttctagcagtcctctgcaggctcctactcccttagccagtcatacggtcgagatacacgaacccaacggcatggttccttcagaagacctcgaacctgaggttgagagttccccggagctggcaccgcctccggcatgtccatccgagagccctgtgcccatagcaccgactgcacagcccgaagagctgctcaacggcgctccaagcccacccgcagtagacctgtcacctgtgtccgaacctgaggagcaggctaaagaggtcacggcctctatggcgccacctactatccctagcgccactcccgcaaccgccccaagtgctacgtctccagcccaagaggaagagatggaggaggaagaagaagaggaagaaggagaagcaggagaggcgggagaggccgagtcagaaaagggcggagaggaactgctcccccctgagtcaactcccattcctgccaacctctcacagaacctcgaagccgcagcagcaactcaggtggcagtgtcggtaccaaagcgtcggaggaagatcaaagagctgaacaaaaaagaggctgtgggtgacttattagatgcgtttaaggaggctaacccagcagtgcccgaagtagagaatcagccccctgccggatccaatccaggcccagagagcgaggggtcaggcgtccctccgaggcccgaagaggccgatgagacgtgggactcaaaggaggacaagattcataacgccgaaaatattcagcctggagaacagaagtacgagtataagagtgaccagtggaaacctctcaatttggaagagaaaaagcgctacgatcgggagttccttctgggcttccagtttatttttgcttcaatgcagaaacctgagggccttcctcacatcagcgacgtggtactcgacaaggctaataaaacacccctgcgacctttagatcctacccggctgcagggaattaactgcggcccagattttacccccagctttgcgaatctggggaggactactctctctacacgaggtcccccacggggaggcccaggcggtgaattacctcgcggtcctgccggacttgggcctaggcggtctcaacagggccctcgcaaagaacctcggaagattatcgccaccgttcttatgacagaggatattaagttgaataaagccgagaaagcgtggaagcccagctccaaaaggacagctgccgacaaagatagaggtgaggaagatgcggacgggagcaaaacacaagatctgtttagaagggtgcggagtattcttaataagttgactccgcaaatgttccagcagctgatgaaacaggtgacacaactggccattgacacggaggagcgactgaaaggagtgatcgatctcatcttcgagaaggcaattagtgagccaaacttctctgtcgcatacgcaaacatgtgtagatgcctgatggcattgaaggtgccgactaccgagaagcctacagtgacggtgaacttcagaaagctgctcctcaaccgatgtcagaaagaattcgaaaaggacaaagacgatgatgaggtctttgagaagaagcagaaagagatggacgaggctgctaccgctgaagaaaggggccgattgaaagaggagttggaggaggctcgtgatatagcaaggcgcagaagtctgggcaacatcaagttcattggcgagctctttaagcttaaaatgctgacagaggcgattatgcatgattgtgtcgttaaactactgaagaatcacgatgaagagtctctggagtgcctctgtagactcctgacaacaattggcaaggatcttgactttgagaaggcaaagcccaggatggatcagtattttaatcagatggagaagattatcaaagagaaaaagacgagttcccgaatcaggtttatgttgcaggatgtcctcgatttgcgcggtagtaattgggtgccgagacggggagaccaaggacctaagacgattgaccagatccacaaagaggcagagatggaagagcaccgcgagcacattaaagtgcagcagcttatggcgaagggcagcgacaagcgcagaggtgggccacccggtcctccgatctccagggggctgcctctggtggacgatggaggctggaatactgtgcccatcagtaaagggtctagacctattgatacttctcggctgactaagatcaccaagcccggaagtatagactccaacaatcagttgtttgccccaggcggtcgccttagttggggcaaaggctctagcggcggtagtggggcaaagcccagtgacgcggcatcggaagccgctaggcctgccactagcactctgaaccggttcagcgccttacagcaagccgttcccaccgagtctactgacaacagacgggtagtccagcggagtagtctgtcccgggagcggggagagaaagcaggcgataggggagaccgcctggaacgaagcgaaagggggggagacagaggcgaccggcttgacagagcgaggacgccagccaccaagaggagtttctccaaggaagtcgaggagcgcagtcgtgaacgtccctcccagcctgaggggcttaggaaggctgccagtctgaccgaagaccgcgacaggggcagggacgctgtcaagcgagaagccgcactgcctcctgtttctccattaaaggccgcactgagtgaagaagagctggaaaagaagagcaaggctatcattgaggagtatctgcatctgaatgacatgaaagaggcggtgcaatgtgtgcaagagctggcaagtccatctctcttgttcatctttgtgcgtcacggggtggagtccaccttagaacgaagtgcaatcgccagagaacatatgggccagttgctccatcagctgctctgtgccggacatcttagtaccgctcagtactatcagggcttatatgagattctggaactggcagaggacatggaaattgatattccccatgtctggctgtacttggccgagttggtcactccaatattgcaggagggaggggttcctatgggcgagctgttccgcgagattactaaacccctcaggcccctaggcaaggcggcttctctgctgctggagattcttggtctgttatgtaagtctatgggaccaaaaaaggttggcaccttatggagagaggccggtttgtcttggaaggaattcttacctgaggggcaggacataggagctttcgtggctgaacagaaggtcgagtacacgctaggggaggagagcgaagctccagggcagagagctctgccctccgaggagctgaaccgtcagctcgagaaactgctgaaggagggaagcagtaatcaaagagtcttcgattggatagaggccaatttatccgagcagcagatagtgtctaatactctggtgcgggctctgatgacagctgtgtgctacagtgcaatcatcttcgagactccactgagggtcgacgttgcagtgctgaaggcacgggctaagctgttgcagaagtacttgtgtgatgaacagaaggaactgcaagctctgtacgcacttcaggcactcgtggtcaccctcgagcagccccctaatctgctgaggatgtttttcgatgccctgtacgacgaggatgtcgtgaaggaggatgccttctattcatgggagtcctcaaaggatccagcggagcagcagggcaagggcgtagctttaaaatcagtcacagcctttttcaaatggctaagagaagcagaggaggagagtgaccataattag

SEQ ID NO: 74304 - DNA, 4821 bp, Artificial Sequence
  derived and/or modified sequence
atgaacaaagccccacagagcacggggcctccccctgccccttccccaggcctgcctcagcccgctttccctccagggcagaccgcccctgtagtgttctccacgccccaggcaacacagatgaatacaccatcacagcccaggcaggggggatttcggtcacttcagcacttttatccaagtcgcgctcagccaccatcttctgccgctagtcgcgttcaatctgccgctcccgctcggcctgggcctgcagctcatgtgtacccagccggaagtcaagtgatgatgattccatctcaaatttcataccccgctagtcaaggcgcatactatattccaggccagggtcgctcaacttacgtggtgcctacccagcagtaccccgtacagcctggagccccaggcttctaccccggagcaagtcccaccgagttcgggacctacgccggagcttattaccctgcccagggagtgcaacagttcccaacgggggtggccccaaccccagtcctcatgaatcaaccgccacagatcgccccaaagagagagaggaagacaatcagaatacgggaccccaaccaggggggaaaggacattacggaggagatcatgtctggagccaggactgcaagcacaccgaccccgccacaaaccgggggtggcttggagcctcaagcaaatggtgagacaccccaggtggcggttatcgtgaggcctgacgatcgctcgcaaggcgcaataatagctgataggcctgggctccctgggcctgagcattcaccatcagagtcgcagcccagctcaccatcacccacaccttccccaagtcccgttctagagccaggctccgagccgaacttagccgtgctgtccatccccggtgacactatgacgaccattcagatgtccgtggaggagagtacacccatatcccgagaaactggcgaaccctatcggctgtccccagaaccgacaccactggcagagcccatcctggaggttgaggtaaccctgagcaaacccgtcccagaaagcgaattctcttcctctccccttcaggcaccaacacccttagccagccacaccgtcgagatacatgagcctaatggaatggtgcctagcgaggatttggaacccgaggtggaaagttctccagaactcgcacctcctcctgcttgtcccagtgagtcccctgtgcctattgcccctaccgctcagcccgaagaactcctcaacggtgcacccagtcctcccgcagttgatctttcgcccgtaagcgaacccgaagagcaagccaaggaagtgacagcgtcaatggctcctcccactattccaagcgccacgccggctacagccccttccgctacttcgcctgcacaagaggaggagatggaggaggaggaggaggaggaggagggcgaggccggtgaggctggtgaggcggaaagcgagaaggggggagaagagctcttaccaccagagtctactccaatccccgcaaacctctcgcagaatctggaagctgccgcagcaacacaggttgcggtttctgtccccaagcggaggcgaaagatcaaagaattgaataaaaaagaggcggtgggtgatctgcttgacgccttcaaagaagctaatcctgccgtccccgaagtcgaaaatcaacccccagccggttcaaaccccggtcccgaaagcgaagggagcggagtgccccctagaccagaagaggccgatgagacatgggactcaaaggaggataaaatccacaacgccgagaatatccagcccggagagcagaagtacgaatacaaaagcgatcagtggaagccactgaacctggaagagaagaaaaggtacgatcgggagttcttactcggctttcagttcattttcgcgtccatgcagaaacccgaaggccttcctcacatctctgacgtggtgttggacaaagccaataagaccccgctgcgacctctcgatcccacaaggctgcaaggaatcaattgtggtcccgactttacaccgagtttcgccaatctcggcaggaccacgctttcaaccaggggacccccacggggtggcccaggtggagaactaccccgagggcctgccggacttgggcctcggaggagccagcaagggccaagaaaagagcccaggaaaatcattgcaactgtcctgatgacagaggacattaagcttaacaaagctgaaaaggcatggaagccgtcgtccaaaaggacagccgcagacaaagatcgaggggaagaagatgccgatggctctaagacccaagacctctttaggagggttcgctccatcctgaacaaacttactccacagatgttccaacagctgatgaagcaggtgacccagctagctatcgacactgaggagcgcctcaagggtgtcatcgacttaattttcgagaaagctatttctgaacctaactttagtgttgcatatgccaatatgtgccgctgcttgatggcactcaaggtccccacaaccgaaaaacctacagtgacagtcaatttccggaagctgcttctcaaccgctgtcagaaagaattcgagaaggacaaggatgatgacgaggtcttcgagaaaaagcaaaaggagatggacgaggcagccacagcagaagagaggggcaggctgaaggaggagttggaggaagcaagggatattgccaggcggagaagcctgggcaacatcaaattcataggagagcttttcaaactcaaaatgttgacagaagccataatgcatgattgtgtggttaagctgcttaaaaatcatgatgaggagagtctcgaatgcttgtgtcggctgttgacaactattgggaaggacctggacttcgagaaggccaagccccgtatggaccagtactttaatcagatggagaagattataaaggaaaagaagaccagctcccgaattaggttcatgctccaggatgtcctcgacctgagaggatccaactgggtccctcgtagaggggatcagggccctaagacgatagaccagatccacaaagaggccgaaatggaggagcatcgagagcatatcaaagttcagcagttgatggccaagggctccgataaacgacggggaggacccccaggtcctccgataagtcgcggtctccctctggtcgatgatggcggttggaacaccgtgcccatcagcaaagggtcccgtcccattgataccagcagacttacaaagattaccaagccaggtagcatcgattccaataaccagttatttgcccctgggggacgcctttcttgggggaagggctcttccgggggatccggcgcaaagccatcagacgcagcctctgaggccgctcgaccagccacgtctacgttgaacagattttccgccctgcagcaggcagtgcccacggagtccaccgacaaccgacgggtggtgcagcgttcctcactttcccgagaacgaggcgagaaggccggtgaccggggagaccgactagaacggtccgagcggggaggagaccgaggggatcgtcttgatcgtgctaggacacccgcaactaagcgctccttttctaaggaagttgaagaaagaagtagagagcggccttctcagccagagggtttgcgcaaagccgcatcgctgaccgaagacagagacaggggaagagacgcagtaaaacgagaggccgcactcccaccagtgtctcccctgaaggctgctctgtcggaagaagagctcgagaaaaaaagcaaggccatcatcgaggaatacctccacctgaatgatatgaaagaggcagtgcagtgtgtccaggagctggcttcacctagtctgctatttattttcgtgcggcatggcgtagagagtacacttgagagaagtgcaatagccagggaacacatggggcagttgctgcatcagctgctttgtgccggtcacctctcaaccgcccagtattaccaggggttgtatgaaatcctggagctggcagaagatatggagatcgatattccgcacgtatggctgtacctcgcagagctcgtgacaccaattcttcaggaaggcggtgttcctatgggagagctgttcagggagattacaaagccactgcggccactcggcaaggctgcgagtttgctcctcgagatcctcgggttgctgtgcaaaagtatggggccaaaaaaggtggggaccctgtggagggaggcaggcctgtcttggaaggaattcttgcctgaagggcaggatatcggtgccttcgtcgctgagcagaaggtagagtacacactgggggaagaaagcgaggctcctggccagcgtgccttgcctagcgaggaattgaatcgccagcttgaaaaactgctcaaagaaggttccagtaatcaaagagtcttcgattggatcgaggccaacctttcagaacagcagatcgtctccaacactcttgttagggctctcatgaccgccgtctgttatagtgccatcatattcgagactccactgagggttgacgttgctgtcctgaaagcacgagctaagttgctgcagaagtatctgtgtgacgagcaaaaagagttgcaggcattgtatgccttacaggcactggtggtgactctggaacagcctcccaaccttttgagaatgttcttcgatgcgttatacgatgaggacgttgtgaaagaggatgccttctatagttgggagtcctctaaagatcccgctgaacaacagggaaagggtgtcgcccttaagagtgttactgcattcttcaagtggctgcgcgaggcggaggaagagagtgaccacaactag

SEQ ID NO: 74305 - DNA, 4821 bp, Artificial Sequence
  derived and/or modified sequence
atgaataaggcgccacagtcaacaggacctccaccggcaccttcaccgggactacctcaacctgcctttcctccgggacagactgcacctgtggtattctccaccccacaggctactcagatgaatacgccttcacagcctaggcaggggggatttcggagccttcaacatttctaccccagcagagctcaaccgccaagctcagcagcctctcgtgtgcagtctgcagccccagcccgtccgggacccgcagcccatgtctacccagcgggatcccaggtgatgatgatcccctcgcagattagctatcccgcaagccaaggcgcttactacattcccggtcagggacgttccacttacgtcgtgcccacacagcagtatcctgtacagcctggcgcacctggattttatcctggggcatctccaacagagttcggcacatacgcaggtgcctattatccagcacagggcgtgcaacagttcccaactggcgtagcgccaactcccgtcctcatgaatcagccaccacagatcgcccctaaacgtgagcgaaaaacaatccggatccgcgacccgaatcaaggaggaaaagacattacggaagaaattatgagtggagcccgaaccgctagcactccaactccaccccaaacgggtggaggtttggagccacaagccaatggggagaccccacaggtggccgtgatcgttcgacccgatgacaggagccagggtgcaattattgccgacagacccggacttcccggacccgagcatagcccctctgaatcccagcctagctccccatctcccaccccgtcgcccagccccgtcctcgagcctggcagcgagcccaacctggccgtgctgtccatacctggcgatactatgacgacaatccaaatgagcgttgaagagagcacccctatctctcgagaaacaggtgagccctaccgtctctccccagaacctacgccactggccgagcccatcttggaggttgaagtgacactaagtaagcccgtgccagaaagtgaattttcaagtagtcctctccaggcccctaccccactggcttcccatactgttgagatacacgaacccaacgggatggtgccctcagaagaccttgaacctgaagtcgaatcgagccccgagctggctccacctccagcttgccccagtgagtctcctgtgcccatcgctcccaccgctcagcccgaagagctactcaacggagctccaagtccccctgccgtggatttaagtcccgtgtcagagcccgaagaacaggccaaggaagtgacagcatcgatggctccccctacgattccaagcgcgacaccagccactgccccaagcgctacctccccagcacaggaggaagagatggaagaggaggaggaggaggaggagggcgaggcaggtgaagctggggaagccgagagtgagaagggaggcgaggagctcctgccaccagagtccacccccattcccgctaatctgtcgcagaatcttgaggcggcagcggcaactcaggtggccgtgtcggtccctaagcgccgacggaaaatcaaagaactgaataagaaggaggccgtgggagacttgctggacgctttcaaggaggcaaaccctgccgtgccagaagtggaaaatcaacctcccgctggctccaaccccggacccgagtcagaaggatccggcgtgccccctaggccggaagaggcagatgaaacctgggactccaaggaggacaagatccataatgcagaaaatatccaacctggcgaacaaaagtatgagtacaaatccgaccagtggaagccactgaacctggaggaaaagaagcgttatgacagagagttcctcctgggcttccagttcatctttgccagtatgcaaaaacccgagggcctgccacacataagcgatgtcgtgctggataaagcaaataagacacccctgcggcctctcgacccaactaggctgcaggggataaactgtggaccagacttcacaccatcattcgccaatctggggaggactacgctctcgacccgcggacctcccagaggcggacctggaggggagcttcccagggggccagccggtctgggccctaggcgaagtcaacagggcccacgaaaagaaccccgaaagatcattgcaaccgttttgatgactgaagatatcaaactgaacaaggcagaaaaggcctggaagcccagtagcaagaggactgctgcagataaggacaggggtgaagaggacgccgacggctcgaaaacacaagatttgttccgtagggtgcgttctatcctgaataagcttacgccacagatgtttcaacaactcatgaaacaagttacccagctggccatcgacactgaagagcggctcaaaggcgtgattgacctgatatttgagaaggcgatttccgaaccgaacttcagcgtggcttacgctaacatgtgcaggtgtctgatggcattgaaagtgcctaccacggagaagcccacagtgaccgtgaactttcgcaaattgctattaaaccgatgccaaaaggagtttgaaaaagataaagatgatgatgaagtcttcgagaaaaagcagaaagagatggatgaagcagctaccgcagaggagagggggcgactcaaagaagagttggaagaagccagagacattgccaggcggagaagtttaggcaatatcaaattcattggcgagctgtttaagctcaaaatgctcactgaagctattatgcatgactgcgtggtgaaactgttgaaaaaccacgatgaggagagcctcgaatgcctgtgcagacttctgaccacaataggcaaagatctggattttgagaaggcgaagccccgaatggaccagtactttaatcaaatggaaaagataattaaagagaaaaagacgtcatcccgaatccggttcatgttgcaggacgttctggacctgagaggtagtaactgggttccaagacggggagatcaaggccctaagactatcgatcaaattcacaaggaagctgagatggaagagcatagagaacatatcaaagtccaacaattaatggcaaaaggatccgacaaaaggagaggtggtccaccaggtcctccaattagtcggggactgcccctggtggacgatggagggtggaataccgtgcctattagcaaaggcagccgcccaatcgacacctcacggctcacaaagattaccaagcctggttctatcgattccaacaaccagctgtttgcacccggaggcaggctgtcatgggggaaaggaagttccggaggaagcggagccaagccaagcgacgcagcctctgaagcagcccgaccagctacctccacgctaaataggttttctgccctgcaacaggcagttccgacagagtccacagacaaccgccgagtcgttcagcgatcgtctctgtcacgcgaaagaggagaaaaggcaggcgacagaggggaccgcttggaacggtccgagagaggaggcgaccggggagaccgtctggaccgcgctcgtaccccagctacaaagcgatctttttcaaaagaagtggaggaaaggtcacgtgaaagacctagccagcctgagggcttgcgcaaagccgcatcgttaaccgaggatcgtgataggggcagagatgctgtgaaaagagaggccgcactgcccccagtctccccactcaaagcagcactgtcagaagaggagctggagaaaaagagcaaggctatcattgaagagtacctgcatcttaatgatatgaaagaggcagtacagtgcgtccaggaactggcttctccgagcctcctgtttatctttgttcgacacggggtcgaatccactctggaacgttcggcgatcgcaagggagcacatgggacagctgctacaccagctgctgtgcgctggccatttaagtaccgctcagtattaccagggcctatatgagatcctcgaactggcagaggatatggaaatcgatattcctcatgtgtggttatacttggccgaattagttactcctatccttcaggagggcggtgtgcccatgggagagctttttagagagatcacaaaacctctgagacccctgggcaaggcagcctctctcttgctcgagattcttggactgttgtgtaagagtatgggcccaaagaaggttgggaccttatggcgtgaggccggacttagttggaaggagttcctccccgagggccaggatatcggtgcttttgttgccgaacagaaagtcgagtacacactcggcgaggagtctgaagcaccgggacaacgcgcactacccagtgaagaactgaaccgtcagctggaaaaattattgaaagaaggatcttccaatcagcgcgtatttgattggattgaggctaatttaagcgagcagcagatcgtctcaaacaccctggtgagagccctgatgacagcagtctgctattccgcaatcatctttgagacacccttaagggtagacgtcgccgtactcaaagcccgagctaagttgttgcagaagtatctttgcgatgagcagaaagagcttcaggctctgtacgcgctgcaggcattggtagtgactctggagcagccacctaacctgctgcgaatgttcttcgatgccctatatgacgaagacgtggtgaaggaggacgccttctattcttgggaaagctcaaaagatccagccgaacagcagggaaagggtgtcgctttgaagagtgtcacggccttcttcaaatggctgcgagaagccgaggaagagagcgaccataattag

SEQ ID NO: 74306 - DNA, 432 bp, Artificial Sequence
  derived and/or modified sequence
atgtcaggggcacgcactgcttcaacccccaccccacctcaaacaggcggaggactcgaaccgcaagcaaatggagagacaccacaagtagccgtaattgtcaggcctgacgataggagtcagggagctattattgccgaccgcccaggattgcccggtcctgagcacagcccttctgaatcccagcctagttcccccagtcccacgccctcacctagccctgttctagagcctggcagcgagcccaacctggccgtgctgagtattccaggtgacacgatgaccaccatacagatgtctgtcgaggagtctacccccattagccgcgaaaccggagagccttacagactgtcccctgaacccactccgctggccgagcctattcttgaggtggaggtcactttatctaagcccgtgcccgaatccgagtag

SEQ ID NO: 74307 - DNA, 384 bp, Artificial Sequence
  derived and/or modified sequence
atgagcggcgctcgcaccgcctccacaccgacgccaccccagaccggcggagggttggagcctcaggctaatggcgaaacgccccaggtggctgttattgtccggccagacgaccgcagccaaggggcaatcatcgccgaccgccctggcctgccaggcccagagcattcacccagcgaatctcagcctagttccccaagcccgacccctagcccttcccctgtgctggagcccggttctgaacccaatctggcagtgctgtccattccaggggacactatgacaactatccagatgtccgttgaagaatcgacccctatctctcgagagactggtgaaccctataggcttagccccgagcctaccccgcttgccgagccttag

SEQ ID NO: 74308 - protein, 847 aa, Artificial Sequence
  derived and/or modified sequence
MSKSFQQSSLSRDSQGHGRDLSAAGIGLLAAATQSLSMPASLGRMNQGTARLASLMNLGMSSSLNQQGAHSALSSASTSSHNLQSIFNIGSRGPLPLSSQHRGDADQASNILASFGLSARDLDELSRYPEDKITPENLPQILLQLKRRRTEEGPTLSYGRDGRSATREPPYRVPRDDWEEKRHFRRDSFDDRGPSLNPVLDYDHGSRSQESGYYDRMDYEDDRLRDGERCRDDSFFGETSHNYHKFDSEYERMGRGPGPLQERSLFEKKRGAPPSSNIEDFHGLLPKGYPHLCSICDLPVHSNKEWSQHINGASHSRRCQLLLEIYPEWNPDNDTGHTMGDPFMLQQSTNPAPGILGPPPPSFHLGGPAVGPRGNLGAGNGNLQGPRHMQKGRVETSRVVHIMDFQRGKNLRYQLLQLVEPFGVISNHLILNKINEAFIEMATTEDAQAAVDYYTTTPALVFGKPVRVHLSQKYKRIKKPEGKPDQKFDQKQELGRVIHLSNLPHSGYSDSAVLKLAEPYGKIKNYILMRMKSQAFIEMETREDAMAMVDHCLKKALWFQGRCVKVDLSEKYKKLVLRIPNRGIDLLKKDKSRKRSYSPDGKESPSDKKSKTDGSQKTESSTEGKEQEEKSGEDGEKDTKDDQTEQEPNMLLESEDELLVDEEEAAALLESGSSVGDETDLANLGDVASDGKKEPSDKAVKKDGSASAAAKKKLKKVDKIEELDQENEAALENGIKNEENTEPGAESSENADDPNKDTSENADGQSDENKDDYTIPDEYRIGPYQPNVPVGIDYVIPKTGFYCKLCSLFYTNEEVAKNTHCSSLPHYQKLKKFLNKLAEERRQKKET

SEQ ID NO: 74309 - protein, 99 aa, Artificial Sequence
  derived and/or modified sequence
MSKSFQQSSLSRDSQGHGRDLSAAGIGLLAAATQSLSMPASLGRMNQGTARLASLMNLGMSSSLNQQGAHSALSSASTSSHNLQSIFNIGSRGPLPLSS

SEQ ID NO: 74310 - protein, 87 aa, Artificial Sequence
  derived and/or modified sequence
MSKSFQQSSLSRDSQGHGRDLSAAGIGLLAAATQSLSMPASLGRMNQGTARLASLMNLGMSSSLNQQGAHSALSSASTSSHNLQSIF

SEQ ID NO: 74311 - protein, 78 aa, Artificial Sequence
  derived and/or modified sequence
MSKSFQQSSLSRDSQGHGRDLSAAGIGLLAAATQSLSMPASLGRMNQGTARLASLMNLGMSSSLNQQGAHSALSSAST

SEQ ID NO: 74312 - protein, 433 aa, Artificial Sequence
  derived and/or modified sequence
MSKSFQQSSLSRDSQGHGRDLSAAGIGLLAAATQSLSMPASLGRMNQGTARLASLMNLGMSSSLNQQGAHSALSSASTSSHNLQSIFNIGSRGPLPLSSQHRGDADQASNILASFGLSARDLDELSRYPEDKITPENLPQILLQLKRRRTEEGPTLSYGRDGRSATREPPYRVPRDDWEEKRHFRRDSFDDRGPSLNPVLDYDHGSRSQESGYYDRMDYEDDRLRDGERCRDDSFFGETSHNYHKFDSEYERMGRGPGPLQERSLFEKKRGAPPSSNIEDFHGLLPKGYPHLCSICDLPVHSNKEWSQHINGASHSRRCQLLLEIYPEWNPDNDTGHTMGDPFMLQQSTNPAPGILGPPPPSFHLGGPAVGPRGNLGAGNGNLQGPRHMQKGRVETSRVVHIMDFQRGKNLRYQLLQLVEPFGVISNHLILNK

SEQ ID NO: 74313 - protein, 47 aa, Artificial Sequence
  derived and/or modified sequence
MSKSFQQSSLSRDSQGHGRDLSAAGIGLLAAATQSLSMPASLGRMNQ

SEQ ID NO: 74314 - protein, 100 aa, Artificial Sequence
  derived and/or modified sequence
MSKSFQQSSLSRDSQGHGRDLSAAGIGLLAAATQSLSMPASLGRMNQGTARLASLMNLGMSSSLNQQGAHSALSSASTSSHNLQSIFNIGSRGPLPLSSQ

SEQ ID NO: 74315 - protein, 107 aa, Artificial Sequence
  derived and/or modified sequence
MSKSFQQSSLSRDSQGHGRDLSAAGIGLLAAATQSLSMPASLGRMNQGTARLASLMNLGMSSSLNQQGAHSALSSASTSSHNLQSIFNIGSRGPLPLSSQHRGDADQ

SEQ ID NO: 74316 - DNA, 2544 bp, Artificial Sequence
  derived and/or modified sequence
atgtcgaaatcctttcagcaatctagcctgtcccgcgactcccaggggcacggacgggacctctctgctgccggtatcgggttgctggctgccgctacccaaagcctgagcatgcccgcctctctgggccggatgaatcaggggactgctcgattggccagcctgatgaatctggggatgtccagcagtctgaatcagcagggagcccacagtgcattgtcttccgccagcaccagctcccacaatctacagtctatcttcaatatcggatcccgaggacctctgcccttatcctctcagcacagaggggatgcggatcaagcctctaacatccttgcatcctttggcctcagcgctcgggacttggatgagttgtctagataccctgaggataaaataacccccgaaaacctgccccaaattctgctgcagctcaaacgccgaaggacagaggaggggccgaccctttcatacggaagggatggacgttccgctacacgggaaccaccttacagggtgcctcgcgacgattgggaggagaaaagacactttcggcgcgattcctttgatgacaggggccctagccttaatcccgtgctggactacgatcacgggtccaggtcccaggaatccggctattatgacagaatggattatgaagatgataggttacgggacggggagcggtgtagagacgattctttctttggcgaaacctcacataactaccacaaattcgattccgagtatgagcggatggggagagggcccggacctctgcaagagaggtcgttgttcgaaaaaaaaaggggcgcccctcccagttccaatatcgaagatttccacggcctccttccaaaaggctacccgcacctgtgtagcatctgcgacctgccagtccatagcaacaaggagtggagtcagcatatcaacggtgcttctcattcccgcagatgtcagctgcttctggagatttatccagaatggaatccggataacgacacaggtcacacgatgggggacccatttatgcttcaacagtcaactaacccagcacctggcatcctaggacccccacctccaagtttccacctgggcggccccgccgtggggccccgtggcaatctgggggccggtaatggtaatctccaaggcccacggcacatgcagaagggcagggtagaaacaagtcgcgtggtccatattatggactttcagcgcgggaagaacctgagatatcagttattgcagctcgttgagccatttggcgtcatcagcaatcatctgatattaaataagatcaatgaggctttcattgagatggctaccactgaagacgcccaagcagccgtcgattattacactacaacgccggcattagttttcgggaagcccgtgcgcgtccacctgagccaaaagtacaaacgaatcaaaaaacccgaaggaaagcccgaccagaagtttgaccaaaaacaagagctgggtcgggttattcacctatccaacctgccccattccggctatagcgacagtgccgtcttaaagctggctgaaccctacggcaaaataaagaattacatcctaatgcgtatgaaaagccaggcattcattgaaatggaaactagagaagatgcaatggccatggttgatcactgcttgaaaaaggcgctgtggtttcaggggcgatgcgtgaaagtagacctcagcgaaaaatataaaaaattggtcctgaggattccaaacaggggcatcgatctgctcaagaaggacaaatcccggaagagaagttatagcccagacggcaaggagagcccttccgacaagaagtcaaaaaccgatgggtcccagaagactgaaagctccacagaaggcaaggaacaggaggagaaatctggtgaggacggagaaaaggacacaaaggacgaccagacagaacaggagcctaatatgctattggaaagtgaggacgaactgctggtagacgaagaagaagcagctgctcttctggagagtggatcaagtgtgggggatgagactgacctggccaaccttggagatgtcgcttccgatggaaagaaggagccaagcgacaaggccgttaagaaggacggcagtgcatctgcagccgcaaaaaagaagctgaagaaagttgacaaaattgaagaattggaccaagagaatgaggcggccctagagaatggtataaaaaacgaagagaacacagaacctggtgccgagtcaagcgaaaatgctgatgatccaaataaagatacgtctgagaacgctgacgggcagtcggacgaaaataaggacgactacacaatcccggatgagtaccgcatcggcccataccaacctaacgtccctgttggcatcgattacgtgattcccaaaactggcttctactgcaaactgtgtagcctattttacacaaacgaagaagtcgctaagaacacacactgctcaagccttccgcattatcaaaaacttaagaaattcttgaacaagctggctgaggagagacgccagaaaaaggagacctag

SEQ ID NO: 74317 - DNA, 2544 bp, Artificial Sequence
  derived and/or modified sequence
atgtcaaagtccttccagcagtcatcactgagtagagactctcagggtcatggcagagatctctctgctgccggtattggccttcttgcagcagctacacaaagtcttagtatgcccgctagtctgggcaggatgaatcagggcacagccagactggcaagcctgatgaacctggggatgtcatccagtctgaaccagcaaggcgcacacagcgcactctcaagcgccagtacgtcctcacacaatttgcaatcaatcttcaacattggatctcgagggccattgcctctctcttcccagcacagaggcgatgctgatcaagcgtctaatatcctcgcaagcttcggccttagtgcgagggatcttgatgagctgtcccgctatcctgaggacaagattacacccgaaaatctgccacagatcctgcttcagttaaaaagaaggagaactgaagaagggcctacactaagctatggccgggacggacggagcgcaaccagggaaccaccgtatcgggtgccaagggacgattgggaagagaagaggcacttccgaagggattccttcgatgatcgggggccctctcttaatcccgtccttgactacgatcacggctccaggtcacaggagtccggatattatgatcgaatggactacgaagatgatcggcttagagacggcgagcgctgtcgagacgactcattcttcggcgaaacaagtcacaattatcataaatttgacagcgagtatgagagaatgggaagaggaccaggacctctgcaagaacggagccttttcgagaagaagaggggcgcaccccctagctccaatattgaggactttcatgggctgctcccaaaaggatatccacacctgtgtagtatttgtgatctcccggtccatagtaacaaggagtggtcccagcacataaatggagcttctcattcacgccggtgccaactgctgctcgaaatctatcccgaatggaacccggacaacgacacgggtcatactatgggggaccctttcatgctgcagcagagtaccaaccctgcccctggcatccttgggcccccaccacccagttttcacctgggcggccccgcagtgggacctcggggcaatcttggggcgggcaatggaaatctgcagggcccacgtcacatgcagaaaggtcgcgtggagacatctcgtgtggtgcacatcatggacttccagaggggtaaaaaccttaggtaccagttgttacagctggtggaacctttcggggtgatttctaatcacctgatcctgaacaagattaacgaagcctttatcgagatggccaccaccgaggatgcccaagctgcagttgactactatactactacacccgccctagtgtttggcaagccagtgagggtccacctgtcacagaaatacaagaggatcaagaaacccgagggcaagcctgaccagaagttcgatcagaagcaggaactgggccgggtgattcatctctccaatctacctcatagtggatacagcgattccgccgtcttgaagcttgctgagccgtatggtaagatcaaaaattacattcttatgcgcatgaagtctcaggccttcatcgaaatggaaacacgagaggatgcgatggctatggttgatcactgtctgaagaaagctctctggttccagggtaggtgcgtgaaagtggatctgtcagaaaaatataaaaaactcgtgctgagaatccctaacaggggtattgacctgctcaagaaggacaaaagccgtaagcggtcgtactcccctgacggaaaggagtctccctcagacaagaaatctaaaactgacgggagccagaagacagaaagcagcactgagggcaaagagcaggaggagaaatcaggtgaagatggtgaaaaagataccaaggacgatcagacagagcaggagcctaacatgcttttggagagcgaggacgaactcttggtggacgaggaggaggcagctgccctgctcgagtcagggagttcagtcggtgatgagacagatctagctaatctgggcgatgttgcatccgacgggaaaaaggagccctcggataaagccgtcaagaaggatggatctgcaagcgccgccgccaagaagaaattgaagaaggtggataaaatcgaagaactggatcaggagaatgaggcagcgctggagaacgggataaaaaacgaagaaaacacagaacctggagctgaatccagcgagaatgccgacgacccgaataaagacacaagcgagaatgcagacggacagagcgatgagaacaaggatgactatacaattccagatgagtatagaataggaccctaccagccaaatgtgcccgtgggcatagactacgtgattccaaagacaggtttctactgtaagctctgctcactgttctacacgaacgaagaggtggctaagaacactcattgcagttccctgcctcactatcagaaactgaaaaaattcctcaacaaactcgccgaagagagacgccagaaaaaggagacctag

SEQ ID NO: 74318 - DNA, 300 bp, Artificial Sequence
  derived and/or modified sequence
atgtctaagtcatttcagcagtcctctctgagccgggattcacaggggcacgggcgtgacttgtccgccgccgggattggcctcctcgcagccgctacacagagcctgtctatgcccgcctccctggggcggatgaaccagggaaccgctcgtctcgcctccctgatgaacctcggcatgagtagcagtctgaaccaacaaggcgctcactccgcactgtcatctgcatccacctcctctcacaacttgcagagtatctttaacattggcagcaggggtcctctcccactatcttcttag

SEQ ID NO: 74319 - DNA, 264 bp, Artificial Sequence
  derived and/or modified sequence
atgagcaaatccttccagcagtcatcgctctctcgcgattcccagggccatggacgggacttaagcgcagcaggaatcggcctgctggccgcagctactcagagcctctccatgcccgcatccctaggcaggatgaatcaggggaccgcccggctggcttctctgatgaacctgggaatgagctcttctctcaatcagcaaggtgcccacagcgcactatcatcagccagcaccagcagccacaatctgcagagtatattttag

SEQ ID NO: 74320 - DNA, 237 bp, Artificial Sequence
  derived and/or modified sequence
atgagcaagagtttccagcagtcaagcctgagccgggactcacagggacacggacgagacctctcagccgctggcattggtctgctagccgcagccacacaatcactgtcaatgccagccagcctgggtcgcatgaatcagggtacagcccggctagcgagccttatgaatcttgggatgagctcttccctgaatcagcagggcgcccacagcgcactgtcgtcggctagcacatag

SEQ ID NO: 74321 - DNA, 1302 bp, Artificial Sequence
  derived and/or modified sequence
atgagtaagagtttccaacagtcctctctgtcacgcgattcccagggacatgggagggatttgtcagccgcgggcattggcttgctcgctgccgctactcagagtctgtctatgcctgcctccctgggcagaatgaatcaaggcaccgccagactcgcaagtctcatgaatctcggcatgagctccagtctaaaccaacagggtgcccattcagctctttccagtgcgtcaacttctagccacaatctccaatcaatcttcaatataggttcaagaggcccactcccgctgtccagtcaacataggggcgacgcagaccaagccagtaatattctggcttcgttcgggctttctgcacgggacctggacgagctgtcccggtaccccgaggataagatcacccccgaaaatctgccacagatcctgctgcagctgaaaagacgccgcacagaggaagggcctacgctctcctatgggagggacgggaggtccgctaccagagagcccccctatagagtgcctagggatgattgggaggaaaagcggcatttcaggcgagacagcttcgatgaccgcggaccttccctgaacccagtcctggattatgaccacgggtcacggtcccaggagtctgggtattacgatcggatggactacgaagatgataggctccgagacggggagcggtgccgagacgactcctttttcggcgagaccagccataactaccacaagttcgacagtgaatatgagagaatgggcaggggcccagggcccctccaggaacgaagcctgttcgaaaagaagaggggcgcgccccccagtagtaacatcgaagatttccacggcctcttgcccaaggggtaccctcacctgtgctcgatttgtgatctcccagtccacagtaataaggaatggagccagcatatcaacggcgccagtcacagcaggagatgccagctgctgctagaaatctatcccgaatggaaccctgataacgataccgggcatactatgggggacccgttcatgctgcagcagtctacaaatcctgctccggggatcctgggccccccgccccccagctttcacctgggtgggcctgctgtgggcccgcgtggcaatctcggagcaggaaacggaaatctgcagggcccacggcatatgcagaaaggtagagttgaaaccagtagggttgttcatattatggactttcagcgcggcaaaaatctcagataccaactgctccagctggtggagcctttcggcgtgatttcaaatcaccttatactgaacaagtag

SEQ ID NO: 74322 - DNA, 144 bp, Artificial Sequence
  derived and/or modified sequence
atgtcgaaaagcttccaacagtcctcccttagcagagatagccagggccacgggagggacttgtctgcagctggaatcggcctcctggcagcagctacccagtcgctatccatgcccgccagcctaggaaggatgaatcaatag

SEQ ID NO: 74323 - DNA, 237 bp, Artificial Sequence
  derived and/or modified sequence
atgtcaaagagctttcaacagtcctcgctttccagggacagtcaggggcatggacgggacctgtcagctgctggcatcggccttttggctgctgcaacccagtctctgtcaatgccagccagcttaggaaggatgaaccagggtactgcgcggcttgcgtccctaatgaatctcggaatgagctcatcgctcaatcagcagggagcgcactccgcactgagctcagcaagcacttag

SEQ ID NO: 74324 - DNA, 2544 bp, Artificial Sequence
  derived and/or modified sequence
atgagtaagagctttcagcagtcatccctcagtcgtgatagtcagggccatggcagagacctctctgctgcaggcattggtctgctcgccgctgccacccagtcactgagtatgcctgcttctttagggcggatgaatcagggaaccgctcggctggcgtccctgatgaatcttgggatgagcagctcgttgaatcagcagggagcccactccgctctgagttccgcatccacgtcttcccacaatctgcagtcaatctttaatattggaagcagaggaccactgcccctgtcttcccagcaccgcggagacgcagaccaggcctcgaatatcctggcctcttttggactgtctgctagggatctcgacgaactgagtagatatcccgaggacaaaattaccccggagaatctgccccaaattttgctgcagctgaaacgcagacgtacagaagaagggcctaccttgtcttacggcagggacggtcgatcagctacccgcgagccgccctatcgcgtccctagagatgattgggaggagaaaaggcactttagacgcgattccttcgacgacagaggccctagcctgaaccccgtactcgattacgaccacgggtcccgctcacaggagtccgggtactatgatcgcatggactatgaggacgatcgactgcgcgatggagagcggtgccgtgatgattctttttttggtgaaacaagccacaattatcacaaattcgattccgagtatgagcgcatgggccggggccctggtcccctgcaggagagatccctgttcgagaagaaacggggcgccccgccgtcctcaaatatagaagacttccacgggttattgcccaagggctatccacacctctgctcaatctgcgatttgccagttcactctaacaaggaatggtcccaacacatcaacggcgcttctcattcaagacgctgccagctgttgctggagatatatcctgagtggaatccagacaacgataccgggcacaccatgggagatcccttcatgttgcaacagtctaccaacccggcccctggtatcctgggaccgcctcctccatcatttcatctcggtggtccagctgtgggccctcgcggcaacctgggcgccgggaatggcaacctccagggacctcgacacatgcagaaaggccgcgtggagacctctagagtggtacacattatggatttccaaaggggaaaaaacttgagataccagttgctccagctggtggagccgtttggagtgatatctaaccacctgatcctgaacaaaatcaacgaggctttcatagaaatggcgaccacagaagatgcgcaggccgccgtggactattacactactacgccggccctggtgtttggtaagcccgtgcgggtgcacctcagtcagaagtacaaacggattaaaaagcctgagggcaaaccagatcagaagtttgaccaaaagcaagaattgggtcgggtgatacacctcagcaacttgccccacagtggatattcggattctgctgtcctgaagttagcagaaccctacggcaaaattaagaattatatcctcatgcggatgaagagccaggcctttatcgagatggaaaccagagaggacgccatggccatggtagatcactgcctcaagaaggctctttggttccagggtcgctgtgtgaaggtggatctgtcggagaagtacaagaaactggtgctgaggatacctaaccggggcatcgatttgctgaaaaaggacaagtcacgcaaaagatcatatagtcccgacgggaaagaaagccctagtgataagaaatctaagacagatggtagtcagaaaacagaatccagcacagaaggaaaggagcaggaagagaaatcgggggaagacggcgagaaagataccaaagatgaccaaacagagcaagaacccaacatgttgctggagagtgaggacgagctgctggtagacgaggaggaagccgccgctcttctcgaaagcggcagcagcgtgggagatgagacagatttggctaacctgggagacgtggccagcgatggcaaaaaggagcccagcgataaggccgttaaaaaggacggtagtgcgagtgccgccgctaagaaaaagctcaaaaaggtggacaagatagaggagctggaccaggaaaacgaggcggccctcgaaaacggaataaaaaatgaggaaaatactgagccaggcgccgagtcatcggagaatgccgatgatcctaacaaggatacgagcgaaaacgccgatggacagagcgacgaaaataaggatgactatacaatacccgatgagtaccgaattggaccttaccagcccaatgtcccagtcggaatcgattatgtaatcccaaagacgggcttctactgcaagctctgctctttgttctacactaatgaggaggtcgcaaaaaatacccattgctctagtctgccacactaccaaaagctcaaaaaatttctgaacaagctggctgaggaaaggagacagaaaaaagagacttag

SEQ ID NO: 74325 - DNA, 303 bp, Artificial Sequence
  derived and/or modified sequence
atgagcaagagcttccagcagtcgtctctcagtcgtgattcgcaaggtcatggtagagatctcagtgctgccggaatcgggctgctggctgctgctacccaatccttgtcaatgccggcttcactgggaagaatgaatcagggcacagcaaggctggcttctttgatgaatctgggtatgtcgtcctccctcaaccaacaaggcgctcactccgcgctgagttccgctagtactagcagtcataaccttcagagtatcttcaatattgggagccgggggcctctcccgttgtctagccaatag

SEQ ID NO: 74326 - DNA, 324 bp, Artificial Sequence
  derived and/or modified sequence
atgtccaagtcttttcaacagagctctctgtctcgcgacagccagggacatggacgagatcttagcgcggcgggcattgggctgctggctgctgcaacccaatcactctctatgcccgcatccctagggcgaatgaatcagggcactgccagactggcctccctgatgaacctcggtatgagtagctcccttaaccagcagggggcacattctgcgctgtcttcggcgtccaccagctcccataatctacagagcatcttcaacattggttcccgagggcccctgcctctgtccagtcagcatcgcggcgatgctgaccaatag

SEQ ID NO: 74327 - DNA, 2544 bp, Artificial Sequence
  derived and/or modified sequence
atgagcaagagcttccagcagagcagcctgagccgggacagccagggccacggccgggacctgtctgctgctggcatcggcctgctggccgccgccacccagagcctgtccatgcctgccagcctgggccgcatgaaccagggcacagcccggctggccagcctgatgaacctgggcatgagcagcagcctgaaccagcagggcgcccacagcgccctgagcagcgccagcaccagcagccacaacctgcagagcatcttcaacatcggcagccggggccccctgcccctgagcagccagcacagaggagatgctgaccaggccagcaacatcctggccagctttggcctgagcgcccgggacctggatgagctgagccgctacccagaggacaagatcaccccagagaacctgccccagatcctgctgcagctgaagagaagaagaacagaggagggccccaccctgtcctatggaagagatggccgcagcgccacccgggagcccccctacagagtgcccagagatgactgggaggagaagaggcacttcagaagagacagctttgatgaccggggccccagcctgaaccctgtgctggactatgaccacggcagccgcagccaggagagcggctactatgacaggatggactatgaagatgaccggctgagagatggagagcgctgcagagatgacagcttcttcggggagaccagccacaactaccacaagtttgacagtgaatatgaaagaatgggccggggccctggccccctgcaggagaggagcctgtttgagaagaagagaggagccccacccagcagcaacatcgaggacttccacggcctgctgcccaagggctacccccacctgtgcagcatctgtgacctgcctgtgcacagcaacaaggagtggagccagcacatcaatggagccagccacagccgccgctgccagctgctgctggagatctacccagagtggaacccagacaatgacaccggccacaccatgggagaccccttcatgctgcagcagagcaccaacccagcccctggcatcctgggccccccaccacccagcttccacctgggcggccctgctgtgggcccccggggcaacctgggcgctggaaatggaaacctgcagggccccaggcacatgcagaagggccgggtggagaccagccgggtggtgcacatcatggacttccagaggggcaagaacctgcgctaccagctgctgcagctggtggagccctttggagtcatcagcaaccacctgatcctgaacaagatcaatgaggccttcatcgagatggccaccacagaagatgcccaggccgctgtggactactacaccaccaccccagccctggtgtttgggaagcctgtgcgggtgcacctgagccagaagtacaagaggatcaagaagccagagggcaagccagaccagaagtttgaccagaagcaggagctgggccgggtcatccacctgagcaacctgccccacagcggctacagcgacagcgctgtgctgaagctggccgagccctacggcaagatcaagaactacatcctgatgaggatgaagagccaggccttcatcgagatggagaccagagaagatgccatggccatggtggaccactgcctgaagaaggccctgtggttccagggccgctgtgtgaaggtggacctgtctgagaagtacaagaagctggtgctgcgcatccccaacagaggcatcgacctgctgaagaaggacaagagcaggaagaggagctacagcccagatggcaaggagagccccagcgacaagaagagcaagacagatggcagccagaagacagagagcagcacagagggcaaggagcaggaggagaagtctggagaagatggagagaaggacaccaaggatgaccagacagagcaggagcccaacatgctgctggagagtgaagatgagctgctggtggatgaggaggaggccgccgccctgctggagagcggcagctctgtgggagatgaaacagacctggccaacctgggagatgtggccagtgatggcaagaaggagcccagcgacaaggctgtgaagaaggatggcagcgccagcgctgctgccaagaagaagctgaagaaggtggacaagattgaggagctggaccaggagaatgaagctgccctggagaatggcatcaagaatgaagaaaatacagagcctggagctgagagcagtgaaaatgctgatgaccccaacaaggacaccagtgaaaatgctgatggccagagtgatgagaacaaggatgactacaccatcccagatgagtacagaattggcccctaccagcccaacgtgcctgtgggcatcgactatgtgatccccaagacaggcttctactgcaagctgtgcagcctcttctacaccaatgaggaggtggccaagaacacccactgcagcagcctgccccactaccagaagctgaagaagttcctgaacaagctggccgaggagcggcggcagaagaaggagacctag

SEQ ID NO: 74328 - DNA, 300 bp, Artificial Sequence
  derived and/or modified sequence
atgagcaagagcttccagcagagcagcctgagccgggacagccagggccacggccgggacctgtctgctgctggcatcggcctgctggccgccgccacccagagcctgtccatgcctgccagcctgggccgcatgaaccagggcacagcccggctggccagcctgatgaacctgggcatgagcagcagcctgaaccagcagggcgcccacagcgccctgagcagcgccagcaccagcagccacaacctgcagagcatcttcaacatcggcagccggggccccctgcccctgagcagctag

SEQ ID NO: 74329 - DNA, 264 bp, Artificial Sequence
  derived and/or modified sequence
atgagcaagagcttccagcagagcagcctgagccgggacagccagggccacggccgggacctgtctgctgctggcatcggcctgctggccgccgccacccagagcctgtccatgcctgccagcctgggccgcatgaaccagggcacagcccggctggccagcctgatgaacctgggcatgagcagcagcctgaaccagcagggcgcccacagcgccctgagcagcgccagcaccagcagccacaacctgcagagcatcttctag

SEQ ID NO: 74330 - DNA, 237 bp, Artificial Sequence
  derived and/or modified sequence
atgagcaagagcttccagcagagcagcctgagccgggacagccagggccacggccgggacctgtctgctgctggcatcggcctgctggccgccgccacccagagcctgtccatgcctgccagcctgggccgcatgaaccagggcacagcccggctggccagcctgatgaacctgggcatgagcagcagcctgaaccagcagggcgcccacagcgccctgagcagcgccagcacctag

SEQ ID NO: 74331 - DNA, 1302 bp, Artificial Sequence
  derived and/or modified sequence
atgagcaagagcttccagcagagcagcctgagccgggacagccagggccacggccgggacctgtctgctgctggcatcggcctgctggccgccgccacccagagcctgtccatgcctgccagcctgggccgcatgaaccagggcacagcccggctggccagcctgatgaacctgggcatgagcagcagcctgaaccagcagggcgcccacagcgccctgagcagcgccagcaccagcagccacaacctgcagagcatcttcaacatcggcagccggggccccctgcccctgagcagccagcacagaggagatgctgaccaggccagcaacatcctggccagctttggcctgagcgcccgggacctggatgagctgagccgctacccagaggacaagatcaccccagagaacctgccccagatcctgctgcagctgaagagaagaagaacagaggagggccccaccctgtcctatggaagagatggccgcagcgccacccgggagcccccctacagagtgcccagagatgactgggaggagaagaggcacttcagaagagacagctttgatgaccggggccccagcctgaaccctgtgctggactatgaccacggcagccgcagccaggagagcggctactatgacaggatggactatgaagatgaccggctgagagatggagagcgctgcagagatgacagcttcttcggggagaccagccacaactaccacaagtttgacagtgaatatgaaagaatgggccggggccctggccccctgcaggagaggagcctgtttgagaagaagagaggagccccacccagcagcaacatcgaggacttccacggcctgctgcccaagggctacccccacctgtgcagcatctgtgacctgcctgtgcacagcaacaaggagtggagccagcacatcaatggagccagccacagccgccgctgccagctgctgctggagatctacccagagtggaacccagacaatgacaccggccacaccatgggagaccccttcatgctgcagcagagcaccaacccagcccctggcatcctgggccccccaccacccagcttccacctgggcggccctgctgtgggcccccggggcaacctgggcgctggaaatggaaacctgcagggccccaggcacatgcagaagggccgggtggagaccagccgggtggtgcacatcatggacttccagaggggcaagaacctgcgctaccagctgctgcagctggtggagccctttggagtcatcagcaaccacctgatcctgaacaagtag

SEQ ID NO: 74332 - DNA, 144 bp, Artificial Sequence
  derived and/or modified sequence
atgagcaagagcttccagcagagcagcctgagccgggacagccagggccacggccgggacctgtctgctgctggcatcggcctgctggccgccgccacccagagcctgtccatgcctgccagcctgggccgcatgaaccagtag

SEQ ID NO: 74333 - DNA, 303 bp, Artificial Sequence
  derived and/or modified sequence
atgagcaagagcttccagcagagcagcctgagccgggacagccagggccacggccgggacctgtctgctgctggcatcggcctgctggccgccgccacccagagcctgtccatgcctgccagcctgggccgcatgaaccagggcacagcccggctggccagcctgatgaacctgggcatgagcagcagcctgaaccagcagggcgcccacagcgccctgagcagcgccagcaccagcagccacaacctgcagagcatcttcaacatcggcagccggggccccctgcccctgagcagccagtag

SEQ ID NO: 74334 - DNA, 324 bp, Artificial Sequence
  derived and/or modified sequence
atgagcaagagcttccagcagagcagcctgagccgggacagccagggccacggccgggacctgtctgctgctggcatcggcctgctggccgccgccacccagagcctgtccatgcctgccagcctgggccgcatgaaccagggcacagcccggctggccagcctgatgaacctgggcatgagcagcagcctgaaccagcagggcgcccacagcgccctgagcagcgccagcaccagcagccacaacctgcagagcatcttcaacatcggcagccggggccccctgcccctgagcagccagcacagaggagatgctgaccagtag

SEQ ID NO: 74335 - DNA, 4015 bp, Artificial Sequence
  derived and/or modified sequence
ctttcccctccggcctctgccggtgctgctgcgccctgcggagctccgaacacgtgcgcagaggctggctgtggcagatgcaactgcaggatgacttgaaagtagggcatccttcacccatctgaagggaggaaatagtggcaggtgacagtctgcatgtgcagttttcagatgccttcacctgaatgacatctacctccatcaggaccccagatgtctgacagccctgtgtgacaccaagataagtaacagttgtctgctggttctcagcttgaagaagattctgcagtccttattgatcctttttcttggcgttaccatttttgaagcaaagttaacctagctttctagtttgagctttctttttggccgtctttaaaaaaatttttttttttaatctataaaatagacaagagctagttctacaatgtccaagtcattccagcagtcatctctcagtagggactcacagggtcatgggcgtgacctgtctgcggcaggaataggccttcttgctgctgctacccagtctttaagtatgccagcatctcttggaaggatgaaccagggtactgcacgccttgctagtttaatgaatcttggaatgagttcttcattgaatcaacaaggagctcatagtgcactgtcttctgctagtacttcttcccataatttgcagtctatatttaacattggaagtagaggtccactccctttatcttctcaacaccgtggagatgcagaccaggccagtaacattttggccagctttggtctgtctgctagagacttagatgaactgagtcgttatccagaggacaagattactcctgagaatttgccccaaatccttctacagcttaaaaggaggagaactgaagaaggccctaccttgagttatggtagagatggcagatctgctacacgggagccaccatacagagtacctagggatgattgggaagaaaaaaggcactttagaagagatagttttgatgatcgtggtcctagtctcaacccagtgcttgattatgaccatggaagtcgttctcaagaatctggttattatgacagaatggattatgaagatgacagattaagagatggagaaaggtgtagggatgattctttttttggtgagacctcgcataactatcataaatttgacagtgagtatgagagaatgggacgtggtcctggccccttacaagagagatctctctttgagaaaaagagaggcgctcctccaagtagcaatattgaagacttccatggactcttaccgaagggttatccccatctgtgctctatatgtgatttgccagttcattctaataaggagtggagtcaacatatcaatggagcaagtcacagtcgtcgatgccagcttcttcttgaaatctacccagaatggaatcctgacaatgatacaggacacacaatgggtgatccattcatgttgcagcagtctacaaatccagcaccaggaattctgggacctccacctccctcatttcatcttgggggaccagcagttggaccaagaggaaatctgggtgctggaaatggaaacctgcaaggacctagacacatgcagaaaggcagagtggaaactagcagagttgttcacatcatggattttcaacgagggaaaaacttgagataccagctattacagctggtagaaccatttggagtcatttcaaatcatctgattctaaataaaattaatgaggcatttattgaaatggcaaccacagaggatgctcaggccgcagtggattattacacaaccacaccagcgttagtatttggcaagccagtgagagttcatttatcccagaagtataaaagaataaagaaacctgaaggaaagccagatcagaagtttgatcaaaagcaagagcttggacgtgtgatacatctcagcaatttgccgcattctggctattctgatagtgctgttctcaagcttgctgagccttatgggaaaataaagaattacatattgatgaggatgaaaagtcaggcttttattgagatggagacaagagaagatgcaatggcaatggttgaccattgtttgaaaaaagccctttggtttcaggggagatgtgtgaaggttgacctgtctgagaaatataaaaaactggttctgaggattccaaacagaggcattgatttactgaaaaaagataaatcccgaaaaagatcttactctccagatggcaaagaatctccaagtgataagaaatccaaaactgatggttcccagaagactgagagttcaaccgaaggtaaagaacaagaagagaagtccggtgaagatggtgagaaagacacaaaggatgaccagacagagcaggaacctaatatgcttcttgaatctgaagatgagctacttgtagatgaagaagaagcagcagcactgctagaaagtggcagttcagtgggagacgagaccgatcttgctaatttaggtgatgtggcttctgatgggaaaaaggaaccatcagataaagctgtgaaaaaagatggaagtgcttcagcagcagcaaagaaaaagcttaaaaaggtggacaagatcgaggaacttgatcaagaaaacgaagcagcgttggaaaatggaattaaaaatgaggaaaacacagaaccaggtgctgaatcttctgagaacgctgatgatcccaacaaagatacaagtgaaaacgcagatggtcaaagtgatgagaacaaggacgactatacaatcccagatgagtatagaattggaccatatcagcccaatgttcctgttggtatagactatgtgatacctaaaacagggttttactgtaagctgtgttcactcttttatacaaatgaagaagttgcaaagaatactcattgcagcagccttcctcattatcagaaattaaagaaatttctgaataaattggcagaagaacgcagacagaagaaggaaacttaagatgtgcaaggagatttaatgatttcaaagaaaataatggttctttgtttttaatgttaaccttttttaaatacaatactgatagttagaagaaaactattgtactcttttgttttagtggagaaataatagatgtctgttcatgtgttaagtgttatagcaaaaaaaatacacatatggttaagttaatgaatagtttttgttttatcagaatggcaacagacagaagtactttgtagagattgacttcctaagctacttaagacaacttgcaccactaagaaaaaaatgtagaaccatttggaaaaatgaaatttagtagttccaagtttcaaagaaatgtcaacattttattccattcaataaagaacaaaaccaatagtgtttttattactttcatctgaaacattccatgttttaatctgagccttgcagactttcatttggagtttgaacccgttttggttgcatttcatttttggagaacttaattaacgtgagattggcaattgaaatgcaggtgcagttttctgttaatgtcatgctgttgtttaggtaataagaaatattaagtaattggctttagattttgtaatttttttccctgagttcctgctagatttcgtattctagtagtcaatgtattttcagtgaaatgcaaaaatattcccgttatctttgaccagtattaatttttgagatcttactgcttgtcacttgaatcccgtgattgtcatacatctctggtataagcaacatttgatttttgaagtgtgtagaccatctcttcatattttcaagatgtaattttacatttctgcatttttaaaacagtttggccataatcctagatgcacgcttctaattcatgtacctgcacatgtgacctttgtgaacagaaatttgcatgtataatttgtgtttacttgtaactttctggttatatactgcttatatctgtggattcaagttactgaagtgaataccaataaaaagaaaaccctaggccatgttaattggttatacatgtttggaatgttaacc

SEQ ID NO: 74336 - DNA, 4843 bp, Artificial Sequence
  derived and/or modified sequence
gtgggggcgagctctctcgcgagagtgggtttgttcttgggctgcagccgctgccgccgcttctcgccagcgccgttgctgcgggggattgtgggagtctccgcgtcccgctcgctgggagagaggtacctctccttttccctctccctttccctaagagttgtctgctggttctcagcttgaagaagattctgcagtccttattgatcctttttcttggcgttaccatttttgaagcaaagttaacctagctttctagtttgagctttctttttggccgtctttaaaaaaatttttttttttaatctataaaatagacaagagctagttctacaatgtccaagtcattccagcagtcatctctcagtagggactcacagggtcatgggcgtgacctgtctgcggcaggaataggccttcttgctgctgctacccagtctttaagtatgccagcatctcttggaaggatgaaccagggtactgcacgccttgctagtttaatgaatcttggaatgagttcttcattgaatcaacaaggagctcatagtgcactgtcttctgctagtacttcttcccataatttgcagtctatatttaacattggaagtagaggtccactccctttatcttctcaacaccgtggagatgcagaccaggccagtaacattttggccagctttggtctgtctgctagagacttagatgaactgagtcgttatccagaggacaagattactcctgagaatttgccccaaatccttctacagcttaaaaggaggagaactgaagaaggccctaccttgagttatggtagagatggcagatctgctacacgggagccaccatacagagtacctagggatgattgggaagaaaaaaggcactttagaagagatagttttgatgatcgtggtcctagtctcaacccagtgcttgattatgaccatggaagtcgttctcaagaatctggttattatgacagaatggattatgaagatgacagattaagagatggagaaaggtgtagggatgattctttttttggtgagacctcgcataactatcataaatttgacagtgagtatgagagaatgggacgtggtcctggccccttacaagagagatctctctttgagaaaaagagaggcgctcctccaagtagcaatattgaagacttccatggactcttaccgaagggttatccccatctgtgctctatatgtgatttgccagttcattctaataaggagtggagtcaacatatcaatggagcaagtcacagtcgtcgatgccagcttcttcttgaaatctacccagaatggaatcctgacaatgatacaggacacacaatgggtgatccattcatgttgcagcagtctacaaatccagcaccaggaattctgggacctccacctccctcatttcatcttgggggaccagcagttggaccaagaggaaatctgggtgctggaaatggaaacctgcaaggacctagacacatgcagaaaggcagagtggaaactagcagagttgttcacatcatggattttcaacgagggaaaaacttgagataccagctattacagctggtagaaccatttggagtcatttcaaatcatctgattctaaataaaattaatgaggcatttattgaaatggcaaccacagaggatgctcaggccgcagtggattattacacaaccacaccagcgttagtatttggcaagccagtgagagttcatttatcccagaagtataaaagaataaagaaacctgaaggaaagccagatcagaagtttgatcaaaagcaagagcttggacgtgtgatacatctcagcaatttgccgcattctggctattctgatagtgctgttctcaagcttgctgagccttatgggaaaataaagaattacatattgatgaggatgaaaagtcaggcttttattgagatggagacaagagaagatgcaatggcaatggttgaccattgtttgaaaaaagccctttggtttcaggggagatgtgtgaaggttgacctgtctgagaaatataaaaaactggttctgaggattccaaacagaggcattgatttactgaaaaaagataaatcccgaaaaagatcttactctccagatggcaaagaatctccaagtgataagaaatccaaaactgatggttcccagaagactgagagttcaaccgaaggtaaagaacaagaagagaagtccggtgaagatggtgagaaagacacaaaggatgaccagacagagcaggaacctaatatgcttcttgaatctgaagatgagctacttgtagatgaagaagaagcagcagcactgctagaaagtggcagttcagtgggagacgagaccgatcttgctaatttaggtgatgtggcttctgatgggaaaaaggaaccatcagataaagctgtgaaaaaagatggaagtgcttcagcagcagcaaagaaaaagcttaaaaaggtggacaagatcgaggaacttgatcaagaaaacgaagcagcgttggaaaatggaattaaaaatgaggaaaacacagaaccaggtgctgaatcttctgagaacgctgatgatcccaacaaagatacaagtgaaaacgcagatggtcaaagtgatgagaacaaggacgactatacaatcccagatgagtatagaattggaccatatcagcccaatgttcctgttggtatagactatgtgatacctaaaacagggttttactgtaagctgtgttcactcttttatacaaatgaagaagttgcaaagaatactcattgcagcagccttcctcattatcagaaattaaagaaatttctgaataaattggcagaagaacgcagacagaagaaggaaacttaagatgtgcaaggagatttaatgatttcaaagaaaataatggttctttgtttttaatgttaaccttttttaaatacaatactgatagttagaagaaaactattgtactcttttgttttagtggagaaataatagatgtctgttcatgtgttaagtgttatagcaaaaaaaatacacatatggttaagttaatgaatagtttttgttttatcagaatggcaacagacagaagtactttgtagagattgacttcctaagctacttaagacaacttgcaccactaagaaaaaaatgtagaaccatttggaaaaatgaaatttagtagttccaagtttcaaagaaatgtcaacattttattccattcaataaagaacaaaaccaatagtgtttttattactttcatctgaaacattccatgttttaatctgagccttgcagactttcatttggagtttgaacccgttttggttgcatttcatttttggagaacttaattaacgtgagattggcaattgaaatgcaggtgcagttttctgttaatgtcatgctgttgtttaggtaataagaaatattaagtaattggctttagattttgtaatttttttccctgagttcctgctagatttcgtattctagtagtcaatgtattttcagtgaaatgcaaaaatattcccgttatctttgaccagtattaatttttgagatcttactgcttgtcacttgaatcccgtgattgtcatacatctctggtataagcaacatttgatttttgaagtgtgtagaccatctcttcatattttcaagatgtaattttacatttctgcatttttaaaacagtttggccataatcctagatgcacgcttctaattcatgtacctgcacatgtgacctttgtgaacagaaatttgcatgtataatttgtgtttacttgtaactttctggttatatactgcttatatctgtggattcaagttactgaagtgaataccaataaaaagaaaaccctaggccatgttaattggttatacatgtttggaatgttaaccaacgtatttgtcagttgtggtttttattcgctcttaaactttgtgcatgctttaacaatttattacttttaaatctagagtgaattctaaagactgccgctaaagatctgagttttaaaaatgttgttgctggtggatttcttgttcctgttacataactaaaagtgaggccatttgtggtttttaaaaaccttatgaattaaaaatgctacaggtgaacaaacagaagcttatgtttagagatattgatgacttaacagtacaattggaagtaatacggatgagcaagaattagttctgcagcttttcaaaataattacgtagagactcttggtatattggattatctgttgtaaacaatttttttttcttccctgacacagggtctcactctgtcacccagactggagtgcagtggcacagttctctgcaacctcagcctttgggctcaaatgaccctcctacctcagtctcctgagtagctgggactacaggctcatgccactatacctggctagtttttggtttttttgtatagatggggctttgccatgttgcccaggttgatcttgaattcctgggcccaagtgatctgctcgcttcagcctcccaaagtgctgggactgtaggcatgagccaccatccctggccaagaaacaaagttttaatttcaaaaaaatctacaaaaacaggataggcattgtctttcaaatgttcagaccccagtttattaaaggatacttcaaatagttggctaaattttatgatctctcccgttgaaaagtaggtgatgattttaatgtgacatgcacaaaaaatccttgccagtttacttctgcaatttaattttagcctttactaattacccacttctgtttaattccaatttttaacagcaggtacataaagcattatgtgca

SEQ ID NO: 74337 - DNA, 589 bp, Artificial Sequence
  derived and/or modified sequence
gtttcattgcagagaggctggctgtggcagatgcaactgcaggtgccgtcatttaatttcccagacacttgacctccttctgatttgtgtactccctccaaggctgagttgcaagttgtctgctggttctcagcttgaagaagattctgcagtccttattgatcctttttcttggcgttaccatttttgaagcaaagttaacctagctttctagtttgagctttctttttggccgtctttaaaaaaatttttttttttaatctataaaatagacaagagctagttctacaatgtccaagtcattccagcagtcatctctcagtagggactcacagggtcatgggcgtgacctgtctgcggcaggaataggccttcttgctgctgctacccagtctttaagtatgccagcatctcttggaaggatgaaccagggtactgcacgccttgctagtttaatgaatcttggaatgagttcttcattgaatcaacaaggagctcatagtgcactgtcttctgctagtacttcttcccataatttgcagtctatatttaacattggaagtagaggtccactccctttatcttctca

SEQ ID NO: 74338 - DNA, 696 bp, Artificial Sequence
  derived and/or modified sequence
gtggaacaagccgcctgcagtacagtgcgaggcgggtgatttgcacttgtttagtcaagtcacctcacatcctttttctctttatcaaaatagtattagtccaggttcctccagagaggatcgtgtggtgtgggaccttccggtttccagacaaagggttttggagtaccgtggtgtagtcgccgcatcgttctttgcatttcgagctctgtgccatgttctgtgttcggcatttaccgtggatgaatatcccctagagttgtctgctggttctcagcttgaagaagattctgcagtccttattgatcctttttcttggcgttaccatttttgaagcaaagttaacctagctttctagtttgagctttctttttggccgtctttaaaaaaatttttttttttaatctataaaatagacaagagctagttctacaatgtccaagtcattccagcagtcatctctcagtagggactcacagggtcatgggcgtgacctgtctgcggcaggaataggccttcttgctgctgctacccagtctttaagtatgccagcatctcttggaaggatgaaccagggtactgcacgccttgctagtttaatgaatcttggaatgagttcttcattgaatcaacaaggagctcatagtgcactgtcttctgctagtacttcttcccataatttgcagtctatattta

SEQ ID NO: 74339 - DNA, 770 bp, Artificial Sequence
  derived and/or modified sequence
agtcaagtcacctcacatcctttttctctttatcaaaatagtattagtccaggttcctccagagaggatcgtgtggtgtgggaccttccggtttccagacaaagggttttggagtaccgtggtgtagtcgccgcatcgttctttgcatttcgagctctgtgccatgttctgtgttcggcatttaccgtggatgaatatcccctaggtgtttatcctgctctgtggccctgttctgtggaatattcctattggatcagttacagttttttagccagatatttctagaacggttatggtggttctgaaatggctagtctttcgggcgcgctggaataatgtgaagaatcgttgatttcgtagagttgtctgctggttctcagcttgaagaagattctgcagtccttattgatcctttttcttggcgttaccatttttgaagcaaagttaacctagctttctagtttgagctttctttttggccgtctttaaaaaaatttttttttttaatctataaaatagacaagagctagttctacaatgtccaagtcattccagcagtcatctctcagtagggactcacagggtcatgggcgtgacctgtctgcggcaggaataggccttcttgctgctgctacccagtctttaagtatgccagcatctcttggaaggatgaaccagggtactgcacgccttgctagtttaatgaatcttggaatgagttcttcattgaatcaacaaggagctcatagtgcactgtcttctgctagtac

SEQ ID NO: 74340 - DNA, 1530 bp, Artificial Sequence
  derived and/or modified sequence
cgccgttgctgcgggggattgtgggagtctccgcgtcccgctcgctgggagagagttgtctgctggttctcagcttgaagaagattctgcagtccttattgatcctttttcttggcgttaccatttttgaagcaaagttaacctagctttctagtttgagctttctttttggccgtctttaaaaaaatttttttttttaatctataaaatagacaagagctagttctacaatgtccaagtcattccagcagtcatctctcagtagggactcacagggtcatgggcgtgacctgtctgcggcaggaataggccttcttgctgctgctacccagtctttaagtatgccagcatctcttggaaggatgaaccagggtactgcacgccttgctagtttaatgaatcttggaatgagttcttcattgaatcaacaaggagctcatagtgcactgtcttctgctagtacttcttcccataatttgcagtctatatttaacattggaagtagaggtccactccctttatcttctcaacaccgtggagatgcagaccaggccagtaacattttggccagctttggtctgtctgctagagacttagatgaactgagtcgttatccagaggacaagattactcctgagaatttgccccaaatccttctacagcttaaaaggaggagaactgaagaaggccctaccttgagttatggtagagatggcagatctgctacacgggagccaccatacagagtacctagggatgattgggaagaaaaaaggcactttagaagagatagttttgatgatcgtggtcctagtctcaacccagtgcttgattatgaccatggaagtcgttctcaagaatctggttattatgacagaatggattatgaagatgacagattaagagatggagaaaggtgtagggatgattctttttttggtgagacctcgcataactatcataaatttgacagtgagtatgagagaatgggacgtggtcctggccccttacaagagagatctctctttgagaaaaagagaggcgctcctccaagtagcaatattgaagacttccatggactcttaccgaagggttatccccatctgtgctctatatgtgatttgccagttcattctaataaggagtggagtcaacatatcaatggagcaagtcacagtcgtcgatgccagcttcttcttgaaatctacccagaatggaatcctgacaatgatacaggacacacaatgggtgatccattcatgttgcagcagtctacaaatccagcaccaggaattctgggacctccacctccctcatttcatcttgggggaccagcagttggaccaagaggaaatctgggtgctggaaatggaaacctgcaaggacctagacacatgcagaaaggcagagtggaaactagcagagttgttcacatcatggattttcaacgagggaaaaacttgagataccagctattacagctggtagaaccatttggagtcatttcaaatcatctgattctaaataaaa

SEQ ID NO: 74341 - DNA, 2243 bp, Artificial Sequence
  derived and/or modified sequence
tttcccctccggcctctgccggtgctgctgcgccctgcggagctccgaacacgtgcgcagaggctggctgtggcagatgcaactgcaggatgacttgaaagtagggcatccttcacccatctgaagggaggaaatagtggcaggtgacagtctgcatgtgcagttttcagatgccttcacctgaatgacatctacctccatcaggaccccagatgtctgacagccctgtgtgacaccaagataagtaacgagtggagtcaacatatcaatggagcaagtcacagtcgtcgatgccagcttcttcttgaaatctacccagaatggaatcctgacaatgatacaggacacacaatgggtgatccattcatgttgcagcagtctacaaatccagcaccaggaattctgggacctccacctccctcatttcatcttgggggaccagcagttggaccaagaggaaatctgggtgctggaaatggaaacctgcaaggacctagacacatgcagaaaggcagagtggaaactagcagagttgttcacatcatggattttcaacgagggaaaaacttgagataccagctattacagctggtagaaccatttggagtcatttcaaatcatctgattctaaataaaattaatgaggcatttattgaaatggcaaccacagaggatgctcaggccgcagtggattattacacaaccacaccagcgttagtatttggcaagccagtgagagttcatttatcccagaagtataaaagaataaagaaacctgaaggaaagccagatcagaagtttgatcaaaagcaagagcttggacgtgtgatacatctcagcaatttgccgcattctggctattctgatagtgctgttctcaagcttgctgagccttatgggaaaataaagaattacatattgatgaggatgaaaagtcaggcttttattgagatggagacaagagaagatgcaatggcaatggttgaccattgtttgaaaaaagccctttggtttcaggggagatgtgtgaaggttgacctgtctgagaaatataaaaaactggttctgaggattccaaacagaggcattgatttactgaaaaaagataaatcccgaaaaagatcttactctccagatggcaaagaatctccaagtgataagaaatccaaaactgatggttcccagaagactgagagttcaaccgaaggtaaagaacaagaagagaagtccggtgaagatggtgagaaagacacaaaggatgaccagacagagcaggaacctaatatgcttcttgaatctgaagatgagctacttgtagatgaagaagaagcagcagcactgctagaaagtggcagttcagtgggagacgagaccgatcttgctaatttaggtgatgtggcttctgatgggaaaaaggaaccatcagataaagctgtgaaaaaagatggaagtgcttcagcagcagcaaagaaaaagcttaaaaaggtggacaagatcgaggaacttgatcaagaaaacgaagcagcgttggaaaatggaattaaaaatgaggaaaacacagaaccaggtgctgaatcttctgagaacgctgatgatcccaacaaagatacaagtgaaaacgcagatggtcaaagtgatgagaacaaggacgactatacaatcccagatgagtatagaattggaccatatcagcccaatgttcctgttggtatagactatgtgatacctaaaacagggttttactgtaagctgtgttcactcttttatacaaatgaagaagttgcaaagaatactcattgcagcagccttcctcattatcagaaattaaagaaatttctgaataaattggcagaagaacgcagacagaagaaggaaacttaagatgtgcaaggagatttaatgatttcaaagaaaataatggttctttgtttttaatgttaaccttttttaaatacaatactgatagttagaagaaaactattgtactcttttgttttagtggagaaataatagatgtctgttcatgtgttaagtgttatagcaaaaaaaatacacatatggttaagttaatgaatagtttttgttttatcagaatggcaacagacagaagtactttgtagagattgacttcctaagctacttaagacaacttgcaccactaagaaaaaaatgtagaaccatttggaaaaatgaaatttagtagttccaagtttcaaagaaatgtcaacattttattccattca

SEQ ID NO: 74342 - DNA, 664 bp, Artificial Sequence
  derived and/or modified sequence
ctgcgccctgcggagctccgaacacgtgcgcagaggctggctgtggcagatgcaactgcaggatgacttgaaagtagggcatccttcacccatctgaagggaggaaatagtggcaggtgacagtctgcatgtgcagttttcagatgccttcacctgaatgacatctacctccatcaggaccccagatgtctgacagccctgtgtgacaccaagataagtaacaatctggctgctgactaccctattggacaactccaatattagagaacatttccaccaattcagaaagtttattatgcactgctgttctagagcagggatcagcaaacttgctgtaaagagccagagttgtctgctggttctcagcttgaagaagattctgcagtccttattgatcctttttcttggcgttaccatttttgaagcaaagttaacctagctttctagtttgagctttctttttggccgtctttaaaaaaatttttttttttaatctataaaatagacaagagctagttctacaatgtccaagtcattccagcagtcatctctcagtagggactcacagggtcatgggcgtgacctgtctgcggcaggaataggccttcttgctgctgctacccagtctttaagtatgccagcatctcttggaaggatgaaccag

SEQ ID NO: 74343 - DNA, 561 bp, Artificial Sequence
  derived and/or modified sequence
gtatgtgagccgcctgatcggcggccgccatgttaggagcgcagtggcggcgcaaccagccttctagggcggcggaggtgagcggtccgggagggaaacacgcggccggccaagggcccagggtgcggcgggagattttgggtgaagagagttgtctgctggttctcagcttgaagaagattctgcagtccttattgatcctttttcttggcgttaccatttttgaagcaaagttaacctagctttctagtttgagctttctttttggccgtctttaaaaaaatttttttttttaatctataaaatagacaagagctagttctacaatgtccaagtcattccagcagtcatctctcagtagggactcacagggtcatgggcgtgacctgtctgcggcaggaataggccttcttgctgctgctacccagtctttaagtatgccagcatctcttggaaggatgaaccagggtactgcacgccttgctagtttaatgaatcttggaatgagttcttcattgaatcaacaaggagctcatagtgcactgtcttctgctagtactt

SEQ ID NO: 74344 - DNA, 3249 bp, Artificial Sequence
  derived and/or modified sequence
gcagcaacggaaaggcgccacgctcgtgagcggaaccagcgttccgggggcgctcagtgtgggcaggcaggaagcctggctccactaggacacacagattctctcctgagcagctgcgaactatgcgccccttctacccttaagagatgggatgggagtccaacaaacccagccattgctcagaccccagcccttctctcctctaagaagcaggttcacctctgccaccgcactcgcatttttttttttttttaaagcccggcctttcctaggcggggtcaagggccccgcccaccgaagccacgcccagtagccgccccggggcggggttcccctcggctcccggctgccctttcccctccggcctctgccggtgctgctgcgccctgcggagctccgaacacgtgcgcagaggctggctgtggcagatgcaactgcagatgccttcacctgaatgacatctacctccatcaggaccccagatgtctgacagccctgtgtgacaccaagataagtaacagttgtctgctggttctcagcttgaagaagattctgcagtccttattgatcctttttcttggcgttaccatttttgaagcaaagttaacctagctttctagtttgagctttctttttggccgtctttaaaaaaatttttttttttaatctataaaatagacaagagctagttctacaatgtccaagtcattccagcagtcatctctcagtagggactcacagggtcatgggcgtgacctgtctgcggcaggaataggccttcttgctgctgctacccagtctttaagtatgccagcatctcttggaaggatgaaccagggtactgcacgccttgctagtttaatgaatcttggaatgagttcttcattgaatcaacaaggagctcatagtgcactgtcttctgctagtacttcttcccataatttgcagtctatatttaacattggaagtagaggtccactccctttatcttctcaacaccgtggagatgcagaccaggccagtaacattttggccagctttggtctgtctgctagagacttagatgaactgagtcgttatccagaggacaagattactcctgagaatttgccccaaatccttctacagcttaaaaggaggagaactgaagaaggccctaccttgagttatggtagagatggcagatctgctacacgggagccaccatacagagtacctagggatgattgggaagaaaaaaggcactttagaagagatagttttgatgatcgtggtcctagtctcaacccagtgcttgattatgaccatggaagtcgttctcaagaatctggttattatgacagaatggattatgaagatgacagattaagagatggagaaaggtgtagggatgattctttttttggtgagacctcgcataactatcataaatttgacagtgagtatgagagaatgggacgtggtcctggccccttacaagagagatctctctttgagaaaaagagaggcgctcctccaagtagcaatattgaagacttccatggactcttaccgaagggttatccccatctgtgctctatatgtgatttgccagttcattctaataaggagtggagtcaacatatcaatggagcaagtcacagtcgtcgatgccagcttcttcttgaaatctacccagaatggaatcctgacaatgatacaggacacacaatgggtgatccattcatgttgcagcagtctacaaatccagcaccaggaattctgggacctccacctccctcatttcatcttgggggaccagcagttggaccaagaggaaatctgggtgctggaaatggaaacctgcaaggacctagacacatgcagaaaggcagagtggaaactagcagagttgttcacatcatggattttcaacgagggaaaaacttgagataccagctattacagctggtagaaccatttggagtcatttcaaatcatctgattctaaataaaattaatgaggcatttattgaaatggcaaccacagaggatgctcaggccgcagtggattattacacaaccacaccagcgttagtatttggcaagccagtgagagttcatttatcccagaagtataaaagaataaagaaacctgaaggaaagccagatcagaagtttgatcaaaagcaagagcttggacgtgtgatacatctcagcaatttgccgcattctggctattctgatagtgctgttctcaagcttgctgagccttatgggaaaataaagaattacatattgatgaggatgaaaagtcaggcttttattgagatggagacaagagaagatgcaatggcaatggttgaccattgtttgaaaaaagccctttggtttcaggggagatgtgtgaaggttgacctgtctgagaaatataaaaaactggttctgaggattccaaacagaggcattgatttactgaaaaaagataaatcccgaaaaagatcttactctccagatggcaaagaatctccaagtgataagaaatccaaaactgatggttcccagaagactgagagttcaaccgaaggtaaagaacaagaagagaagtccggtgaagatggtgagaaagacacaaaggatgaccagacagagcaggaacctaatatgcttcttgaatctgaagatgagctacttgtagatgaagaagaagcagcagcactgctagaaagtggcagttcagtgggagacgagaccgatcttgctaatttaggtgatgtggcttctgatgggaaaaaggaaccatcagataaagctgtgaaaaaagatggaagtgcttcagcagcagcaaagaaaaagcttaaaaaggtggacaagatcgaggaacttgatcaagaaaacgaagcagcgttggaaaatggaattaaaaatgaggaaaacacagaaccaggtgctgaatcttctgagaacgctgatgatcccaacaaagatacaagtgaaaacgcagatggtcaaagtgatgagaacaaggacgactatacaatcccagatgagtatagaattggaccatatcagcccaatgttcctgttggtatagactatgtgatacctaaaacagggttttactgtaagctgtgttcactcttttatacaaatgaagaagttgcaaagaatactcattgcagcagccttcctcattatcagaaattaaagaaatttctgaataaattggcagaagaacgcagacagaagaaggaaacttaagatgtgcaa

SEQ ID NO: 74345 - DNA, 564 bp, Artificial Sequence
  derived and/or modified sequence
atcgcgtaaaaatggccgaaaaatgaaacgttaacgcttgtttttcgtactgcgtcgtggaacaagccgcctgcagtacagtgcgagagttgtctgctggttctcagcttgaagaagattctgcagtccttattgatcctttttcttggcgttaccatttttgaagcaaagttaacctagctttctagtttgagctttctttttggccgtctttaaaaaaatttttttttttaatctataaaatagacaagagctagttctacaatgtccaagtcattccagcagtcatctctcagtagggactcacagggtcatgggcgtgacctgtctgcggcaggaataggccttcttgctgctgctacccagtctttaagtatgccagcatctcttggaaggatgaaccagggtactgcacgccttgctagtttaatgaatcttggaatgagttcttcattgaatcaacaaggagctcatagtgcactgtcttctgctagtacttcttcccataatttgcagtctatatttaacattggaagtagaggtccactccctttatcttctcaa

SEQ ID NO: 74346 - DNA, 587 bp, Artificial Sequence
  derived and/or modified sequence
tttcccctccggcctctgccggtgctgctgcgccctgcggagctccgaacacgtgcgcagaggctggctgtggcagatgcaactgcagagttgtctgctggttctcagcttgaagaagattctgcagtccttattgatcctttttcttggcgttaccatttttgaagcaaagttaacctagctttctagtttgagctttctttttggccgtctttaaaaaaatttttttttttaatctataaaatagacaagagctagttctacaatgtccaagtcattccagcagtcatctctcagtagggactcacagggtcatgggcgtgacctgtctgcggcaggaataggccttcttgctgctgctacccagtctttaagtatgccagcatctcttggaaggatgaaccagggtactgcacgccttgctagtttaatgaatcttggaatgagttcttcattgaatcaacaaggagctcatagtgcactgtcttctgctagtacttcttcccataatttgcagtctatatttaacattggaagtagaggtccactccctttatcttctcaacaccgtggagatgcagaccagg

SEQ ID NO: 74347 - DNA, 2544 bp, Artificial Sequence
  derived and/or modified sequence
atgagcaagagcttccagcagagcagcctgagccgggacagccagggtcatggcagagacctgtccgccgcagggatcggactactcgccgctgcaacccagtcgctgagcatgcccgcttccctgggaaggatgaaccagggaactgcaagactcgcaagcctgatgaaccttggcatgtcgtcttccctgaatcagcagggtgctcattctgctctcagcagcgccagcacctcctcccacaacttgcaaagcatctttaatatcgggagcagggggcccttaccgctttcgtcccagcatagaggcgacgcagaccaggcttccaacatcctggcgtcttttggcctgtcagcaagagacctggatgaattatctcggtatcctgaagataaaataaccccggagaatctgccacaaatattgttgcagctgaaacgtcgcagaactgaggaaggcccgaccctgagctatgggcgcgacggcagatctgctactcgcgagcccccctaccgcgtgcctagggacgactgggaggaaaagaggcacttcagacgggactcttttgatgatcgcggtccgtccctcaatcctgttctggattacgaccatggctccagatcccaggaaagcggatattacgataggatggactacgaagacgaccggctgcgggatggcgagaggtgccgggacgattctttttttggcgagacatcccacaattaccacaagtttgattccgagtacgaaagaatggggcgcggcccgggccctctccaggagcgttcactgttcgaaaagaaacggggagctcctcctagtagcaacatcgaagactttcatgggctcctgcccaaaggttatcctcacctgtgttcaatctgtgatctgccagttcactccaataaggagtggagccagcacatcaacggagcttcacatagtcggcgctgtcagctgctgttggagatctaccctgaatggaacccagacaatgataccgggcacacaatgggagaccctttcatgctgcagcagtctaccaatccagctccaggtattctgggaccccctccacccagcttccacctcgggggccctgcagttggtccgcgcgggaatttgggggccggcaatggcaatctgcagggccctaggcatatgcagaaggggcgggtggagacaagcagggtggtgcacattatggattttcagcggggtaagaacctccggtaccagctgctccagttagtagaacccttcggtgtaatctcgaaccatttgatcctcaacaagatcaatgaggcttttatcgaaatggccacaacagaagatgcacaggccgcagtggattattatactaccacacccgcgctcgtgttcggcaaacctgtgcgggtccatctttcccagaaatataaacggatcaagaagcccgagggcaagccagatcagaaattcgatcaaaagcaagagctcggcagagtgatccacctgtcaaacttgccacacagcggctattctgacagcgctgtgttaaagttggccgagccatatgggaagattaaaaactatattttgatgaggatgaaaagccaggcctttatagagatggaaacccgggaggatgctatggctatggtcgatcactgcctgaaaaaagccctgtggtttcagggaagatgcgtgaaggtagatctgagcgagaaatacaagaaacttgtcttgaggatccctaatcggggcattgatctcttaaagaaagacaagtcccgcaaaaggtcgtacagtccagatggcaaggaaagccctagcgacaaaaaatcgaagacggacggctcacagaaaacagaatcttccacagagggcaaggaacaggaggagaagtccggtgaggacggggagaaggatacaaaggacgatcaaacagagcaggaacccaacatgctcctggagagcgaagacgagctcctcgtggacgaggaggaagccgctgcgctgctggaaagtggatcctcggtgggcgatgaaaccgatctcgctaaccttggtgatgttgcatctgatggtaagaaggaaccatcagacaaagcagttaagaaagatggcagcgcctctgcggccgccaagaagaagttaaagaaggtcgataagatcgaggaattggatcaggagaacgaagctgcactcgaaaacgggattaaaaatgaggagaatactgagcctggcgcagagtcatcagagaatgccgatgatcccaataaggacacatccgaaaacgcagatgggcagtccgatgaaaataaagacgactatactataccagatgaatatcggatcggaccctatcagcctaacgtcccagtggggattgattatgtaatacctaagaccgggttctattgcaagctgtgtagcttattttacaccaatgaagaggttgcaaagaatacacattgctcttcactgccccactatcaaaagctgaaaaaatttctgaataaactggctgaagaacgacgccagaaaaaggagacgtag

SEQ ID NO: 74348 - DNA, 2544 bp, Artificial Sequence
  derived and/or modified sequence
atgagcaagagcttccagcagagcagcctgagccgggacagccagggtcacgggagagatctgtctgccgctgggataggattgctggcagctgcaacacagagcctgagcatgccagcctcccttggccggatgaaccagggcactgcaaggctggcctcgcttatgaacctgggaatgtctagctctcttaatcagcagggggctcactctgcattgagttccgccagcactagcagtcacaacctgcagtccatttttaatattgggagccgtgggcctttacctctcagcagtcagcatcgtggagacgccgaccaggcgtctaacatcttagcctcttttggactctcagctcgcgatctggatgaactcagcagatatcccgaggataagatcacccccgaaaacctcccacagatactgttacagctgaagagaaggaggaccgaggagggccctaccctgagctatggaagggacggtcggtctgccacccgagagcccccctacagggtgcctcgcgacgattgggaggagaagcgccactttcgcagagacagctttgacgataggggaccgtcactcaatccagttctggattatgatcacggcagccgctcacaggagtcaggctattatgaccggatggactatgaagacgataggttgagagatggcgagcgatgtcgcgacgactctttttttggagagaccagtcataactaccacaagtttgactcagaatacgaacggatgggccgggggccaggtcccctgcaagagcgctcactgttcgagaaaaagcggggggcaccaccatccagcaatattgaggactttcatggccttttacctaaaggctaccctcacctgtgttccatttgtgatctccccgtgcacagcaataaagaatggtctcagcatataaatggtgcctctcacagccggcggtgtcagttgctactggagatttacccagaatggaatcctgataatgacactggtcatacaatgggtgatcctttcatgcttcagcagtcaaccaatccagctccaggaatactaggcccaccccctccatcgttccacctcggtgggccagctgttggcccacgcgggaatctgggcgctggaaatggcaatctgcagggcccaaggcatatgcaaaaaggacgcgtagaaacctctagagtggtgcacataatggactttcagcgcggaaagaacctgagataccagctgctgcaattggtcgaaccctttggtgtcattagcaaccacctaatcttgaacaagatcaatgaagcattcattgagatggctacaacggaggacgctcaagccgccgtagactattacacaactaccccggccctagtgtttggcaagcctgtgagagtccacctgtcccagaagtacaaaaggattaaaaagcctgaggggaagcctgaccagaagtttgaccaaaaacaagagctcggtcgggtcatccacctttctaatcttccacactctggctactcagactctgccgtcttgaaactggcggagccctatggtaaaatcaagaactacattcttatgcgtatgaagtcgcaggccttcattgagatggagactcgcgaagacgcaatggccatggtggaccactgcttaaaaaaagcactgtggttccaagggcgatgtgttaaagtggacctgagtgaaaaatacaaaaagttagtgctgcgcatccctaatagggggatcgatctactgaagaaggataaatctcgcaaaaggtcttattcaccggacgggaaggagagtcctagtgataagaaaagtaagacagatggtagtcagaagacagaaagttcaactgaagggaaagagcaagaggagaagtctggcgaggatggggagaaggatactaaggatgaccagacagaacaagaacccaatatgttgctcgagtctgaggatgaacttttggtagacgaagaggaagccgccgctctcctcgagtcaggttcatctgtaggcgatgaaacggatcttgccaatctcggcgatgtagctagtgatggcaagaaggagccatccgacaaggctgtgaaaaaagacggatctgcgagtgccgcagccaaaaagaaactaaagaaggttgacaaaattgaggaattggatcaagaaaacgaggcagctctggaaaatggtatcaaaaatgaggagaacactgagcctggagcagaatcgtctgagaacgccgatgaccccaacaaggacacgagcgaaaatgccgacgggcaatccgatgagaataaggacgattataccatcccggacgaatatagaatcgggccttatcagcctaatgtccccgtgggcatcgattatgtaattccgaaaactggcttttattgcaaactttgctcccttttttatacaaacgaggaggtcgctaagaatacacattgttcctctctcccccattaccagaaactaaagaaattcctgaacaaactcgctgaggaaaggcggcagaagaaggagacctag

SEQ ID NO: 74349 - DNA, 300 bp, Artificial Sequence
  derived and/or modified sequence
atgagcaagagcttccagcagagcagcctgagccgggacagccagggtcacggacgcgacctatccgctgcggggatcggtctcctggccgcggccacacagagtctgagcatgccagcgtctctcggacggatgaatcaggggaccgcccgtttggcgagcctgatgaaccttggaatgtccagttctctgaaccagcaaggtgcccattctgccctgagcagtgctagcaccagtagccataacttgcagagtatttttaatattggctcacgcggacccctgcctctttcgtcctag

SEQ ID NO: 74350 - DNA, 264 bp, Artificial Sequence
  derived and/or modified sequence
atgagcaagagcttccagcagagcagcctgagccgggacagccagggacatggacgcgatctgtcagccgccggcatagggctcctggcagccgcaacacagagcctgtcaatgccagcgtctctggggcgaatgaaccaagggaccgcaaggctggcttccctgatgaacttgggcatgagtagttcacttaaccaacagggcgctcactctgctctcagtagtgctagcactagctcacataatctccagtctatattttag

SEQ ID NO: 74351 - DNA, 237 bp, Artificial Sequence
  derived and/or modified sequence
atgagcaagagcttccagcagagcagcctgagccgggacagccagggccatgggcgcgacctgagcgccgctggcattggtctgctagctgccgccacccagagcttgtctatgcccgcctccctggggcgaatgaaccagggaaccgctaggctggcttcgctaatgaatcttgggatgagctccagtctcaaccagcaaggcgcccactcagcactctcctctgcgtccacatag

SEQ ID NO: 74352 - DNA, 1302 bp, Artificial Sequence
  derived and/or modified sequence
atgagcaagagcttccagcagagcagcctgagccgggacagccagggacatggccgggacctgtcagctgcaggcataggtctccttgctgcagctactcaatcgctgtccatgcccgcttcgttaggacggatgaaccagggcacagctaggcttgcgagtttgatgaatcttggaatgtctagctcccttaaccagcaaggcgcgcactctgctttgagctcggcctccacatcatctcacaatttgcagtccatctttaatattggcagccgcggccccctccccctgtcatcccagcatagaggcgatgccgatcaggcctccaatattctcgccagcttcgggctgtccgccagagatctggatgagctgagtcgctatcctgaggacaagatcactcctgagaatctacctcagatactgctacagctgaagcgtcgaaggacggaggaaggaccaactttgagctatgggagagatggtaggtcggctactcgtgaacccccctaccgagtccctcgtgatgactgggaggagaagcggcacttccgccgggatagctttgacgatcggggacctagtttaaacccagtgctcgactatgaccatggctcaagatcgcaagagagtggctactacgacaggatggattacgaagatgaccggttgcgggatggcgagcggtgccgagatgactcgtttttcggtgaaacttcccacaattaccacaaattcgatagcgaatacgagagaatgggccgtggccccgggcccctgcaggaacgctcattgttcgaaaaaaagcgcggtgcccccccttcaagcaatatcgaagactttcatggactcctccctaaggggtacccacacctctgctcgatctgtgacctcccagtccactccaataaggagtggtctcagcacatcaacggagcctctcacagtcgacggtgccagttgctgctcgaaatatacccagagtggaaccctgacaatgacaccggccacacaatgggggacccattcatgctgcaacagtcaactaatccggcacctggcattctggggccacccccgccatcattccacctcggggggcctgccgttggacccaggggaaacctgggtgcgggcaatgggaacctacaggggccacggcacatgcaaaaggggcgggtcgagacatctcgggtggtccacattatggatttccagcgagggaaaaatcttcgataccagcttctgcagctcgtggagccgtttggagttatcagtaaccacctcatcttgaataagtag

SEQ ID NO: 74353 - DNA, 144 bp, Artificial Sequence
  derived and/or modified sequence
atgagcaagagcttccagcagagcagcctgagccgggacagccagggacatggccgcgacctgagcgcggctgggatcggtctgctggccgccgcaacccagtcactgtcaatgccagctagtttaggacgtatgaaccagtag

SEQ ID NO: 74354 - DNA, 237 bp, Artificial Sequence
  derived and/or modified sequence
atgagcaagagcttccagcagagcagcctgagccgggacagccagggccacggaagagacctctccgctgcagggatcggcctcctggccgctgctacccagtccctgagtatgcccgccagcctcggaaggatgaaccaggggaccgccaggttggcatctttaatgaacttgggcatgtcctcatccctgaaccagcaaggtgcccatagcgccttatcttcagctagtacctag

SEQ ID NO: 74355 - DNA, 2544 bp, Artificial Sequence
  derived and/or modified sequence
atgagcaagagcttccagcagagcagcctgagccgggacagccaggggcacggcagggatttgagcgctgccggaatcggactcttggctgccgccacacaatcactttctatgcccgcctctttggggcgcatgaatcagggtacagcccggctggcctctttgatgaatctaggtatgtccagcagcctaaaccaacagggcgcacattcagcccttagcagtgcgagtacctctagtcataacttgcagtcaattttcaacatcggaagccggggtccgttgccacttagctctcagcaccgaggggacgccgatcaggcatccaacattcttgcaagttttgggctcagcgctagggacttggacgaactgtccagataccccgaggacaaaatcaccccagaaaacctgccccagatactactccagcttaaaaggaggcgcacagaggaaggccctacattatcctatggacgggacggccgttctgctaccagagaacccccctacagagtacctcgcgacgattgggaggaaaaacgccacttcagaagggattcttttgacgacagggggccttctctcaaccccgttcttgactacgatcatgggagccgcagccaagagtcaggatactatgacagaatggattacgaggatgatagactgagggacggggaacgctgtagggacgactcttttttcggtgagacatcccacaattatcacaaatttgacagcgaatacgagaggatggggagaggccctggacctctccaagagcgctctctgttcgagaaaaaacggggggctcccccgtcctcaaacatagaggacttccacggactgttgccgaaaggataccctcatttgtgtagtatttgcgacctgcctgtgcattccaacaaggagtggagtcagcacataaacggggcttcccactcaaggcgctgccagctgttactggagatctacccagaatggaatcctgataacgacactgggcacaccatgggtgatccatttatgctgcagcagtcaacgaatccggcccccggcatactgggaccaccaccgcctagttttcatctcggtggccccgccgtcggtccccggggcaaccttggagccggaaacggcaacctgcaaggtccgagacacatgcagaaaggtcgcgtagagactagcagggttgttcacatcatggactttcagcggggcaaaaatctccgatatcaattgctgcagttggttgagccttttggcgtgatttctaaccaccttatcctcaataaaattaatgaagcgttcatcgaaatggctacaaccgaggatgcccaggcagcagttgattactacacgactaccccggccttggtgtttggaaaacctgtgcgggtacatctgtcccagaagtataaacgaataaaaaagccagagggcaagcctgatcagaagttcgaccagaaacaggaactaggccgcgtaatccatctgtccaatctgcctcactctgggtactctgatagcgccgtcctaaagctcgctgaaccgtacggaaagattaagaattacatcctgatgcggatgaagtcacaggcattcatcgagatggagacccgcgaggacgccatggcaatggttgaccactgcctgaagaaggctctctggttccaaggccgatgtgtaaaggtggatctcagcgaaaagtacaagaagctggttctaaggataccgaaccggggcatcgaccttttgaagaaagataagagccgcaaacgctcgtatagcccagatgggaaagaatcccccagtgataaaaagtcaaaaacagacggttcgcagaagacagaaagcagtactgaaggtaaagaacaggaggagaagtcgggagaagatggagagaaggacaccaaggacgaccagaccgagcaggagcctaatatgctcctcgaaagcgaggacgaattactggtggacgaagaggaggctgccgccctgctggagtcaggctcctctgtgggcgacgaaaccgacttggccaacctgggggacgttgcttcagacggaaagaaagaaccaagtgacaaggcggtaaagaaggatggctccgcatctgcagcagctaaaaagaaacttaagaaggttgataaaatcgaagagttggaccaagaaaatgaggcagccctggaaaacggcatcaagaatgaggaaaacaccgaacccggagccgagtcttccgagaatgctgacgacccaaacaaagacacttcagaaaacgccgacggccagtctgacgaaaataaggatgactataccatacccgatgagtataggattggaccttatcaacctaatgtccccgtgggtatcgactacgtgatcccgaaaactggattttattgcaaactgtgttctctgttctacacgaacgaggaggtagctaaaaacactcactgctcttctctcccacactatcaaaagctgaagaaattcctgaacaaattagccgaggaaagaaggcagaagaaagagacatag

SEQ ID NO: 74356 - DNA, 303 bp, Artificial Sequence
  derived and/or modified sequence
atgagcaagagcttccagcagagcagcctgagccgggacagccagggtcacggtcgagatttaagtgcggcgggaatcgggctcctggcggccgctactcagtcacttagcatgccagcatctttggggcggatgaatcagggcacagcacggctagcctccctgatgaacctgggcatgagctcttcactgaatcaacagggagctcacagcgccttgtctagcgcctctacatcaagtcacaaccttcagagtatctttaacattggatcccgtggacctctaccactaagctcccagtag

SEQ ID NO: 74357 - DNA, 324 bp, Artificial Sequence
  derived and/or modified sequence
atgagcaagagcttccagcagagcagcctgagccgggacagccagggccatggcagagacctctctgccgctggaattggacttctggcagcagccacccagagcctttccatgcctgcaagccttggaaggatgaaccaaggaactgcgagactggcgtccctcatgaacctgggaatgagctcctccctaaatcagcagggggcccacagcgccctgtcgtctgcttccacatcgtctcacaatctgcagagtatctttaacatcggatctcgtgggccactgccactgtcctctcaacacagaggtgacgccgaccaatag

SEQ ID NO: 74358 - DNA, 2544 bp, Artificial Sequence
  derived and/or modified sequence
atgagcaagagtttccaacagtcaagcttaagcagagactcccaggggcacggtcgcgacctgagcgccgctggcattggcctacttgccgctgccactcagtccctgtccatgcccgcttctctcggccgaatgaaccaggggacagcccgactggcgtctctaatgaacctcgggatgtcttcttcgctgaaccagcagggggcacattcagcgcttagtagtgccagtactagctctcataacttgcagagtatctttaatattggttcccggggaccacttcctctctcatcccagcatcggggtgatgccgatcaggctagcaacatactcgcgtcatttggtctgtccgcgagggatctcgacgagctcagccgctatcctgaggataaaattactcccgaaaacctgccccagattcttttacaattgaaaagacgcaggaccgaggagggccctactctgtcctacgggagggacggacgctctgccacaagagagcccccatatagggtaccacgggacgactgggaagagaagagacatttcaggagggatagcttcgatgatcggggtccctccttgaacccagtgctcgattacgaccacggatctcggtcccaggaatccggttattatgaccggatggattacgaggacgatagactccgggacggagagcggtgtagggacgattctttttttggtgaaacgtctcacaactatcataaatttgactctgagtatgaaaggatggggaggggcccaggcccactgcaggaaagatctttatttgaaaagaagagaggcgctccccctagcagcaacattgaagatttccatggcttgctgcctaaggggtatcctcacctctgttccatctgcgatctacctgtccacagtaacaaggaatggagccagcacattaacggcgcaagccattcccgcagatgtcagcttctgctcgaaatctacccagagtggaacccggacaatgataccggccacacaatgggagacccttttatgctgcaacagtccaccaacccagccccaggaatccttggcccaccacccccttcattccacctcggtgggcctgctgtcggcccacgcggtaacctcggcgctgggaatggcaatctgcagggccctcgccacatgcagaaaggtagagttgagaccagccgggtcgtgcatatcatggacttccaacgcggtaagaatttaagataccagttgctgcagctggtggaaccctttggagtaatttccaatcaccttatcttaaacaagattaatgaggcgttcatagaaatggcaaccactgaagacgctcaggcagcagtggattactatactactacccccgctcttgtgtttggaaagcccgtccgggtccacctgtctcagaagtacaaacggataaagaagcccgaggggaagccggatcagaaatttgatcagaagcaggagcttggccgtgtgatacatctcagtaatttgcctcactccggctattccgattccgccgtcctcaagctagctgagccatatggaaagatcaaaaattatattctgatgcgcatgaaatctcaagcgtttatcgaaatggagactagggaggacgcaatggcgatggtagaccattgtctgaagaaggcactgtggtttcaaggcaggtgcgtgaaagtagacctgagtgagaagtataagaagctagtgctaagaatcccgaatcgagggattgatttgcttaaaaaagacaaatctcgcaagaggtcatacagccccgatggaaaggagtccccctctgacaagaagagtaaaacagatggatctcagaagacagagtcatcaacagagggtaaagaacaggaggaaaaatcaggagaggacggggagaaggacaccaaagatgaccagaccgagcaggaacccaatatgctgctggagtccgaagatgagctactcgtagacgaagaggaagcagccgcattgctggaaagtgggagttccgttggagacgaaacagacctcgctaatcttggcgatgttgcttctgatggtaaaaaggagccatcagataaggccgtgaagaaggatgggagtgcttccgctgccgcaaagaaaaaacttaagaaggttgataagattgaagagttggatcaggagaacgaggcggctcttgaaaatgggatcaaaaacgaagagaacaccgaacctggggctgaatcttctgagaacgcggatgatccaaacaaggacactagtgaaaatgctgacggccagtccgatgaaaataaagacgattacaccattcccgatgagtacaggattggcccttaccaacctaacgtcccagtgggcattgattatgtcatcccgaaaacaggtttctactgcaagctctgttccctgttttatacaaatgaggaggttgctaagaatacgcactgttcctcactgccccactatcagaagctaaaaaagtttttgaacaaattggcagaagagagacgacagaagaaggaaacctag

SEQ ID NO: 74359 - DNA, 2544 bp, Artificial Sequence
  derived and/or modified sequence
atgagtaagtccttccaacaaagttcattgtcaagagatagccagggacacggtagggacctgagcgccgcagggatcgggttattggccgctgctacccagtcactcagcatgcccgcttcactagggagaatgaatcaaggtactgctaggttggcatcactgatgaatctgggaatgtctagctcactgaatcaacaaggcgctcattcagctttatcttctgcctccacatccagccataacctgcagtccattttcaacattggcagccgaggacctctgcccctgtccagtcagcaccggggagatgcagaccaagcctctaacattctggcctcattcgggctttccgcgagggatctcgacgagttgagcagatatcccgaggacaagattactcccgaaaatctacctcagatcctcctacaactgaagcgccgacgtactgaggaagggcctacactgagttacgggcgagacggacggtctgcaactagggagcccccttacagagtgccacgcgatgactgggaggagaagcgtcacttccgcagggattccttcgatgaccggggacctagcctgaatcccgtgctcgactacgatcatgggagccgcagccaggagtcaggatattacgacaggatggattacgaggatgatagactgagagacggggagaggtgtcgcgacgactcattctttggcgaaaccagtcacaactaccacaagtttgattctgagtacgagagaatgggcaggggccctggaccactgcaggagcgcagcttgttcgagaagaagaggggtgccccaccttcatctaacatcgaagatttccatggactcctcccgaaagggtaccctcacctgtgctccatctgtgacctgcccgttcactcaaacaaagagtggagccagcacatcaatggagcgtcacattcacgcagatgccagctcctgctggagatttatccagagtggaacccagacaatgataccggccatactatgggggatccttttatgcttcagcagagcacaaatcccgctcccggaatcttggggcctccccctccctcttttcatttagggggacccgcagttggccctaggggcaatctgggtgctggaaacggcaacctccagggacccaggcacatgcaaaaagggagggtggagacgtccagggtggtccacattatggactttcagcgcggtaagaatctgcggtaccaacttttgcagcttgtggagccctttggtgtgatcagcaatcacctgatcctgaataagatcaacgaggccttcatcgaaatggccacgacagaggacgcccaggccgctgtcgattactacacaacaaccccagccctcgtgttcggcaaaccagttcgcgtccatctctcccagaaatacaaacgaattaagaagcctgagggaaagcccgaccagaaatttgatcagaaacaggagcttgggagggtcattcatttgtcaaacttacctcattctggttacagcgactctgcggtcctcaagctggctgagccgtacggcaagattaagaattacattctgatgagaatgaagtcgcaggcatttattgaaatggagaccagagaggacgcaatggccatggtcgaccattgcctgaaaaaagctctctggttccaagggcgttgcgtgaaagtggacctcagcgaaaaatataagaaactcgtgttacggattccgaatagaggtattgatctactgaagaaggataagagtagaaagagatcttatagcccagacggaaaggagtccccgtcggataaaaagagcaagacagacggtagccagaagacggagtcatctactgaaggcaaagagcaggaagagaaatcaggcgaggacggggaaaaggacactaaggatgaccagaccgagcaggagcccaacatgttgctcgagtcagaggacgaactgcttgttgatgaggaagaggctgctgcgctcctggagtcaggttccagcgtgggcgatgagaccgacttggccaacttgggggacgtggccagcgatggaaaaaaagagccttccgacaaagccgtgaaaaaagatggaagtgcaagcgcggctgccaagaaaaagctgaagaaagttgacaagatagaagaactcgatcaggaaaatgaggctgccctggagaacggcataaaaaacgaggagaatactgagcccggtgctgaatcatctgagaacgctgacgatcccaataaggatacaagtgagaacgctgatggacagtccgatgaaaataaagacgactatactatcccagacgagtatcgcattggcccataccagcccaatgttcccgtgggcatcgattacgtaattcctaaaaccggtttttattgtaagctctgttctttgttctataccaatgaggaggtggctaagaacacccattgttcgtcattgccgcattatcagaagttgaagaaattcctcaacaagctggccgaagagcgccgacagaagaaggagacctag

SEQ ID NO: 74360 - DNA, 300 bp, Artificial Sequence
  derived and/or modified sequence
atgtccaaatccttccagcagagtagcctcagtagagattctcagggacatggcagagacctgagcgctgccggaatcggactccttgctgccgcaacccagtcgttgtccatgccagcttcgctgggaagaatgaatcaaggtaccgccaggctggcctccctgatgaacttggggatgagtagcagtctgaatcagcaaggtgcgcactctgccttaagtagcgcaagcacaagttcacataacttgcagtctatctttaatatcggaagccgcggacccctgccactgtcaagctag

SEQ ID NO: 74361 - DNA, 264 bp, Artificial Sequence
  derived and/or modified sequence
atgagtaagagttttcagcaaagcagtctgtccagagatagccagggtcacggccgtgacttgagcgccgctggaatcggtcttctggctgccgcaacccagagcctttcaatgcctgcctcgttggggcgtatgaatcagggaaccgccaggctcgcctctctcatgaatctggggatgtccagctctcttaaccagcaaggtgcacactctgcactctctagtgcctccacaagttcccataacttacagagcattttctag

SEQ ID NO: 74362 - DNA, 237 bp, Artificial Sequence
  derived and/or modified sequence
atgagcaaatctttccagcagtcatccctctccagagatagccaggggcacggtagggatctgtcagccgcaggaattggcttgttagcggctgccactcagtctctatccatgccggcatccttaggtaggatgaatcagggcaccgcccgattagcctctcttatgaatttgggcatgtcatcctccctgaaccaacagggggctcactccgccctctcatccgcttcaacttag

SEQ ID NO: 74363 - DNA, 1302 bp, Artificial Sequence
  derived and/or modified sequence
atgagcaagagcttccaacagtctagcttgtcaagggattcacagggccatggcagggacctctcagcggcaggtattggcctgctggcagcagccacgcaaagtctgagtatgccagcatccctgggaagaatgaaccagggaacggctaggctggccagtcttatgaatcttggaatgagttcgtctctgaaccagcaaggcgctcacagtgccctgtctagcgcatccacgagttctcacaacctgcagtccatcttcaatattggatcgagagggcctctgcctctcagttcccagcatcggggagacgcagatcaggcgtccaacattctggcatcattcggcctgtctgctcgggatctagatgaattaagtaggtaccccgaggacaagatcacacctgagaaccttcctcagattctgctccagcttaaacgcaggcgcacggaagaggggcctacgctgtcctatggacgtgatggtcgttccgctacccgcgagcccccttatagggtgccacgtgatgattgggaagaaaagcggcattttcgaagggattccttcgatgaccggggtccatcattaaatccggtgctcgactacgatcatgggtcgcgctcgcaggagtcaggctattacgatagaatggactacgaggatgaccgtctaagggacggcgaacggtgccgtgatgactctttttttggggagacttcgcacaactaccataagtttgacagcgaatacgaacgcatggggcgaggtcccggaccactgcaagagcgaagcctgttcgagaagaaaagaggcgctcctccctccagcaatatagaagattttcatggactgttgcctaagggatatccccacctgtgctcaatctgcgatctgccggtccactctaacaaagagtggagccaacatatcaacggtgctagccatagtagaagatgccagctgctcttagaaatttaccctgagtggaaccctgataacgataccggccatacaatgggtgatcctttcatgctgcaacaaagtactaatcctgctccagggatcttggggccacccccaccaagctttcatctggggggtccagccgtcggtccccgaggcaatctcggtgccggaaacggcaatttgcagggccctcgtcatatgcaaaagggcagagtcgagactagccgcgtggttcacattatggactttcaacggggtaagaatcttcggtaccagctcctccagttagtcgagccattcggtgtgataagtaaccacttgatcctgaataaatag

SEQ ID NO: 74364 - DNA, 144 bp, Artificial Sequence
  derived and/or modified sequence
atgtccaagtcatttcagcaatcgagtttgtccagagacagtcaaggacacggaagggatctgtctgctgctggcatcggcttgctggccgctgccactcagtccctaagcatgccagcttcgcttgggaggatgaaccagtag

SEQ ID NO: 74365 - DNA, 237 bp, Artificial Sequence
  derived and/or modified sequence
atgtcaaaatcgttccagcagtcaagcttgagcagggactcccagggccacggtagagacctgtctgcagctggtattggacttctcgccgcagcaacccagtccctcagcatgccggcatcccttgggaggatgaatcagggtacagcgcgtctcgcgagcctcatgaacctgggcatgtctagctccctgaaccagcaaggcgcacactctgcattgagctccgccagcacctag

SEQ ID NO: 74366 - DNA, 2544 bp, Artificial Sequence
  derived and/or modified sequence
atgagtaagagtttccagcaatcctctttaagtagggactcccaggggcatggaagagatctgagcgctgcaggcatcggactcctagctgcagccactcagtccctctctatgcctgcaagcttaggccgaatgaatcaaggaacagcacggctcgccagcctgatgaatctcgggatgtcctcatccctgaaccagcaaggggcacactccgcactttctagcgccagtacctcaagccataacctgcagtctatcttcaacataggctcccggggtcctctgcctttatcttctcagcataggggtgatgccgatcaggcctcaaacattctggcttcctttgggttatctgcccgtgacttagacgaactgtcccgatatccagaggacaagatcacacccgagaatcttccacaaatcctcctgcaactcaaaaggcgacggacggaggaaggtcccacgttgtcttatggaagagacggacgttccgccaccagggagcccccttacagagtcccacgcgacgactgggaggagaagcgccatttccgaagggattctttcgacgataggggccctagcttgaaccccgtcctggattatgatcacggttcacggtcccaggagtccgggtactacgacaggatggactatgaagacgatcgcctcagagacggcgaaagatgtcgcgatgactctttcttcggagagacttcacataattatcataaatttgactctgagtacgagcggatggggagaggaccgggtcccctccaggagagatccctcttcgagaagaagaggggtgcacctccatcaagcaacatcgaggattttcatggactgcttcctaagggctatccacatctgtgcagtatatgtgacctgcccgtgcacagcaacaaggaatggtcacaacacattaacggagcatcccactcccggcgttgccagctgcttctggaaatctacccagaatggaacccagacaatgacacagggcataccatgggcgacccctttatgctgcagcagagtactaatcctgccccaggcatcctagggccaccccctcctagtttccatctcggcggtcctgccgtgggaccacggggtaacctgggtgccggaaatggaaatctccagggtcccagacacatgcagaagggacgggttgagacatctcgtgtggtgcacataatggactttcagaggggcaagaatctacggtaccagctgctgcagctcgtggagccctttggagtgatttccaatcacctgatactcaataagattaatgaggcctttattgagatggcaaccaccgaggatgcccaagccgcagtggactactacactactaccccagctttagttttcggaaaaccagtgagggtacacttgtcccagaagtacaagcgcattaaaaaaccagagggcaaacccgatcagaaatttgaccagaaacaggagctgggtcgcgtgatacacctgtctaacttgcctcactcaggatacagcgatagtgccgtgctcaagctagccgaaccctacgggaagatcaagaactacattctgatgagaatgaagagccaagctttcatcgaaatggaaacaagggaagatgccatggcaatggtggaccactgcctgaaaaaggccctctggttccagggaagatgtgtcaaggttgatctttcagaaaagtacaaaaaattagtgcttcggattcccaacagaggcatcgatctgttgaaaaaggacaaatccaggaagaggtcatacagccccgacggcaaagagagtccatcagacaaaaaaagcaaaaccgacggttcacagaaaacagagagctctaccgaagggaaggagcaggaagagaaatcgggcgaggacggtgagaaagataccaaggatgatcaaactgagcaggaaccaaatatgctgctcgagtctgaagatgagctgcttgtcgatgaagaggaggctgccgctctgctggagtccggctccagcgtcggtgacgagacggacctcgcaaacctcggagacgtcgcctcggatgggaagaaggagccgagtgacaaggccgtgaagaaggatggttccgcatctgcagccgcaaagaagaagcttaaaaaggtagacaaaattgaggagctggatcaggagaatgaagcagctttggagaacggcattaagaacgaagagaacactgagcctggagccgagtcctctgagaatgctgacgacccaaacaaggatacttcagagaacgccgatgggcagagcgatgagaacaaagatgactataccatacccgatgagtacaggatagggccatatcagcctaatgtgccagtcggcattgactacgtcatacccaaaacaggcttttattgtaaactgtgcagtctcttttataccaatgaagaagtggccaagaacactcattgcagtagcctacctcactatcagaagctgaagaagtttctgaataaactggccgaagaacggaggcagaaaaaagagacttag

SEQ ID NO: 74367 - DNA, 303 bp, Artificial Sequence
  derived and/or modified sequence
atgtccaagtctttccagcagagttcattatcccgggacagccaggggcacggacgagatctcagcgcagctgggattggcttgcttgccgcagccacacagtctctgtctatgccagccagcctaggacgcatgaatcagggaacagctaggctggcatccctgatgaatctagggatgtcgtcatctctgaaccagcagggcgctcatagcgcactctccagcgcctcaacatcctcacataatctgcagagcatcttcaacattggttcacgcggacccctacccctcagcagtcagtag

SEQ ID NO: 74368 - DNA, 324 bp, Artificial Sequence
  derived and/or modified sequence
atgagtaaatccttccaacagtccagcctaagtagagattcccagggccatgggagggacctgtcagcagcaggcattggcctgctggcagcagctacacagtccctgagtatgccggcaagccttggcaggatgaaccaggggacggccaggttagcatccctgatgaatttggggatgtcttcttctctgaaccagcagggtgcccacagtgcactctccagcgcatccacctcttcccataatctccaaagtatcttcaacattggatccagggggccactgccactttccagccagcatcggggagacgctgatcagtag

SEQ ID NO: 74369 - DNA, 2544 bp, Artificial Sequence
  derived and/or modified sequence
atgagcaagagcttccagcagagcagcctgagcagagacagccagggccacggcagagacctgagcgccgccggcatcggcctgctggccgccgccacccagagcctgagcatgcccgccagcctgggcagaatgaaccagggcaccgccagactggccagcctgatgaacctgggcatgagcagcagcctgaaccagcagggcgcccacagcgccctgagcagcgccagcaccagcagccacaacctgcagagcatcttcaacatcggcagcagaggccccctgcccctgagcagccagcacagaggcgacgccgaccaggccagcaacatcctggccagcttcggcctgagcgccagagacctggacgagctgagcagataccccgaggacaagatcacccccgagaacctgccccagatcctgctgcagctgaagagaagaagaaccgaggagggccccaccctgagctacggcagagacggcagaagcgccaccagagagcccccctacagagtgcccagagacgactgggaggagaagagacacttcagaagagacagcttcgacgacagaggccccagcctgaaccccgtgctggactacgaccacggcagcagaagccaggagagcggctactacgacagaatggactacgaggacgacagactgagagacggcgagagatgcagagacgacagcttcttcggcgagaccagccacaactaccacaagttcgacagcgagtacgagagaatgggcagaggccccggccccctgcaggagagaagcctgttcgagaagaagagaggcgccccccccagcagcaacatcgaggacttccacggcctgctgcccaagggctacccccacctgtgcagcatctgcgacctgcccgtgcacagcaacaaggagtggagccagcacatcaacggcgccagccacagcagaagatgccagctgctgctggagatctaccccgagtggaaccccgacaacgacaccggccacaccatgggcgaccccttcatgctgcagcagagcaccaaccccgcccccggcatcctgggcccccccccccccagcttccacctgggcggccccgccgtgggccccagaggcaacctgggcgccggcaacggcaacctgcagggccccagacacatgcagaagggcagagtggagaccagcagagtggtgcacatcatggacttccagagaggcaagaacctgagataccagctgctgcagctggtggagcccttcggcgtgatcagcaaccacctgatcctgaacaagatcaacgaggccttcatcgagatggccaccaccgaggacgcccaggccgccgtggactactacaccaccacccccgccctggtgttcggcaagcccgtgagagtgcacctgagccagaagtacaagagaatcaagaagcccgagggcaagcccgaccagaagttcgaccagaagcaggagctgggcagagtgatccacctgagcaacctgccccacagcggctacagcgacagcgccgtgctgaagctggccgagccctacggcaagatcaagaactacatcctgatgagaatgaagagccaggccttcatcgagatggagaccagagaggacgccatggccatggtggaccactgcctgaagaaggccctgtggttccagggcagatgcgtgaaggtggacctgagcgagaagtacaagaagctggtgctgagaatccccaacagaggcatcgacctgctgaagaaggacaagagcagaaagagaagctacagccccgacggcaaggagagccccagcgacaagaagagcaagaccgacggcagccagaagaccgagagcagcaccgagggcaaggagcaggaggagaagagcggcgaggacggcgagaaggacaccaaggacgaccagaccgagcaggagcccaacatgctgctggagagcgaggacgagctgctggtggacgaggaggaggccgccgccctgctggagagcggcagcagcgtgggcgacgagaccgacctggccaacctgggcgacgtggccagcgacggcaagaaggagcccagcgacaaggccgtgaagaaggacggcagcgccagcgccgccgccaagaagaagctgaagaaggtggacaagatcgaggagctggaccaggagaacgaggccgccctggagaacggcatcaagaacgaggagaacaccgagcccggcgccgagagcagcgagaacgccgacgaccccaacaaggacaccagcgagaacgccgacggccagagcgacgagaacaaggacgactacaccatccccgacgagtacagaatcggcccctaccagcccaacgtgcccgtgggcatcgactacgtgatccccaagaccggcttctactgcaagctgtgcagcctgttctacaccaacgaggaggtggccaagaacacccactgcagcagcctgccccactaccagaagctgaagaagttcctgaacaagctggccgaggagagaagacagaagaaggagacctag

SEQ ID NO: 74370 - DNA, 300 bp, Artificial Sequence
  derived and/or modified sequence
atgagcaagagcttccagcagagcagcctgagcagagacagccagggccacggcagagacctgagcgccgccggcatcggcctgctggccgccgccacccagagcctgagcatgcccgccagcctgggcagaatgaaccagggcaccgccagactggccagcctgatgaacctgggcatgagcagcagcctgaaccagcagggcgcccacagcgccctgagcagcgccagcaccagcagccacaacctgcagagcatcttcaacatcggcagcagaggccccctgcccctgagcagctag

SEQ ID NO: 74371 - DNA, 264 bp, Artificial Sequence
  derived and/or modified sequence
atgagcaagagcttccagcagagcagcctgagcagagacagccagggccacggcagagacctgagcgccgccggcatcggcctgctggccgccgccacccagagcctgagcatgcccgccagcctgggcagaatgaaccagggcaccgccagactggccagcctgatgaacctgggcatgagcagcagcctgaaccagcagggcgcccacagcgccctgagcagcgccagcaccagcagccacaacctgcagagcatcttctag

SEQ ID NO: 74372 - DNA, 237 bp, Artificial Sequence
  derived and/or modified sequence
atgagcaagagcttccagcagagcagcctgagcagagacagccagggccacggcagagacctgagcgccgccggcatcggcctgctggccgccgccacccagagcctgagcatgcccgccagcctgggcagaatgaaccagggcaccgccagactggccagcctgatgaacctgggcatgagcagcagcctgaaccagcagggcgcccacagcgccctgagcagcgccagcacctag

SEQ ID NO: 74373 - DNA, 1302 bp, Artificial Sequence
  derived and/or modified sequence
atgagcaagagcttccagcagagcagcctgagcagagacagccagggccacggcagagacctgagcgccgccggcatcggcctgctggccgccgccacccagagcctgagcatgcccgccagcctgggcagaatgaaccagggcaccgccagactggccagcctgatgaacctgggcatgagcagcagcctgaaccagcagggcgcccacagcgccctgagcagcgccagcaccagcagccacaacctgcagagcatcttcaacatcggcagcagaggccccctgcccctgagcagccagcacagaggcgacgccgaccaggccagcaacatcctggccagcttcggcctgagcgccagagacctggacgagctgagcagataccccgaggacaagatcacccccgagaacctgccccagatcctgctgcagctgaagagaagaagaaccgaggagggccccaccctgagctacggcagagacggcagaagcgccaccagagagcccccctacagagtgcccagagacgactgggaggagaagagacacttcagaagagacagcttcgacgacagaggccccagcctgaaccccgtgctggactacgaccacggcagcagaagccaggagagcggctactacgacagaatggactacgaggacgacagactgagagacggcgagagatgcagagacgacagcttcttcggcgagaccagccacaactaccacaagttcgacagcgagtacgagagaatgggcagaggccccggccccctgcaggagagaagcctgttcgagaagaagagaggcgccccccccagcagcaacatcgaggacttccacggcctgctgcccaagggctacccccacctgtgcagcatctgcgacctgcccgtgcacagcaacaaggagtggagccagcacatcaacggcgccagccacagcagaagatgccagctgctgctggagatctaccccgagtggaaccccgacaacgacaccggccacaccatgggcgaccccttcatgctgcagcagagcaccaaccccgcccccggcatcctgggcccccccccccccagcttccacctgggcggccccgccgtgggccccagaggcaacctgggcgccggcaacggcaacctgcagggccccagacacatgcagaagggcagagtggagaccagcagagtggtgcacatcatggacttccagagaggcaagaacctgagataccagctgctgcagctggtggagcccttcggcgtgatcagcaaccacctgatcctgaacaagtag

SEQ ID NO: 74374 - DNA, 144 bp, Artificial Sequence
  derived and/or modified sequence
atgagcaagagcttccagcagagcagcctgagcagagacagccagggccacggcagagacctgagcgccgccggcatcggcctgctggccgccgccacccagagcctgagcatgcccgccagcctgggcagaatgaaccagtag

SEQ ID NO: 74375 - DNA, 303 bp, Artificial Sequence
  derived and/or modified sequence
atgagcaagagcttccagcagagcagcctgagcagagacagccagggccacggcagagacctgagcgccgccggcatcggcctgctggccgccgccacccagagcctgagcatgcccgccagcctgggcagaatgaaccagggcaccgccagactggccagcctgatgaacctgggcatgagcagcagcctgaaccagcagggcgcccacagcgccctgagcagcgccagcaccagcagccacaacctgcagagcatcttcaacatcggcagcagaggccccctgcccctgagcagccagtag

SEQ ID NO: 74376 - DNA, 324 bp, Artificial Sequence
  derived and/or modified sequence
atgagcaagagcttccagcagagcagcctgagcagagacagccagggccacggcagagacctgagcgccgccggcatcggcctgctggccgccgccacccagagcctgagcatgcccgccagcctgggcagaatgaaccagggcaccgccagactggccagcctgatgaacctgggcatgagcagcagcctgaaccagcagggcgcccacagcgccctgagcagcgccagcaccagcagccacaacctgcagagcatcttcaacatcggcagcagaggccccctgcccctgagcagccagcacagaggcgacgccgaccagtag

SEQ ID NO: 74377 - protein, 283 aa, Artificial Sequence
  derived and/or modified sequence
MSKSFQQSSLSRDSQGHGRDLSAAGIGLLAAATQSLSMLLESEDELLVDEEEAAALLESGSSVGDETDLANLGDVASDGKKEPSDKAVKKDGSASAAAKKKLKKRRFPGSMEGFVTLDEVGDEEDSELQKLRKSGMAFKSGDKNDDGLVEIKVDKIEELDQENEAALENGIKNEENTEPGAESSENADDPNKDTSENADGQSDENKDDYTIPDEYRIGPYQPNVPVGIDYVIPKTGFYCKLCSLFYTNEEVAKNTHCSSLPHYQKLKKFLNKLAEERRQKKET

SEQ ID NO: 74378 - protein, 559 aa, Artificial Sequence
  derived and/or modified sequence
MLGAQWRRNQPSRAAEEWSQHINGASHSRRCQLLLEIYPEWNPDNDTGHTMGDPFMLQQSTNPAPGILGPPPPSFHLGGPAVGPRGNLGAGNGNLQGPRHMQKGRVETSRVVHIMDFQRGKNLRYQLLQLVEPFGVISNHLILNKINEAFIEMATTEDAQAAVDYYTTTPALVFGKPVRVHLSQKYKRIKKPEGKPDQKFDQKQELGRVIHLSNLPHSGYSDSAVLKLAEPYGKIKNYILMRMKSQAFIEMETREDAMAMVDHCLKKALWFQGRCVKVDLSEKYKKLVLRIPNRGIDLLKKDKSRKRSYSPDGKESPSDKKSKTDGSQKTESSTEGKEQEEKSGEDGEKDTKDDQTEQEPNMLLESEDELLVDEEEAAALLESGSSVGDETDLANLGDVASDGKKEPSDKAVKKDGSASAAAKKKLKKVDKIEELDQENEAALENGIKNEENTEPGAESSENADDPNKDTSENADGQSDENKDDYTIPDEYRIGPYQPNVPVGIDYVIPKTGFYCKLCSLFYTNEEVAKNTHCSSLPHYQKLKKFLNKLAEERRQKKET

SEQ ID NO: 74379 - DNA, 1680 bp, Artificial Sequence
  derived and/or modified sequence
atgctaggggctcaatggcgtaggaaccagccgagccgcgccgctgaggaatggagccaacatattaacggcgcctcccactcgcgtcggtgccagttactactagagatctatccagaatggaatcctgataatgatactggacacacaatgggcgacccattcatgctgcaacagtccactaacccagctcccgggattctggggccaccacctccaagctttcacctggggggccccgccgttggtccacggggaaaccttggcgctggcaatggaaatcttcagggccctcggcacatgcagaagggccgggtggagacttctcgggtggttcacattatggactttcaacggggtaagaatcttcggtatcagctgctgcaacttgttgaacctttcggtgtcatctccaaccatctcattttgaataaaatcaacgaggcctttattgagatggccacgacggaggacgcccaagcagcagtggactattacacaacgacgcccgcactcgttttcggcaagcccgtccgggtacacctctctcagaagtacaagcggatcaagaaacccgaaggcaaaccagaccaaaaattcgatcagaagcaagaactgggccgcgtcattcatctgagcaaccttccacattccggatactcagactccgctgtgcttaagcttgctgaaccctatggtaagataaagaattatatcttgatgcgcatgaagtcacaggccttcatcgaaatggagacacgggaagacgccatggcaatggttgatcactgtctaaaaaaagctctctggttccagggtagatgcgtcaaagtcgacctgtccgagaaatacaaaaagctcgtgcttcggattcctaaccggggaattgatctgcttaaaaaggacaagtcgagaaagcgatcctattcaccggacggaaaagagtccccctcggacaaaaagtcaaaaaccgatggaagccagaagactgaaagctccaccgagggaaaggagcaagaagagaaatccggcgaggacggtgagaaggataccaaggacgaccagacagaacaggaacctaacatgctgctggaaagcgaagatgagctactcgtcgatgaggaggaagctgccgccctgctcgagtcgggcagttccgtgggggatgagacagacttagcgaacctgggcgacgtcgccagtgatggaaaaaaagagccctctgacaaggctgttaagaaagacggaagtgcctcggccgccgccaagaagaagcttaaaaaggtggacaagattgaggaactcgatcaggagaatgaggcagcactggaaaatggcattaagaacgaagaaaacactgagccgggtgccgaaagcagcgaaaacgctgacgatcctaataaggatacatccgagaacgccgatggtcagagcgatgagaacaaagacgattatactattcctgacgagtatcgcatcggcccatatcaacctaatgtgcctgtaggcatcgactacgttattcctaaaaccggcttttattgcaagctatgttccctcttctacacaaatgaagaggtggccaaaaatacgcactgttcatctttgccccattatcaaaaactcaaaaagttcctgaacaaactcgctgaggaacgcagacaaaaaaaggagacctag

SEQ ID NO: 74380 - DNA, 1680 bp, Artificial Sequence
  derived and/or modified sequence
atgctgggcgcccagtggaggaggaaccagcccagcagagctgctgaggagtggagccagcacatcaatggagccagccacagccgccgctgccagctgctgctggagatctacccagagtggaacccagacaatgacaccggccacaccatgggagaccccttcatgctgcagcagagcaccaacccagcccctggcatcctgggccccccaccacccagcttccacctgggcggccctgctgtgggcccccggggcaacctgggcgctggaaatggaaacctgcagggccccaggcacatgcagaagggccgggtggagaccagccgggtggtgcacatcatggacttccagaggggcaagaacctgcgctaccagctgctgcagctggtggagccctttggagtcatcagcaaccacctgatcctgaacaagatcaatgaggccttcatcgagatggccaccacagaagatgcccaggccgctgtggactactacaccaccaccccagccctggtgtttgggaagcctgtgcgggtgcacctgagccagaagtacaagaggatcaagaagccagagggcaagccagaccagaagtttgaccagaagcaggagctgggccgggtcatccacctgagcaacctgccccacagcggctacagcgacagcgctgtgctgaagctggccgagccctacggcaagatcaagaactacatcctgatgaggatgaagagccaggccttcatcgagatggagaccagagaagatgccatggccatggtggaccactgcctgaagaaggccctgtggttccagggccgctgtgtgaaggtggacctgtctgagaagtacaagaagctggtgctgcgcatccccaacagaggcatcgacctgctgaagaaggacaagagcaggaagaggagctacagcccagatggcaaggagagccccagcgacaagaagagcaagacagatggcagccagaagacagagagcagcacagagggcaaggagcaggaggagaagtctggagaagatggagagaaggacaccaaggatgaccagacagagcaggagcccaacatgctgctggagagtgaagatgagctgctggtggatgaggaggaggccgccgccctgctggagagcggcagctctgtgggagatgaaacagacctggccaacctgggagatgtggccagtgatggcaagaaggagcccagcgacaaggctgtgaagaaggatggcagcgccagcgctgctgccaagaagaagctgaagaaggtggacaagattgaggagctggaccaggagaatgaagctgccctggagaatggcatcaagaatgaagaaaatacagagcctggagctgagagcagtgaaaatgctgatgaccccaacaaggacaccagtgaaaatgctgatggccagagtgatgagaacaaggatgactacaccatcccagatgagtacagaattggcccctaccagcccaacgtgcctgtgggcatcgactatgtgatccccaagacaggcttctactgcaagctgtgcagcctcttctacaccaatgaggaggtggccaagaacacccactgcagcagcctgccccactaccagaagctgaagaagttcctgaacaagctggccgaggagcggcggcagaagaaggagacctag

SEQ ID NO: 74381 - DNA, 2664 bp, Artificial Sequence
  derived and/or modified sequence
gttgctgcgggggattgtgggagtctccgcgtcccgctcgctgggagagaggtacctctccttttccctctccctttccctaagctacccagaatggaatcctgacaatgatacaggacacacaatgggtgatccattcatgttgcagcagtctacaaatccagcaccaggaattctgggacctccacctccctcatttcatcttgggggaccagcagttggaccaagaggaaatctgggtgctggaaatggaaacctgcaaggacctagacacatgcagaaaggcagagtggaaactagcagagttgttcacatcatggattttcaacgagggaaaaacttgagataccagctattacagctggtagaaccatttggagtcatttcaaatcatctgattctaaataaaattaatgaggcatttattgaaatggcaaccacagaggatgctcaggccgcagtggattattacacaaccacaccagcgttagtatttggcaagccagtgagagttcatttatcccagaagtataaaagaataaagaaacctgaaggaaagccagatcagaagtttgatcaaaagcaagagcttggacgtgtgatacatctcagcaatttgccgcattctggctattctgatagtgctgttctcaagcttgctgagccttatgggaaaataaagaattacatattgatgaggatgaaaagtcaggcttttattgagatggagacaagagaagatgcaatggcaatggttgaccattgtttgaaaaaagccctttggtttcaggggagatgtgtgaaggttgacctgtctgagaaatataaaaaactggttctgaggattccaaacagaggcattgatttactgaaaaaagataaatcccgaaaaagatcttactctccagatggcaaagaatctccaagtgataagaaatccaaaactgatggttcccagaagactgagagttcaaccgaaggtaaagaacaagaagagaagtccggtgaagatggtgagaaagacacaaaggatgaccagacagagcaggaacctaatatgcttcttgaatctgaagatgagctacttgtagatgaagaagaagcagcagcactgctagaaagtggcagttcagtgggagacgagaccgatcttgctaatttaggtgatgtggcttctgatgggaaaaaggaaccatcagataaagctgtgaaaaaagatggaagtgcttcagcagcagcaaagaaaaagcttaaaaaggtggacaagatcgaggaacttgatcaagaaaacgaagcagcgttggaaaatggaattaaaaatgaggaaaacacagaaccaggtgctgaatcttctgagaacgctgatgatcccaacaaagatacaagtgaaaacgcagatggtcaaagtgatgagaacaaggacgactatacaatcccagatgagtatagaattggaccatatcagcccaatgttcctgttggtatagactatgtgatacctaaaacagggttttactgtaagctgtgttcactcttttatacaaatgaagaagttgcaaagaatactcattgcagcagccttcctcattatcagaaattaaagaaatttctgaataaattggcagaagaacgcagacagaagaaggaaacttaagatgtgcaaggagatttaatgatttcaaagaaaataatggttctttgtttttaatgttaaccttttttaaatacaatactgatagttagaagaaaactattgtactcttttgttttagtggagaaataatagatgtctgttcatgtgttaagtgttatagcaaaaaaaatacacatatggttaagttaatgaatagtttttgttttatcagaatggcaacagacagaagtactttgtagagattgacttcctaagctacttaagacaacttgcaccactaagaaaaaaatgtagaaccatttggaaaaatgaaatttagtagttccaagtttcaaagaaatgtcaacattttattccattcaataaagaacaaaaccaatagtgtttttattactttcatctgaaacattccatgttttaatctgagccttgcagactttcatttggagtttgaacccgttttggttgcatttcatttttggagaacttaattaacgtgagattggcaattgaaatgcaggtgcagttttctgttaatgtcatgctgttgtttaggtaataagaaatattaagtaattggctttagattttgtaatttttttccctgagttcctgctagatttcgtattctagtagtcaatgtattttcagtgaaatgcaaaaatattcccgttatctttgaccagtattaatttttgagatcttactgcttgtcacttgaatcccgtgattgtcatacatctctggtataagcaacatttgatttttgaagtgtgtagaccatctcttcatattttcaagatgtaattttacatttctgcatttttaaaacagtttggccataatcctagatgcacgcttctaattcatgtacctgcacatgtgacctttgtgaacagaaatttgcatgtataatttgtgtttacttgtaactttctggttatatactgcttatatctgtggattcaagttactgaagtgaataccaataaaaagaaaaccctaggcca

SEQ ID NO: 74382 - DNA, 2518 bp, Artificial Sequence
  derived and/or modified sequence
gcgtcccgctcgctgggagagaggtacctctccttttccctctccctttccctaaggtaggcgtgaagcgggtaagagtcggggtcgggtggctgggggttctccgtgtccgccgggaggggacaacgacggcgacaggggctgcggggagccggcggcgcgcctttcttgctcgctcccgctctgcctccctccgcgttgcgtatgtgagccgcctgatcggcggccgccatgttaggagcgcagtggcggcgcaaccagccttctagggcggcggaggagtggagtcaacatatcaatggagcaagtcacagtcgtcgatgccagcttcttcttgaaatctacccagaatggaatcctgacaatgatacaggacacacaatgggtgatccattcatgttgcagcagtctacaaatccagcaccaggaattctgggacctccacctccctcatttcatcttgggggaccagcagttggaccaagaggaaatctgggtgctggaaatggaaacctgcaaggacctagacacatgcagaaaggcagagtggaaactagcagagttgttcacatcatggattttcaacgagggaaaaacttgagataccagctattacagctggtagaaccatttggagtcatttcaaatcatctgattctaaataaaattaatgaggcatttattgaaatggcaaccacagaggatgctcaggccgcagtggattattacacaaccacaccagcgttagtatttggcaagccagtgagagttcatttatcccagaagtataaaagaataaagaaacctgaaggaaagccagatcagaagtttgatcaaaagcaagagcttggacgtgtgatacatctcagcaatttgccgcattctggctattctgatagtgctgttctcaagcttgctgagccttatgggaaaataaagaattacatattgatgaggatgaaaagtcaggcttttattgagatggagacaagagaagatgcaatggcaatggttgaccattgtttgaaaaaagccctttggtttcaggggagatgtgtgaaggttgacctgtctgagaaatataaaaaactggttctgaggattccaaacagaggcattgatttactgaaaaaagataaatcccgaaaaagatcttactctccagatggcaaagaatctccaagtgataagaaatccaaaactgatggttcccagaagactgagagttcaaccgaaggtaaagaacaagaagagaagtccggtgaagatggtgagaaagacacaaaggatgaccagacagagcaggaacctaatatgcttcttgaatctgaagatgagctacttgtagatgaagaagaagcagcagcactgctagaaagtggcagttcagtgggagacgagaccgatcttgctaatttaggtgatgtggcttctgatgggaaaaaggaaccatcagataaagctgtgaaaaaagatggaagtgcttcagcagcagcaaagaaaaagcttaaaaaggtggacaagatcgaggaacttgatcaagaaaacgaagcagcgttggaaaatggaattaaaaatgaggaaaacacagaaccaggtgctgaatcttctgagaacgctgatgatcccaacaaagatacaagtgaaaacgcagatggtcaaagtgatgagaacaaggacgactatacaatcccagatgagtatagaattggaccatatcagcccaatgttcctgttggtatagactatgtgatacctaaaacagggttttactgtaagctgtgttcactcttttatacaaatgaagaagttgcaaagaatactcattgcagcagccttcctcattatcagaaattaaagaaatttctgaataaattggcagaagaacgcagacagaagaaggaaacttaagatgtgcaaggagatttaatgatttcaaagaaaataatggttctttgtttttaatgttaaccttttttaaatacaatactgatagttagaagaaaactattgtactcttttgttttagtggagaaataatagatgtctgttcatgtgttaagtgttatagcaaaaaaaatacacatatggttaagttaatgaatagtttttgttttatcagaatggcaacagacagaagtactttgtagagattgacttcctaagctacttaagacaacttgcaccactaagaaaaaaatgtagaaccatttggaaaaatgaaatttagtagttccaagtttcaaagaaatgtcaacattttattccattcaataaagaacaaaaccaatagtgtttttattactttcatctgaaacattccatgttttaatctgagccttgcagactttcatttggagtttgaacccgttttggttgcatttcatttttggagaacttaattaacgtgagattggcaattgaaatgcaggtgcagttttctgttaatgtcatgctgttgtttaggtaataagaaatattaagtaattggctttagattttgtaatttttttccctg

SEQ ID NO: 74383 - DNA, 455 bp, Artificial Sequence
  derived and/or modified sequence
tctccttttccctctccctttccctaaggtaggcgtgaagcgggtaagagtcggggtcgggtggctgggggttctccgtgtccgccgggaggggacaacgacggcgacaggggctgcggggagccggcggcgcgcctttcttgctcgctcccgctctgcctccctccgcgttgcgtatgtgagccgcctgatcggcggccgccatgttaggagcgcagtggcggcgcaaccagccttctagggcggcggagagttgtctgctggttctcagcttgaagaagattctgcagtccttattgatcctttttcttggcgttaccatttttgaagcaaagttaacctagctttctagtttgagctttctttttggccgtctttaaaaaaatttttttttttaatctataaaatagacaagagctagttctacaatgtccaagtcattccagcagtcatct

SEQ ID NO: 74384 - DNA, 1680 bp, Artificial Sequence
  derived and/or modified sequence
atgctgggcgcccagtggcggcggaaccagcccagccgggccgccgaggagtggtctcaacacatcaacggcgcatcgcacagtcgtcggtgccaactgctcttagaaatttatcccgagtggaatcctgacaatgatacaggtcacacgatgggtgatcccttcatgctccaacagtcaactaaccctgcacccggcatcctgggacccccccctcctagttttcacctgggaggacccgccgtcggcccacgcggtaatcttggagccggtaatggcaacctccagggtccccgccacatgcagaaaggccgcgtggagaccagccgagtcgtccacattatggacttccagcggggcaagaatctgcggtaccaactgctgcagctggtggagcccttcggagtaatctccaatcacctgatactgaataaaatcaacgaggcctttatcgagatggccactaccgaagacgctcaagccgccgtggattactacaccaccaccccggctctggtattcggcaagcccgtccgggtgcacctgtcccagaagtataagcgcattaagaagcctgagggcaagcctgaccagaagttcgatcagaagcaagagctcggacgcgtgatacacctcagcaatctgccacattccgggtatagcgactcagccgtactgaagctagccgaaccctatggcaaaatcaaaaattacattttaatgcgcatgaagtcccaggctttcatagaaatggagacccgagaagacgcgatggctatggtagaccattgcctgaagaaggccctgtggtttcagggtagatgtgtcaaagtggatctttctgagaaatataaaaagttggttcttcggattccaaaccgcggaatcgatctgctgaagaaggataagtcgcgaaaaagatcttatagcccagacggcaaagagagccccagcgacaaaaagtctaaaaccgatgggtcgcagaaaaccgaaagttcaacggaagggaaggagcaggaagagaagtcgggcgaggatggtgaaaaggacacaaaggacgatcagaccgagcaggaaccgaacatgctgttggagtcagaagatgaactgctggtggacgaagaagaggccgcagccctgctggaatctggtagcagcgtgggcgatgagacagacctagccaacctgggagacgtcgcttctgacgggaaaaaggagccatctgataaagctgtaaagaaagacggtagcgctagcgcagcggcaaaaaagaaactgaaaaaggtcgacaagatcgaggaactggaccaggagaacgaggcagccttggagaacggcatcaaaaatgaagagaacactgagcccggagccgagtctagcgagaacgctgatgatcccaataaggacacctcagagaacgccgacggccagagtgatgagaacaaggacgattacacgatccctgatgagtacagaatcggcccctatcagccaaatgtcccggttggcatcgactacgttattcctaaaacaggcttttattgtaagctgtgcagtctgttctataccaatgaggaggtggccaagaacacccactgttccagcctgccgcactaccaaaagctcaagaagttcctgaacaaactcgctgaagaaagacgccagaaaaaagagacttag

SEQ ID NO: 74385 - DNA, 1680 bp, Artificial Sequence
  derived and/or modified sequence
atgctcggggcacagtggagacgtaatcagccaagccgggctgccgaggaatggagccagcatattaacggcgctagtcattcccgtaggtgccaactcttactcgagatatatccagagtggaaccccgacaacgacacaggccataccatgggcgacccttttatgcttcagcagtcaacaaatcccgcacccggaatactggggcctccacccccatcatttcacttgggcggacctgcggtgggcccaagggggaacctgggagcgggaaacggcaacctgcaaggacccagacatatgcagaaggggagagtagaaacctctcgagtggtacatattatggactttcagaggggcaaaaaccttcgctaccagctcctacagctagtggaaccctttggtgtgatcagcaatcatcttattcttaataagattaatgaagctttcatcgaaatggctaccacagaggatgcacaagcagctgttgattattacactaccacgccggcacttgtctttggaaagccagtgcgcgtccatttaagccagaagtataaacggatcaagaagcccgaaggtaagcctgaccagaagttcgaccaaaagcaagaattggggagagtcatccacttgagtaacctgccacactctggttacagtgactctgcggtactcaagctggccgagccctatggcaagattaaaaactatattctaatgagaatgaagagccaggcattcatcgagatggagaccagagaggatgccatggccatggtcgatcattgtctgaaaaaggccctctggttccaggggaggtgcgtgaaagtggaccttagcgaaaaatataagaagctcgttcttagaatccccaataggggcatagaccttctgaagaaggacaagtctcgtaagcggtcctattcaccggatggtaaagagtccccctctgacaaaaagagtaaaaccgatggatcacagaaaaccgaaagcagcactgagggtaaagagcaggaggaaaagtcgggcgaggatggagagaaggataccaaagatgaccaaacggagcaggaacccaacatgctgctcgaatctgaggatgagctgttggtggacgaggaagaagcagcagccctactggaatctgggagcagtgtaggcgacgagacggacctggcaaacctgggtgatgtggcttccgacgggaagaaagagccttccgacaaagcagtcaagaaggacgggtcggcttctgcagccgctaaaaagaaactgaaaaaagtagacaagatcgaagagctagatcaggagaatgaggccgcattggaaaacggcataaagaacgaggagaatacagagcctggcgctgaatcttccgagaacgccgatgatccgaataaggatacttctgaaaatgccgatggacagtctgacgagaataaagacgattatacaattccagacgaataccgaatcggaccctatcagcccaatgtgccggtaggaattgattacgtcataccgaagacaggcttctactgtaaattgtgttcattattttacacaaacgaggaggtggccaagaacactcactgctcatctttaccacattatcagaagctaaagaaatttttgaataaattagccgaagagagacgccagaaaaaggaaacctag

SEQ ID NO: 74386 - DNA, 1680 bp, Artificial Sequence
  derived and/or modified sequence
atgctgggcgcccagtggagaagaaaccagcccagcagagccgccgaggagtggagccagcacatcaacggcgccagccacagcagaagatgccagctgctgctggagatctaccccgagtggaaccccgacaacgacaccggccacaccatgggcgaccccttcatgctgcagcagagcaccaaccccgcccccggcatcctgggcccccccccccccagcttccacctgggcggccccgccgtgggccccagaggcaacctgggcgccggcaacggcaacctgcagggccccagacacatgcagaagggcagagtggagaccagcagagtggtgcacatcatggacttccagagaggcaagaacctgagataccagctgctgcagctggtggagcccttcggcgtgatcagcaaccacctgatcctgaacaagatcaacgaggccttcatcgagatggccaccaccgaggacgcccaggccgccgtggactactacaccaccacccccgccctggtgttcggcaagcccgtgagagtgcacctgagccagaagtacaagagaatcaagaagcccgagggcaagcccgaccagaagttcgaccagaagcaggagctgggcagagtgatccacctgagcaacctgccccacagcggctacagcgacagcgccgtgctgaagctggccgagccctacggcaagatcaagaactacatcctgatgagaatgaagagccaggccttcatcgagatggagaccagagaggacgccatggccatggtggaccactgcctgaagaaggccctgtggttccagggcagatgcgtgaaggtggacctgagcgagaagtacaagaagctggtgctgagaatccccaacagaggcatcgacctgctgaagaaggacaagagcagaaagagaagctacagccccgacggcaaggagagccccagcgacaagaagagcaagaccgacggcagccagaagaccgagagcagcaccgagggcaaggagcaggaggagaagagcggcgaggacggcgagaaggacaccaaggacgaccagaccgagcaggagcccaacatgctgctggagagcgaggacgagctgctggtggacgaggaggaggccgccgccctgctggagagcggcagcagcgtgggcgacgagaccgacctggccaacctgggcgacgtggccagcgacggcaagaaggagcccagcgacaaggccgtgaagaaggacggcagcgccagcgccgccgccaagaagaagctgaagaaggtggacaagatcgaggagctggaccaggagaacgaggccgccctggagaacggcatcaagaacgaggagaacaccgagcccggcgccgagagcagcgagaacgccgacgaccccaacaaggacaccagcgagaacgccgacggccagagcgacgagaacaaggacgactacaccatccccgacgagtacagaatcggcccctaccagcccaacgtgcccgtgggcatcgactacgtgatccccaagaccggcttctactgcaagctgtgcagcctgttctacaccaacgaggaggtggccaagaacacccactgcagcagcctgccccactaccagaagctgaagaagttcctgaacaagctggccgaggagagaagacagaagaaggagacctag

SEQ ID NO: 74387 - protein, 433 aa, Artificial Sequence
  derived and/or modified sequence
MTAASRANPYSIVSLEEDGLHLVTMSGANGFGNGKVHTRRRCRNRFVKKNGQCNIAFANMDEKSQRYLADMFTTCVDIRWRYMLLIFSLAFLASWLLFGVIFWVIAVAHGDLEPAEGHGRTPCVMQVHGFMAAFLFSIETQTTIGYGLRCVTEECLVAVFMVVAQSIVGCIIDSFMIGAIMAKMARPKKRAQTLLFSHNAVVALRDGKLCLMWRVGNLRKSHIVEAHVRAQLIKPRVTEEGEYIPLDQIDIDVGFDKGLDRIFLVSPITILHEIDEASPLFGISRQDLETDDFEIVVILEGMVEATAMTTQARSSYLANEILWGHRFEPVLFEEKNQYKIDYSHFHKTYEVPSTPRCSAKDLVENKFLLPSANSFCYENELAFLSRDEEDEADGDQDGRSRDGLSPQARHDFDRLQAGGGVLEQRPYRRGSEI

SEQ ID NO: 74388 - DNA, 1302 bp, Artificial Sequence
  derived and/or modified sequence
atgaccgccgccagcagagccaacccctacagcatcgtgagcctggaggaggacggcctgcacctggtgaccatgagcggcgccaacggcttcggcaacggcaaggtgcacaccagaagaagatgcagaaacagattcgtgaagaagaacggccagtgcaacatcgccttcgccaacatggacgagaagagccagagatacctggccgacatgttcaccacctgcgtggacatcagatggagatacatgctgctgatcttcagcctggccttcctggccagctggctgctgttcggcgtgatcttctgggtgatcgccgtggcccacggcgacctggagcccgccgagggccacggcagaaccccctgcgtgatgcaggtgcacggcttcatggccgccttcctgttcagcatcgagacccagaccaccatcggctacggcctgagatgcgtgaccgaggagtgcctggtggccgtgttcatggtggtggcccagagcatcgtgggctgcatcatcgacagcttcatgatcggcgccatcatggccaagatggccagacccaagaagagagcccagaccctgctgttcagccacaacgccgtggtggccctgagagacggcaagctgtgcctgatgtggagagtgggcaacctgagaaagagccacatcgtggaggcccacgtgagagcccagctgatcaagcccagagtgaccgaggagggcgagtacatccccctggaccagatcgacatcgacgtgggcttcgacaagggcctggacagaatcttcctggtgagccccatcaccatcctgcacgagatcgacgaggccagccccctgttcggcatcagcagacaggacctggagaccgacgacttcgagatcgtggtgatcctggagggcatggtggaggccaccgccatgaccacccaggccagaagcagctacctggccaacgagatcctgtggggccacagattcgagcccgtgctgttcgaggagaagaaccagtacaagatcgactacagccacttccacaagacctacgaggtgcccagcacccccagatgcagcgccaaggacctggtggagaacaagttcctgctgcccagcgccaacagcttctgctacgagaacgagctggccttcctgagcagagacgaggaggacgaggccgacggcgaccaggacggcagaagcagagacggcctgagcccccaggccagacacgacttcgacagactgcaggccggcggcggcgtgctggagcagagaccctacagaagaggcagcgagatctag

SEQ ID NO: 74389 - DNA, 1302 bp, Artificial Sequence
  derived and/or modified sequence
atgacagcagctagccgagccaacccatactctatcgtgagcctggaagaagacggattgcacctggtgaccatgagcggtgcaaacggttttggcaatggtaaagtccacaccagaaggaggtgtagaaatcgcttcgtgaagaagaacggacagtgtaatatcgccttcgcaaatatggatgaaaaatcccagagataccttgcggacatgtttacaacttgtgtggacatacggtggcggtacatgttattgatttttagcctagctttcctggccagttggcttctctttggcgtgatcttctgggtgatcgccgtggcccacggcgatctggagcccgccgaaggtcacggccgaaccccctgtgtcatgcaggttcatggttttatggccgcctttctgttctccattgagactcaaacaacaatcggatatggactccgctgcgtcacagaggagtgcctcgtagccgtgttcatggttgttgcacagtccatcgttggctgtattatcgattctttcatgattggggctatcatggcgaagatggcgaggccaaagaaacgagctcagaccctccttttcagtcacaacgccgtggtagccttacgggacggtaagctctgccttatgtggcgcgtgggcaacctgagaaaatcccatatcgtggaggcgcacgtgcgcgcgcaattgataaagcctcgggtgactgaggagggggaatatattccgttggatcagatcgatatcgacgtggggtttgacaaagggcttgatcgtatctttctggtttctccgatcacaattctgcacgagattgacgaggcctcccctctgttcggcatctcacgccaggacctcgagacagacgacttcgaaattgtggtcattctcgaaggaatggtggaagctaccgccatgaccactcaggccaggtcctcatacctggcaaatgagattctctggggacatagatttgaacccgtgctgtttgaagaaaaaaaccagtacaaaattgactattcacattttcacaagacctatgaggttccatctaccccgaggtgctcagccaaggacttagttgagaacaaattcttgctgccatcagccaacagcttttgctacgaaaacgagctggcctttctgagtagggacgaagaggatgaagccgacggggatcaggatggcaggagccgtgacgggttgagccctcaggccagacacgattttgaccgcttacaggccggcgggggcgtgctggagcagcgcccatatcggcgcggatccgaaatttag

SEQ ID NO: 74390 - DNA, 1302 bp, Artificial Sequence
  derived and/or modified sequence
atgacagctgccagccgggccaacccctacagcatcgtgtccctggaggaggatggcctgcacctggtgaccatgtctggggccaatggatttggaaatggcaaggtgcacacccggcggcgctgcaggaacagatttgtgaagaagaatggccagtgcaacatcgcctttgccaacatggatgagaagagccagcgctacctggccgacatgttcaccacctgtgtggacatccgctggagatacatgctgctgatcttcagcctggccttcctggcctcctggctgctgtttggagtcatcttctgggtgattgctgtggcccatggagacctggagcctgctgagggccacggccgcaccccctgtgtgatgcaggtgcacggcttcatggccgccttcctgttcagcattgagacccagaccaccatcggctacggcctgcgctgtgtgacagaggagtgcctggtggccgtgttcatggtggtggcccagagcatcgtgggctgcatcatcgacagcttcatgattggagccatcatggccaagatggcccggcccaagaagagggcccagaccctgctcttcagccacaatgctgtggtggccctgagagatggcaagctgtgcctgatgtggagggtgggcaacctgaggaagagccacatcgtggaggcccacgtgcgggcccagctgatcaagccccgggtgacagaggagggggagtacatccccctggaccagattgatattgatgtgggctttgataaaggcctggaccgcatcttcctggtgagccccatcaccatcctgcacgagattgatgaggccagccccctgtttggcatcagccggcaggacctggagacagatgactttgaaattgtggtgatcctggagggcatggtggaggccacagccatgaccacccaggcccggagcagctacctggccaatgagatcctgtggggccacagatttgagcctgtgctgtttgaggagaagaaccagtacaagattgactacagccacttccacaagacctatgaggtgcccagcaccccccgctgcagcgccaaggacctggtggagaacaagttcctgctgcccagcgccaacagcttctgctatgaaaatgagctggccttcctgagcagagatgaagaagatgaagcagatggagaccaggacggccgcagcagagatggcctgagcccccaggcccggcatgactttgaccggctgcaggccggcggcggcgtgctggagcagaggccctaccgccggggcagcgagatctag

SEQ ID NO: 74391 - DNA, 1302 bp, Artificial Sequence
  derived and/or modified sequence
atgaccgccgccagccgggccaacccctacagcatcgtgagcctggaggaagatggtctccacttagtgacaatgtccggagctaacggattcggaaatggaaaggtgcatacccgcagacggtgcaggaaccgattcgtcaaaaagaacggccagtgcaacatcgcctttgccaatatggacgagaagtctcagcgctacttggccgatatgttcaccacatgtgtggatataaggtggaggtacatgcttttaatttttagcctcgccttcctggctagctggctgctattcggcgtgattttttgggtcatagcagtggcacatggtgatctagagccggccgaagggcatggcaggaccccctgcgtcatgcaagtgcatgggttcatggccgctttcctctttagcattgagacacagacaaccattgggtacgggctgaggtgcgtcacagaggagtgcctggttgcggtattcatggtagtggcccagagcatcgtcggctgtatcattgactcttttatgattggggctatcatggctaagatggcacgccctaagaaacgggcccagaccctgctgttcagccacaacgctgtggtcgcattaagagacggcaagctctgtctgatgtggcgtgtgggtaatttgcggaaatcgcatatagtggaggcgcatgtgcgcgcccagttgattaaacctagggtcacggaggaaggagaatacattcccttggatcaaatcgacatcgatgtagggtttgacaaaggtctggacagaatcttcctcgtctcgcccatcacaatcctgcacgagatcgacgaggcttctcccctttttgggatttccagacaggaccttgagaccgatgatttcgagattgtcgtgatactcgaaggaatggttgaggcgaccgccatgaccacacaggcgagatcgtcctacctcgccaacgaaatcctttggggacaccggttcgagccagtactgtttgaagaaaagaatcagtacaagattgactacagccactttcacaagacatatgaggtcccaagcacacctaggtgttccgcaaaagatcttgttgagaataagttcctgctacccagcgcgaactccttctgttatgaaaacgaactggctttcctctcaagagatgaggaggacgaggcagatggggaccaagatggacgcagcagagacgggctttctccccaagctcgccacgacttcgatcgattgcaggccggaggcggagtgctcgaacagagaccgtatcgtcgtggctctgagatctag

SEQ ID NO: 74392 - DNA, 1302 bp, Artificial Sequence
  derived and/or modified sequence
atgacggccgcaagtcgggctaacccttattccatcgtttcactcgaagaggatggattacacctggtgaccatgtcgggcgcaaatgggttcggcaacggcaaagtacacacaagacggcgatgccgcaatcgctttgtgaaaaaaaatggacagtgcaatatcgccttcgcaaatatggacgaaaagagtcagcgctacttggcggatatgtttacaacttgtgtggatattcgatggcggtatatgctcttgattttttccctcgcgtttctggcttcttggttactgttcggagtgatattctgggtgattgcagttgcacatggagatctcgagccggcagaagggcatggacggacaccatgcgtgatgcaggtgcacggctttatggccgctttcctgttctccattgagacacagacgaccatcggctacggccttaggtgtgtgacagaggagtgcctggtggctgtgtttatggtagtggcgcagtctatcgtaggctgcatcatagacagctttatgattggcgcaattatggctaagatggccaggcccaaaaaacgcgcacaaacgctactcttctcccataatgccgttgtagccctccgggatggcaagctctgcctgatgtggcgagtcggcaatctccgaaaatcccacatcgtcgaagctcacgtgagggcgcaactgatcaaacccagggtgactgaggaaggcgaatacatccccctcgaccagatcgatattgacgtgggtttcgacaagggtttggataggattttccttgtgtccccaattactatcctccatgagattgacgaggcgtctcccctgttcgggatatctagacaggatttggagactgatgactttgagatcgtcgttatcctagagggcatggtagaggccactgcaatgacaactcaggctcgctcttcatacctggccaatgagatcctctgggggcaccgtttcgagcccgtactgtttgaagaaaagaaccagtacaaaatcgactacagtcattttcataagacttacgaagtgccttccacccctcgctgtagcgccaaagatctggttgagaacaaatttctgctgccctcagcaaattccttttgctacgaaaacgaactggcattcctcagcagggacgaggaggatgaagctgatggcgatcaggacggcagatctagggatggcctgagtcctcaggcccgtcatgattttgatcggctgcaagccggtgggggtgttctggagcagcgaccttaccgtagggggtccgagatttag

SEQ ID NO: 74393 - protein, 166 aa, Artificial Sequence
  derived and/or modified sequence
MSTVGLFHFPTPLTRICPAPWGLRLWEKLTLLSPGIAVTPVQMAGKKDYPALLSLDENELEEQFVKGHGPGGQATNKTSNCVVLKHIPSGIVVKCHQTRSVDQNRKLARKILQEKVDVFYNGENSPVHKEKREAAKKKQERKKRAKETLEKKKLLKELWESSKKVH

SEQ ID NO: 74394 - protein, 36 aa, Artificial Sequence
  derived and/or modified sequence
MSTVGLFHFPTPLTRICPAPWGLRLWEKLTLLSPGI

SEQ ID NO: 74395 - protein, 138 aa, Artificial Sequence
  derived and/or modified sequence
MSTVGLFHFPTPLTRICPAPWGLRLWEKLTLLSPGIAVTPVQMAGKKDYPALLSLDENELEEQFVKGHGPGGQATNKTSNCVVLKHIPSGIVVKCHQTRSVDQNRKLARKILQEKVDVFYNGENSPVHKEKREAAKKK

SEQ ID NO: 74396 - protein, 96 aa, Artificial Sequence
  derived and/or modified sequence
MSTVGLFHFPTPLTRICPAPWGLRLWEKLTLLSPGIAVTPVQMAGKKDYPALLSLDENELEEQFVKGHGPGGQATNKTSNCVVLKHIPSGIVVKVD

SEQ ID NO: 74397 - DNA, 501 bp, Artificial Sequence
  derived and/or modified sequence
atgtcgaccgtcgggctcttccacttccctactcccttaacaagaatttgcccagctccctgggggttaaggctgtgggagaaactaactctcctaagccctgggatcgcagtgacaccagtccaaatggcgggtaaaaaagattacccagcccttctctcactggacgaaaacgagctggaggaacagttcgttaagggtcacggtcccgggggccaagcgacaaacaagacttcaaactgtgtggtgctcaagcatatcccttcaggcatcgtggttaagtgccaccagacacgcagcgtcgaccagaataggaaacttgctcggaagattctgcaggagaaagttgacgttttctataacggcgagaattcccccgtgcataaggagaaacgggaggccgccaagaaaaagcaggagagaaagaaaagggcaaaggaaactctcgaaaagaaaaaactgctgaaggaactttgggaaagctccaaaaaagttcactag

SEQ ID NO: 74398 - DNA, 501 bp, Artificial Sequence
  derived and/or modified sequence
atgtctaccgtagggttgttccatttccccacaccactgacacggatttgtcctgcaccttgggggcttagactttgggagaaactgactctgctctcccctggaattgccgtgacaccagtccaaatggctggcaaaaaggactatccagcgctgctaagcctggacgagaacgagttggaggagcagttcgtgaagggtcatggtccaggtgggcaggctacaaataagacatcaaactgcgtggtcctcaaacacatcccttctggcatcgtggtgaagtgccaccagacccgctcggtggaccagaacaggaaattggcccgaaagattctccaggagaaagtcgacgtgttctataacggtgaaaattcacccgtccataaagagaaaagagaagctgcaaaaaagaaacaagaaagaaaaaagagagctaaagagaccctggagaaaaagaaactgttaaaagaactgtgggagagctcgaagaaggtccactag

SEQ ID NO: 74399 - DNA, 501 bp, Artificial Sequence
  derived and/or modified sequence
atgagcacagtcgggctgtttcactttccaacacccctgacccgaatctgcccagcaccatggggactacggctgtgggaaaagttgacactactgtctcctggtatcgcggtgactccggttcagatggccggaaaaaaagattacccggctctcctgtccttggacgaaaacgaactggaggagcagttcgtgaaggggcatggccctggggggcaggctaccaacaaaacaagcaactgcgtcgtactcaagcatattccatctggtatcgtagtgaagtgtcaccagacccgcagtgtggatcaaaacagaaaactggcccgaaagattttacaagaaaaagtcgacgtgttttacaacggcgaaaatagtcctgtccacaaggagaaacgcgaggctgctaaaaagaagcaagaacggaagaaacgggccaaagagaccctcgaaaaaaaaaaactcctgaaggagttgtgggagtcttcaaagaaggttcattag

SEQ ID NO: 74400 - DNA, 111 bp, Artificial Sequence
  derived and/or modified sequence
atgagcacagtgggcctcttccactttcctacccctctgacacgcatctgcccagctccttggggccttcggctgtgggagaaacttactctgctgagccccggaatctag

SEQ ID NO: 74401 - DNA, 417 bp, Artificial Sequence
  derived and/or modified sequence
atgagtactgtgggcttatttcattttcccacgccactgactagaatctgcccagccccttggggcttacggttatgggaaaagctcacccttctcagtccgggaatagctgtgacgcctgtgcagatggctggtaaaaaggactacccagccctgctgagcctagacgagaatgagctggaggagcagttcgtcaagggacacggccctggggggcaggcaactaacaagacaagcaactgcgttgtgcttaaacatatcccttcagggattgtggtgaaatgtcaccagaccagatctgtcgaccagaaccgcaaactggctcgcaaaattttgcaagagaaagtggacgtcttctacaatggggaaaactctcccgtccacaaggagaagcgggaagcagccaaaaagaagtag

SEQ ID NO: 74402 - DNA, 291 bp, Artificial Sequence
  derived and/or modified sequence
atgagcactgtcggactgtttcactttcccacacccctcacccggatttgccccgcgccatgggggttgaggctctgggagaaattgactttgttaagccctggcattgccgtgacccctgtgcaaatggccggaaagaaagattatcccgccctgttatctttggacgagaatgaactcgaggagcagtttgtcaagggccatggcccaggggggcaagccacgaacaaaacctccaactgcgttgtgctaaagcatattccttcaggaatcgtagtcaaggtagattag

SEQ ID NO: 74403 - DNA, 501 bp, Artificial Sequence
  derived and/or modified sequence
atgagcacagtgggcctcttccacttccccacccccctgacccgcatctgcccagccccctggggcctgcggctgtgggagaagctgaccctgctgagccctggcattgctgtgacccctgtgcagatggccggcaagaaggactacccagccctgctgagcctggatgaaaatgagctggaggagcagtttgtgaagggccacggccctgggggccaggccaccaacaagaccagcaactgtgtggtgctgaagcacatccccagcggcatcgtggtgaagtgccaccagaccaggtctgtggaccagaacaggaagctggccaggaagatcctgcaggagaaggtggatgtgttctacaatggagagaacagccctgtgcacaaggagaagcgggaggccgccaagaagaagcaggagaggaagaagagggccaaggagaccctggagaagaagaagctgctgaaggagctgtgggagagcagcaagaaggtgcactag

SEQ ID NO: 74404 - DNA, 111 bp, Artificial Sequence
  derived and/or modified sequence
atgagcacagtgggcctcttccacttccccacccccctgacccgcatctgcccagccccctggggcctgcggctgtgggagaagctgaccctgctgagccctggcatctag

SEQ ID NO: 74405 - DNA, 417 bp, Artificial Sequence
  derived and/or modified sequence
atgagcacagtgggcctcttccacttccccacccccctgacccgcatctgcccagccccctggggcctgcggctgtgggagaagctgaccctgctgagccctggcattgctgtgacccctgtgcagatggccggcaagaaggactacccagccctgctgagcctggatgaaaatgagctggaggagcagtttgtgaagggccacggccctgggggccaggccaccaacaagaccagcaactgtgtggtgctgaagcacatccccagcggcatcgtggtgaagtgccaccagaccaggtctgtggaccagaacaggaagctggccaggaagatcctgcaggagaaggtggatgtgttctacaatggagagaacagccctgtgcacaaggagaagcgggaggccgccaagaagaagtag

SEQ ID NO: 74406 - DNA, 291 bp, Artificial Sequence
  derived and/or modified sequence
atgagcacagtgggcctcttccacttccccacccccctgacccgcatctgcccagccccctggggcctgcggctgtgggagaagctgaccctgctgagccctggcattgctgtgacccctgtgcagatggccggcaagaaggactacccagccctgctgagcctggatgaaaatgagctggaggagcagtttgtgaagggccacggccctgggggccaggccaccaacaagaccagcaactgtgtggtgctgaagcacatccccagcggcatcgtggtgaaggtggactag

SEQ ID NO: 74407 - DNA, 501 bp, Artificial Sequence
  derived and/or modified sequence
atgagcaccgtgggcctgttccacttccccacccccctgacccggatctgtcctgctccttgggggctgaggttgtgggaaaaactgacactcctctctccagggatcgctgtcacaccggtgcaaatggcgggcaagaaggactatccggccctgctgagtttagatgagaatgagcttgaagagcaattcgttaagggccacggaccaggcgggcaggccaccaataagacctcaaattgcgttgtgctgaaacacatcccctctggtatcgttgtcaagtgccatcagactaggtctgtcgatcagaaccgaaaactggcgcggaagatcctgcaagagaaggtggacgttttctataacggcgagaattcaccggttcataaggagaaacgggaggccgctaagaagaagcaggaacggaaaaagagagcaaaagagaccctcgagaaaaaaaaactactcaaggagctctgggagtcaagcaaaaaagtgcactag

SEQ ID NO: 74408 - DNA, 501 bp, Artificial Sequence
  derived and/or modified sequence
atgagcaccgtgggcctgttccacttccccacccccctgacccggatatgccctgctccatggggactccgcttgtgggagaaactgacattactatctccgggcatagctgttacccccgtgcagatggctggcaagaaggattaccccgcgctgctatcgctggatgagaatgaactggaagagcagttcgtgaaaggccacggccctggaggccaagctacaaataagacgagtaattgtgtggtgctcaagcatattccatccgggatcgtggttaagtgccaccagactagaagtgtcgatcagaaccgcaaattggccaggaagatcctgcaagagaaagtggatgtcttctacaacggggagaacagtcctgtacataaggaaaagagagaggccgccaagaaaaagcaggagcggaaaaagagggccaaggagaccctggaaaaaaagaagttgcttaaggaattgtgggagtcaagcaagaaggttcactag

SEQ ID NO: 74409 - DNA, 501 bp, Artificial Sequence
  derived and/or modified sequence
atgagcaccgtgggcctgttccacttccccacccccctgacccggatttgtcccgctccctggggccttcgcctgtgggaaaaattgaccctgctcagccctgggatagccgtgacacctgttcaaatggccggcaaaaaggattatcccgccctcctcagcctcgacgaaaacgagttagaggagcaattcgtgaaaggacacggtccaggagggcaagccacaaataagacatctaattgcgttgtgctcaagcacatccccagtgggattgtggttaagtgccatcagacacgctccgttgaccagaatagaaaactcgcccggaaaatactgcaggagaaggtggacgtcttctacaatggggagaactcccccgttcacaaagaaaagcgcgaagcagccaagaagaaacaggagaggaagaagagagcgaaggaaacacttgaaaagaaaaaactcctgaaagaactctgggagtcaagcaaaaaagttcattag

SEQ ID NO: 74410 - DNA, 111 bp, Artificial Sequence
  derived and/or modified sequence
atgagcaccgtgggcctgttccacttccccacccccctgacccggatctgccccgccccctggggtctcaggctctgggagaaattgaccctgttatcccccggcatttag

SEQ ID NO: 74411 - DNA, 417 bp, Artificial Sequence
  derived and/or modified sequence
atgagcaccgtgggcctgttccacttccccacccccctgacccggatttgtcccgcaccctgggggctccggctatgggaaaagctcaccctactgagtccaggaattgccgtgacacccgttcaaatggccggcaagaaagactaccccgccctactgtctcttgacgagaatgaattggaggaacagttcgtaaaggggcatggaccaggaggccaagccaccaacaaaacgagcaattgcgtggtactcaagcacattccctctggtattgtggtgaaatgccatcaaacccgatcagttgatcagaacaggaagcttgccaggaaaattctgcaggaaaaggtcgacgtcttctataatggcgagaattctcccgtacataaagaaaagcgtgaggccgcaaaaaagaagtag

SEQ ID NO: 74412 - DNA, 291 bp, Artificial Sequence
  derived and/or modified sequence
atgagcaccgtgggcctgttccacttccccacccccctgacccggatttgccctgctccgtggggcttgagattgtgggagaaactgacgttactgtcacccggtattgccgtcacaccggtgcagatggcagggaagaaagattacccggctctgctcagcctggacgagaacgagcttgaggaacagtttgtgaagggccacggccccgggggccaggccacaaacaaaacttcgaattgtgtcgtgctcaagcacatccctagcggtattgttgtcaaggtggactag

SEQ ID NO: 74413 - DNA, 501 bp, Artificial Sequence
  derived and/or modified sequence
atgtcaacagttgggctattccacttccccacacccctcactcgaatctgcccagcaccatgggggctgagactttgggaaaagttaactttgctcagcccagggatagcagttacacccgtacagatggccggtaagaaggactaccctgccctgctgtccctggatgagaatgaattggaggagcagtttgtcaaaggtcacggaccgggtgggcaggcaactaataagacgagcaattgcgttgtgctaaaacatatccctagcgggatcgttgtcaaatgtcatcagaccaggagtgttgatcagaatcggaagttggccaggaagattcttcaggagaaggtggacgtcttttacaatggagagaatagccccgtgcacaaagagaaacgcgaagccgctaaaaagaaacaggagcgaaaaaagagagcaaaggaaacactggaaaaaaaaaagctgctgaaggagttatgggaaagcagcaagaaggtccattag

SEQ ID NO: 74414 - DNA, 501 bp, Artificial Sequence
  derived and/or modified sequence
atgtctaccgttggcctctttcacttccctactcccctgaccaggatttgtcctgcaccctgggggctgagactgtgggaaaagctcacccttctcagcccaggtattgctgtgactccagtgcaaatggccggtaagaaggactatcctgcgctgttgtctctggacgaaaacgagcttgaagaacagttcgtcaaaggccatggcccaggcggacaggcaacgaacaagactagcaactgcgtcgtcctgaagcatattccgtccggcatcgtcgtgaagtgtcaccagacgcgtagcgtggatcagaaccggaaactcgccaggaagattctgcaggaaaaggtcgatgtgttctacaatggggagaacagccctgtgcacaaggaaaagcgggaggcagccaagaagaaacaggagcgtaaaaagcgtgcgaaggagacgctggagaaaaaaaagcttctgaaggaattgtgggagtcctctaaaaaagtacactag

SEQ ID NO: 74415 - DNA, 501 bp, Artificial Sequence
  derived and/or modified sequence
atgtccactgtaggcctcttccattttcccacaccattaactagaatttgcccagcaccctgggggcttcggctgtgggaaaagcttaccctacttagtcccggaatcgcggtcacacccgtacagatggcaggaaaaaaggattaccccgcattgctttccctggatgagaatgagctggaggaacagttcgtcaagggccatggtcccggtggccaggcgactaataaaaccagcaattgcgttgttctcaagcatattcctagtgggatagtggtgaaatgtcaccagacaagatctgttgatcagaatagaaagttggcccgtaaaatcttacaggaaaaggtggatgtgttctataatggggagaacagcccggtacataaagagaagagagaggccgcaaaaaagaagcaagagcggaaaaagcgggctaaggagactttggagaagaagaaactactcaaagagctctgggagtcttccaagaaagtgcattag

SEQ ID NO: 74416 - DNA, 111 bp, Artificial Sequence
  derived and/or modified sequence
atgtcaaccgtgggactgttccatttccccactccgttaacgaggatctgccctgctccttggggactacgcctgtgggaaaaattaacactgctgtcaccaggaatctag

SEQ ID NO: 74417 - DNA, 417 bp, Artificial Sequence
  derived and/or modified sequence
atgagcaccgtcggtctgtttcactttcccacacctctcaccagaatctgtcccgctccgtggggcctgaggctgtgggaaaaactgactctcttatctccaggaatagccgtgacaccagtgcagatggctggaaagaaggactatcccgctctgctgagcttggacgagaatgagcttgaagaacagttcgtcaagggacatggtcctggagggcaggccacaaacaagacgtctaattgtgttgtgctcaaacatattccaagtggcatcgtggtgaaatgtcaccagacacgcagcgtcgatcaaaacagaaagcttgcccgaaagatactgcaggaaaaagtggatgttttctacaacggcgaaaatagtcctgtgcataaggagaaaagggaagctgccaagaaaaaatag

SEQ ID NO: 74418 - DNA, 291 bp, Artificial Sequence
  derived and/or modified sequence
atgtctaccgtgggactgtttcacttccctactcctctgaccaggatttgcccagctccatggggactgagactgtgggaaaagctgaccctactttcacctggcattgctgtgactcctgttcagatggccggaaagaaggactaccccgcacttctgtcactggacgaaaatgaactggaggaacagtttgtgaaaggacacggccctggtgggcaggcaactaataaaacaagtaattgtgtagtgctcaagcatattccaagcggcatcgtggtcaaagtggactag

SEQ ID NO: 74419 - DNA, 2073 bp, Artificial Sequence
  derived and/or modified sequence
cacacgccgaagggctccgagggggtcaggccaatcggcagccgtcaccccacaccccagcccatcaccacactcaaggggccgctaagacagtgtctcctaagtctcgtctcctgtccccagcggcctacagctccctgcaggctggtggccgcttacctggccgccgctcccgctgccgatgtcagggtcatgcaagcggcctctcgcgaccgttacccgagggagcgcgcgcgcgcccggcgtctctccagtgattggctgcccggaaggaggcggagacagcctcgcatggcgcgcgcgtccacctcgccgttccccctcgcgcagctccaaccaaagagagacatccaaccccgggggagtgacaagggggcgggattgctgtgaaactctcttctctgattggctctctgggagccagccgctgccacgagggaaagaagcttcagtttctcgcatgcgcagtgagtaaacatgagcctctggtagataagagaaaccgcgatcggagtacggcgcgtgcgcagatcagggatcgcgattgcgaatcctccgctgaggtgatttggatatccctagaacgttgagggcacgagtcgggtcctgagaccaggtcctcagccagcagagccacgttccttatgagcaccgtgggtttatttcattttcctacaccactgacccgaatatgcccggcgccatggggactccggctttgggagaagctgacgttgttatccccaggaatagctgtcactccggtccagatggcaggcaagaaggactaccctgcactgctttccttggatgagaatgaactcgaagagcagtttgtgaaaggacacggtccagggggccaggcaaccaacaaaaccagcaactgcgtggtgctgaagcacatcccctcaggcatcgttgtaaagtgccatcagacaagatcagttgatcagaacagaaagctagctcggaaaatcctacaagagaaagtagatgttttctacaatggtgaaaacagtcctgttcacaaagaaaaacgagaagcggcgaagaaaaaacaagaaaggaaaaaaagagcaaaggaaaccctggaaaaaaagaagctacttaaagaactgtgggagtcaagtaaaaaggtccactgagaaaagaattagagattccaactgacagaatctgccagaagctcccagggaataatggtggcgagttccatcaccagcattattatagtgcttcaaaagaaatatttttgatgaacttaaaagacaacaaatttatttaaatggtgcactaaactgtagtgaacagagacatgcacgattcaagaataaaactcggctgggcacggtggacggtgcctcacatctgtaatcccagcactttgggaggccgaggcgggcggatcacttgaggtcaggagtttgagaccagcctggccaacatggtgaaaccccgtctctactaaaaatacaaaaaattagccaggcatggtggcgggcacctgtaatcccagctactcgggaggccgaggcaggagaattgcgtgaacctgggaggcggaggttgcagtgagctgagatcgcgccactgcactcaagcctgggcaacacctgggtgacagagcgagaccccatctcaaaaaaaaaataaaactagttcaagtgcaatgacacacgcctataatcccagcaccttgggaggctaagacaggaagatcacctgagcccaggagctcaagattgcagtgagctatgaacaccactgcactccacctgtccacttgttcttgtgtgacagaacaagaccctgtctctaaaaaataagataaaaccataaagaaacacagtcagtactatacaagaataatggctacttctagagggaaggagttgtcattgtgatgaggcacttggaggggttctggggtgcctgacaaagttctgtttcttcacctgggtggtagttagaagggtgtccccgtatttcaaattgtacctttgtgagattgtatgttttgtaataataaaattttttttgtaattagtaaagtcaatttttatggagaactgg

SEQ ID NO: 74420 - DNA, 1575 bp, Artificial Sequence
  derived and/or modified sequence
cctggggctgttcaggcactcagggcaggggagaggagagactaccgtcctggagataacggttccacggaggcccaaggcgaaacggaaggatcctcatgtacaaaactgagcggaatggagctgtgagcacgcatcaggtcctcagccagcagagccacgttccttatgagcaccgtgggtttatttcattttcctacaccactgacccgaatatgcccggcgccatggggactccggctttgggagaagctgacgttgttatccccaggaatagctgtcactccggtccagatggcaggcaagaaggactaccctgcactgctttccttggatgagaatgaactcgaagagcagtttgtgaaaggacacggtccagggggccaggcaaccaacaaaaccagcaactgcgtggtgctgaagcacatcccctcaggcatcgttgtaaagtgccatcagacaagatcagttgatcagaacagaaagctagctcggaaaatcctacaagagaaagtagatgttttctacaatggtgaaaacagtcctgttcacaaagaaaaacgagaagcggcgaagaaaaaacaagaaaggaaaaaaagagcaaaggaaaccctggaaaaaaagaagctacttaaagaactgtgggagtcaagtaaaaaggtccactgagaaaagaattagagattccaactgacagaatctgccagaagctcccagggaataatggtggcgagttccatcaccagcattattatagtgcttcaaaagaaatatttttgatgaacttaaaagacaacaaatttatttaaatggtgcactaaactgtagtgaacagagacatgcacgattcaagaataaaactcggctgggcacggtggacggtgcctcacatctgtaatcccagcactttgggaggccgaggcgggcggatcacttgaggtcaggagtttgagaccagcctggccaacatggtgaaaccccgtctctactaaaaatacaaaaaattagccaggcatggtggcgggcacctgtaatcccagctactcgggaggccgaggcaggagaattgcgtgaacctgggaggcggaggttgcagtgagctgagatcgcgccactgcactcaagcctgggcaacacctgggtgacagagcgagaccccatctcaaaaaaaaaataaaactagttcaagtgcaatgacacacgcctataatcccagcaccttgggaggctaagacaggaagatcacctgagcccaggagctcaagattgcagtgagctatgaacaccactgcactccacctgtccacttgttcttgtgtgacagaacaagaccctgtctctaaaaaataagataaaaccataaagaaacacagtcagtactatacaagaataatggctacttctagagggaaggagttgtcattgtgatgaggcacttggaggggttctggggtgcctgacaaagttctgtttcttcacctgggtggtagttagaagggtgtccccgtatttcaaattgtacctttgtgagattgtatgttttgtaataataaaattttttttgtaattagtaaa

SEQ ID NO: 74421 - DNA, 1326 bp, Artificial Sequence
  derived and/or modified sequence
cttggaagatatttttggtctattgcaagaaaatatgtattagctggcagggcatgtcctggtaacatggcagacagtgcaaggctgaggagaggggcgtcttgctgaataatgtgtctctactcatttcctaaattccctcggtaacagatgggtcatcatttgaattgctttataaaaagctgtctttgaatctgaagcataatcttgagggcagatgcctcttactgaaagctctccttattcatctaacccaggtcctcagccagcagagccacgttccttatgagcaccgtgggtttatttcattttcctacaccactgacccgaatatgcccggcgccatggggactccggctttgggagaagctgacgttgttatccccaggaatagctgtcactccggtccagatggcaggcaagaaggactaccctgcactgctttccttggatgagaatgaactcgaagagcagtttgtgaaaggacacggtccagggggccaggcaaccaacaaaaccagcaactgcgtggtgctgaagcacatcccctcaggcatcgttgtaaagtgccatcagacaagatcagttgatcagaacagaaagctagctcggaaaatcctacaagagaaagtagatgttttctacaatggtgaaaacagtcctgttcacaaagaaaaacgagaagcggcgaagaaaaaacaagaaaggaaaaaaagagcaaaggaaaccctggaaaaaaagaagctacttaaagaactgtgggagtcaagtaaaaaggtccactgagaaaagaattagagattccaactgacagaatctgccagaagctcccagggaataatggtggcgagttccatcaccagcattattatagtgcttcaaaagaaatatttttgatgaacttaaaagacaacaaatttatttaaatggtgcactaaactgtagtgaacagagacatgcacgattcaagaataaaactcggctgggcacggtggacggtgcctcacatctgtaatcccagcactttgggaggccgaggcgggcggatcacttgaggtcaggagtttgagaccagcctggccaacatggtgaaaccccgtctctactaaaaatacaaaaaattagccaggcatggtggcgggcacctgtaatcccagctactcgggaggccgaggcaggagaattgcgtgaacctgggaggcggaggttgcagtgagctgagatcgcgccactgcactcaagcctgggcaacacctgggtgacagagcgagaccccatctcaaaaaaaaaataaaactagttcaagtgcaatgacacacgcctata

SEQ ID NO: 74422 - DNA, 604 bp, Artificial Sequence
  derived and/or modified sequence
gattgcgaatcctccgctgaggtgatttggatatccctagaacgttgagggcacgagtcgggtcctgagaccaggtaagcatctgcggagaagccaggtaaccctacggctgccgacgactgtcaaaggctccggagagaggactgcgagccgggacgcctgggtttttcccgacttgcgaccccgagtggcgcagccagtttacctgaggccgcgctggcggtggggtggggccggccgtgacacccgagctcagttttctcgggacctggtttacgctaggtgctgtgggtcggccctggggctgttcaggcactcagggcaggggagaggagagactaccgtcctggagataacggttccacggaggcccaaggcgaaacggaaggatcctcatgtacaaaactgagcggaatggagctgtgagcacgcatcaggtgctgtttcaggcctggcacgtagtagaggtcctcagccagcagagccacgttccttatgagcaccgtgggtttatttcattttcctacaccactgacccgaatatgcccggcgccatggggactccggctttgggagaagctgacgttgttatccccaggaatag

SEQ ID NO: 74423 - DNA, 3733 bp, Artificial Sequence
  derived and/or modified sequence
gctgaacataggaccccaatcccttctagcttgtagtgtttctcctgagaaatctgctgttaatctgataggttttcctttataggttacctggtgcttctgtctcacagactcttaaaattctttctttcattttaactttgtccggaattggtgggttcttggtcttgctgacttcaagaatgaagccacggaccctcatggtgagtattacagctcttaaagatggtgtgtccagagtttgttccttcagatgttcagatgcatccagagtttcttccttctggtgggtttgtggtctcgctgacttcaggagtgaacctgcagaccttcgcagtgagtgttgcagctcttaaaggcagcacagacccaaggagtgagcagcagtaacatttaccacaaagaccaaaagaacaaagcttccacagtgtggaaggtgacccgaacgggttgcactgctggctcaggcagcctgcgtttattcccttatctgaccccacccacatcctgctgattggtccattttacagagagctgattggcccattttacagacagctgattggtctgttttgacagggtgctgattggtgcgtttataaaccttgagctagacacagagtgctgactggtgcatttacaatcctttagctagacacaaaagttctccaagtccctagatttagctagacacagcactgattgatgtgtttacaaaccttcagctagacacagagtgctgattggtgcatttacaatcctttagctagacacaaaagttctccaagtccccactagattagctagacatagagcactgattggtgcatttacaaaccttgagctagacacagggtgctgattggtgtatttacaaaccttgagctagacacaaagtgctgactggtgtatttataaacctttagctagacataaaagttctccaagtccccacccgactcaggagtccagctagctttgcctactggatcccatgctggggccgtgggtggagctgcctgctagtcccacaccatgcccccgcactcctcagcccttgggcggtcaatgggactggttgcagagcagggggcggcgcccgtccgggaggctctggccatgagggagcagggcagggggagggggggactcaggcatggcgggttgcaagtcccacgccctgctccacggggaggcagctgaggcccagcgagaattcaagcacagcccgggtgagctggcagtgctgggggacccggcacaccctccacagctgctggccggggtgctaagcccctcactgcctggggccggcggcaccagccggccactcctaggtcggggcccgccaagccctcactggcccgcgagctctccctccacacctccccacaagcggagggagcccgctttggccttggccagtccagagaggggcttccacagtgcagcggcgggctgaagggctcctcaagcacagccagagtggatgccgaggccaaggaggcgccgagagcgagtgagggctactagcacattgtcacctctcatttggataacctgatgacaatatgcctagatgaagatctttttgcaatggatttctcaggtgttctttgtgcttctcgtatttggatgtctaggtctctagcaaggccggggaagttttcctcgattattcccccaaatatgttttccaagcttttagatttctcttcttcctcaggaacaccaattattcttaggtttggtcgtttaacacaatcccagacttcttggaggctttgttcatattttcttattcttttttgtctttgttggattgggttaatttgaagaccttgtcttcgagctctgaatttctttattctacttgttgaattctattgctgagactttccagagcattttgcatttctaaaaatgtgtccaaagtttcctgaattttttattgttttttctttaagctatctatttccctgagtgatttctcccttcacttcttgtatcattttttggatttccttacattgggcttcacctttctctggtccttccctgattaataactaacctcctgaattctttttcaggtaaatcaggtatttcttcttggtttggatccattgccagtgaactagtatgttttttggggggtgttgaagcgtcttgttttgtcatattaccagggtttgttcatttgggtaggctctgtcagagggaaggtctagggctgaaggctgttcagattcttttgtcccatggggtgttctcttcatgtagtactctgccccttttcctatggatgtggcttcctatgagccaaacttgcagtgattgttgtctctcttctgggtctagccacccagcgaatcttcccagttccaggctggtactggaggttatctgcagagtcctgtgatgtgaaccatctatgggtctctcagccatggctaccagtgcctgttcggtggaggtggcagagggtacaatggagctttggtgggttaatggtctattttttttgctggttggcctcctgccaggaggtggtcctttccagaaagcatcagctgtggtaatatggggaggaaccagcagtgggcggggccctagaactcccaagatttatttgccctttgtcttcctgccagggtgcatagggaaggaccatcaggtgggggtggagctaggcgtgtctgagctcagactctccttgggcgggtcttgctgcggctgctgtagggaatgtgggtgagattcccaggtcactggagtcgtgtacctaggagagttatggctgcctctgctgagtcatgcaggttgtcagggaagtgggggaaagctggcagtcacaggcctcacccagctcccacacaaacccaagggccggtcttactcccaccgtgttcccccacaactgccccgagtctgtttccaggcagagggtgagactggcttgaaaatttgccccaaggctgtgcccctcccagcagcgaaagaaaagggctgtagttcttcccccacctgtgaagtctgcatgctggattcgtgcagttgcccaagttctggccaggaggcttctcaccctgtttaaattgttacgaagttcgactagagaattcttctccctgtggagttttatcccttgctcctctggccaccctcccgatggatccctgtggtgccaggcaggaatgggccttctggggacccagcgagctcccacggcctttctgctgcttcctctacccctgtagttcgctctgctgagtctgacttagctccaggtcctcagccagcagagccacgttccttatgagcaccgtgggtttatttcattttcctacaccactgacccgaatatgcccggcgccatggggactccggctttgggagaagctgacgttgttatccccaggaatagctgtcactccggtccagatggcaggcaagaaggactaccctgcactgctttccttggatgagaatgaactcgaagagcagtttgtgaaaggacacggtccagggggccaggcaaccaacaaaaccagcaactgcgtggtgctgaagcacatcccctcaggcatcgttgtaaagtgccatcagacaagatcagttgatcagaacagaaagctagctcggaaaatcctacaagagaaagtagatgttttctacaatggtgaaaacagtcctgttcacaaagaaaaacgagaagcggcgaagaaaaaac

SEQ ID NO: 74424 - DNA, 573 bp, Artificial Sequence
  derived and/or modified sequence
gcgaatcctccgctgaggtgatttggatatccctagaacgttgagggcacgagtcgggtcctgagaccaggtgctgtgggtcggccctggggctgttcaggcactcagggcaggggagaggagagactaccgtcctggagataacggttccacggaggcccaaggcgaaacggaaggatcctcatgtacaaaactgagcggaatggagctgtgagcacgcatcaggtgctgtttcaggcctggcacgtagtagaggtcctcagccagcagagccacgttccttatgagcaccgtgggtttatttcattttcctacaccactgacccgaatatgcccggcgccatggggactccggctttgggagaagctgacgttgttatccccaggaatagctgtcactccggtccagatggcaggcaagaaggactaccctgcactgctttccttggatgagaatgaactcgaagagcagtttgtgaaaggacacggtccagggggccaggcaaccaacaaaaccagcaactgcgtggtgctgaagcacatcccctcaggcatcgttgtaaaggtagatca

SEQ ID NO: 74425 - DNA, 501 bp, Artificial Sequence
  derived and/or modified sequence
atgagcaccgtgggcctgttccacttccccacccccctgaccagaatctgccccgccccctggggcctgagactgtgggagaagctgaccctgctgagccccggcatcgccgtgacccccgtgcagatggccggcaagaaggactaccccgccctgctgagcctggacgagaacgagctggaggagcagttcgtgaagggccacggccccggcggccaggccaccaacaagaccagcaactgcgtggtgctgaagcacatccccagcggcatcgtggtgaagtgccaccagaccagaagcgtggaccagaacagaaagctggccagaaagatcctgcaggagaaggtggacgtgttctacaacggcgagaacagccccgtgcacaaggagaagagagaggccgccaagaagaagcaggagagaaagaagagagccaaggagaccctggagaagaagaagctgctgaaggagctgtgggagagcagcaagaaggtgcactag

SEQ ID NO: 74426 - DNA, 111 bp, Artificial Sequence
  derived and/or modified sequence
atgagcaccgtgggcctgttccacttccccacccccctgaccagaatctgccccgccccctggggcctgagactgtgggagaagctgaccctgctgagccccggcatctag

SEQ ID NO: 74427 - DNA, 417 bp, Artificial Sequence
  derived and/or modified sequence
atgagcaccgtgggcctgttccacttccccacccccctgaccagaatctgccccgccccctggggcctgagactgtgggagaagctgaccctgctgagccccggcatcgccgtgacccccgtgcagatggccggcaagaaggactaccccgccctgctgagcctggacgagaacgagctggaggagcagttcgtgaagggccacggccccggcggccaggccaccaacaagaccagcaactgcgtggtgctgaagcacatccccagcggcatcgtggtgaagtgccaccagaccagaagcgtggaccagaacagaaagctggccagaaagatcctgcaggagaaggtggacgtgttctacaacggcgagaacagccccgtgcacaaggagaagagagaggccgccaagaagaagtag

SEQ ID NO: 74428 - DNA, 291 bp, Artificial Sequence
  derived and/or modified sequence
atgagcaccgtgggcctgttccacttccccacccccctgaccagaatctgccccgccccctggggcctgagactgtgggagaagctgaccctgctgagccccggcatcgccgtgacccccgtgcagatggccggcaagaaggactaccccgccctgctgagcctggacgagaacgagctggaggagcagttcgtgaagggccacggccccggcggccaggccaccaacaagaccagcaactgcgtggtgctgaagcacatccccagcggcatcgtggtgaaggtggactag

SEQ ID NO: 74429 - protein, 296 aa, Artificial Sequence
  derived and/or modified sequence
MGELMAFLLPLIIVLMVKHSDSRTHSLRYFRLGVSDPIHGVPEFISVGYVDSHPITTYDSVTRQKEPRAPWMAENLAPDHWERYTQLLRGWQQMFKVELKRLQRHYNHSDNVAHTIKQAWEANQHELLYQKNWLEEECIAWLKRFLEYGKDTLQRTEPPLVRVNRKETFPGVTALFCKAHGFYPPEIYMTWMKNGEEIVQEIDYGDILPSGDGTYQAWASIELDPQSSNLYSCHVEHCGVHMVLQVPQESETIPLVMKAVSGSIVLVIVLAGVGVLVWRRRPREQNGAIYLPTPDR

SEQ ID NO: 74430 - DNA, 891 bp, Artificial Sequence
  derived and/or modified sequence
atgggagagctcatggcatttctgctccccctgattatcgtcttaatggttaagcactctgatagcagaactcactcattaaggtacttcaggttaggggtgagcgacccgattcatggagtcccagagtttattagcgtaggctacgttgacagtcatccgataacgacttatgactccgttactcgacagaaggagcccagagccccctggatggccgagaatctagcccctgaccactgggagcggtatacacaactgctcagaggatggcaacagatgtttaaggtggaactgaaaagactgcagcgccactataatcacagcgacaacgtcgcacatacaattaaacaggcttgggaggccaaccagcacgagctcctataccagaaaaattggcttgaggaagagtgcatagcctggctgaagaggttcctcgagtacggtaaggataccctgcagaggaccgaaccgccattagtgagagtgaataggaaggaaacgttcccgggcgtaaccgcactcttctgcaaggcccacggcttctatcccccagaaatctacatgacctggatgaagaatggcgaggagattgtccaggagatagattacggcgacatcctgccctcgggtgacggcacctatcaggcttgggctagcatagagcttgaccctcaaagtagtaacctttacagctgccatgttgagcactgcggcgttcatatggttctgcaggtaccacaggaaagtgagacaattccattagtcatgaaggccgtgtctgggtccattgtcttggtcatcgtgctggccggcgtcggcgttctggtatggagaaggaggccacgggaacagaatggagctatttacctccccaccccggataggtag

SEQ ID NO: 74431 - DNA, 891 bp, Artificial Sequence
  derived and/or modified sequence
atgggagagctgatggccttcctgctgcccctcatcatcgtgctgatggtgaagcacagcgacagcaggacccacagcctgcgctacttccggctgggcgtgtctgaccccatccatggagtgcctgagttcatctctgtgggctacgtggacagccaccccatcaccacctatgacagcgtgacccggcagaaggagccccgggccccctggatggccgagaacctggccccagaccactgggagcgctacacccagctgctgcggggctggcagcagatgttcaaggtggagctgaagaggctgcagaggcactacaaccacagcgacaacgtggcccacaccatcaagcaggcctgggaggccaaccagcacgagctgctgtaccagaagaactggctggaggaggagtgcatcgcctggctgaagcgcttcctggagtatggcaaggacaccctgcagaggacagagccccccctggtgcgggtgaacaggaaggagaccttccctggggtgacagccctcttctgcaaggcccacggcttctacccacctgagatctacatgacctggatgaagaatggagaggagatcgtgcaggagattgattatggagacatcctgcccagcggagatggcacctaccaggcctgggccagcattgagctggacccccagagcagcaacctgtacagctgccacgtggagcactgcggcgtgcacatggtgctgcaggtgccccaggagagcgagaccatccccctggtgatgaaggctgtgtctggcagcatcgtgctggtgattgtgctggccggcgtgggcgtgctggtgtggaggcggcggccccgggagcagaatggagccatctacctgcccaccccagacagatag

SEQ ID NO: 74432 - DNA, 1154 bp, Artificial Sequence
  derived and/or modified sequence
ggactatgggggaactgatggcgttcctgttacctctcatcattgtgttaatggtgaagcacagcgattcccggacgcactctctgagatattttcgcctgggcgtttcggatcccatccatggggtccctgaatttatttcggttgggtacgtggactcgcaccctatcaccacatatgacagtgtcactcggcagaaggagccacgggccccatggatggcagagaacctcgcgcctgatcactgggagaggtacactcagctgctgaggggctggcagcagatgttcaaggtggaactgaagcgcctacagaggcactacaatcactcagataatgtggctcacaccatcaagcaggcatgggaggccaatcagcatgagttgctgtatcaaaagaattggctggaagaagaatgtattgcctggctaaagagattcctggagtatgggaaagacaccctacaaagaacagagcccccactggtcagagtaaatcgcaaagaaacttttccaggggttacagctctcttctgcaaagctcatggcttttaccccccagaaatttacatgacatggatgaaaaacggggaagaaattgtccaagaaattgattatggagacattcttcccagtggggatggaacctatcaggcgtgggcatcaattgagcttgatcctcagagcagcaacctttactcctgtcatgtggagcactgcggtgtccacatggttcttcaggtcccccaggaatcagaaactatccctcttgtgatgaaagctgtctctgggtccattgtccttgtcattgtgctggctggagttggtgttctagtctggagaagaaggccccgagagcaaaatggagccatctaccttccaacaccagatcgatgattgcagatccctcttttccagttctccttcctctaggagccatgttatcctctgtcccccatagagtcaagcctagtgcttgaaggtcctgacgacacccacaacatacatgagagtaatgggattgagcatttatggcagcaacagaggagccacaaaatgttctttgttctttggctccaaaaagactgtcagctttcagtctcttttgatggactgttttatcagagttgactttaaatacagcttgtctcatga

SEQ ID NO: 74433 - DNA, 891 bp, Artificial Sequence
  derived and/or modified sequence
atgggcgagctgatggccttcctgctgcccctgatcatcgtgctgatggttaagcactctgatagccggacccactcactccgctactttcgtctaggagtgtccgatccaattcacggtgtccctgaattcatcagcgtcggatacgtggactcgcaccctatcactacatacgacagtgtcacgcgacagaaggagcccagagcaccctggatggctgagaatctggcccctgatcactgggaaagatacacacagctcctaagaggatggcagcagatgtttaaagtcgaacttaaaaggctgcagcggcactacaaccactccgataacgttgcccacaccattaagcaagcctgggaggctaatcaacatgagctcctttaccagaagaattggctggaggaagaatgcatcgcttggctcaagagatttttggagtacggcaaagacactctgcagagaacagagccacctctggtccgagtgaaccggaaggagacatttcctggcgtgacagcgctgttttgcaaggcccatggcttctatcccccagaaatctacatgacgtggatgaaaaacggagaagagatagtgcaggagattgattacggtgatattcttccgtccggggatggcacttatcaagcctgggcgagcatcgaattggacccacagtcaagtaatctgtattcctgccatgtggagcattgcggggtacatatggtgctccaggtgccgcaggaaagtgaaacaatccccctagtgatgaaggctgtgtccggcagtatagtgctagtgatagtgttagccggagtgggcgtattggtatggcgccgccgcccaagggaacagaatggcgctatatatctgcccacacctgaccgttag

SEQ ID NO: 74434 - DNA, 891 bp, Artificial Sequence
  derived and/or modified sequence
atgggagagttaatggcctttctgctgccattgatcatcgtgctcatggtaaaacactccgactctaggacacactctctgcggtacttcagattaggggtcagcgatcccatccacggggtaccagagtttatttccgtaggttacgttgattcacacccgatcaccacatacgactctgtcacccgccagaaggaaccaagagctccctggatggcagaaaatttggcacctgatcactgggagcgctacacccaactcctgcgaggctggcagcagatgttcaaagtggagctcaagcgactgcaaagacactataatcattctgataacgtcgcccacaccattaaacaggcatgggaggctaatcaacacgagctcctgtaccagaagaattggcttgaagaggagtgtattgcttggctgaaaaggttcttagagtatgggaaggatacgctgcagcgtaccgaaccacccttggttcgtgtgaatagaaaagagacctttccaggcgtgacagccctgttttgcaaagctcacggattctatccaccagagatctatatgacttggatgaagaacggggaagagattgtgcaagaaatagattatggggatattcttccgagtggggacgggacgtaccaagcctgggctagtatagagttggaccctcaaagctccaatttatacagttgtcacgttgagcactgtggtgtgcacatggttcttcaagtcccgcaggaatccgagacgatccctctggtcatgaaggccgtgagcggatcaattgtcttagtaattgttctagctggggtgggagtgctcgtgtggcgcaggagaccacgcgaacagaatggtgcaatttatttacccacgcccgatcggtag

SEQ ID NO: 74435 - DNA, 891 bp, Artificial Sequence
  derived and/or modified sequence
atgggcgagctgatggccttcctgctgcccctgatcatcgtgctgatggtgaagcacagcgacagcagaacccacagcctgagatacttcagactgggcgtgagcgaccccatccacggcgtgcccgagttcatcagcgtgggctacgtggacagccaccccatcaccacctacgacagcgtgaccagacagaaggagcccagagccccctggatggccgagaacctggcccccgaccactgggagagatacacccagctgctgagaggctggcagcagatgttcaaggtggagctgaagagactgcagagacactacaaccacagcgacaacgtggcccacaccatcaagcaggcctgggaggccaaccagcacgagctgctgtaccagaagaactggctggaggaggagtgcatcgcctggctgaagagattcctggagtacggcaaggacaccctgcagagaaccgagccccccctggtgagagtgaacagaaaggagaccttccccggcgtgaccgccctgttctgcaaggcccacggcttctacccccccgagatctacatgacctggatgaagaacggcgaggagatcgtgcaggagatcgactacggcgacatcctgcccagcggcgacggcacctaccaggcctgggccagcatcgagctggacccccagagcagcaacctgtacagctgccacgtggagcactgcggcgtgcacatggtgctgcaggtgccccaggagagcgagaccatccccctggtgatgaaggccgtgagcggcagcatcgtgctggtgatcgtgctggccggcgtgggcgtgctggtgtggagaagaagacccagagagcagaacggcgccatctacctgcccacccccgacagatag

SEQ ID NO: 74436 - DNA, 7725 bp, Artificial Sequence
  derived and/or modified sequence
agaatcttctgtaggcctttctcttgccttcttttattcacaactgatgacactgcatatcttcccctgttcttattgggagaaggccttgtgtgtcaccaagaggttctcagaagggacctgtcagtttttggttaaaagaacccggaaagagaaggactatgggggaactgatggcgttcctgttacctctcatcattgtgttaatggtgaagcacagcgattcccggacgcactctctgagatattttcgcctgggcgtttcggatcccatccatggggtccctgaatttatttcggttgggtacgtggactcgcaccctatcaccacatatgacagtgtcactcggcagaaggagccacgggccccatggatggcagagaacctcgcgcctgatcactgggagaggtacactcagctgctgaggggctggcagcagatgttcaaggtggaactgaagcgcctacagaggcactacaatcactcagataatgtggctcacaccatcaagcaggcatgggaggccaatcagcatgagttgctgtatcaaaagaattggctggaagaagaatgtattgcctggctaaagagattcctggagtatgggaaagacaccctacaaagaacagagcccccactggtcagagtaaatcgcaaagaaacttttccaggggttacagctctcttctgcaaagctcatggcttttaccccccagaaatttacatgacatggatgaaaaacggggaagaaattgtccaagaaattgattatggagacattcttcccagtggggatggaacctatcaggcgtgggcatcaattgagcttgatcctcagagcagcaacctttactcctgtcatgtggagcactgcggtgtccacatggttcttcaggtcccccaggaatcagaaactatccctcttgtgatgaaagctgtctctgggtccattgtccttgtcattgtgctggctggagttggtgttctagtctggagaagaaggccccgagagcaaaatggagccatctaccttccaacaccagatcgatgattgcagatccctcttttccagttctccttcctctaggagccatgttatcctctgtcccccatagagtcaagcctagtgcttgaaggtcctgacgacacccacaacatacatgagagtaatgggattgagcatttatggcagcaacagaggagccacaaaatgttctttgttctttggctccaaaaagactgtcagctttcagtctcttttgatggactgttttatcagagttgactttaaatacagcttgtctcatgacacaacgcttccctacattctatttgtcaatgatgatttgcaactagttggagattctcagagcaggaaggaatcttttcaaccagagcaggaactgtcttctgcaatgccttggacttgagcctccagcctccacttgaacaccatgtgaagggaacctcagtacttcataaaatggcctttctcattcatctttcatgggaacatttattgtacaagcgctttgaatatcatgggcaccatgactgtgaccctacaggtaggattggatcactccatgagagtagccggcaggtttctacaatggcctgggaatggactgattatttttatacattttctggcctgagagaaagccaaagtcccctgctgttcacagcaaccctgcctgggagcttggaatcttggtaatctgcccggttggatctatggaggtagtctcaccctttttgtcttttgtgggaaattaagagaaataattatcagacatatcatcacctccagtggaactacagagacctggacccagctgcactattttaatgtaaaaataacagtatggccaggtgcagtggctcacgcctgtaatcccatcactttgagcagccaaggcgggcggatcacgaggtcaggagattaagaccatcctggccaatatggtgaaaccctgtctctactaaaatacaaaaaattagctgggcatggtgttgcgtgcctgtagtcccagctacttgggaggctgagacaggggaattgcttgaacccgggaggcagagattgcagtgagccgagatcacgccactgcactccagcctggcgacagagtgagactctatctcaaaataataataataataataataataataataataataataacagtatatttggtgtcaggagagggctcaattctcatttctgcctttcctgtgctggctcatggtagctgggcatgacttgccttcctacataggttgtcttcatacatatgcactgggaatcaataaaagcccatggtgagaatgaacatccccttaatgttccttactatccccaacccctgaggcctcacctactgccctgccatgtggagctacttgccctggggctgccagtcacacattcctcggtcctacttctctgaccccgtttgactctgcacctgagccctaatgcttacttcagtgacctgaactttgacaagtggcttttgtcctgcacctcaggtttgacctctgctctcccttgaccttgactgtgacatttgacctttggctttaatcattacagcctcagataaaggtaccttcagcccgggcacagtggctcacgcctgtaatcctagcactttgggaggctgaggcaggcggattccctgagctcaggagttcaagaccagcctgggcaacacggtgaaaccctgtctctactaaaatacaaataattagctgggcatggtggcatgtgcctatagtcccagctacttgggaggctaaggcaggagaatcacttgaatctataaggcagaggtggcagtgagccgagatcacaccactgcactccagcctgggcaacggagcaagactctgtctccaaaaaaaaaaagaaagataccctcagtgtgccaggcctctaagagctcacctgccaggcttcctccttgctccactgtcccatgtaattccatatatgaagctaccactgtacatctctcttttccggtgcctgttgagttgcatagaagcacagttgtgtttattttgtttttagggttgccatgggcaatttccgtgccacttttaagcagtgttgcactgtgaagagaatgtaggcaagtttatttctggaatggtttcttcttacaatcagaatagttaggatgtaatatatttttgggtgggcatttaaagtgaaaaggtacatatttacatagacacaggtgataatgtatctatgtaaatgccttttgattctgcaactgcaggatactctcatcaaagacacagataaaaagcctctgtgtttccaaggccttgccctacacctaacacataatatgtccaaatggatgaagaggaggcaaggacaaggatgtgatgacaaaacattctgttatgcacttgtagcatttatgtttcttcctgggggattttataatactaaaagaatcataatataaagagatgattaaaaaaaaaatactgccgggcacggtggctcatgcctgtaatcccagcattttgggaggccgaggtgggcagatcacctgaggtcgggagttcgagaccagcctgaccaacatggagaaaccctgtctctaccaaacatacaaaattagccggggatggtggcgcatgcctataatcccagctactcgggagtctgaggcagaagaaccgcttgaacccgggaggcagaggttgtggtgagccgagatcgcgccatcgcactctagcctgggcaacaagagtgaaactccatctcaaaaaaataaaaataaaataagtaagtaatacctaaaattctgcaaccttcattttactatagatggttgaagattatattacttcttaattgttttagccttgttattgcttcattacttcatggttgttgagtacagatgctcagtaatcataacctatgaaatatttgacaccatgatctaaacattaaaaacaaataactgtgctattgccacagctatgttttggctttgaattttctttactgaatattttggatcaagaacactagatgagaaacctgttcaactctgttcttttttttttttttaactccactgtatttattacctgtttttgttttttttgtttgtttgtttttgatgtgcatatagaccaagatgtggtaaatttaaatggcagatgtttttgatgtggtacatttaagggagagaaagcagtttaaagagcagggtgaaaaatccaacaagactccatcgagagtttctgagctctcccatcaggggccagtcctcctttcctctctcctcttactcccatgatttccaagttgtgatcctttccttatttctgaggaatgacttggtttctcctcttctttttttggcctgagagaagatgtttttgcacttgtagctatgaggaacagattgtccactagggaggccagctgatcattttctgccagagtcacacagagcagtcacaccttattttgaaaaccactgtctggggtctttgtcctcacatatgcaggtctagtgtccccacaaagtgatcagatggatatataaagtggagtgccaatgtattaatttactgtgagaaacacaattgctaagtgggtcagatatctgtctcagctggtcagtacaccttccagcaggaaaatctacataagaacaactaaatcacaatctgtagagtgcttgatgaccccagaattggtgcaaggggacacattcttgcttgttagcacctgctctctggagtttgctattttctcacacacagtgtattagttcacagaatgttctccaaggaggacagggggctttgcccatagccatgtgctgtgggcagcagagctaggaagaagcacaggcatctcccagcccaggtgtttcccacttaactgcattgcccttttcatcttttttttttccccaatagcttcaggacattcagtacattgtgctttttagaggttgatgattccactgcctgagctgccttcacctctctttctttggaaattgccatctttgagcattgtatgtctctgtaacatctctgcatctccttttcactctggcctccctttctccattgtccttctagcttctggttgccccaaaccccacagactgtgtaacaaaacccaaaacctattggtttaaaacaatacccattttattttctttcatagtttctatgggtcaggaatttggatatggcttgggtaagcagttctggcttctcatggagttggaggcaagtggtggctggaacagaaatggggcagccaggggtggtggccaggcatcagctacatctcctccatgtagtctcaggaactctccatgtaatctctctgtgtgggttgggcttcctcacaacatggtggcctcagggcagtcactgcttacatggcagctagcttccctcagagtgagtatcccaagagatcacagtcaaagtgcatagcatttatataatctaatcttggaagtcacaaaatgtcattcttgtgatactctcattggtgaagaagtcataaaatcctgctcaggttcaaaaagagggtgtatagaacccaacactcaataggaagattgtcagagttacattgtaagaagagcatgtagttgggagatatcattgtggccattttgggaaagatgcaacatgtcacaatgtcatgttctccatcgtctccccgttccaccttgtactggtttccaagggtagtcgtttaaaagtaccacaaaaactgggtggcttggaacaacagaaatttattgtttcacagttctggaggccagaagttcaaaatgaagtgttggcagaaacatgctgcctctaaagggactgggaaaggatctgttccaggcttccctcctatcttctggttgttccttgccttctggctgcgtaactctagtcttcatttggtgttctccctgcatgcatggctttgtgtccaaatttccttttttcatgaggccatcagtcatactggattagggacccactctactactgcaggatgacctcaccttcccaaattacatctgcaacaaccctatttccaaagaaggccacattctgaggtactgggggttataacttcaacatgaattttttggaggaaacaattcaactcctaacacatctctacccaacctctgtaggttccctcaatccaccaaaattttttggctccactggattatctagcagttaggaaaccaagatcattaaatgaattcaccgcaactacagtgagactgactaccttagcttacctctgtgaaaggagttaagccaaaggaatctgtggaattttggagagtttgggagcatttgggggcaggaggcaaatgttcttcctttaaatcacaacacttagttctcttccatttataagactcacccctccatcccaacccctgcaccacaggacaaggaagtgttcttggtcttcaactttcatccctgatggtgaaagcagttgctcctgacctatttgcccaccagcttctcctctggagcctgaggcttctgatgcctgcctggctggttctcagtaagaaggtcaagttcaaccagaggggagatgctgatgcctttcagtacttaaatatgagttcagaccctggggcctggacataagatttggggtcccctggatataagatttctgaaaacactcagactgtggagacccctgctgagggagaagccccaaactgtggcttcaggggaatgcaccaaggctctcattgaggccaccttctccaacaagctcccctcctgcttccccatggctggcatggctgaggaaaaaggacactgagcacagcccgtgcatgagcggcttgccatgcaacaggataaaacccataatgccactcagcaagccttggttgtaaatctagtttgattacatttgtaatcaaatgatggccatttgttctgtttctggtttgtgaaccaactgaagacataagcagggcctcagctaacccacaaatagcacatgtgtgcaaactggaaaaatgaacccttcttctgggaggacgccagcccaggccaggtcacccggcttggccagcagaacacagagtagattttggtcccgtttgttccccagtggggtatctatccttgtgcagggcacaagcctacatggtggctctggtcatatcattagaaaatagacagaaatgggctgcacaccagaatgaatgaattgaattgaaagggaggagtgatggtggaaaaaaaaacaagtcaattcatttagactggtagaaccagaaccactgtgtagtacatccaaacggttaaaattccctggaagatgttacataatcctatcatggtgtttatttatggaaatctattttaaaaattttatgtaatactgcacagtctgtttgcatgatgccttgtacgtagtagcaactcagtaaatactttttgaatgaactagtatagtattttaattagctagtcttcatgtactggtacaaaagaacagtgtcatcttacagctgaagtcatagaggggaaatatcccactcaagatcatataacattccaggtactcaggatgaatggtttgaggactggtctgaattcttcaaaggtttcagctgtattaacattctccatctaataaactttatcttgtcattgca

SEQ ID NO: 74437 - protein, 249 aa, Artificial Sequence
  derived and/or modified sequence
MGELMAFLLPLIIVLMVKHSDSRTHSLRYFRLGVSDPIHGVPEFISVGYVDSHPITTYDSVTRQKEPRAPWMAENLAPDHWERYTQLLRGWQQMFKVELKRLQRHYNHSGSHTYQRMIGCELLEDGSTTGFLQYAYDGQDFLIFNKDTLSWLAVDNVAHTIKQAWEANQHELLYQKNWLEEECIAWLKRFLEYGKDTLQRTESETIPLVMKAVSGSIVLVIVLAGVGVLVWRRRPREQNGAIYLPTPDR

SEQ ID NO: 74438 - DNA, 750 bp, Artificial Sequence
  derived and/or modified sequence
atgggggagctgatggcattcctgttgcctcttattatagttttaatggttaaacatagtgattcaagaacgcacagcctcagatattttagactgggggtctctgacccaatccacggagtgcccgagttcataagcgtgggttacgtcgacagccatccaattaccacgtatgactctgtcacacggcagaaagagccccgcgcgccgtggatggcagagaatctcgccccagatcactgggagcgatacacacagttgctcagaggttggcagcagatgttcaaggtcgagttgaaacgcctccagcgtcattacaaccatagcgggtcccacacctaccaacggatgatcggctgcgagctcctcgaggacgggagcactactggttttctgcaatacgcctatgacgggcaggatttcctaattttcaacaaagatacactcagctggctagccgtcgacaacgtggctcacaccataaaacaagcctgggaggcgaaccagcacgagctattgtatcagaaaaattggctcgaagaagaatgcatcgcgtggttgaaaaggttccttgaatacggcaaagatacactccagagaacagagagtgagacgatccctcttgtgatgaaagcagtaagcggatctatcgtgttggtgatcgtgctagcaggggtcggagtgctcgtgtggcgacggcggcctagagagcagaacggcgcaatatacctcccaacccctgaccggtag

SEQ ID NO: 74439 - DNA, 750 bp, Artificial Sequence
  derived and/or modified sequence
atgggagagctgatggccttcctgctgcccctcatcatcgtgctgatggtgaagcacagcgacagcaggacccacagcctgcgctacttccggctgggcgtgtctgaccccatccatggagtgcctgagttcatctctgtgggctacgtggacagccaccccatcaccacctatgacagcgtgacccggcagaaggagccccgggccccctggatggccgagaacctggccccagaccactgggagcgctacacccagctgctgcggggctggcagcagatgttcaaggtggagctgaagaggctgcagaggcactacaaccacagcggcagccacacctaccagaggatgattggctgtgagctgctggaggatggcagcaccaccggcttcctgcagtatgcctatgatggccaggacttcctgatcttcaacaaggacaccctgtcctggctggccgtggacaacgtggcccacaccatcaagcaggcctgggaggccaaccagcacgagctgctgtaccagaagaactggctggaggaggagtgcatcgcctggctgaagcgcttcctggagtatggcaaggacaccctgcagaggacagaaagtgagaccatccccctggtgatgaaggctgtgtctggcagcatcgtgctggtgattgtgctggccggcgtgggcgtgctggtgtggaggagaagaccccgggagcagaatggagccatctacctgcccaccccagacagatag

SEQ ID NO: 74440 - DNA, 2043 bp, Artificial Sequence
  derived and/or modified sequence
ggactatgggggaactgatggcgttcctgttacctctcatcattgtgttaatggtgaagcacagcgattcccggacgcactctctgagatattttcgcctgggcgtttcggatcccatccatggggtccctgaatttatttcggttgggtacgtggactcgcaccctatcaccacatatgacagtgtcactcggcagaaggagccacgggccccatggatggcagagaacctcgcgcctgatcactgggagaggtacactcagctgctgaggggctggcagcagatgttcaaggtggaactgaagcgcctacagaggcactacaatcactcagggtctcacacttaccagagaatgattggctgtgagctgctggaggatggaagcaccacaggatttctgcagtatgcatatgacgggcaggatttcctgatcttcaataaagacaccctctcctggctggctgtagataatgtggctcacaccatcaagcaggcatgggaggccaatcagcatgagttgctgtatcaaaagaattggctggaagaagaatgtattgcctggctaaagagattcctggagtatgggaaagacaccctacaaagaacagaatcagaaactatccctcttgtgatgaaagctgtctctgggtccattgtccttgtcattgtgctggctggagttggtgttctagtctggagaagaaggccccgagagcaaaatggagccatctaccttccaacaccagatcgatgattgcagatccctcttttccagttctccttcctctaggagccatgttatcctctgtcccccatagagtcaagcctagtgcttgaaggtcctgacgacacccacaacatacatgagagtaatgggattgagcatttatggcagcaacagaggagccacaaaatgttctttgttctttggctccaaaaagactgtcagctttcagtctcttttgatggactgttttatcagagttgactttaaatacagcttgtctcatgacacaacgcttccctacattctatttgtcaatgatgatttgcaactagttggagattctcagagcaggaaggaatcttttcaaccagagcaggaactgtcttctgcaatgccttggacttgagcctccagcctccacttgaacaccatgtgaagggaacctcagtacttcataaaatggcctttctcattcatctttcatgggaacatttattgtacaagcgctttgaatatcatgggcaccatgactgtgaccctacaggtaggattggatcactccatgagagtagccggcaggtttctacaatggcctgggaatggactgattatttttatacattttctggcctgagagaaagccaaagtcccctgctgttcacagcaaccctgcctgggagcttggaatcttggtaatctgcccggttggatctatggaggtagtctcaccctttttgtcttttgtgggaaattaagagaaataattatcagacatatcatcacctccagtggaactacagagacctggacccagctgcactattttaatgtaaaaataacagtatggccaggtgcagtggctcacgcctgtaatcccatcactttgagcagccaaggcgggcggatcacgaggtcaggagattaagaccatcctggccaatatggtgaaaccctgtctctactaaaatacaaaaaattagctgggcatggtgttgcgtgcctgtagtcccagctacttgggaggctgagacaggggaattgcttgaacccgggaggcagagattgcagtgagccgagatcacgccactgcactccagcctggcgacagagtgagactctatctcaaaataataataataataataataataataataataataataacagtatatttggtgtcaggagagggctcaattctcatttctgcctttcctgtgctggctcatggtagctgggcatgacttgccttcctacataggttgtcttcatacatatgcactgggaatcaataaaagcccatggtgagaatgaa

SEQ ID NO: 74441 - DNA, 750 bp, Artificial Sequence
  derived and/or modified sequence
atgggcgagctgatggccttcctgctgcccctgatcatcgtgctgatggtaaaacacagcgattctcgaactcactcgctgagatacttccggttaggggtgtcagatccaattcacggagtacctgaatttatctcagtaggatatgttgactcacaccctattactacgtatgattccgtaactcgccagaaggagccgagagctccctggatggcagagaatctggcacctgaccactgggaacgttacacacagcttctgcggggctggcagcagatgttcaaggtcgagctgaaacgactccagcgccactacaaccactctggcagtcacacctaccagcggatgattggctgcgaactgctggaggacggatcaactaccggatttttacagtatgcctacgacgggcaggattttcttatcttcaataaagacacattgtcttggctggcggtagataacgtggcccatacgattaagcaggcttgggaagcaaaccagcacgaactgctctaccaaaaaaattggcttgaggaggagtgcattgcatggctcaagaggtttcttgagtatggaaaggatacactccagcggacagaatctgaaaccatccctttggtgatgaaggctgtgagcggatcaatcgtcttagtgattgtgctcgctggcgtgggggtgctagtgtggcgcaggaggccccgggagcaaaacggcgccatatatctgcctacccctgaccgctag

SEQ ID NO: 74442 - DNA, 750 bp, Artificial Sequence
  derived and/or modified sequence
atgggggaactgatggctttccttcttccacttatcatcgtccttatggtcaagcatagcgactcccgcactcacagtctccgatacttccgcctgggtgtgagcgatccgatccatggcgtgcccgaattcatcagcgtagggtacgtggactcccatccaatcaccacgtacgacagcgtgacccgacagaaggaacctagggccccttggatggcggaaaatctcgctccggatcactgggagaggtacactcagcttctgcgaggctggcaacaaatgttcaaggttgagctcaaacggctgcaaaggcattataatcacagcggctcacacacctatcagcgtatgataggctgcgaactgcttgaagacggctccaccactgggttcctacagtatgcctacgatggacaggacttccttatcttcaacaaagacacactgtcgtggctcgccgttgacaatgttgctcatacaataaagcaggcatgggaggctaaccagcatgaattgctttatcagaaaaattggctggaggaagaatgcatcgcctggttgaaacggttcctggaatacggcaaggacacactacagcggacggaatccgaaacaatcccactggttatgaaagccgtatcgggtagcatcgtgctcgttatcgtgctagccggagtgggagtgctggtgtggagacgaaggcccagggagcagaacggcgcaatctacctgccgaccccagatcgctag

SEQ ID NO: 74443 - DNA, 750 bp, Artificial Sequence
  derived and/or modified sequence
atgggcgagctgatggccttcctgctgcccctgatcatcgtgctgatggtgaagcacagcgacagcagaacccacagcctgagatacttcagactgggcgtgagcgaccccatccacggcgtgcccgagttcatcagcgtgggctacgtggacagccaccccatcaccacctacgacagcgtgaccagacagaaggagcccagagccccctggatggccgagaacctggcccccgaccactgggagagatacacccagctgctgagaggctggcagcagatgttcaaggtggagctgaagagactgcagagacactacaaccacagcggcagccacacctaccagagaatgatcggctgcgagctgctggaggacggcagcaccaccggcttcctgcagtacgcctacgacggccaggacttcctgatcttcaacaaggacaccctgagctggctggccgtggacaacgtggcccacaccatcaagcaggcctgggaggccaaccagcacgagctgctgtaccagaagaactggctggaggaggagtgcatcgcctggctgaagagattcctggagtacggcaaggacaccctgcagagaaccgagagcgagaccatccccctggtgatgaaggccgtgagcggcagcatcgtgctggtgatcgtgctggccggcgtgggcgtgctggtgtggagaagaagacccagagagcagaacggcgccatctacctgcccacccccgacagatag

SEQ ID NO: 74444 - DNA, 7584 bp, Artificial Sequence
  derived and/or modified sequence
agaatcttctgtaggcctttctcttgccttcttttattcacaactgatgacactgcatatcttcccctgttcttattgggagaaggccttgtgtgtcaccaagaggttctcagaagggacctgtcagtttttggttaaaagaacccggaaagagaaggactatgggggaactgatggcgttcctgttacctctcatcattgtgttaatggtgaagcacagcgattcccggacgcactctctgagatattttcgcctgggcgtttcggatcccatccatggggtccctgaatttatttcggttgggtacgtggactcgcaccctatcaccacatatgacagtgtcactcggcagaaggagccacgggccccatggatggcagagaacctcgcgcctgatcactgggagaggtacactcagctgctgaggggctggcagcagatgttcaaggtggaactgaagcgcctacagaggcactacaatcactcagggtctcacacttaccagagaatgattggctgtgagctgctggaggatggaagcaccacaggatttctgcagtatgcatatgacgggcaggatttcctgatcttcaataaagacaccctctcctggctggctgtagataatgtggctcacaccatcaagcaggcatgggaggccaatcagcatgagttgctgtatcaaaagaattggctggaagaagaatgtattgcctggctaaagagattcctggagtatgggaaagacaccctacaaagaacagaatcagaaactatccctcttgtgatgaaagctgtctctgggtccattgtccttgtcattgtgctggctggagttggtgttctagtctggagaagaaggccccgagagcaaaatggagccatctaccttccaacaccagatcgatgattgcagatccctcttttccagttctccttcctctaggagccatgttatcctctgtcccccatagagtcaagcctagtgcttgaaggtcctgacgacacccacaacatacatgagagtaatgggattgagcatttatggcagcaacagaggagccacaaaatgttctttgttctttggctccaaaaagactgtcagctttcagtctcttttgatggactgttttatcagagttgactttaaatacagcttgtctcatgacacaacgcttccctacattctatttgtcaatgatgatttgcaactagttggagattctcagagcaggaaggaatcttttcaaccagagcaggaactgtcttctgcaatgccttggacttgagcctccagcctccacttgaacaccatgtgaagggaacctcagtacttcataaaatggcctttctcattcatctttcatgggaacatttattgtacaagcgctttgaatatcatgggcaccatgactgtgaccctacaggtaggattggatcactccatgagagtagccggcaggtttctacaatggcctgggaatggactgattatttttatacattttctggcctgagagaaagccaaagtcccctgctgttcacagcaaccctgcctgggagcttggaatcttggtaatctgcccggttggatctatggaggtagtctcaccctttttgtcttttgtgggaaattaagagaaataattatcagacatatcatcacctccagtggaactacagagacctggacccagctgcactattttaatgtaaaaataacagtatggccaggtgcagtggctcacgcctgtaatcccatcactttgagcagccaaggcgggcggatcacgaggtcaggagattaagaccatcctggccaatatggtgaaaccctgtctctactaaaatacaaaaaattagctgggcatggtgttgcgtgcctgtagtcccagctacttgggaggctgagacaggggaattgcttgaacccgggaggcagagattgcagtgagccgagatcacgccactgcactccagcctggcgacagagtgagactctatctcaaaataataataataataataataataataataataataataacagtatatttggtgtcaggagagggctcaattctcatttctgcctttcctgtgctggctcatggtagctgggcatgacttgccttcctacataggttgtcttcatacatatgcactgggaatcaataaaagcccatggtgagaatgaacatccccttaatgttccttactatccccaacccctgaggcctcacctactgccctgccatgtggagctacttgccctggggctgccagtcacacattcctcggtcctacttctctgaccccgtttgactctgcacctgagccctaatgcttacttcagtgacctgaactttgacaagtggcttttgtcctgcacctcaggtttgacctctgctctcccttgaccttgactgtgacatttgacctttggctttaatcattacagcctcagataaaggtaccttcagcccgggcacagtggctcacgcctgtaatcctagcactttgggaggctgaggcaggcggattccctgagctcaggagttcaagaccagcctgggcaacacggtgaaaccctgtctctactaaaatacaaataattagctgggcatggtggcatgtgcctatagtcccagctacttgggaggctaaggcaggagaatcacttgaatctataaggcagaggtggcagtgagccgagatcacaccactgcactccagcctgggcaacggagcaagactctgtctccaaaaaaaaaaagaaagataccctcagtgtgccaggcctctaagagctcacctgccaggcttcctccttgctccactgtcccatgtaattccatatatgaagctaccactgtacatctctcttttccggtgcctgttgagttgcatagaagcacagttgtgtttattttgtttttagggttgccatgggcaatttccgtgccacttttaagcagtgttgcactgtgaagagaatgtaggcaagtttatttctggaatggtttcttcttacaatcagaatagttaggatgtaatatatttttgggtgggcatttaaagtgaaaaggtacatatttacatagacacaggtgataatgtatctatgtaaatgccttttgattctgcaactgcaggatactctcatcaaagacacagataaaaagcctctgtgtttccaaggccttgccctacacctaacacataatatgtccaaatggatgaagaggaggcaaggacaaggatgtgatgacaaaacattctgttatgcacttgtagcatttatgtttcttcctgggggattttataatactaaaagaatcataatataaagagatgattaaaaaaaaaatactgccgggcacggtggctcatgcctgtaatcccagcattttgggaggccgaggtgggcagatcacctgaggtcgggagttcgagaccagcctgaccaacatggagaaaccctgtctctaccaaacatacaaaattagccggggatggtggcgcatgcctataatcccagctactcgggagtctgaggcagaagaaccgcttgaacccgggaggcagaggttgtggtgagccgagatcgcgccatcgcactctagcctgggcaacaagagtgaaactccatctcaaaaaaataaaaataaaataagtaagtaatacctaaaattctgcaaccttcattttactatagatggttgaagattatattacttcttaattgttttagccttgttattgcttcattacttcatggttgttgagtacagatgctcagtaatcataacctatgaaatatttgacaccatgatctaaacattaaaaacaaataactgtgctattgccacagctatgttttggctttgaattttctttactgaatattttggatcaagaacactagatgagaaacctgttcaactctgttcttttttttttttttaactccactgtatttattacctgtttttgttttttttgtttgtttgtttttgatgtgcatatagaccaagatgtggtaaatttaaatggcagatgtttttgatgtggtacatttaagggagagaaagcagtttaaagagcagggtgaaaaatccaacaagactccatcgagagtttctgagctctcccatcaggggccagtcctcctttcctctctcctcttactcccatgatttccaagttgtgatcctttccttatttctgaggaatgacttggtttctcctcttctttttttggcctgagagaagatgtttttgcacttgtagctatgaggaacagattgtccactagggaggccagctgatcattttctgccagagtcacacagagcagtcacaccttattttgaaaaccactgtctggggtctttgtcctcacatatgcaggtctagtgtccccacaaagtgatcagatggatatataaagtggagtgccaatgtattaatttactgtgagaaacacaattgctaagtgggtcagatatctgtctcagctggtcagtacaccttccagcaggaaaatctacataagaacaactaaatcacaatctgtagagtgcttgatgaccccagaattggtgcaaggggacacattcttgcttgttagcacctgctctctggagtttgctattttctcacacacagtgtattagttcacagaatgttctccaaggaggacagggggctttgcccatagccatgtgctgtgggcagcagagctaggaagaagcacaggcatctcccagcccaggtgtttcccacttaactgcattgcccttttcatcttttttttttccccaatagcttcaggacattcagtacattgtgctttttagaggttgatgattccactgcctgagctgccttcacctctctttctttggaaattgccatctttgagcattgtatgtctctgtaacatctctgcatctccttttcactctggcctccctttctccattgtccttctagcttctggttgccccaaaccccacagactgtgtaacaaaacccaaaacctattggtttaaaacaatacccattttattttctttcatagtttctatgggtcaggaatttggatatggcttgggtaagcagttctggcttctcatggagttggaggcaagtggtggctggaacagaaatggggcagccaggggtggtggccaggcatcagctacatctcctccatgtagtctcaggaactctccatgtaatctctctgtgtgggttgggcttcctcacaacatggtggcctcagggcagtcactgcttacatggcagctagcttccctcagagtgagtatcccaagagatcacagtcaaagtgcatagcatttatataatctaatcttggaagtcacaaaatgtcattcttgtgatactctcattggtgaagaagtcataaaatcctgctcaggttcaaaaagagggtgtatagaacccaacactcaataggaagattgtcagagttacattgtaagaagagcatgtagttgggagatatcattgtggccattttgggaaagatgcaacatgtcacaatgtcatgttctccatcgtctccccgttccaccttgtactggtttccaagggtagtcgtttaaaagtaccacaaaaactgggtggcttggaacaacagaaatttattgtttcacagttctggaggccagaagttcaaaatgaagtgttggcagaaacatgctgcctctaaagggactgggaaaggatctgttccaggcttccctcctatcttctggttgttccttgccttctggctgcgtaactctagtcttcatttggtgttctccctgcatgcatggctttgtgtccaaatttccttttttcatgaggccatcagtcatactggattagggacccactctactactgcaggatgacctcaccttcccaaattacatctgcaacaaccctatttccaaagaaggccacattctgaggtactgggggttataacttcaacatgaattttttggaggaaacaattcaactcctaacacatctctacccaacctctgtaggttccctcaatccaccaaaattttttggctccactggattatctagcagttaggaaaccaagatcattaaatgaattcaccgcaactacagtgagactgactaccttagcttacctctgtgaaaggagttaagccaaaggaatctgtggaattttggagagtttgggagcatttgggggcaggaggcaaatgttcttcctttaaatcacaacacttagttctcttccatttataagactcacccctccatcccaacccctgcaccacaggacaaggaagtgttcttggtcttcaactttcatccctgatggtgaaagcagttgctcctgacctatttgcccaccagcttctcctctggagcctgaggcttctgatgcctgcctggctggttctcagtaagaaggtcaagttcaaccagaggggagatgctgatgcctttcagtacttaaatatgagttcagaccctggggcctggacataagatttggggtcccctggatataagatttctgaaaacactcagactgtggagacccctgctgagggagaagccccaaactgtggcttcaggggaatgcaccaaggctctcattgaggccaccttctccaacaagctcccctcctgcttccccatggctggcatggctgaggaaaaaggacactgagcacagcccgtgcatgagcggcttgccatgcaacaggataaaacccataatgccactcagcaagccttggttgtaaatctagtttgattacatttgtaatcaaatgatggccatttgttctgtttctggtttgtgaaccaactgaagacataagcagggcctcagctaacccacaaatagcacatgtgtgcaaactggaaaaatgaacccttcttctgggaggacgccagcccaggccaggtcacccggcttggccagcagaacacagagtagattttggtcccgtttgttccccagtggggtatctatccttgtgcagggcacaagcctacatggtggctctggtcatatcattagaaaatagacagaaatgggctgcacaccagaatgaatgaattgaattgaaagggaggagtgatggtggaaaaaaaaacaagtcaattcatttagactggtagaaccagaaccactgtgtagtacatccaaacggttaaaattccctggaagatgttacataatcctatcatggtgtttatttatggaaatctattttaaaaattttatgtaatactgcacagtctgtttgcatgatgccttgtacgtagtagcaactcagtaaatactttttgaatgaactagtatagtattttaattagctagtcttcatgtactggtacaaaagaacagtgtcatcttacagctgaagtcatagaggggaaatatcccactcaagatcatataacattccaggtactcaggatgaatggtttgaggactggtctgaattcttcaaaggtttcagctgtattaacattctccatctaataaactttatcttgtcattgca

SEQ ID NO: 74445 - protein, 214 aa, Artificial Sequence
  derived and/or modified sequence
MGELMAFLLPLIIVLMVKHSDSRTHSLRYFRLGVSDPIHGVPEFISVGYVDSHPITTYDSVTRQKEPRAPWMAENLAPDHWERYTQLLRGWQQMFKVELKRLQRHYNHSGSHTYQRMIGCELLEDGSTTGFLQYAYDGQDFLIFNKDTLSWLAVDNVAHTIKQAWEANQHELLYQKNWLEEECIAWLKRFLEYGKDTLQRTEQNGAIYLPTPDR

SEQ ID NO: 74446 - DNA, 645 bp, Artificial Sequence
  derived and/or modified sequence
atgggggaacttatggcatttctgctccctctgattatagtgctgatggtcaagcattccgattcccgcacccatagcctccgctacttccgcttaggcgtaagcgacccgattcacggagtcccggaattcatttccgtaggttacgtcgatagtcaccccatcacaacgtacgactccgttacaaggcagaaggagcctcgcgccccgtggatggctgagaacctagcaccagaccactgggaacgctacactcagttattacgaggctggcagcagatgttcaaggtcgagttgaaaagattacagcgacattataatcactccggctctcatacctatcagcggatgatcgggtgcgagctcctcgaggatggctcaactaccgggttcctacaatatgcctatgatgggcaagactttctgatttttaataaggacacactctcatggctggcggtggacaacgtggctcataccattaagcaagcctgggaggccaatcaacatgagctcctgtaccagaagaactggctggaggaagagtgtattgcctggttaaaaaggttccttgagtacggcaaagatacactgcagaggactgagcagaatggagcaatctacctcccaaccccggatagatag

SEQ ID NO: 74447 - DNA, 645 bp, Artificial Sequence
  derived and/or modified sequence
atgggagagctgatggccttcctgctgcccctcatcatcgtgctgatggtgaagcacagcgacagcaggacccacagcctgcgctacttccggctgggcgtgtctgaccccatccatggagtgcctgagttcatctctgtgggctacgtggacagccaccccatcaccacctatgacagcgtgacccggcagaaggagccccgggccccctggatggccgagaacctggccccagaccactgggagcgctacacccagctgctgcggggctggcagcagatgttcaaggtggagctgaagaggctgcagaggcactacaaccacagcggcagccacacctaccagaggatgattggctgtgagctgctggaggatggcagcaccaccggcttcctgcagtatgcctatgatggccaggacttcctgatcttcaacaaggacaccctgtcctggctggccgtggacaacgtggcccacaccatcaagcaggcctgggaggccaaccagcacgagctgctgtaccagaagaactggctggaggaggagtgcatcgcctggctgaagcgcttcctggagtatggcaaggacaccctgcagaggacagagcagaatggagccatctacctgcccaccccagacagatag

SEQ ID NO: 74448 - DNA, 1046 bp, Artificial Sequence
  derived and/or modified sequence
ggccttgtgtgtcaccaagaggttctcagaagggacctgtcagtttttggttaaaagaacccggaaagagaaggactatgggggaactgatggcgttcctgttacctctcatcattgtgttaatggtgaagcacagcgattcccggacgcactctctgagatattttcgcctgggcgtttcggatcccatccatggggtccctgaatttatttcggttgggtacgtggactcgcaccctatcaccacatatgacagtgtcactcggcagaaggagccacgggccccatggatggcagagaacctcgcgcctgatcactgggagaggtacactcagctgctgaggggctggcagcagatgttcaaggtggaactgaagcgcctacagaggcactacaatcactcagggtctcacacttaccagagaatgattggctgtgagctgctggaggatggaagcaccacaggatttctgcagtatgcatatgacgggcaggatttcctgatcttcaataaagacaccctctcctggctggctgtagataatgtggctcacaccatcaagcaggcatgggaggccaatcagcatgagttgctgtatcaaaagaattggctggaagaagaatgtattgcctggctaaagagattcctggagtatgggaaagacaccctacaaagaacagagcaaaatggagccatctaccttccaacaccagatcgatgattgcagatccctcttttccagttctccttcctctaggagccatgttatcctctgtcccccatagagtcaagcctagtgcttgaaggtcctgacgacacccacaacatacatgagagtaatgggattgagcatttatggcagcaacagaggagccacaaaatgttctttgttctttggctccaaaaagactgtcagctttcagtctcttttgatggactgttttatcagagttgactttaaatacagcttgtctcatgacacaacgcttccctacattctatttgtcaatgatgatttgcaactagttggagattctcagagcag

SEQ ID NO: 74449 - DNA, 645 bp, Artificial Sequence
  derived and/or modified sequence
atgggcgagctgatggccttcctgctgcccctgatcatcgtgctgatggtgaaacattccgacagtaggacgcacagtctgaggtacttccggctgggcgtgtccgaccctatccacggggtgccagagtttatcagtgtgggttatgtcgactctcatcctattaccacgtacgattcagtgacccggcagaaagaaccccgagctccttggatggctgaaaatctggcccccgaccactgggaacgttatactcagctgctcagaggatggcagcaaatgttcaaagttgagctgaagcgactgcagcgacactacaaccattccgggtcccatacctatcaacgtatgataggctgcgagctgttagaggacggaagcaccacaggatttctgcagtacgcttacgacggacaggatttcctgatctttaacaaggatacactgtcgtggctggccgtcgacaacgtggcccacacaatcaaacaggcgtgggaagcaaaccagcacgaattgctatatcagaaaaattggctggaagaggagtgtattgcatggctgaaacgattcctggaatatgggaaggatactctacagcggacagagcaaaatggggcaatctatctgcctacgcccgacaggtag

SEQ ID NO: 74450 - DNA, 645 bp, Artificial Sequence
  derived and/or modified sequence
atgggggagctcatggcctttcttctgcctttaattattgtgctgatggttaagcactctgactcacgtacacactcccttcgctacttccgccttggagtctcggatcccattcatggggtgccagaatttataagtgtcgggtacgtcgactctcatcctattacaacttacgactctgttacgagacagaaggaaccaagggcaccgtggatggcagagaatctggcgccagatcattgggagcgctatacgcaacttctgcgagggtggcagcagatgtttaaagtggaattaaagcgcttgcagagacattataaccacagcggcagccacacttatcagcggatgattggctgtgaacttctagaggacggaagcaccaccggatttctgcagtacgcatacgatggccaggattttctaatcttcaacaaggacacactttcatggctggctgtggacaacgtcgctcacacgattaagcaggcatgggaggctaatcaacatgagctcctgtaccaaaagaattggctggaggaggagtgcattgcgtggttgaagaggtttctcgagtatggtaaagataccctgcagaggaccgagcagaacggggctatctacctgcccacccctgacaggtag

SEQ ID NO: 74451 - DNA, 645 bp, Artificial Sequence
  derived and/or modified sequence
atgggcgagctgatggccttcctgctgcccctgatcatcgtgctgatggtgaagcacagcgacagcagaacccacagcctgagatacttcagactgggcgtgagcgaccccatccacggcgtgcccgagttcatcagcgtgggctacgtggacagccaccccatcaccacctacgacagcgtgaccagacagaaggagcccagagccccctggatggccgagaacctggcccccgaccactgggagagatacacccagctgctgagaggctggcagcagatgttcaaggtggagctgaagagactgcagagacactacaaccacagcggcagccacacctaccagagaatgatcggctgcgagctgctggaggacggcagcaccaccggcttcctgcagtacgcctacgacggccaggacttcctgatcttcaacaaggacaccctgagctggctggccgtggacaacgtggcccacaccatcaagcaggcctgggaggccaaccagcacgagctgctgtaccagaagaactggctggaggaggagtgcatcgcctggctgaagagattcctggagtacggcaaggacaccctgcagagaaccgagcagaacggcgccatctacctgcccacccccgacagatag

SEQ ID NO: 74452 - DNA, 7479 bp, Artificial Sequence
  derived and/or modified sequence
agaatcttctgtaggcctttctcttgccttcttttattcacaactgatgacactgcatatcttcccctgttcttattgggagaaggccttgtgtgtcaccaagaggttctcagaagggacctgtcagtttttggttaaaagaacccggaaagagaaggactatgggggaactgatggcgttcctgttacctctcatcattgtgttaatggtgaagcacagcgattcccggacgcactctctgagatattttcgcctgggcgtttcggatcccatccatggggtccctgaatttatttcggttgggtacgtggactcgcaccctatcaccacatatgacagtgtcactcggcagaaggagccacgggccccatggatggcagagaacctcgcgcctgatcactgggagaggtacactcagctgctgaggggctggcagcagatgttcaaggtggaactgaagcgcctacagaggcactacaatcactcagggtctcacacttaccagagaatgattggctgtgagctgctggaggatggaagcaccacaggatttctgcagtatgcatatgacgggcaggatttcctgatcttcaataaagacaccctctcctggctggctgtagataatgtggctcacaccatcaagcaggcatgggaggccaatcagcatgagttgctgtatcaaaagaattggctggaagaagaatgtattgcctggctaaagagattcctggagtatgggaaagacaccctacaaagaacagagcaaaatggagccatctaccttccaacaccagatcgatgattgcagatccctcttttccagttctccttcctctaggagccatgttatcctctgtcccccatagagtcaagcctagtgcttgaaggtcctgacgacacccacaacatacatgagagtaatgggattgagcatttatggcagcaacagaggagccacaaaatgttctttgttctttggctccaaaaagactgtcagctttcagtctcttttgatggactgttttatcagagttgactttaaatacagcttgtctcatgacacaacgcttccctacattctatttgtcaatgatgatttgcaactagttggagattctcagagcaggaaggaatcttttcaaccagagcaggaactgtcttctgcaatgccttggacttgagcctccagcctccacttgaacaccatgtgaagggaacctcagtacttcataaaatggcctttctcattcatctttcatgggaacatttattgtacaagcgctttgaatatcatgggcaccatgactgtgaccctacaggtaggattggatcactccatgagagtagccggcaggtttctacaatggcctgggaatggactgattatttttatacattttctggcctgagagaaagccaaagtcccctgctgttcacagcaaccctgcctgggagcttggaatcttggtaatctgcccggttggatctatggaggtagtctcaccctttttgtcttttgtgggaaattaagagaaataattatcagacatatcatcacctccagtggaactacagagacctggacccagctgcactattttaatgtaaaaataacagtatggccaggtgcagtggctcacgcctgtaatcccatcactttgagcagccaaggcgggcggatcacgaggtcaggagattaagaccatcctggccaatatggtgaaaccctgtctctactaaaatacaaaaaattagctgggcatggtgttgcgtgcctgtagtcccagctacttgggaggctgagacaggggaattgcttgaacccgggaggcagagattgcagtgagccgagatcacgccactgcactccagcctggcgacagagtgagactctatctcaaaataataataataataataataataataataataataataacagtatatttggtgtcaggagagggctcaattctcatttctgcctttcctgtgctggctcatggtagctgggcatgacttgccttcctacataggttgtcttcatacatatgcactgggaatcaataaaagcccatggtgagaatgaacatccccttaatgttccttactatccccaacccctgaggcctcacctactgccctgccatgtggagctacttgccctggggctgccagtcacacattcctcggtcctacttctctgaccccgtttgactctgcacctgagccctaatgcttacttcagtgacctgaactttgacaagtggcttttgtcctgcacctcaggtttgacctctgctctcccttgaccttgactgtgacatttgacctttggctttaatcattacagcctcagataaaggtaccttcagcccgggcacagtggctcacgcctgtaatcctagcactttgggaggctgaggcaggcggattccctgagctcaggagttcaagaccagcctgggcaacacggtgaaaccctgtctctactaaaatacaaataattagctgggcatggtggcatgtgcctatagtcccagctacttgggaggctaaggcaggagaatcacttgaatctataaggcagaggtggcagtgagccgagatcacaccactgcactccagcctgggcaacggagcaagactctgtctccaaaaaaaaaaagaaagataccctcagtgtgccaggcctctaagagctcacctgccaggcttcctccttgctccactgtcccatgtaattccatatatgaagctaccactgtacatctctcttttccggtgcctgttgagttgcatagaagcacagttgtgtttattttgtttttagggttgccatgggcaatttccgtgccacttttaagcagtgttgcactgtgaagagaatgtaggcaagtttatttctggaatggtttcttcttacaatcagaatagttaggatgtaatatatttttgggtgggcatttaaagtgaaaaggtacatatttacatagacacaggtgataatgtatctatgtaaatgccttttgattctgcaactgcaggatactctcatcaaagacacagataaaaagcctctgtgtttccaaggccttgccctacacctaacacataatatgtccaaatggatgaagaggaggcaaggacaaggatgtgatgacaaaacattctgttatgcacttgtagcatttatgtttcttcctgggggattttataatactaaaagaatcataatataaagagatgattaaaaaaaaaatactgccgggcacggtggctcatgcctgtaatcccagcattttgggaggccgaggtgggcagatcacctgaggtcgggagttcgagaccagcctgaccaacatggagaaaccctgtctctaccaaacatacaaaattagccggggatggtggcgcatgcctataatcccagctactcgggagtctgaggcagaagaaccgcttgaacccgggaggcagaggttgtggtgagccgagatcgcgccatcgcactctagcctgggcaacaagagtgaaactccatctcaaaaaaataaaaataaaataagtaagtaatacctaaaattctgcaaccttcattttactatagatggttgaagattatattacttcttaattgttttagccttgttattgcttcattacttcatggttgttgagtacagatgctcagtaatcataacctatgaaatatttgacaccatgatctaaacattaaaaacaaataactgtgctattgccacagctatgttttggctttgaattttctttactgaatattttggatcaagaacactagatgagaaacctgttcaactctgttcttttttttttttttaactccactgtatttattacctgtttttgttttttttgtttgtttgtttttgatgtgcatatagaccaagatgtggtaaatttaaatggcagatgtttttgatgtggtacatttaagggagagaaagcagtttaaagagcagggtgaaaaatccaacaagactccatcgagagtttctgagctctcccatcaggggccagtcctcctttcctctctcctcttactcccatgatttccaagttgtgatcctttccttatttctgaggaatgacttggtttctcctcttctttttttggcctgagagaagatgtttttgcacttgtagctatgaggaacagattgtccactagggaggccagctgatcattttctgccagagtcacacagagcagtcacaccttattttgaaaaccactgtctggggtctttgtcctcacatatgcaggtctagtgtccccacaaagtgatcagatggatatataaagtggagtgccaatgtattaatttactgtgagaaacacaattgctaagtgggtcagatatctgtctcagctggtcagtacaccttccagcaggaaaatctacataagaacaactaaatcacaatctgtagagtgcttgatgaccccagaattggtgcaaggggacacattcttgcttgttagcacctgctctctggagtttgctattttctcacacacagtgtattagttcacagaatgttctccaaggaggacagggggctttgcccatagccatgtgctgtgggcagcagagctaggaagaagcacaggcatctcccagcccaggtgtttcccacttaactgcattgcccttttcatcttttttttttccccaatagcttcaggacattcagtacattgtgctttttagaggttgatgattccactgcctgagctgccttcacctctctttctttggaaattgccatctttgagcattgtatgtctctgtaacatctctgcatctccttttcactctggcctccctttctccattgtccttctagcttctggttgccccaaaccccacagactgtgtaacaaaacccaaaacctattggtttaaaacaatacccattttattttctttcatagtttctatgggtcaggaatttggatatggcttgggtaagcagttctggcttctcatggagttggaggcaagtggtggctggaacagaaatggggcagccaggggtggtggccaggcatcagctacatctcctccatgtagtctcaggaactctccatgtaatctctctgtgtgggttgggcttcctcacaacatggtggcctcagggcagtcactgcttacatggcagctagcttccctcagagtgagtatcccaagagatcacagtcaaagtgcatagcatttatataatctaatcttggaagtcacaaaatgtcattcttgtgatactctcattggtgaagaagtcataaaatcctgctcaggttcaaaaagagggtgtatagaacccaacactcaataggaagattgtcagagttacattgtaagaagagcatgtagttgggagatatcattgtggccattttgggaaagatgcaacatgtcacaatgtcatgttctccatcgtctccccgttccaccttgtactggtttccaagggtagtcgtttaaaagtaccacaaaaactgggtggcttggaacaacagaaatttattgtttcacagttctggaggccagaagttcaaaatgaagtgttggcagaaacatgctgcctctaaagggactgggaaaggatctgttccaggcttccctcctatcttctggttgttccttgccttctggctgcgtaactctagtcttcatttggtgttctccctgcatgcatggctttgtgtccaaatttccttttttcatgaggccatcagtcatactggattagggacccactctactactgcaggatgacctcaccttcccaaattacatctgcaacaaccctatttccaaagaaggccacattctgaggtactgggggttataacttcaacatgaattttttggaggaaacaattcaactcctaacacatctctacccaacctctgtaggttccctcaatccaccaaaattttttggctccactggattatctagcagttaggaaaccaagatcattaaatgaattcaccgcaactacagtgagactgactaccttagcttacctctgtgaaaggagttaagccaaaggaatctgtggaattttggagagtttgggagcatttgggggcaggaggcaaatgttcttcctttaaatcacaacacttagttctcttccatttataagactcacccctccatcccaacccctgcaccacaggacaaggaagtgttcttggtcttcaactttcatccctgatggtgaaagcagttgctcctgacctatttgcccaccagcttctcctctggagcctgaggcttctgatgcctgcctggctggttctcagtaagaaggtcaagttcaaccagaggggagatgctgatgcctttcagtacttaaatatgagttcagaccctggggcctggacataagatttggggtcccctggatataagatttctgaaaacactcagactgtggagacccctgctgagggagaagccccaaactgtggcttcaggggaatgcaccaaggctctcattgaggccaccttctccaacaagctcccctcctgcttccccatggctggcatggctgaggaaaaaggacactgagcacagcccgtgcatgagcggcttgccatgcaacaggataaaacccataatgccactcagcaagccttggttgtaaatctagtttgattacatttgtaatcaaatgatggccatttgttctgtttctggtttgtgaaccaactgaagacataagcagggcctcagctaacccacaaatagcacatgtgtgcaaactggaaaaatgaacccttcttctgggaggacgccagcccaggccaggtcacccggcttggccagcagaacacagagtagattttggtcccgtttgttccccagtggggtatctatccttgtgcagggcacaagcctacatggtggctctggtcatatcattagaaaatagacagaaatgggctgcacaccagaatgaatgaattgaattgaaagggaggagtgatggtggaaaaaaaaacaagtcaattcatttagactggtagaaccagaaccactgtgtagtacatccaaacggttaaaattccctggaagatgttacataatcctatcatggtgtttatttatggaaatctattttaaaaattttatgtaatactgcacagtctgtttgcatgatgccttgtacgtagtagcaactcagtaaatactttttgaatgaactagtatagtattttaattagctagtcttcatgtactggtacaaaagaacagtgtcatcttacagctgaagtcatagaggggaaatatcccactcaagatcatataacattccaggtactcaggatgaatggtttgaggactggtctgaattcttcaaaggtttcagctgtattaacattctccatctaataaactttatcttgtcattgca

SEQ ID NO: 74453 - protein, 488 aa, Artificial Sequence
  derived and/or modified sequence
MDPGQQPPPQPAPQGQGQPPSQPPQGQGPPSGPGQPAPAATQAAPQAPPAGHQIVHVRGDSETDLEALFNAVMNPKTANVPQTVPMRLRKLPDSFFKPPEPKSHSRQASTDAGTAGALTPQHVRAHSSPASLQLGAVSPGTLTPTGVVSGPAATPTAQHLRQSSFEIPDDVPLPAGWEMAKTSSGQRYFLNHIDQTTTWQDPRKAMLSQMNVTAPTSPPVQQNMMNSASGPLPDGWEQAMTQDGEIYYINHKNKTTSWLDPRLDPRFAMNQRISQSAPVKQPPPLAPQSPQGGVMGGSNSNQQQQMRLQQLQMEKERLRLKQQELLRQELALRSQLPTLEQDGGTQNPVSSPGMSQELRTMTTNSSDPFLNSGTYHSRDESTDSGLSMSSYSVPRTPDDFLNSVDEMDTGDTINQSTLPSQQNRFPDYLEAIPGTNVDLGTLEGDGMNIEGEELMPSLQEALSSDILNDMESVLAATKLDKESFLTWL

SEQ ID NO: 74454 - DNA, 1467 bp, Artificial Sequence
  derived and/or modified sequence
atggaccccggccagcagccccccccccagcccgccccccagggccagggccagccccccagccagcccccccagggccagggcccccccagcggccccggccagcccgcccccgccgccacccaggccgccccccaggccccccccgccggccaccagatcgtgcacgtgagaggcgacagcgagaccgacctggaggccctgttcaacgccgtgatgaaccccaagaccgccaacgtgccccagaccgtgcccatgagactgagaaagctgcccgacagcttcttcaagccccccgagcccaagagccacagcagacaggccagcaccgacgccggcaccgccggcgccctgaccccccagcacgtgagagcccacagcagccccgccagcctgcagctgggcgccgtgagccccggcaccctgacccccaccggcgtggtgagcggccccgccgccacccccaccgcccagcacctgagacagagcagcttcgagatccccgacgacgtgcccctgcccgccggctgggagatggccaagaccagcagcggccagagatacttcctgaaccacatcgaccagaccaccacctggcaggaccccagaaaggccatgctgagccagatgaacgtgaccgcccccaccagcccccccgtgcagcagaacatgatgaacagcgccagcggccccctgcccgacggctgggagcaggccatgacccaggacggcgagatctactacatcaaccacaagaacaagaccaccagctggctggaccccagactggaccccagattcgccatgaaccagagaatcagccagagcgcccccgtgaagcagcccccccccctggccccccagagcccccagggcggcgtgatgggcggcagcaacagcaaccagcagcagcagatgagactgcagcagctgcagatggagaaggagagactgagactgaagcagcaggagctgctgagacaggagctggccctgagaagccagctgcccaccctggagcaggacggcggcacccagaaccccgtgagcagccccggcatgagccaggagctgagaaccatgaccaccaacagcagcgaccccttcctgaacagcggcacctaccacagcagagacgagagcaccgacagcggcctgagcatgagcagctacagcgtgcccagaacccccgacgacttcctgaacagcgtggacgagatggacaccggcgacaccatcaaccagagcaccctgcccagccagcagaacagattccccgactacctggaggccatccccggcaccaacgtggacctgggcaccctggagggcgacggcatgaacatcgagggcgaggagctgatgcccagcctgcaggaggccctgagcagcgacatcctgaacgacatggagagcgtgctggccgccaccaagctggacaaggagagcttcctgacctggctgtag

SEQ ID NO: 74455 - DNA, 1467 bp, Artificial Sequence
  derived and/or modified sequence
atggatcccgggcagcaaccaccacctcagcctgctcctcagggccaggggcagccccctagccagccgccacaggggcagggtcctccatccggacctgggcagccagcaccagcggctacacaagccgccccacaggctcccccagcggggcaccaaatcgtgcatgttcgtggtgacagtgaaacagacttggaggcccttttcaacgcggtgatgaatccaaaaactgccaacgtgccacaaaccgtccctatgcgcctcaggaagttgcccgatagcttctttaagccacctgagcccaaatcccacagtagacaagcaagcactgacgccggcacggccggcgccttaactccccagcatgtgcgggcacactccagtcctgcgagcctgcagctcggagccgtgtccccgggcaccctaacacctaccggcgttgtatctggccccgccgcaacgccgacggcacagcatttgagacagtcctccttcgaaattcctgatgatgtccctctgcctgccgggtgggagatggctaaaacatcaagcggccaacgctactttttaaaccatatagatcaaacaaccacatggcaggacccacgaaaagccatgctgagccagatgaatgtcacagctcccaccagtcccccagttcagcagaatatgatgaactccgccagcgggccccttcccgacggatgggagcaagcaatgacccaggatggggagatctattacataaaccacaagaataagaccacttcttggctcgatcctcgactcgacccccggttcgccatgaatcagaggataagtcagagcgcccccgtcaagcagccgccacccctagctccacagtccccccaggggggcgtcatgggtggttctaattcaaaccagcagcaacaaatgcgcttgcaacagttacagatggaaaaggagcgtttgcgcctcaagcagcaggaactgctgcggcaggagctggcccttaggagccagctacctacacttgaacaggatggtggaactcaaaatcccgttagctcacccgggatgtctcaggagctgcgtacgatgacaaccaactctagtgatccctttctgaattcagggacatatcactcgcgcgatgagtctacagactccggactgtcaatgtccagctacagcgtcccgcgaacgccagatgactttttgaacagtgtggatgagatggatacaggggacactattaatcagagtactctgcctagtcaacagaataggttccccgactacttagaggcaatacctggcactaacgtcgaccttggaactctggagggggatggtatgaatatcgagggcgaggaattaatgccatccctgcaggaggcgctgagcagtgatatacttaacgacatggagagcgtattggctgcgacaaagctcgataaggagtcatttctgacctggttatag

SEQ ID NO: 74456 - DNA, 1467 bp, Artificial Sequence
  derived and/or modified sequence
atggaccccggccagcagcccccaccccagcctgccccccagggccagggccagccccccagccagcccccccagggccagggccccccatctggccctggccagcctgccccagctgccacccaggccgccccccaggcccccccagctggccaccagatcgtgcacgtgcggggggacagcgagacagacctggaggccctcttcaatgctgtgatgaaccccaagacagccaacgtgccccagacagtgcccatgaggctgaggaagctgcctgacagcttcttcaagcccccagagcccaagagccacagccggcaggccagcacagatgctggaacagctggggccctgaccccccagcacgtgcgggcccacagcagccctgccagcctgcagctgggcgctgtgtccccaggcaccctgacccccactggagtggtgtctggccctgctgccacccccacagcccagcacctgcggcagagcagctttgagatcccagatgatgtgcccctgcctgctggctgggagatggccaagaccagcagcggccagcgctacttcctgaaccacatcgaccagaccaccacctggcaggaccccaggaaggccatgctgagccagatgaatgtgacagcccccaccagcccccctgtgcagcagaacatgatgaacagcgccagcggccccctgcctgatggctgggagcaggccatgacccaggatggagagatctactacatcaaccacaagaacaagaccacctcctggctggacccccggctggaccccaggtttgccatgaaccagaggatcagccagagcgcccctgtgaagcagcccccacccctggccccccagagcccccagggcggcgtgatgggcggcagcaacagcaaccagcagcagcagatgaggctgcagcagctgcagatggagaaggagcggctgcggctgaagcagcaggagctgctgcggcaggagctggccctgcggagccagctgcccaccctggagcaggacggcggcacccagaaccctgtgagcagccctggcatgagccaggagctgcggaccatgaccaccaacagcagtgaccccttcctgaacagcggcacctaccacagcagagatgagagcacagacagcggcctgtccatgagcagctacagcgtgcccaggaccccagatgacttcctgaacagcgtggatgagatggacacaggagacaccatcaaccagagcaccctgcccagccagcagaaccgcttcccagactacctggaggccatccctggcaccaacgtggacctgggcaccctggagggagatggcatgaacattgaaggagaggagctgatgcccagcctgcaggaggccctgagcagtgacatcctgaatgacatggagagcgtgctggccgccaccaagctggacaaggagagcttcctgacctggctgtag

SEQ ID NO: 74457 - DNA, 1467 bp, Artificial Sequence
  derived and/or modified sequence
atggaccccggccagcagccccccccccagcccgccccccagggccagggacagccccccagccagcccccacaaggccaggggcccccctctggtccgggccagcctgcccccgctgccacccaagccgctccccaagccccccccgcaggccaccagatcgttcacgtgcgtggggattcagagacagaccttgaggccctttttaacgccgtgatgaacccaaagactgccaacgtaccacagacagtccctatgaggctgcggaagctacccgacagcttcttcaaacctcccgaaccaaagtcccactctcggcaggcaagcaccgatgctggaactgctggggcccttaccccccagcatgtacgcgctcactcttcccctgctagtttgcagctgggtgccgtatcccccgggactctgaccccaacaggcgtggtgtccggaccagcagcaacgccaacagcccagcatttgcggcagtctagcttcgagatacctgatgacgtgccccttcctgccggttgggaaatggccaagacaagttccgggcaacgctatttcctgaaccacattgaccagaccacaacatggcaagatccaaggaaagcaatgctgtcacaaatgaacgtaacagcaccgacaagtccgcctgtgcaacagaacatgatgaatagcgccagcggacccttacccgacggctgggaacaggcaatgactcaagatggcgaaatatattacattaatcataagaacaagacaacaagttggttagaccctcgcctagatccaagatttgcaatgaatcagcgcattagccagtcagctcccgtcaaacagccacctccgctggcccctcagagcccccaagggggcgtcatgggaggaagtaacagcaatcagcagcaacagatgcgccttcagcagctgcagatggaaaaagaacgccttagacttaagcagcaggaactgctcagacaggaactggctttaaggtctcagcttcctacactcgagcaagacggagggactcaaaaccctgttagttctccgggcatgtctcaagaacttaggactatgacaaccaactcctccgacccattcctcaacagcggcacttaccattctagggatgagtcaaccgacagcggcctgagtatgtccagttactccgtccccagaactcccgacgattttctcaattcagtggatgagatggataccggcgataccataaatcagtctacccttccttcccaacaaaacagattccctgattacctcgaggccatccccggaaccaacgtggacctcgggacactcgagggggacggtatgaacattgaaggcgaagaactcatgccgtctctacaggaagcactgagtagcgacatcctcaatgatatggagtctgtgctagccgccactaaactggataaagagagcttcctgacctggctgtag

SEQ ID NO: 74458 - DNA, 1467 bp, Artificial Sequence
  derived and/or modified sequence
atggacccaggacagcagcctcccccacaacctgcaccacagggtcagggacagcccccatcccaacctccccagggacaggggccacccagtggcccaggacaacccgctcccgctgcaacccaggccgctcctcaagcgcctcccgctgggcatcagatcgtgcacgtgcgcggtgatagtgagaccgacttggaggccctcttcaatgcggtcatgaaccccaaaacagctaatgtgccccaaactgtgcctatgaggctgagaaagctgcccgatagtttctttaaaccgccagaacctaaaagccactctagacaggcgtccaccgatgccggaacagcgggagctttgacacctcagcatgtgcgggcacattcgagccccgcatccctgcaacttggcgcagtatcaccaggaacgttgaccccaaccggtgtcgttagcggacctgccgcaacgcccactgcgcagcacctgaggcaaagtagcttcgagattcctgacgatgtcccactgccagccggttgggaaatggctaagacttcatccgggcaaagatactttctgaatcacatagaccagaccacaacatggcaagatcctaggaaggcgatgctgtctcagatgaacgtgaccgcacctacaagcccacctgtacagcagaacatgatgaatagcgcctcagggcctctgccagacggatgggaacaggcaatgacacaggatggcgagatctactacataaatcacaaaaacaaaactacaagttggctcgatccaagactcgatccaaggtttgccatgaatcagagaatttcccagtcagcccctgtgaagcagccgcctccactggctcctcagtcaccccagggtggggtcatgggaggcagcaactccaaccaacagcagcagatgaggctccagcagttgcagatggagaaggaaaggctccggctgaaacagcaggagctcctgagacaggagttagctctgagatcccagcttcctactctcgaacaggacggcggaactcagaaccccgtgtcatctccaggcatgtcacaggaattgagaacaatgactacaaatagttcagaccccttcttaaactccgggacatatcacagtcgagacgaatccacggattccggtctcagcatgtcatcatactccgtaccgcgaaccccagacgacttcttaaacagtgtagatgagatggataccggcgacaccattaatcagagcacgttaccctctcagcagaacagatttccagactacctggaggccattccgggaacaaacgtcgacctgggcacactggagggcgatggcatgaatattgagggggaagagctgatgccctcccttcaggaggctctgagttccgacatccttaacgatatggaaagtgtactcgctgccaccaaactggataaggagtcatttttaacttggctatag

SEQ ID NO: 74459 - DNA, 1490 bp, Artificial Sequence
  derived and/or modified sequence
atggatcccgggcagcagccgccgcctcaaccggccccccagggccaagggcagccgccttcgcagcccccgcaggggcagggcccgccgtccggacccgggcaaccggcacccgcggcgacccaggcggcgccgcaggcaccccccgccgggcatcagatcgtgcacgtccgcggggactcggagaccgacctggaggcgctcttcaacgccgtcatgaaccccaagacggccaacgtgccccagaccgtgcccatgaggctccggaagctgcccgactccttcttcaagccgccggagcccaaatcccactcccgacaggccagtactgatgcaggcactgcaggagccctgactccacagcatgttcgagctcattcctctccagcttctctgcagttgggagctgtttctcctgggacactgacccccactggagtagtctctggcccagcagctacacccacagctcagcatcttcgacagtcttcttttgagatacctgatgatgtacctctgccagcaggttgggagatggcaaagacatcttctggtcagagatacttcttaaatcacatcgatcagacaacaacatggcaggaccccaggaaggccatgctgtcccagatgaacgtcacagcccccaccagtccaccagtgcagcagaatatgatgaactcggcttcaggtcctcttcctgatggatgggaacaagccatgactcaggatggagaaatttactatataaaccataagaacaagaccacctcttggctagacccaaggcttgaccctcgttttgccatgaaccagagaatcagtcagagtgctccagtgaaacagccaccacccctggctccccagagcccacagggaggcgtcatgggtggcagcaactccaaccagcagcaacagatgcgactgcagcaactgcagatggagaaggagaggctgcggctgaaacagcaagaactgcttcggcaggagttagccctgcgtagccagttaccaacactggagcaggatggtgggactcaaaatccagtgtcttctcccgggatgtctcaggaattgagaacaatgacgaccaatagctcagatcctttccttaacagtggcacctatcactctcgagatgagagtacagacagtggactaagcatgagcagctacagtgtccctcgaaccccagatgacttcctgaacagtgtggatgagatggatacaggtgatactatcaaccaaagcaccctgccctcacagcagaaccgtttcccagactaccttgaagccattcctgggacaaatgtggaccttggaacactggaaggagatggaatgaacatagaaggagaggagctgatgccaagtctgcaggaagctttgagttctgacatccttaatgacatggagtctgttttggctgccaccaagctagataaagaaagctttcttacatggttatagagccctcaggcagactgaattct

SEQ ID NO: 74460 - protein, 326 aa, Artificial Sequence
  derived and/or modified sequence
MAKTSSGQRYFLNHIDQTTTWQDPRKAMLSQMNVTAPTSPPVQQNMMNSASGPLPDGWEQAMTQDGEIYYINHKNKTTSWLDPRLDPRFAMNQRISQSAPVKQPPPLAPQSPQGGVMGGSNSNQQQQMRLQQLQMEKERLRLKQQELLRQAMRNINPSTANSPKCQELALRSQLPTLEQDGGTQNPVSSPGMSQELRTMTTNSSDPFLNSGTYHSRDESTDSGLSMSSYSVPRTPDDFLNSVDEMDTGDTINQSTLPSQQNRFPDYLEAIPGTNVDLGTLEGDGMNIEGEELMPSLQEALSSDILNDMESVLAATKLDKESFLTWL

SEQ ID NO: 74461 - DNA, 981 bp, Artificial Sequence
  derived and/or modified sequence
atggccaagaccagcagcggccagagatacttcctgaaccacatcgaccagaccaccacctggcaggaccccagaaaggccatgctgagccagatgaacgtgaccgcccccaccagcccccccgtgcagcagaacatgatgaacagcgccagcggccccctgcccgacggctgggagcaggccatgacccaggacggcgagatctactacatcaaccacaagaacaagaccaccagctggctggaccccagactggaccccagattcgccatgaaccagagaatcagccagagcgcccccgtgaagcagcccccccccctggccccccagagcccccagggcggcgtgatgggcggcagcaacagcaaccagcagcagcagatgagactgcagcagctgcagatggagaaggagagactgagactgaagcagcaggagctgctgagacaggccatgagaaacatcaaccccagcaccgccaacagccccaagtgccaggagctggccctgagaagccagctgcccaccctggagcaggacggcggcacccagaaccccgtgagcagccccggcatgagccaggagctgagaaccatgaccaccaacagcagcgaccccttcctgaacagcggcacctaccacagcagagacgagagcaccgacagcggcctgagcatgagcagctacagcgtgcccagaacccccgacgacttcctgaacagcgtggacgagatggacaccggcgacaccatcaaccagagcaccctgcccagccagcagaacagattccccgactacctggaggccatccccggcaccaacgtggacctgggcaccctggagggcgacggcatgaacatcgagggcgaggagctgatgcccagcctgcaggaggccctgagcagcgacatcctgaacgacatggagagcgtgctggccgccaccaagctggacaaggagagcttcctgacctggctgtag

SEQ ID NO: 74462 - DNA, 981 bp, Artificial Sequence
  derived and/or modified sequence
atggcaaaaacctcttccgggcagcggtattttcttaaccatatagaccagactacgacttggcaggaccctcggaaagccatgctgtcccagatgaatgtgacagcacccacttccccgcctgtgcagcagaatatgatgaattccgctagcggcccactaccagacggctgggagcaagctatgacgcaggacggcgagatctactatattaatcataagaacaagactacttcttggctcgatccccggcttgaccctaggttcgccatgaaccagcgcatatcccagagtgcacctgtgaagcagccacctcccctggctcctcagtcgccacagggtggagtgatgggaggaagcaactctaatcaacagcagcagatgagactgcaacagctacagatggagaaggagaggctgcgtctgaaacagcaggagctcctgcgacaagcaatgaggaatattaacccgtccacagcaaactctcccaagtgccaggagctggccttgcggagccagcttcccaccctcgagcaagacggcggcacccagaatccagtaagctcccccggaatgagccaggaactaagaaccatgaccactaacagcagtgatcctttccttaacagcggaacctatcatagtagagacgagagcaccgatagtggactgtctatgtccagctattccgtgcccaggactcctgacgacttccttaactcagtggatgaaatggacaccggcgacacaatcaaccagtctaccctgcctagtcagcaaaatcgtttcccagactacttggaggctatccccggcacaaatgtggacctggggaccctagagggggacggcatgaatatcgagggggaggagctcatgcctagccttcaggaagccctgagttcggacatacttaatgacatggagtccgttctggccgcaacaaaattggacaaagagtcctttctcacatggctgtag

SEQ ID NO: 74463 - DNA, 981 bp, Artificial Sequence
  derived and/or modified sequence
atggccaagaccagcagcggccagcgctacttcctgaaccacatcgaccagaccaccacctggcaggaccccaggaaggccatgctgagccagatgaatgtgacagcccccaccagcccccctgtgcagcagaacatgatgaacagcgccagcggccccctgcctgatggctgggagcaggccatgacccaggatggagagatctactacatcaaccacaagaacaagaccacctcctggctggacccccggctggaccccaggtttgccatgaaccagaggatcagccagagcgcccctgtgaagcagcccccacccctggccccccagagcccccagggcggcgtgatgggcggcagcaacagcaaccagcagcagcagatgaggctgcagcagctgcagatggagaaggagcggctgcggctgaagcagcaggagctgctgcggcaggccatgaggaacatcaaccccagcacagccaacagccccaagtgccaggagctggccctgcggagccagctgcccaccctggagcaggacggcggcacccagaaccctgtgagcagccctggcatgagccaggagctgcggaccatgaccaccaacagcagtgaccccttcctgaacagcggcacctaccacagcagagatgagagcacagacagcggcctgtccatgagcagctacagcgtgcccaggaccccagatgacttcctgaacagcgtggatgagatggacacaggagacaccatcaaccagagcaccctgcccagccagcagaaccgcttcccagactacctggaggccatccctggcaccaacgtggacctgggcaccctggagggagatggcatgaacattgaaggagaggagctgatgcccagcctgcaggaggccctgagcagtgacatcctgaatgacatggagagcgtgctggccgccaccaagctggacaaggagagcttcctgacctggctgtag

SEQ ID NO: 74464 - DNA, 981 bp, Artificial Sequence
  derived and/or modified sequence
atggccaagaccagcagcggccagcggtacttcctgaaccacatcgatcagacgacaacatggcaggacccccggaaagccatgctgagccaaatgaatgtgacggcaccgacatccccgcccgttcagcagaacatgatgaactccgcctcaggccctttgcccgatggctgggagcaggccatgacacaggacggagagatctactatataaatcacaagaataaaactaccagctggctcgatcccagactcgatcctcggtttgccatgaatcagagaatttcacaatccgcacccgttaagcagcctcctccccttgccccccagagtcctcaggggggcgtcatgggcggatccaactccaatcagcagcagcagatgcggctccagcaattgcaaatggaaaaggagcgcctcagactgaagcaacaagaactcctcaggcaagcgatgaggaacatcaatccctccaccgcaaatagccccaagtgccaggaactcgctctccgctcccagctgccaaccctggaacaagacggcgggacgcagaatcccgttagcagcccaggcatgtcacaggaattaagaaccatgacaaccaactcttctgatccctttctgaacagcggaacctaccacagccgggacgagagcaccgattctggcttatctatgagctcatactctgtccctaggactcctgacgacttcctgaatagcgtggacgagatggatacgggagatacgattaatcagagtactctcccctcacagcagaacagattcccggactacctggaggcgatcccagggactaatgttgacctgggaaccctggaaggcgatggtatgaacattgaaggcgaggagctgatgccaagcctccaggaggcattgtcctccgacattctgaacgacatggagagcgtcctcgctgcaaccaaactggataaggaatcctttttgacttggttgtag

SEQ ID NO: 74465 - DNA, 981 bp, Artificial Sequence
  derived and/or modified sequence
atggcgaaaacatctagcggtcagcggtatttcctgaaccacatagatcagaccaccacctggcaggatccgagaaaggctatgctgagccagatgaacgtcactgcccctacttccccccctgtgcagcaaaacatgatgaacagtgcgagtggccctctgcctgatggttgggagcaggccatgacccaagatggcgagatttattacatcaaccataagaacaagaccaccagttggctggatccacgcctagacccccgatttgccatgaatcagagaatctcccaatcagctcctgtcaaacaaccacccccactggcaccccaatcgccgcagggtggcgtcatgggcggtagtaatagtaaccagcagcagcaaatgcgattacaacagctgcagatggaaaaagagagactgagactcaagcagcaagagttactccgacaggccatgagaaatatcaaccccagtactgctaactctcctaaatgccaggaattggcgctcaggagtcagctccccaccttggagcaggacgggggaactcaaaacccagtctcgagcccaggcatgagccaagaattacgcaccatgactaccaatagctccgacccgtttctgaacagcggaacctatcacagtcgggacgagtccacagacagtggtctctccatgtcaagttatagtgtcccacggacaccagacgatttccttaatagcgttgacgagatggacaccggcgatacgataaaccaaagcacactgcctagccagcagaatcgtttcccggactatttggaggcgattcctggaaccaatgtcgacctcggaaccctggagggggacggaatgaacatcgaaggcgaagagctgatgccgtctctgcaggaggccttgagcagcgatatccttaacgatatggaatcagtgttggccgcaacaaagctggataaggagagtttccttacttggctgtag

SEQ ID NO: 74466 - protein, 145 aa, Artificial Sequence
  derived and/or modified sequence
MELVPATPHYPADVLFQTDPTAEMAAESLPFSFGTLSSWELEAWYEDLQEVLSSDENGGTYVSPPGNEEEESKIFTTLDPASLAWLTEEEPEPAEVTSTSQSPHSPDSSQSSLAQEEEEEDQGRTRKRKQSGHSPARAGKQRMKE

SEQ ID NO: 74467 - protein, 192 aa, Artificial Sequence
  derived and/or modified sequence
MELVPATPHYPADVLFQTDPTAEMAAESLPFSFGTLSSWELEAWYEDLQEVLSSDENGGTYVSPPGNEEEESKIFTTLDPASLAWLTEEEPEPAEVTSTSQSPHSPDSSQSSLAQEEEEEDQGRTRKRKQSGHSPARAGKQRMKEKEQENERKVAQLAEENERLKQEIERLTREVEATRRALIDRMVNLHQA

SEQ ID NO: 74468 - DNA, 438 bp, Artificial Sequence
  derived and/or modified sequence
atggagctggtgcccgccaccccccactaccccgccgacgtgctgttccagaccgaccccaccgccgagatggccgccgagagcctgcccttcagcttcggcaccctgagcagctgggagctggaggcctggtacgaggacctgcaggaggtgctgagcagcgacgagaacggcggcacctacgtgagcccccccggcaacgaggaggaggagagcaagatcttcaccaccctggaccccgccagcctggcctggctgaccgaggaggagcccgagcccgccgaggtgaccagcaccagccagagcccccacagccccgacagcagccagagcagcctggcccaggaggaggaggaggaggaccagggcagaaccagaaagagaaagcagagcggccacagccccgccagagccggcaagcagagaatgaaggagtag

SEQ ID NO: 74469 - DNA, 579 bp, Artificial Sequence
  derived and/or modified sequence
atggagctggtgcccgccaccccccactaccccgccgacgtgctgttccagaccgaccccaccgccgagatggccgccgagagcctgcccttcagcttcggcaccctgagcagctgggagctggaggcctggtacgaggacctgcaggaggtgctgagcagcgacgagaacggcggcacctacgtgagcccccccggcaacgaggaggaggagagcaagatcttcaccaccctggaccccgccagcctggcctggctgaccgaggaggagcccgagcccgccgaggtgaccagcaccagccagagcccccacagccccgacagcagccagagcagcctggcccaggaggaggaggaggaggaccagggcagaaccagaaagagaaagcagagcggccacagccccgccagagccggcaagcagagaatgaaggagaaggagcaggagaacgagagaaaggtggcccagctggccgaggagaacgagagactgaagcaggagatcgagagactgaccagagaggtggaggccaccagaagagccctgatcgacagaatggtgaacctgcaccaggcctag

SEQ ID NO: 74470 - DNA, 872 bp, Artificial Sequence
  derived and/or modified sequence
actgagcgtatcatgttaaagatgagcgggtggcagcgacagagccaaaatcagagctggaacctgaggagagagtgttcaagaaggaagtgtatcttcatacatcaccacacctgaaagcagactgatccaactgcagagatggcagctgagtcattgcctttctccttcgggacactgtccagctgggagctggaagcctggtatgaggacctgcaagaggtcctgtcttcagatgaaaatgggggtacctatgtttcacctcctggaaatgaagaggaagaatcaaaaatcttcaccactcttgaccctgcttctctggcttggctgactgaggaggagccagaaccagcagaggtcacaagcacctcccagagccctcactctccagattccagtcagagctccctggctcaggaggaagaggaggaagaccaagggagaaccaggaaacggaaacagagtggtcattccccagcccgggctggaaagcagcgcatgaaggagaaagaacaggagaatgaaaggaaagtggcacagctagctgaagagaatgaacggctcaagcaggaaatcgagcgcctgaccagggaagtagaggcgactcgccgagctctgattgaccgaatggtgaatctgcaccaagcatgaacaattgggagcatcagtcccccacttgggccacactacccacctttcccagaagtggctactgactaccctctcactagtgccaatgatgtgaccctcaatcccacatacgcagggggaaggcttggagtagacaaaaggaaaggtctcagcttgtatatagagattgtacatttatttattactgtccctatctattaaagtgactttctatgagccaa

SEQ ID NO: 74471 - DNA, 644 bp, Artificial Sequence
  derived and/or modified sequence
agagacttaagtctaaggcactgagcgtatcatgttaaagatgagcgggtggcagcgacagagccaaaatcagagctggaacctgaggagagagtgttcaagaaggaagtgtatcttcatacatcaccacacctgaaagcagtacaactttacctacaaaaacaggcatcagaccagcttgccaacttgtggcatagactgtttgctacatggagcttgttccagccactccccattatcctgcagatgtgcttttccagactgatccaactgcagagatggcagctgagtcattgcctttctccttcgggacactgtccagctgggagctggaagcctggtatgaggacctgcaagaggtcctgtcttcagatgaaaatgggggtacctatgtttcacctcctggaaatgaagaggaagaatcaaaaatcttcaccactcttgaccctgcttctctggcttggctgactgaggaggagccagaaccagcagaggtcacaagcacctcccagagccctcactctccagattccagtcagagctccctggctcaggaggaagaggaggaagaccaagggagaaccaggaaacggaaacagagtggtcattccccagcccgggctggaaagcagcgcatgaaggag

SEQ ID NO: 74472 - DNA, 1067 bp, Artificial Sequence
  derived and/or modified sequence
gaggtcagagacttaagtctaaggcactgagcgtatcatgttaaagatgagcgggtggcagcgacagagccaaaatcagagctggaacctgaggagagagtgttcaagaaggaagtgtatcttcatacatcaccacacctgaaagcagcaccaaagcagccataaacaatatgtaaataaacagatgtggctgtattccagtacaactttacctacaaaaacaggcatcagaccagcttgccaacttgtggcatagactgtttgctacatggagcttgttccagccactccccattatcctgcagatgtgcttttccagactgatccaactgcagagatggcagctgagtcattgcctttctccttcgggacactgtccagctgggagctggaagcctggtatgaggacctgcaagaggtcctgtcttcagatgaaaatgggggtacctatgtttcacctcctggaaatgaagaggaagaatcaaaaatcttcaccactcttgaccctgcttctctggcttggctgactgaggaggagccagaaccagcagaggtcacaagcacctcccagagccctcactctccagattccagtcagagctccctggctcaggaggaagaggaggaagaccaagggagaaccaggaaacggaaacagagtggtcattccccagcccgggctggaaagcagcgcatgaaggagaaagaacaggagaatgaaaggaaagtggcacagctagctgaagagaatgaacggctcaagcaggaaatcgagcgcctgaccagggaagtagaggcgactcgccgagctctgattgaccgaatggtgaatctgcaccaagcatgaacaattgggagcatcagtcccccacttgggccacactacccacctttcccagaagtggctactgactaccctctcactagtgccaatgatgtgaccctcaatcccacatacgcagggggaaggcttggagtagacaaaaggaaaggtctcagcttgtatatagagattgtacatttatttattactgtccctatctattaaagtgactttctatgagcca

SEQ ID NO: 74473 - DNA, 951 bp, Artificial Sequence
  derived and/or modified sequence
agagacttaagtctaaggcactgagcgtatcatgttaaagatgagcgggtggcagcgacagagccaaaatcagagctggaacctgaggagagagtgttcaagaaggaagtgtatcttcatacatcaccacacctgaaagcaggtaaacttaacctacccttttccaaaaattttaaacggcaggacagtaaatattttagatgttaaaagtcctatagtctctagcgtgactcttcatctctgccactgtagcaccaaagcagccataaacaatatgtaaataaacagatgtggctgtattccagtacaactttacctacaaaaacaggcatcagaccagcttgccaacttgtggcatagactgtttgctacatggagcttgttccagccactccccattatcctgcagatgtgcttttccagactgatccaactgcagagatggcagctgagtcattgcctttctccttcgggacactgtccagctgggagctggaagcctggtatgaggacctgcaagaggtcctgtcttcagatgaaaatgggggtacctatgtttcacctcctggaaatgaagaggaagaatcaaaaatcttcaccactcttgaccctgcttctctggcttggctgactgaggaggagccagaaccagcagaggtcacaagcacctcccagagccctcactctccagattccagtcagagctccctggctcaggaggaagaggaggaagaccaagggagaaccaggaaacggaaacagagtggtcattccccagcccgggctggaaagcagcgcatgaaggagaaagaacaggagaatgaaaggaaagtggcacagctagctgaagagaatgaacggctcaagcaggaaatcgagcgcctgaccagggaagtagaggcgactcgccgagctctgattgaccgaatggtgaatctgcaccaagcatga

SEQ ID NO: 74474 - DNA, 438 bp, Artificial Sequence
  derived and/or modified sequence
atggaacttgtgcctgcgaccccccattatcccgccgatgtcctttttcagaccgatcccacggctgagatggctgctgaatcactccccttttcatttggcacactgtcctcctgggaactggaggcatggtacgaagaccttcaagaggtcctgagtagcgacgagaacggaggaacgtacgtgagcccccctgggaatgaggaggaggaaagtaaaattttcactactcttgacccagcatctctggcttggctgacagaggaggaacccgaaccagccgaggtgacgagcacaagtcaatcgccacacagcccagattcctctcagtcttcattagcgcaagaagaggaggaagaagaccagggccgaacccggaagaggaagcagtccgggcattcgcccgctcgtgctggtaagcaacgcatgaaagaatag

SEQ ID NO: 74475 - DNA, 579 bp, Artificial Sequence
  derived and/or modified sequence
atggagttggtgcccgcaactcctcattatcccgcagatgtgctgttccaaaccgaccccacagccgaaatggcagctgagagcctgccatttagcttcggaaccctgtcgagctgggagctcgaggcctggtatgaggacctgcaggaagtgctgagttctgacgaaaacgggggaacctatgtgtcaccaccagggaatgaggaagaagaatctaaaattttcaccactctggatcccgcttctctcgcatggttaacagaagaggagcccgagcctgctgaggtgactagcacctcacagtcaccacacagccctgatagcagccaatcgagtctcgctcaggaggaggaagaagaggaccaagggcggaccagaaagaggaaacagtccgggcattcccctgccagagctgggaagcagaggatgaaagagaaggaacaggagaatgaaaggaaagtagcacaattggctgaagagaatgaacggcttaagcaggaaatcgaaagactcacgcgcgaagtggaagccacccggcgggctctcatcgatcgcatggtgaacctccaccaggcatag

SEQ ID NO: 74476 - DNA, 579 bp, Artificial Sequence
  derived and/or modified sequence
atggagttagtgcctgctacaccacattaccctgccgatgtcctgttccaaactgatccaacagccgagatggcggcagagtccctcccattctctttcgggactctgtcgtcgtgggagttagaggcctggtatgaggatctccaagaggttttaagctcagacgaaaatgggggtacttacgtgtctccccctggaaacgaggaagaagaaagcaagatcttcacgacgctggacccagcaagtctggcctggctgacagaggaagaacctgaacctgcagaggttacaagtacctcgcagagccctcatagcccggattcgtctcagtcgagcctggcgcaggaagaggaggaagaggaccagggacgaactcggaagcgcaaacaaagtggccattcgcctgcgcgtgccggcaaacaacggatgaaggagaaggagcaagagaacgagcgcaaagtggcacagctggccgaagagaatgagaggctgaagcaagaaattgagcgcttaacaagggaggttgaggctacaaggagggcactgattgacaggatggtgaatttgcatcaggcctag

SEQ ID NO: 74477 - DNA, 438 bp, Artificial Sequence
  derived and/or modified sequence
atggagctggtgcctgccaccccccactacccagcagatgtgctcttccagacagaccccacagctgagatggctgctgagagcctgcccttctcctttggcaccctgagctcctgggagctggaggcctggtatgaggacctgcaggaggtgctgagcagtgatgaaaatggaggcacctacgtgagccccccaggaaatgaggaggaggagagcaagatcttcaccaccctggaccctgccagcctggcctggctgacagaggaggagcctgagcctgctgaggtgaccagcaccagccagagcccccacagcccagacagcagccagagcagcctggcccaggaggaggaggaggaggaccagggccgcaccaggaagaggaagcagagcggccacagccctgcccgggccggcaagcagaggatgaaggagtag

SEQ ID NO: 74478 - DNA, 579 bp, Artificial Sequence
  derived and/or modified sequence
atggagctggtgcctgccaccccccactacccagcagatgtgctcttccagacagaccccacagctgagatggctgctgagagcctgcccttctcctttggcaccctgagctcctgggagctggaggcctggtatgaggacctgcaggaggtgctgagcagtgatgaaaatggaggcacctacgtgagccccccaggaaatgaggaggaggagagcaagatcttcaccaccctggaccctgccagcctggcctggctgacagaggaggagcctgagcctgctgaggtgaccagcaccagccagagcccccacagcccagacagcagccagagcagcctggcccaggaggaggaggaggaggaccagggccgcaccaggaagaggaagcagagcggccacagccctgcccgggccggcaagcagaggatgaaggagaaggagcaggagaatgaaaggaaggtggcccagctggccgaggagaatgaaaggctgaagcaggagattgaaaggctgacccgggaggtggaggccacccggcgggccctgattgacaggatggtgaacctgcaccaggcctag

SEQ ID NO: 74479 - DNA, 438 bp, Artificial Sequence
  derived and/or modified sequence
atggagctggtgcccgccaccccccactaccccgccgacgtgctgtttcagacagaccccaccgcagaaatggccgctgagtccctcccattctcctttggcaccttatcgagctgggagctcgaagcgtggtatgaggatctccaagaggtactctcaagcgacgaaaatggaggtacttacgttagtcctccagggaacgaggaagaggaatcaaaaatcttcactacactggaccccgcaagcttagcctggctgaccgaggaagaaccggagcccgctgaggtcacgagcacatcccagtcaccccactcccccgattccagccagtcatctctggcacaggaagaggaggaagaagaccaggggcgtactagaaaaaggaagcagtcaggccactctcccgccagagccggcaagcagcgaatgaaggaatag

SEQ ID NO: 74480 - DNA, 579 bp, Artificial Sequence
  derived and/or modified sequence
atggagctggtgcccgccaccccccactaccccgccgacgtgctgttccagactgatccaacagccgagatggctgccgagagcctgccctttagctttggcaccctcagctcatgggagctggaggcctggtacgaggatcttcaggaggtcctgagttccgacgagaatggcgggacatatgtctcccccccaggaaacgaggaagaagagagcaagatcttcactacattagaccctgcatcactagcctggttgactgaagaagagcccgagcctgccgaggttaccagcactagccaatccccacattctcctgattcctctcagagtagtttggcgcaggaggaggaggaggaggatcagggcagaacacgaaaacggaagcagtctggccattccccggcaagagcgggaaagcagaggatgaaagaaaaagagcaggagaacgagaggaaggttgcccagcttgcagaggaaaacgaaagacttaaacaggagattgaacgactgacccgtgaggtagaggccacacggcgggcactgattgataggatggtcaacctgcatcaagcctag

SEQ ID NO: 74481 - DNA, 579 bp, Artificial Sequence
  derived and/or modified sequence
atggagctggtgcccgccaccccccactaccccgccgacgtgctgttccaaactgacccgacggcagaaatggcggcggagtccctgccattctccttcgggacattgtcttcttgggaactggaggcctggtacgaagacttgcaagaggtcctgagctccgacgaaaacggtggcacgtacgtttctcctccgggtaacgaggaagaggaatccaaaatcttcaccacattagatcccgctagtcttgcctggctgaccgaggaagagcccgagcccgcagaggtcacgagcactagtcaaagccctcacagcccggacagcagccagagctccctggcccaggaagaggaggaagaagatcagggacgtacgcgcaagaggaaacagagcggccacagtcccgcccgcgccggcaaacagcgcatgaaggaaaaagagcaggaaaatgaacgcaaggtggcccagctcgctgaggagaacgaacgcctcaagcaggagattgaaagacttactcgggaggtggaggccactagacgggccttgattgatcgaatggtgaatctgcatcaggcttag

SEQ ID NO: 74482 - DNA, 438 bp, Artificial Sequence
  derived and/or modified sequence
atggaactcgtgcctgctactccacactacccggcagatgtgctgtttcagacagacccaaccgccgagatggcggctgaatcattaccttttagctttggcacactgagtagttgggagttggaagcatggtatgaggacctgcaagaggtactcagctctgacgaaaacgggggtacttacgtgagcccacctggcaatgaagaggaagagtccaaaatctttacaactctggaccccgcatcgctggcttggttgactgaggaagaacctgaacccgcagaagtgaccagtactagccaaagcccacactctcccgactcctcgcagtctagtctggcacaggaagaggaagaggaggaccagggtagaaccagaaaaaggaagcagtcaggacacagccctgcaagggccggaaagcagagaatgaaagaatag

SEQ ID NO: 74483 - DNA, 579 bp, Artificial Sequence
  derived and/or modified sequence
atggaattggtgccagccacgcctcactatcctgccgacgtgttatttcaaaccgaccctactgctgaaatggctgctgaaagtttacccttttcgttcggcaccctctcttcatgggaacttgaagcctggtacgaggacctgcaagaagttctctcttctgatgagaatggtggaacttacgtgtctcctcccggtaatgaggaagaggagtccaagatcttcactacccttgaccccgcttctttggcctggctgaccgaggaggaaccagagcccgctgaagtgacatctacctcacagagcccccattccccagactcctctcagtcatctctggcccaggaagaagaggaagaggatcagggcaggacccgcaagaggaaacagtctggacactccccagctcgcgcaggtaaacagaggatgaaggagaaggaacaagagaacgagcggaaggtcgcccagctggctgaagagaacgaacgcttaaaacaggaaatagagcgcctgactcgggaagttgaggctacccggcgtgctctgattgaccgtatggttaatctgcaccaagcctag

SEQ ID NO: 74484 - DNA, 579 bp, Artificial Sequence
  derived and/or modified sequence
atggagctagtgcctgcaaccccacactatcccgctgatgtccttttccagaccgatcctacagccgagatggcagcagaatcccttccatttagtttcggcacactttcatcctgggaattggaggcttggtacgaagatttacaggaggtcctgtcttctgatgagaatggcggaacttacgtctcacctccaggtaatgaggaagaggagtctaagatttttacaactctggaccctgcaagcctcgcatggctgaccgaggaagaaccagagccagcagaggtcacatcaacaagccagtctccccacagcccagactcctctcagtcctcgctcgcccaagaagaagaggaggaggatcagggacgcaccagaaaaagaaagcagtcgggacactctccagctcgcgctggcaagcagaggatgaaggagaaagagcaagaaaacgagcgaaaggtggcccagctagctgaagaaaatgaacgcctaaagcaggaaattgaacgcctgacaagggaagtggaagctacgcggcgtgccttgattgaccggatggtcaacctccaccaggcttag

SEQ ID NO: 74485 - DNA, 510 bp, Artificial Sequence
  derived and/or modified sequence
atggccgccgagagcctgcccttcagcttcggcaccctgagcagctgggagctggaggcctggtacgaggacctgcaggaggtgctgagcagcgacgagaacggcggcacctacgtgagcccccccggcaacgaggaggaggagagcaagatcttcaccaccctggaccccgccagcctggcctggctgaccgaggaggagcccgagcccgccgaggtgaccagcaccagccagagcccccacagccccgacagcagccagagcagcctggcccaggaggaggaggaggaggaccagggcagaaccagaaagagaaagcagagcggccacagccccgccagagccggcaagcagagaatgaaggagaaggagcaggagaacgagagaaaggtggcccagctggccgaggagaacgagagactgaagcaggagatcgagagactgaccagagaggtggaggccaccagaagagccctgatcgacagaatggtgaacctgcaccaggcctag

SEQ ID NO: 74486 - DNA, 510 bp, Artificial Sequence
  derived and/or modified sequence
atggccgctgagagtctaccattcagttttggtaccctttctagttgggagctggaggcctggtacgaggacctgcaggaggttttgtccagtgatgagaacggtgggacctatgttagccctcccggtaatgaggaagaagagagcaagatcttcaccaccctcgatcctgctagcctggcttggttaactgaggaagagcccgagcccgcggaggtcacatccacgtcacagagccctcactctccagatagtagccagtcttcccttgcccaggaagaggaggaggaggaccaaggtagaaccagaaaacgcaaacaatcaggtcactctcctgcccgcgctggcaagcaacgcatgaaggagaaggagcaagagaacgaacgcaaggttgcccaacttgccgaagagaacgaacgcttgaagcaggagattgaacgactcactcgagaggttgaggccacccggcgcgcccttatcgacaggatggttaatctgcaccaagcttag

SEQ ID NO: 74487 - DNA, 510 bp, Artificial Sequence
  derived and/or modified sequence
atggcagccgagagcctgccatttagtttcgggaccctgagtagctgggagctcgaggcctggtacgaggacctccaagaggtccttagctccgacgagaacggtggtacgtacgtaagcccccctggaaatgaggaggaagaatccaagattttcacaacactcgacccagcttcgcttgcttggcttacggaggaggagccagaaccagccgaggtgacttcaacttcccagagcccgcactcacccgatagcagccagtcttctctagcacaggaagaagaggaggaagatcaggggagaacgcgcaagcgcaaacagtcgggccattcccccgccagagcgggaaaacagcggatgaaggaaaaagagcaagaaaatgagcgtaaagtggcccagttggccgaagagaacgagcgattaaagcaggaaatcgagagactcacccgcgaggtcgaagctaccagacgggctctgatcgatcgcatggtgaacttacaccaggcctag

SEQ ID NO: 74488 - DNA, 510 bp, Artificial Sequence
  derived and/or modified sequence
atggctgctgagagcctgcccttctcctttggcaccctgagctcctgggagctggaggcctggtatgaggacctgcaggaggtgctgagcagtgatgaaaatggaggcacctacgtgtccccacctggaaatgaggaggaggagagcaagatcttcaccaccctggaccctgccagcctggcctggctgacagaggaggagcctgagcctgctgaggtgaccagcaccagccagagcccccacagcccagacagcagccagagcagcctggcccaggaggaggaggaggaggaccagggccgcaccaggaagaggaagcagagcggccacagccctgcccgggccggcaagcagaggatgaaggagaaggagcaggagaatgaaaggaaggtggcccagctggccgaggagaatgaaaggctgaagcaggagattgagcggctgacccgggaggtggaggccacccggcgggccctgattgacaggatggtgaacctgcaccaggcctag

SEQ ID NO: 74489 - DNA, 510 bp, Artificial Sequence
  derived and/or modified sequence
atggccgccgagagcctgcccttcagcttcggcaccctgagcagctgggagcttgaggcctggtacgaagacctacaggaggtactgtcatcagacgagaatggcggtacctacgtgtccccccctggtaatgaggaggaggagtcaaagatttttacgaccctggacccagcttctctggcatggctcaccgaagaggagccagaacctgctgaagtaacatctacttcacagagccctcactcccctgattccagccagagcagccttgcacaggaagaagaagaggaggatcaggggaggacccgcaaaaggaagcagtcagggcatagccccgcgcgcgccgggaaacagcggatgaaggaaaaagagcaggagaacgagagaaaggttgcccagctggctgaagagaacgaaaggctgaaacaagaaattgagagactcacccgagaggtggaggctactcgacgcgccctgattgatcgtatggtaaatctgcatcaagcctag

SEQ ID NO: 74490 - DNA, 510 bp, Artificial Sequence
  derived and/or modified sequence
atggccgccgagagcctgcccttcagcttcggcaccctgagcagctgggagctagaggcatggtacgaggacctacaggaggtcttgtcctccgacgagaatgggggcacttacgtatcaccccccggcaacgaggaggaagagagtaagatattcacaacgctggaccctgcaagtttagcctggctaactgaggaagagcctgagcccgccgaggtcacatcgacaagccagtctccccatagccctgattctagccagtcgtctctggctcaggaggaggaagaggaggatcagggccgaacccgcaaacgtaagcagagcggccactctcccgccagggccgggaagcagagaatgaaggaaaaggagcaggaaaacgaacgcaaggtggcacagctggctgaggaaaatgagagactgaagcaggagatcgagaggctgacacgggaagttgaggcaacaaggcgggccctgatcgacagaatggtaaacctccaccaggcttag

SEQ ID NO: 74491 - DNA, 510 bp, Artificial Sequence
  derived and/or modified sequence
atggcagctgaatctctgcccttctccttcgggacactgagttcctgggaattagaggcctggtacgaagacttgcaggaagtgctgtccagcgacgagaacggcggaacctatgtgagtcctcccggtaacgaggaggaggagagtaaaatattcaccactcttgaccccgcttctctggcttggctgacagaggaggaacccgagccagccgaggtgacatcaacctcccagagcccacacagtccagactcgagtcagtcctcactggctcaggaggaagaggaggaggaccagggcagaacccgcaagaggaagcaatctggccatagccccgcacgcgcagggaagcagcgtatgaaagagaaggagcaggaaaacgagcgaaaggtcgcacagctggctgaggagaatgagcgcctaaagcaggagattgaaaggctgaccagagaggtggaggcaactcgcagggccctcatcgaccgcatggtgaacctacatcaggcgtag

SEQ ID NO: 74492 - DNA, 510 bp, Artificial Sequence
  derived and/or modified sequence
atggctgccgaatcactgcccttctcattcggaactctgagtagctgggaactggaagcctggtacgaggacttgcaggaggtcctgtcttcagacgaaaatggcggtacctatgtcagtccccctggaaacgaggaggaagagtccaagatcttcacaacattggacccagcaagtctcgcttggctgacagaggaggagcccgagcccgctgaggttacatccacttcgcagtctccccactcccctgacagcagccaatctagcttagctcaggaagaggaggaagaagatcaggggcgtacaaggaaacgcaagcagagcggccattctcctgccagggcaggaaagcaacgaatgaaggaaaaagaacaagaaaacgaaaggaaggtggcgcagcttgcagaggaaaacgagcgattaaagcaagagatcgagcgactgaccagagaagtggaggctacaaggcgggcactgattgatcgaatggtgaacttgcaccaggcctag

SEQ ID NO: 74493 - protein, 493 aa, Artificial Sequence
  derived and/or modified sequence
MALLPRALSAGAGPSWRRAARAFRGFLLLLPEPAALTRALSRAMACRQEPQPQGPPPAAGAVASYDYLVIGGGSGGLASARRAAELGARAAVVESHKLGGTCVNVGCVPKKVMWNTAVHSEFMHDHADYGFPSCEGKFNWRVIKEKRDAYVSRLNAIYQNNLTKSHIEIIRGHAAFTSDPKPTIEVSGKKYTAPHILIATGGMPSTPHESQIPGASLGITSDGFFQLEELPGRSVIVGAGYIAVEMAGILSALGSKTSLMIRHDKVKEVKKTLSGLEVSMVTAVPGRLPVMTMIPDVDCLLWAIGRVPNTKDLSLNKLGIQTDDKGHIIVDEFQNTNVKGIYAVGDVCGKALLTPVAIAAGRKLAHRLFEYKEDSKLDYNNIPTVVFSHPPIGTVGLTEDEAIHKYGIENVKTYSTSFTPMYHAVTKRKTKCVMKMVCANKEEKVVGIHMQGLGCDEMLQGFAVAVKMGATKADFDNTVAIHPTSSEELVTLR

SEQ ID NO: 74494 - DNA, 1482 bp, Artificial Sequence
  derived and/or modified sequence
atggcgttattaccacgggctttgtcagctggggccggtcctagctggcgccgagcagctcgggcctttcggggttttctcctgctgctcccagagcccgccgccctgactagagctctttccagagcaatggcctgtagacaggaaccccagccgcaaggccccccacctgctgccggcgccgtggcctcttatgactacctggtaatcggaggcggctccggcggccttgcatcggcgaggcgcgctgccgagctgggcgctagagccgccgtggtagaatcccataaactcggtgggacctgcgtcaacgttgggtgtgtgcccaaaaaggttatgtggaacactgccgtgcactctgagtttatgcacgaccatgccgactatggatttccgagctgcgaaggtaaatttaattggagagtcattaaggagaagcgcgatgcctacgttagccggctgaacgcaatctaccagaacaaccttaccaagtctcacatagagattatacgcggacatgcagccttcacttccgacccaaagcccacaatcgaagtgtctgggaagaaatacactgcaccacatatcctcattgcgaccggaggaatgccgtctacaccacacgagagtcagattcccggtgcatctctcggcatcacctccgatgggttttttcagctggaagagctccccggcagatcggttatcgtgggggccgggtacatcgctgtggaaatggccgggattctgtctgcgctgggcagcaaaacaagtcttatgattcgccatgacaaggtgaaagaagtgaaaaagactctgtctggactggaggtttccatggtaacggcggtgcctggaagattacccgtgatgacgatgatcccagacgtcgattgtctgctctgggcgatcggccgtgtgccaaacacaaaggacctctccctcaacaagctaggtatacagacagatgacaagggacacatcatcgtggacgaattccaaaatacgaacgtgaaggggatttatgcagtgggagacgtgtgcggaaaggctttgttaacccctgtcgcaattgctgcagggaggaaactggctcatcggctcttcgagtataaggaagactccaagttggattacaacaacataccgaccgtcgtcttcagccaccccccaattgggacagttggcctgaccgaagacgaggctatccacaagtacggaattgaaaacgtaaagacttatagcacatccttcacgcccatgtaccatgcagtaacaaaacgcaagactaagtgcgtgatgaagatggtgtgcgcaaacaaggaagagaaggttgtggggattcacatgcaggggctcggatgcgatgagatgttgcagggtttcgccgtcgcagtgaagatgggcgcaaccaaggcggactttgataatacagtggctatccatcctaccagcagcgaggagctcgtaacactaagatag

SEQ ID NO: 74495 - DNA, 1482 bp, Artificial Sequence
  derived and/or modified sequence
atggccctgctgccccgagccctgagcgccggcgcgggaccgagctggcggcgggcggcgcgcgccttccgaggcttcctgctgcttctgcccgagcccgcggccctcacgcgcgccctctcccgtgccatggcctgcaggcaggagccgcagccgcagggcccgccgcccgctgctggcgccgtggcctcctatgactacctggtgatcgggggcggctcgggcgggctggccagcgcgcgcagggcggccgagctgggtgccagggccgccgtggtggagagccacaagctgggtggcacttgcgtgaatgttggatgtgtacccaaaaaggtaatgtggaacacagctgtccactctgaattcatgcatgatcatgctgattatggctttccaagttgtgagggtaaattcaattggcgtgttattaaggaaaagcgggatgcctatgtgagccgcctgaatgccatctatcaaaacaatctcaccaagtcccatatagaaatcatccgtggccatgcagccttcacgagtgatcccaagcccacaatagaggtcagtgggaaaaagtacaccgccccacacatcctgatcgccacaggtggtatgccctccacccctcatgagagccagatccccggtgccagcttaggaataaccagcgatggattttttcagctggaagaattgcccggccgcagcgtcattgttggtgcaggttacattgctgtggagatggcagggatcctgtcagccctgggttctaagacatcactgatgatacggcatgataaggtcaaggaggttaaaaagactttgtcgggcttggaagtcagcatggttactgcagttcccggtaggctaccagtcatgaccatgattccagatgttgactgcctgctctgggccattgggcgggtcccgaataccaaggacctgagtttaaacaaactggggattcaaaccgatgacaagggtcatatcatcgtagacgaattccagaataccaacgtcaaaggcatctatgcagttggggatgtatgtggaaaagctcttcttactccagttgcaatagctgctggccgaaaacttgcccatcgactttttgaatataaggaagattccaaattagattataacaacatcccaactgtggtcttcagccacccccctattgggacagtgggactcacggaagatgaagccattcataaatatggaatagaaaatgtgaagacctattcaacgagctttaccccgatgtatcacgcagttaccaaaaggaaaacaaaatgtgtgatgaaaatggtctgtgctaacaaggaagaaaaggtggttgggatccatatgcagggacttgggtgtgatgaaatgctgcagggttttgctgttgcagtgaagatgggagcaacgaaggcagactttgacaacacagtcgccattcaccctacctcttcagaagagctggtcacacttcgttga

SEQ ID NO: 74496 - DNA, 1482 bp, Artificial Sequence
  derived and/or modified sequence
atggccctgctgccccgggccctgtctgctggggccggccccagctggaggagagctgcccgggccttccggggcttcctgctgctgctgcctgagcctgctgccctgacccgggccctgagccgggccatggcctgccggcaggagccccagccccagggccccccacctgctgctggagctgtggccagctatgactacctggtgattggaggcggcagcggcggcctggccagcgccaggagagctgctgagctgggcgcccgggctgctgtggtggagagccacaagctgggcggcacctgtgtgaatgtgggctgtgtgcccaagaaggtgatgtggaacacagctgtgcacagcgagttcatgcatgaccatgctgactatggcttccccagctgtgagggcaagttcaactggagggtcatcaaggagaagagagatgcctacgtgtcccggctgaatgccatctaccagaacaacctgaccaagagccacatcgagatcatccggggccacgccgccttcaccagtgaccccaagcccaccatcgaggtgtctgggaagaagtacacagccccccacatcctgattgccaccggcggcatgcccagcacccctcatgagagccagatccctggggccagcctgggcatcaccagtgatggcttcttccagctggaggagctgcccggccgcagcgtcatcgtgggcgccggctacatcgctgtggagatggccggcatcctgagcgccctgggcagcaagaccagcctgatgatcagacatgacaaggtgaaggaggtgaagaagaccctgagcggcctggaggtgtccatggtgacagctgtgcccggccgcctgcctgtgatgaccatgatcccagatgtggactgcctgctgtgggccatcggccgggtgcccaacaccaaggacctgagcctgaacaagctgggcatccagacagatgacaagggccacatcatcgtggatgagttccagaacaccaacgtgaagggcatctatgctgtgggagatgtgtgtgggaaggccctgctgacccctgtggccatcgccgccggcaggaagctggcccaccggctgtttgagtacaaggaggacagcaagctggactacaacaacatccccaccgtggtgttcagccacccccccatcggcaccgtgggcctgacagaagatgaggccatccacaagtatggaattgaaaatgtgaagacctacagcaccagcttcacccccatgtaccacgctgtgaccaagaggaagaccaagtgtgtgatgaagatggtgtgtgccaacaaggaggagaaggtggtgggcatccacatgcagggcctgggctgtgatgagatgctgcagggctttgctgtggccgtgaagatgggcgccaccaaggctgactttgacaacacagtggccatccaccccaccagcagcgaggagctggtgaccctgaggtag

SEQ ID NO: 74497 - DNA, 1482 bp, Artificial Sequence
  derived and/or modified sequence
atggccctgctgccccgggccctgagcgccggcgccggccccagctggcgccgcgccgcccgggcatttaggggctttttgctgttgctgccagaacctgccgctctcacccgtgccctaagtagggcaatggcctgcagacaagagcctcaaccccagggcccacctccggcagccggggccgtcgcatcctatgactatctcgtcatcggcggtgggtccggcgggctggcctctgccagaagggctgccgagctgggggcacgggctgccgtggtggaaagccacaagcttggaggcacatgtgttaatgttggatgcgtcccaaaaaaggtaatgtggaacactgccgtgcacagcgaatttatgcatgaccacgcagactatgggttccccagttgcgaggggaagtttaactggagggttattaaagagaaacgtgatgcgtacgtgtcaaggcttaacgctatctaccaaaacaatcttaccaaaagtcacatcgagataatcaggggccatgcggccttcacttccgacccaaaaccaactatagaagtttccggcaaaaagtacacagctcctcatattctgattgccaccggtggcatgccatctaccccccacgagagccagatccctggagcctcccttgggattacgtccgacggattcttccagttggaggaactgcccgggagaagcgtgatcgtcggagcaggctatatcgcagtcgagatggccggcattctgtctgccttgggtagtaaaacaagtctgatgataagacacgataaagtgaaagaagtcaagaaaacgttgagcggactcgaagtgagcatggtgacggccgtacctggcaggctgcctgttatgacaatgataccagatgtcgattgcttgctgtgggccatcggtcgggttcccaataccaaggacctcagtctgaataagcttggcattcagacagacgacaagggacacataatagtcgatgaatttcagaacaccaatgttaaaggcatctatgccgtcggggacgtgtgtgggaaggcactgctaacgcccgtcgccatcgcggccgggcgcaaacttgcccaccggttgtttgagtacaaggaggatagtaaacttgactacaacaatatcccaactgtggtgtttagtcacccgccaatagggactgtgggtttgacggaggacgaagctatccataaatatggcatcgaaaacgtaaaaacgtatagcacctcctttacacctatgtaccatgccgtcactaaaagaaagacgaaatgcgttatgaaaatggtctgcgctaacaaagaagagaaggtcgtagggatacacatgcagggcctcggctgtgatgagatgttgcagggctttgcggtagcagttaagatgggcgcaactaaggcggactttgacaataccgtggctatccatccaacatcctccgaagagttagtgaccctgcggtag

SEQ ID NO: 74498 - DNA, 1482 bp, Artificial Sequence
  derived and/or modified sequence
atggccctgcttccccgtgcgcttagcgccggagccggaccctcctggcgtcgggcagctagggcatttagaggtttcctgctcttgctgcccgaaccagccgctcttacgagggccctctcacgcgcaatggcctgccgacaggagcctcaaccacaaggaccaccccctgcggctggggctgtcgctagctatgattatctcgtgattggaggaggatccggaggtttagcctctgcacggagggctgcagagttgggagcccgagcggcagtagtggaatcacataaactgggagggacatgtgtgaatgttggctgcgtgccgaaaaaagtgatgtggaataccgcagttcatagtgaatttatgcacgatcacgcagactacgggtttccgtcgtgcgagggaaagttcaactggcgggttatcaaggagaaaagggacgcctacgtttcccgattgaacgcgatttatcagaataacctcactaaaagccatattgagataattagaggccatgccgctttcacgagcgatcccaaaccaactattgaagtgtcgggtaagaagtacaccgctccacacattctcattgccacaggaggaatgccctcaactccgcacgaatcacagatcccaggagccagtttgggaatcaccagtgacggcttctttcagttggaagagcttcccggacggtcggtgatcgtcggcgctgggtatatcgccgtggaaatggctggaatcttgagcgccctcggcagcaaaacgtccctcatgattcggcacgacaaagtcaaagaggtcaaaaagacactcagcgggctggaggttagcatggtcacagcggtgccaggcagactgcctgtcatgaccatgatacccgatgtcgactgtctcctgtgggcaattggcagggtgccaaacacaaaggatctgagcctgaacaaactgggcattcagaccgacgacaaaggtcatatcattgtagacgagtttcagaatactaatgtgaagggaatttacgccgttggtgatgtgtgtggaaaagcactgttaacgcccgttgctatcgccgctggaaggaaactggcacaccgcctttttgaatacaaagaggacagcaaactggattacaacaacattcccaccgtagtgtttagccacccaccgattggcaccgtaggactgactgaggatgaagctattcataaatacggtattgagaacgtgaaaacatattctacatcgttcacacctatgtaccacgcagtgaccaaaaggaagaccaagtgcgtcatgaagatggtgtgtgctaataaagaagaaaaggtggtcggcatccacatgcaagggctgggttgcgatgagatgttgcaaggcttcgcagtggcagtcaagatgggtgcaacaaaagctgactttgataatacagtggccatccaccccacctcttcagaagagttggtcacattacggtag

SEQ ID NO: 74499 - DNA, 1482 bp, Artificial Sequence
  derived and/or modified sequence
atggccctgctgcccagagccctgagcgccggcgccggccccagctggagaagagccgccagagccttcagaggcttcctgctgctgctgcccgagcccgccgccctgaccagagccctgagcagagccatggcctgcagacaggagccccagccccagggccccccccccgccgccggcgccgtggccagctacgactacctggtgatcggcggcggcagcggcggcctggccagcgccagaagagccgccgagctgggcgccagagccgccgtggtggagagccacaagctgggcggcacctgcgtgaacgtgggctgcgtgcccaagaaggtgatgtggaacaccgccgtgcacagcgagttcatgcacgaccacgccgactacggcttccccagctgcgagggcaagttcaactggagagtgatcaaggagaagagagacgcctacgtgagcagactgaacgccatctaccagaacaacctgaccaagagccacatcgagatcatcagaggccacgccgccttcaccagcgaccccaagcccaccatcgaggtgagcggcaagaagtacaccgccccccacatcctgatcgccaccggcggcatgcccagcaccccccacgagagccagatccccggcgccagcctgggcatcaccagcgacggcttcttccagctggaggagctgcccggcagaagcgtgatcgtgggcgccggctacatcgccgtggagatggccggcatcctgagcgccctgggcagcaagaccagcctgatgatcagacacgacaaggtgaaggaggtgaagaagaccctgagcggcctggaggtgagcatggtgaccgccgtgcccggcagactgcccgtgatgaccatgatccccgacgtggactgcctgctgtgggccatcggcagagtgcccaacaccaaggacctgagcctgaacaagctgggcatccagaccgacgacaagggccacatcatcgtggacgagttccagaacaccaacgtgaagggcatctacgccgtgggcgacgtgtgcggcaaggccctgctgacccccgtggccatcgccgccggcagaaagctggcccacagactgttcgagtacaaggaggacagcaagctggactacaacaacatccccaccgtggtgttcagccacccccccatcggcaccgtgggcctgaccgaggacgaggccatccacaagtacggcatcgagaacgtgaagacctacagcaccagcttcacccccatgtaccacgccgtgaccaagagaaagaccaagtgcgtgatgaagatggtgtgcgccaacaaggaggagaaggtggtgggcatccacatgcagggcctgggctgcgacgagatgctgcagggcttcgccgtggccgtgaagatgggcgccaccaaggccgacttcgacaacaccgtggccatccaccccaccagcagcgaggagctggtgaccctgagatag

SEQ ID NO: 74500 - protein, 469 aa, Artificial Sequence
  derived and/or modified sequence
MALLPRALSAGAGPSWRRAARAFRGFLLLLPEPAALTRALSRAMACRQEPQPQGPPPAAGAVASYDYLVIGGGSGGLASARRAAELGARAAVVESHKLGGTCVNVGCVPKKVMWNTAVHSEFMHDHADYGFPSCEGKFNWRVIKEKRDAYVSRLNAIYQNNLTKSHIEIIRGHAAFTSDPKPTIEVSGKKYTAPHILIATGGMPSTPHESQIPGASLGITSDGFFQLEELPGRSVIVGAGYIAVEMAGILSALGSKTSLMIRHDKVLRSFDSMISTNCTEELENAGVEVLKFSQGIQTDDKGHIIVDEFQNTNVKGIYAVGDVCGKALLTPVAIAAGRKLAHRLFEYKEDSKLDYNNIPTVVFSHPPIGTVGLTEDEAIHKYGIENVKTYSTSFTPMYHAVTKRKTKCVMKMVCANKEEKVVGIHMQGLGCDEMLQGFAVAVKMGATKADFDNTVAIHPTSSEELVTLR

SEQ ID NO: 74501 - DNA, 1410 bp, Artificial Sequence
  derived and/or modified sequence
atggcactgctacctcgagccctttccgctggggctggcccatcatggcggagagcggcccgggcctttagggggtttctccttctgctgccggagcctgctgccctgacacgcgccttaagccgggcaatggcttgcagacaggaaccccagccacaaggacctccgccagccgccggggcagtggccagctatgattacctcgttatcgggggaggaagcggaggactcgcaagcgcgcgacgggcagctgagctgggagctcgtgccgccgtggttgagtctcacaaactcggaggcacttgtgtcaacgtcgggtgcgttcctaagaaggtgatgtggaacacagctgtgcactctgaatttatgcacgatcatgccgactatgggtttccaagttgcgaggggaagttcaactggcgcgttatcaaggaaaaacgggatgcctacgtcagtcggttgaacgccatctaccagaacaacctcacaaaaagtcatattgagatcattcgcggccatgccgccttcacaagcgaccctaaacccacgatcgaggtgtctggcaagaagtacacagctccacatatcttgatcgcgactggcggtatgccatcgaccccccatgaaagccagattccaggtgccagtctcggcataactagtgatggattctttcagctggaggagttgcctgggaggagcgtgatagttggcgccgggtatattgccgtcgaaatggcagggatcctctcagctctgggctcaaagactagtctgatgattaggcatgataaagttctccgttcctttgattccatgatctccactaattgtaccgaagagctggagaacgccggtgtagaggtgcttaagttctcacaagggatccagacggatgacaaagggcatattattgttgacgaatttcagaatactaatgtgaaaggcatctatgccgttggggatgtttgcggcaaggccctccttacccccgtcgccatcgccgccgggcgcaagctcgcccataggctgtttgagtacaaagaggattccaagctcgattacaacaatatccctactgtggtcttctcccatcctcctataggaacggtgggtttgacagaagatgaggccatccacaagtacggcattgaaaatgtgaagacttacagtaccagcttcacacctatgtaccacgcagtgacaaagcggaagacaaagtgcgtcatgaagatggtatgtgccaacaaggaggagaaggttgtaggcattcacatgcagggccttgggtgcgatgaaatgctgcaagggtttgctgtggccgtcaagatgggtgcaaccaaggccgacttcgataatactgtggctattcacccaacatcttcagaagaactcgtcacccttagatag

SEQ ID NO: 74502 - DNA, 1410 bp, Artificial Sequence
  derived and/or modified sequence
atggccctgctgccccgagccctgagcgccggcgcgggaccgagctggcggcgggcggcgcgcgccttccgaggcttcctgctgcttctgcccgagcccgcggccctcacgcgcgccctctcccgtgccatggcctgcaggcaggagccgcagccgcagggcccgccgcccgctgctggcgccgtggcctcctatgactacctggtgatcgggggcggctcgggcgggctggccagcgcgcgcagggcggccgagctgggtgccagggccgccgtggtggagagccacaagctgggtggcacttgcgtgaatgttggatgtgtacccaaaaaggtaatgtggaacacagctgtccactctgaattcatgcatgatcatgctgattatggctttccaagttgtgagggtaaattcaattggcgtgttattaaggaaaagcgggatgcctatgtgagccgcctgaatgccatctatcaaaacaatctcaccaagtcccatatagaaatcatccgtggccatgcagccttcacgagtgatcccaagcccacaatagaggtcagtgggaaaaagtacaccgccccacacatcctgatcgccacaggtggtatgccctccacccctcatgagagccagatccccggtgccagcttaggaataaccagcgatggattttttcagctggaagaattgcccggccgcagcgtcattgttggtgcaggttacattgctgtggagatggcagggatcctgtcagccctgggttctaagacatcactgatgatacggcatgataaggtacttagaagttttgattcaatgatcagcaccaactgcacggaggagctggagaacgctggcgtggaggtgctgaagttctcccaggggattcaaaccgatgacaagggtcatatcatcgtagacgaattccagaataccaacgtcaaaggcatctatgcagttggggatgtatgtggaaaagctcttcttactccagttgcaatagctgctggccgaaaacttgcccatcgactttttgaatataaggaagattccaaattagattataacaacatcccaactgtggtcttcagccacccccctattgggacagtgggactcacggaagatgaagccattcataaatatggaatagaaaatgtgaagacctattcaacgagctttaccccgatgtatcacgcagttaccaaaaggaaaacaaaatgtgtgatgaaaatggtctgtgctaacaaggaagaaaaggtggttgggatccatatgcagggacttgggtgtgatgaaatgctgcagggttttgctgttgcagtgaagatgggagcaacgaaggcagactttgacaacacagtcgccattcaccctacctcttcagaagagctggtcacacttcgttga

SEQ ID NO: 74503 - DNA, 1410 bp, Artificial Sequence
  derived and/or modified sequence
atggccctgctgccccgggccctgtctgctggggccggccccagctggaggagagctgcccgggccttccggggcttcctgctgctgctgcctgagcctgctgccctgacccgggccctgagccgggccatggcctgccggcaggagccccagccccagggccccccacctgctgctggagctgtggccagctatgactacctggtgattggaggcggcagcggcggcctggccagcgccaggagagctgctgagctgggcgcccgggctgctgtggtggagagccacaagctgggcggcacctgtgtgaatgtgggctgtgtgcccaagaaggtgatgtggaacacagctgtgcacagcgagttcatgcatgaccatgctgactatggcttccccagctgtgagggcaagttcaactggagggtcatcaaggagaagagagatgcctacgtgtcccggctgaatgccatctaccagaacaacctgaccaagagccacatcgagatcatccggggccacgccgccttcaccagtgaccccaagcccaccatcgaggtgtctgggaagaagtacacagccccccacatcctgattgccaccggcggcatgcccagcacccctcatgagagccagatccctggggccagcctgggcatcaccagtgatggcttcttccagctggaggagctgcccggccgcagcgtcatcgtgggcgccggctacatcgctgtggagatggccggcatcctgagcgccctgggcagcaagaccagcctgatgatcagacatgacaaggtgctgcggagctttgacagcatgatcagcaccaactgcacagaggagctggagaatgccggcgtggaggtgctgaagttcagccagggcatccagacagatgacaagggccacatcatcgtggatgagttccagaacaccaacgtgaagggcatctatgctgtgggagatgtgtgtgggaaggccctgctgacccctgtggccatcgccgccggcaggaagctggcccaccggctgtttgagtacaaggaggacagcaagctggactacaacaacatccccaccgtggtgttcagccacccccccatcggcaccgtgggcctgacagaagatgaggccatccacaagtatggaattgaaaatgtgaagacctacagcaccagcttcacccccatgtaccacgctgtgaccaagaggaagaccaagtgtgtgatgaagatggtgtgtgccaacaaggaggagaaggtggtgggcatccacatgcagggcctgggctgtgatgagatgctgcagggctttgctgtggccgtgaagatgggcgccaccaaggctgactttgacaacacagtggccatccaccccaccagcagcgaggagctggtgaccctgaggtag

SEQ ID NO: 74504 - DNA, 1410 bp, Artificial Sequence
  derived and/or modified sequence
atggccctgctgccccgggccctgagcgccggcgccggccccagctggaggcgcgctgcacgcgctttcaggggcttcctattgctgttgcctgagcccgcagcactgacaagggccctctctcgcgccatggcctgtagacaggaaccccagcctcagggcccgccccctgccgctggtgcagtggcctcttacgattatttggtcattggagggggcagtggaggtctagccagcgcaagacgggcagccgagctgggcgcgcgcgccgcggtggtagaatcacacaagctgggaggaacatgcgtcaatgtgggttgcgtgcccaagaaagtcatgtggaacaccgctgtgcactctgagtttatgcatgatcatgcggactatggttttccatcatgcgagggcaagttcaactggcgggtcatcaaggagaaacgagatgcctacgtatcccggctcaatgccatctatcagaacaacctgacgaaatctcacattgagatcatccggggccatgctgcattcacatcggacccaaagccaacaatagaggtgtctggcaaaaagtacactgcccctcacatcctcatagccaccggggggatgccgtccacgccacatgagagccagatcccaggagctagcctgggaatcacctctgacgggttcttccagctggaggaattgccaggaaggtcggtcattgtgggcgcaggttatatcgctgtcgagatggctggaatcctcagtgccttaggcagtaagactagcctgatgattagacatgataaagtattgagaagttttgactcgatgatttcaaccaattgcaccgaagagttggagaatgctggtgtagaagtgttgaagtttagccagggaatacaaaccgatgacaagggccacatcattgtcgacgaattccagaacacaaatgtaaaagggatttatgcagtcggagacgtttgtgggaaagcactgctgacgccagtggctattgctgctgggaggaaactggctcacagattgttcgagtacaaagaggactctaaactggattacaataatatacccactgtggtgtttagccacccgcctatagggaccgtggggctcacggaggacgaagcgatccacaagtacgggattgagaatgtcaagacgtactccacaagctttactcctatgtaccacgctgtgacgaaaagaaaaaccaagtgcgtgatgaagatggtttgtgctaacaaagaggagaaggtggtaggcatacacatgcaagggttagggtgtgacgaaatgctccagggatttgctgtcgccgtcaagatgggcgccaccaaagccgacttcgacaacaccgtagcgatccatcccacttctagcgaagagcttgtgacattaagatag

SEQ ID NO: 74505 - DNA, 1410 bp, Artificial Sequence
  derived and/or modified sequence
atggcactcctgccaagggcactaagcgcaggagctgggccatcttggcgacgggctgcacgtgctttcagggggttcctcctcctgctgcccgagcctgccgcactgaccagggctctaagccgtgccatggcctgccggcaggaaccacagccgcaaggcccaccacctgctgcaggtgccgttgcatcctatgattatctggttatcggaggcggaagcggcggacttgctagcgccagacgcgctgccgaactcggcgcacgggctgccgtggtggaaagccacaagctgggtgggacttgtgttaacgtaggttgtgtgccgaaaaaggtcatgtggaacaccgcagtgcatagcgaattcatgcatgaccatgcggactacggctttccatcctgcgagggaaaatttaactggcgagtaatcaaggagaagcgcgatgcgtacgtctcacgcctcaacgccatttaccaaaataacttgaccaagtctcacatcgagattatccgtgggcacgctgctttcacctccgaccctaaaccaaccattgaagtctctggaaagaaatataccgcccctcacatcctcatcgctaccggaggcatgccaagcactcctcatgagtcacagatccctggagcaagtttggggatcaccagtgatggcttctttcagctcgaggaactgcccggtcggtccgtgatagtgggagccggttacatagctgtagagatggccggtatcctatcggctttgggatccaagaccagcctaatgattcgccatgataaggtgctgcgatcatttgactcgatgatctcgactaattgcacagaggaactggaaaatgcgggagttgaggtgctcaaattttcacaggggatccagaccgatgacaaagggcacattatagttgacgagttccagaacacaaacgtgaaggggatttacgcagtgggggatgtgtgcggcaaggcactgcttacacccgtggctatcgccgctgggcgaaagctggcacacagactatttgaatacaaagaagatagtaaactggactacaacaacatcccaaccgtggtcttcagccatccaccaatcggaacagtgggtttaacagaggatgaagcaatccacaagtatggcatcgaaaacgtgaagacttacagcacatcttttacgccaatgtaccacgccgtaacaaaaagaaagaccaagtgcgttatgaagatggtgtgtgccaataaagaagaaaaggtcgttggcatccacatgcaaggactgggttgcgatgaaatgctgcaggggttcgccgtcgccgttaagatgggagccaccaaagccgacttcgacaatacagtagccatccatcccactagttccgaagagttggtaacgctgagatag

SEQ ID NO: 74506 - DNA, 1410 bp, Artificial Sequence
  derived and/or modified sequence
atggccctgctgcccagagccctgagcgccggcgccggccccagctggagaagagccgccagagccttcagaggcttcctgctgctgctgcccgagcccgccgccctgaccagagccctgagcagagccatggcctgcagacaggagccccagccccagggccccccccccgccgccggcgccgtggccagctacgactacctggtgatcggcggcggcagcggcggcctggccagcgccagaagagccgccgagctgggcgccagagccgccgtggtggagagccacaagctgggcggcacctgcgtgaacgtgggctgcgtgcccaagaaggtgatgtggaacaccgccgtgcacagcgagttcatgcacgaccacgccgactacggcttccccagctgcgagggcaagttcaactggagagtgatcaaggagaagagagacgcctacgtgagcagactgaacgccatctaccagaacaacctgaccaagagccacatcgagatcatcagaggccacgccgccttcaccagcgaccccaagcccaccatcgaggtgagcggcaagaagtacaccgccccccacatcctgatcgccaccggcggcatgcccagcaccccccacgagagccagatccccggcgccagcctgggcatcaccagcgacggcttcttccagctggaggagctgcccggcagaagcgtgatcgtgggcgccggctacatcgccgtggagatggccggcatcctgagcgccctgggcagcaagaccagcctgatgatcagacacgacaaggtgctgagaagcttcgacagcatgatcagcaccaactgcaccgaggagctggagaacgccggcgtggaggtgctgaagttcagccagggcatccagaccgacgacaagggccacatcatcgtggacgagttccagaacaccaacgtgaagggcatctacgccgtgggcgacgtgtgcggcaaggccctgctgacccccgtggccatcgccgccggcagaaagctggcccacagactgttcgagtacaaggaggacagcaagctggactacaacaacatccccaccgtggtgttcagccacccccccatcggcaccgtgggcctgaccgaggacgaggccatccacaagtacggcatcgagaacgtgaagacctacagcaccagcttcacccccatgtaccacgccgtgaccaagagaaagaccaagtgcgtgatgaagatggtgtgcgccaacaaggaggagaaggtggtgggcatccacatgcagggcctgggctgcgacgagatgctgcagggcttcgccgtggccgtgaagatgggcgccaccaaggccgacttcgacaacaccgtggccatccaccccaccagcagcgaggagctggtgaccctgagatag

SEQ ID NO: 74507 - protein, 440 aa, Artificial Sequence
  derived and/or modified sequence
MALLPRALSAGAGPSWRRAARAFRGFLLLLPEPAALTRALSRAMACRQEPQPQGPPPAAGAVASYDYLVIGGGSGGLASARRAAELGARAAVVESHKLGGTCVNVGCVPKKVMWNTAVHSEFMHDHADYGFPSCEGKFNWRVIKEKRDAYVSRLNAIYQNNLTKSHIEIIRGHAAFTSDPKPTIEVSGKKYTAPHILIATGGMPSTPHESQIPGASLGITSDGFFQLEELPGRSVIVGAGYIAVEMAGILSALGSKTSLMIRHDKGIQTDDKGHIIVDEFQNTNVKGIYAVGDVCGKALLTPVAIAAGRKLAHRLFEYKEDSKLDYNNIPTVVFSHPPIGTVGLTEDEAIHKYGIENVKTYSTSFTPMYHAVTKRKTKCVMKMVCANKEEKVVGIHMQGLGCDEMLQGFAVAVKMGATKADFDNTVAIHPTSSEELVTLR

SEQ ID NO: 74508 - DNA, 1323 bp, Artificial Sequence
  derived and/or modified sequence
atggctctcctgcctcgcgccctctccgctggagccggtccatcatggaggcgggccgcgcgggctttcagagggttcctgctgctcctgcccgaacccgcagccctgacgagggcgctgtctagggctatggcctgccggcaagaacctcagccccagggacctcctcctgcagctggcgctgtcgcaagctacgactaccttgtaataggtggaggttctggggggctggccagcgcccgaagggccgctgaactgggcgccagggcagccgttgtggagagccataagctcgggggcacctgcgttaacgtgggctgcgtgccgaaaaaggtgatgtggaatacagctgtccactctgagtttatgcatgatcatgctgattacggatttccttcatgtgaaggaaaattcaattggagagtgatcaaagagaaacgggatgcttatgtgtcccggctcaatgccatttaccagaacaatctgaccaaatcccatatagaaattatacgaggacacgctgcattcaccagcgatcctaagcctacaatagaagtatctggcaagaagtataccgcccctcacatcctgatcgcgaccggtggtatgccttctacgcctcacgagtcccagattcccggcgccagtcttggaataacgtctgatggtttctttcagcttgaggaacttcccggacgctctgtaatagtgggggccggttatatcgctgttgaaatggcaggcattcttagcgcccttggctccaagacctccctgatgattaggcatgataagggcattcagacagacgacaagggccacattatcgtggacgaattccagaacaccaacgtaaagggaatttacgctgtgggggacgtctgcggtaaggctttgcttaccccagtggctatagccgcgggtagaaagttggctcatcggctctttgagtacaaggaggacagcaagttggactacaataacattcccacggtagttttcagccaccctcccatcggtaccgttggactgacggaagatgaggcaatacataaatatgggatagaaaacgttaaaacctactctacgtcctttaccccaatgtaccatgccgtcaccaagaggaaaactaaatgtgtcatgaaaatggtgtgcgccaataaggaagagaaggtagttggcattcacatgcagggccttggttgtgacgaaatgctccaggggtttgccgtcgcagtgaagatgggcgcgacaaaagctgactttgataacaccgtcgccatacaccctacaagctcagaagagctggtcacgttaagatag

SEQ ID NO: 74509 - DNA, 1323 bp, Artificial Sequence
  derived and/or modified sequence
atggccctgctgccccgagccctgagcgccggcgcgggaccgagctggcggcgggcggcgcgcgccttccgaggcttcctgctgcttctgcccgagcccgcggccctcacgcgcgccctctcccgtgccatggcctgcaggcaggagccgcagccgcagggcccgccgcccgctgctggcgccgtggcctcctatgactacctggtgatcgggggcggctcgggcgggctggccagcgcgcgcagggcggccgagctgggtgccagggccgccgtggtggagagccacaagctgggtggcacttgcgtgaatgttggatgtgtacccaaaaaggtaatgtggaacacagctgtccactctgaattcatgcatgatcatgctgattatggctttccaagttgtgagggtaaattcaattggcgtgttattaaggaaaagcgggatgcctatgtgagccgcctgaatgccatctatcaaaacaatctcaccaagtcccatatagaaatcatccgtggccatgcagccttcacgagtgatcccaagcccacaatagaggtcagtgggaaaaagtacaccgccccacacatcctgatcgccacaggtggtatgccctccacccctcatgagagccagatccccggtgccagcttaggaataaccagcgatggattttttcagctggaagaattgcccggccgcagcgtcattgttggtgcaggttacattgctgtggagatggcagggatcctgtcagccctgggttctaagacatcactgatgatacggcatgataaggggattcaaaccgatgacaagggtcatatcatcgtagacgaattccagaataccaacgtcaaaggcatctatgcagttggggatgtatgtggaaaagctcttcttactccagttgcaatagctgctggccgaaaacttgcccatcgactttttgaatataaggaagattccaaattagattataacaacatcccaactgtggtcttcagccacccccctattgggacagtgggactcacggaagatgaagccattcataaatatggaatagaaaatgtgaagacctattcaacgagctttaccccgatgtatcacgcagttaccaaaaggaaaacaaaatgtgtgatgaaaatggtctgtgctaacaaggaagaaaaggtggttgggatccatatgcagggacttgggtgtgatgaaatgctgcagggttttgctgttgcagtgaagatgggagcaacgaaggcagactttgacaacacagtcgccattcaccctacctcttcagaagagctggtcacacttcgttga

SEQ ID NO: 74510 - DNA, 1323 bp, Artificial Sequence
  derived and/or modified sequence
atggccctgctgccccgggccctgtctgctggggccggccccagctggaggagagctgcccgggccttccggggcttcctgctgctgctgcctgagcctgctgccctgacccgggccctgagccgggccatggcctgccggcaggagccccagccccagggccccccacctgctgctggagctgtggccagctatgactacctggtgattggaggcggcagcggcggcctggccagcgccaggagagctgctgagctgggcgcccgggctgctgtggtggagagccacaagctgggcggcacctgtgtgaatgtgggctgtgtgcccaagaaggtgatgtggaacacagctgtgcacagcgagttcatgcatgaccatgctgactatggcttccccagctgtgagggcaagttcaactggagggtcatcaaggagaagagagatgcctacgtgtcccggctgaatgccatctaccagaacaacctgaccaagagccacatcgagatcatccggggccacgccgccttcaccagtgaccccaagcccaccatcgaggtgtctgggaagaagtacacagccccccacatcctgattgccaccggcggcatgcccagcacccctcatgagagccagatccctggggccagcctgggcatcaccagtgatggcttcttccagctggaggagctgcccggccgcagcgtcatcgtgggcgccggctacatcgctgtggagatggccggcatcctgagcgccctgggcagcaagaccagcctgatgatcagacatgacaagggcatccagacagatgacaagggccacatcatcgtggatgagttccagaacaccaacgtgaagggcatctatgctgtgggagatgtgtgtgggaaggccctgctgacccctgtggccatcgctgctggcaggaagctggcccaccggctgtttgagtacaaggaggacagcaagctggactacaacaacatccccaccgtggtgttcagccacccccccatcggcaccgtgggcctgacagaagatgaggccatccacaagtatggaattgaaaatgtgaagacctacagcaccagcttcacccccatgtaccacgctgtgaccaagaggaagaccaagtgtgtgatgaagatggtgtgtgccaacaaggaggagaaggtggtgggcatccacatgcagggcctgggctgtgatgagatgctgcagggctttgctgtggccgtgaagatgggcgccaccaaggctgactttgacaacacagtggccatccaccccaccagcagcgaggagctggtgaccctgaggtag

SEQ ID NO: 74511 - DNA, 1323 bp, Artificial Sequence
  derived and/or modified sequence
atggccctgctgccccgggccctgagcgccggcgccggccccagctggagacgagcggcgagggccttcagagggttcctgttgcttctgccggaaccagccgcattaacgagagctctatcccgcgccatggcctgtcgtcaggaaccccaaccacagggacccccacctgcggccggcgctgttgcctcttacgattacttagtaatcggaggaggctctgggggccttgcctccgccaggagggctgcggaactcggcgccagggctgctgtggtggagtcgcacaagcttggcggtacatgtgtgaacgtgggctgcgtgcctaagaaggttatgtggaatacggccgtgcactctgaatttatgcacgatcacgcggattatggtttcccatcatgcgaaggtaaattcaactggcgcgttatcaaggagaaacgcgacgcctacgtgtccagattaaacgctatttatcagaataacctgaccaagagccacattgagatcatccggggccacgccgccttcacatctgatccaaaaccaaccattgaggtctccgggaagaagtataccgcccctcacattttaatagctactgggggaatgccttcaacaccccatgagagtcagattcctggtgcgtctctggggatcacgagtgacggcttcttccagctcgaagagctgccgggtcgcagtgtgattgtgggagccggatacatcgctgttgaaatggcaggaattctcagtgctctgggctctaaaactagcctcatgatcagacacgacaaaggtattcaaacggacgataaggggcatattatcgttgatgaattccaaaatactaacgtgaaaggaatatacgctgtgggtgatgtttgtggtaaggcccttctcacccctgtggcaatcgctgctggccggaaactggcgcaccgactgttcgagtataaagaagattctaagctggattataacaatattccaaccgtggtgtttagtcatcctcccattgggacagtcggactgacagaagacgaagcaatccacaaatatggcatcgaaaatgtgaaaacatacagcaccagctttacacccatgtaccatgcagtcactaagcgaaagaccaaatgtgtgatgaagatggtgtgtgccaataaagaagagaaagttgtgggtattcacatgcagggactggggtgtgacgagatgcttcagggattcgctgtggccgtcaagatgggcgccacaaaagcggatttcgacaacaccgtggcgattcaccctaccagcagtgaggaacttgtcacactgcgatag

SEQ ID NO: 74512 - DNA, 1323 bp, Artificial Sequence
  derived and/or modified sequence
atggcactacttcctcgagctctttcggcaggcgcaggtccctcatggcgaagagctgcacgggctttccgcggtttcctgctgctgctgcctgaaccggctgctctcaccagagcactgtctagagcaatggcgtgtcgacaggagccacagccccaaggccctccacccgctgccggagccgtcgcctcctacgattatctggtgatagggggtggttcaggtgggctggctagcgccaggagagccgcagagctgggagctagggctgctgtggtcgagtcacataaacttggaggcacatgcgtgaacgtgggatgtgttccaaagaaggtgatgtggaataccgctgtgcattctgagtttatgcacgaccacgcagactacggatttcctagctgtgaaggcaagttcaattggcgagtcatcaaagagaaacgggatgcctacgtatcgcggctcaacgccatctatcagaataatctaactaagtcccacattgaaattatccgagggcacgctgcgttcacctctgatccgaaacctaccatcgaggtgtcagggaagaaatacactgcccctcacattttgatcgctacgggagggatgccttccacaccccacgaatcacagatccccggagcctccctcggaattacatccgatggcttctttcagctggaagagctcccgggaaggtctgtcatcgtgggcgcagggtatatcgctgtggagatggcaggtatcctcagcgcattggggtcaaagacatcactaatgatcaggcacgacaagggcattcagaccgatgacaaaggccacataatcgtggatgagttccagaatacgaacgtcaagggtatctatgctgtaggtgacgtgtgtggcaaggccctgctgacacctgtcgccattgcagcaggcaggaagcttgcccataggctcttcgagtacaaggaggatagtaagctggactacaataacatccctaccgtcgtattttctcacccaccaatcgggacggtcggcctgacagaagatgaggctattcacaaatacggaattgaaaacgtcaaaacatactcaacttcttttacccccatgtatcacgccgttacaaaacgcaaaacgaagtgcgtcatgaagatggtgtgcgctaacaaggaggaaaaggttgtcggaattcacatgcaaggattagggtgtgacgagatgctgcaaggctttgctgtggcagttaagatgggggcaactaaggcggatttcgacaacactgtcgccatccacccaacaagctccgaagagctggtgaccctgagatag

SEQ ID NO: 74513 - DNA, 1323 bp, Artificial Sequence
  derived and/or modified sequence
atggccctgctgcccagagccctgagcgccggcgccggccccagctggagaagagccgccagagccttcagaggcttcctgctgctgctgcccgagcccgccgccctgaccagagccctgagcagagccatggcctgcagacaggagccccagccccagggccccccccccgccgccggcgccgtggccagctacgactacctggtgatcggcggcggcagcggcggcctggccagcgccagaagagccgccgagctgggcgccagagccgccgtggtggagagccacaagctgggcggcacctgcgtgaacgtgggctgcgtgcccaagaaggtgatgtggaacaccgccgtgcacagcgagttcatgcacgaccacgccgactacggcttccccagctgcgagggcaagttcaactggagagtgatcaaggagaagagagacgcctacgtgagcagactgaacgccatctaccagaacaacctgaccaagagccacatcgagatcatcagaggccacgccgccttcaccagcgaccccaagcccaccatcgaggtgagcggcaagaagtacaccgccccccacatcctgatcgccaccggcggcatgcccagcaccccccacgagagccagatccccggcgccagcctgggcatcaccagcgacggcttcttccagctggaggagctgcccggcagaagcgtgatcgtgggcgccggctacatcgccgtggagatggccggcatcctgagcgccctgggcagcaagaccagcctgatgatcagacacgacaagggcatccagaccgacgacaagggccacatcatcgtggacgagttccagaacaccaacgtgaagggcatctacgccgtgggcgacgtgtgcggcaaggccctgctgacccccgtggccatcgccgccggcagaaagctggcccacagactgttcgagtacaaggaggacagcaagctggactacaacaacatccccaccgtggtgttcagccacccccccatcggcaccgtgggcctgaccgaggacgaggccatccacaagtacggcatcgagaacgtgaagacctacagcaccagcttcacccccatgtaccacgccgtgaccaagagaaagaccaagtgcgtgatgaagatggtgtgcgccaacaaggaggagaaggtggtgggcatccacatgcagggcctgggctgcgacgagatgctgcagggcttcgccgtggccgtgaagatgggcgccaccaaggccgacttcgacaacaccgtggccatccaccccaccagcagcgaggagctggtgaccctgagatag

SEQ ID NO: 74514 - protein, 239 aa, Artificial Sequence
  derived and/or modified sequence
MRASRSPPSPRRCHHHHEATGAASGAAAGGPGAGCVGLCRLALTPSAQDGRNSTFQTYKKEVCLPRHSMHPGPWAICCECQTRFGGRLPVSRVEAALPYWVPLSLRPRKQSQKTVQFPIPQTAKMCPCLCHRFGGRLPMPRDQAVMPYWVPQVLRSQQQIVRRQQSLKGIQAPLLDACCWHNCWRICGDECLLSKFQQLQAPYQDQLPAPAARLLPLGLLTLLQAIPRVIMAIRQCFGV

SEQ ID NO: 74515 - DNA, 1031 bp, Artificial Sequence
  derived and/or modified sequence
ctctgagcggttgaggttggggctggggttgagctcgggttgggttcctcctggggcaggagggaaaggcgggagccagggcgtcagggcctgcggacgatgtgtgtgtgaaagggcgcgtcagccataagaagccatatgcgtgcgagccggtccccaccgtccccgcggcgttgtcaccatcatcatgaggccactggagcagcctcaggcgctgctgccggggggccgggcgcggggtgcgtcgggctctgcaggttggcactcacacccagcgcgcaggatggcaggaatagcacatttcaaacctacaagaaagaagtgtgcctcccccgtcattcgatgcaccctggcccctgggccatctgctgtgaatgccagaccagattcgggggccgcctgcctgtgtccagggtggaagcagcactgccttactgggtccctctgtccctgagaccccgaaagcagagtcaaaagacggttcaatttcctatcccccaaaccgccaagatgtgcccctgcctatgccaccgctttgggggccgcctcccgatgcctagggaccaggcagtgatgccctactgggtgccccaggtcctgaggtctcagcagcagatagtcaggaggcagcagagtttgaaaggcatccaagcacccctgctggatgcatgctgctggcacaactgctggcggatctgcggtgatgagtgcctgttgtccaagttccagcagctccaggccccctaccaggaccagctaccggctcctgcagcgcgtctgctgcccctcggcctcctgaccctcctccaggccatcccgagggtcatcatggccattcgccagtgttttggggtttgaagttggaatcttcagctactgtcaagaacagccacaaaaatgtgtcacgatcaagatctttgagagtccaccaatcaggaggcgtctgtgacagtcgctgtcttctcagaacagaatccacacccaggattcaacccaaatgatttctcatcaggtgattcttggttgtagca

SEQ ID NO: 74516 - DNA, 720 bp, Artificial Sequence
  derived and/or modified sequence
atgagagccagcagaagcccccccagccccagaagatgccaccaccaccacgaggccaccggcgccgccagcggcgccgccgccggcggccccggcgccggctgcgtgggcctgtgcagactggccctgacccccagcgcccaggacggcagaaacagcaccttccagacctacaagaaggaggtgtgcctgcccagacacagcatgcaccccggcccctgggccatctgctgcgagtgccagaccagattcggcggcagactgcccgtgagcagagtggaggccgccctgccctactgggtgcccctgagcctgagacccagaaagcagagccagaagaccgtgcagttccccatcccccagaccgccaagatgtgcccctgcctgtgccacagattcggcggcagactgcccatgcccagagaccaggccgtgatgccctactgggtgccccaggtgctgagaagccagcagcagatcgtgagaagacagcagagcctgaagggcatccaggcccccctgctggacgcctgctgctggcacaactgctggagaatctgcggcgacgagtgcctgctgagcaagttccagcagctgcaggccccctaccaggaccagctgcccgcccccgccgccagactgctgcccctgggcctgctgaccctgctgcaggccatccccagagtgatcatggccatcagacagtgcttcggcgtgtag

SEQ ID NO: 74517 - DNA, 720 bp, Artificial Sequence
  derived and/or modified sequence
atgagagcatctcgcagtcccccttccccgcgccggtgtcaccatcaccatgaggcaacgggagcagccagtggggccgctgccggtgggcccggggctggctgtgtgggcctgtgtcgacttgctttgacaccaagcgcacaggatggccgtaattcaacttttcagacatacaagaaggaggtgtgtctcccacgtcactccatgcaccccgggccttgggcgatctgctgcgagtgccagactaggttcgggggtcgccttcccgtcagcagggtggaggccgcactgccttactgggtgccactgagtttgcgtccacgtaagcaaagccagaagaccgtacagttccctatcccccagactgcaaagatgtgtccttgcctctgtcataggttcggcggacggcttcccatgccccgtgatcaagctgttatgccatattgggttccacaggtcctgcgaagccagcagcagatcgtcagaagacagcagtcactgaaaggaattcaagcgccgctcctggatgcatgctgttggcataattgctggcggatttgcggtgatgaatgtttgcttagtaaattccaacagctgcaggcgccctatcaagaccagttaccggctcccgcagctaggctcttgccacttggtctgttaaccctactgcaagccatccctagagtcatcatggcaattcgacagtgctttggtgtgtag

SEQ ID NO: 74518 - DNA, 720 bp, Artificial Sequence
  derived and/or modified sequence
atgagggccagccgcagcccccccagcccccggcgctgccaccaccaccacgaggccaccggggccgccagcggggctgctgctgggggccctggagctggctgtgtgggcctgtgccgcctggccctgacccccagcgcccaggatggaagaaacagcaccttccagacctacaagaaggaggtgtgcctgcccaggcacagcatgcaccctggcccctgggccatctgctgtgagtgccagaccaggtttggaggccgcctgcctgtgtcccgggtggaggccgccctgccctactgggtgcccctgagcctgcggcccaggaagcagagccagaagacagtgcagttccccatcccccagacagccaagatgtgcccctgcctgtgccacagatttggaggccgcctgcccatgccccgggaccaggccgtgatgccctactgggtgccccaggtgctgcggagccagcagcagatcgtgcggcggcagcagagcctgaagggcatccaggcccccctgctggatgcctgctgctggcacaactgctggaggatctgtggagatgagtgcctgctgagcaagttccagcagctgcaggccccctaccaggaccagctgcctgccccagctgcccggctgctgcccctgggcctgctgaccctgctgcaggccatccccagggtcatcatggccatccggcagtgctttggagtgtag

SEQ ID NO: 74519 - DNA, 720 bp, Artificial Sequence
  derived and/or modified sequence
atgcgggccagccggagcccccccagcccccggcggtgccaccaccaccacgaagccactggggcggcaagcggcgcggctgcaggaggaccaggggctggctgtgtgggcctgtgcaggttagccctcaccccttccgcccaggatgggcgaaactcaacattccagacttataagaaagaggtctgtttgccacggcactccatgcaccctggaccatgggctatatgttgcgagtgtcagactaggtttggtggccgcctgccggtgtctcgggtggaagcagctctgccatactgggtgcctctgtcactgcggccaaggaaacagtcccagaagacggtccagttccccatccctcagaccgccaagatgtgtccgtgtctgtgccaccggtttggtgggagactccccatgcctcgagaccaggccgtgatgccatactgggtacctcaggtcctgaggagtcagcagcagatcgtgcgccgccagcagtcccttaaaggtattcaggccccgctccttgatgcttgttgctggcacaattgttggagaatctgcggggacgaatgtctgctatcgaagttccaacagctacaagcaccatatcaggatcagctgccagcgccggccgctagactcttacctttaggactgctcacactgctgcaggctatcccacgagtgattatggctataaggcagtgtttcggtgtttag

SEQ ID NO: 74520 - DNA, 720 bp, Artificial Sequence
  derived and/or modified sequence
atgagagcaagtaggagcccaccttccccacggaggtgtcatcaccaccacgaagccaccggtgccgcttccggtgccgctgccggaggtcccggagctggatgtgtgggcttatgcagactggccttgactccctctgcccaggacggacggaattcaacatttcagacctacaagaaagaggtttgtcttccccgtcacagcatgcatcccggaccttgggctatctgctgcgagtgccagactcggtttgggggtagattgcccgtgtcccgtgtggaagcagcgttaccttactgggtccccctgagcctgaggccaagaaagcagtctcaaaaaactgtccaattcccaattccacagaccgccaagatgtgtccatgcctgtgccataggttcggaggaaggcttcccatgccacgcgaccaggcagttatgccgtactgggtccctcaggtactccggtcccaacagcagatagtccggcgacagcaatctctgaagggaatacaggctcccctcctcgacgcttgttgctggcacaattgttggaggatatgcggagacgaatgtctgttgtccaaattccagcagctgcaggctccatatcaggaccaattgcccgctcccgcagctaggctgctacctctggggctgctaacgctcctgcaggcaattccccgagtgatcatggccattcgccagtgcttcggcgtgtag

SEQ ID NO: 74521 - protein, 158 aa, Artificial Sequence
  derived and/or modified sequence
MRASRSPPSPRRCHHHHEATGAASGAAAGGPGAGCVGLCRLALTPSAQDGRNSTFQTYKKEVCLPRHSMHPGPWAICCECQTRFGGRLPVSRVEAALPYWVPLSLRPRKQHPCWMHAAGTTAGGSAVMSACCPSSSSSRPPTRTSYRLLQRVCCPSAS

SEQ ID NO: 74522 - DNA, 477 bp, Artificial Sequence
  derived and/or modified sequence
atgagagccagcagaagcccccccagccccagaagatgccaccaccaccacgaggccaccggcgccgccagcggcgccgccgccggcggccccggcgccggctgcgtgggcctgtgcagactggccctgacccccagcgcccaggacggcagaaacagcaccttccagacctacaagaaggaggtgtgcctgcccagacacagcatgcaccccggcccctgggccatctgctgcgagtgccagaccagattcggcggcagactgcccgtgagcagagtggaggccgccctgccctactgggtgcccctgagcctgagacccagaaagcagcacccctgctggatgcacgccgccggcaccaccgccggcggcagcgccgtgatgagcgcctgctgccccagcagcagcagcagcagaccccccaccagaaccagctacagactgctgcagagagtgtgctgccccagcgccagctag

SEQ ID NO: 74523 - DNA, 477 bp, Artificial Sequence
  derived and/or modified sequence
atgcgggcaagcaggtcccccccatcacctcgcagatgtcatcaccaccatgaagccactggggcagcgtccggggcagcggcaggcggcccgggtgctggatgtgtggggctatgtagactagccctgactccctccgctcaggacggtagaaatagcacctttcagacctacaagaaggaggtctgcttaccccgtcattccatgcaccccgggccttgggctatctgttgcgagtgccagacgagatttggtggtcgcctgccagtgtctagagtggaagccgcactcccctactgggtccccctctcactgcgacctaggaagcaacacccctgttggatgcacgccgcagggaccaccgccggcggaagcgccgttatgtcagcctgttgcccttccagctccagcagccgccccccaactcggacttcgtatcgcttgctgcagagagtgtgttgtccttcagcctcgtag

SEQ ID NO: 74524 - DNA, 477 bp, Artificial Sequence
  derived and/or modified sequence
atgagggccagccgcagcccccccagcccccggcgctgccaccaccaccacgaggccaccggggccgccagcggggctgctgctgggggccctggagctggctgtgtgggcctgtgccgcctggccctgacccccagcgcccaggatggaagaaacagcaccttccagacctacaagaaggaggtgtgcctgcccaggcacagcatgcaccctggcccctgggccatctgctgtgagtgccagaccaggtttggaggccgcctgcctgtgtcccgggtggaggccgccctgccctactgggtgcccctgagcctgcggcccaggaagcagcacccctgctggatgcatgctgctggcaccacagctgggggcagcgctgtgatgtctgcctgctgccccagcagcagcagcagccggccccccaccaggaccagctaccgcctgctgcagagggtgtgctgccccagcgccagctag

SEQ ID NO: 74525 - DNA, 477 bp, Artificial Sequence
  derived and/or modified sequence
atgcgggccagccggagcccccccagcccccggcggtgccaccaccaccatgaggcaactggagcagccagcggagccgccgccggtggccccggtgccggctgtgtgggcctatgccgcctggcgttgaccccaagcgcccaggatggtcgcaatagcacttttcagacatacaagaaggaggtctgtctaccccgccacagcatgcacccaggaccttgggctatctgctgtgagtgccagaccaggtttggaggcagattgcctgtgagccgagtggaggccgcactgccctactgggtgcctctctctctcaggccacggaaacaacacccgtgctggatgcatgcggcaggaaccaccgctggaggttctgccgtgatgtctgcttgctgcccatcctcctcttcaagcagaccacctacaaggacctcctaccgcctcttacagcgtgtgtgctgtcccagcgccagctag

SEQ ID NO: 74526 - DNA, 477 bp, Artificial Sequence
  derived and/or modified sequence
atgagagcctccagatcacccccaagccctaggcgatgccaccatcaccatgaagccacaggcgctgccagcggggcagctgccggaggtcctggtgctggttgtgtcggtctttgtcggctggctctcaccccttcagcccaagacggcaggaattctaccttccaaacttacaagaaggaagtgtgtctccctcgacactctatgcaccctggcccttgggccatttgctgcgagtgccagactcgattcggaggtcgcctccctgtgtcgagagtggaggcagctctgccatactgggtccccctgagcctgagaccacgcaaacagcatccctgttggatgcatgccgcagggacaacggctggcggttccgctgtaatgagcgcatgttgtccctcctctagctcatccaggcctcctaccagaacctcttatcgccttttacagagggtgtgttgcccctccgcctcatag

SEQ ID NO: 74527 - DNA, 950 bp, Artificial Sequence
  derived and/or modified sequence
agcgggacgggcgggcgcgcgggcgttgttgggctcctctgagcggttgaggttggggctggggttgagctcgggttgggttcctcctggggcaggagggaaaggcgggagccagggcgtcagggcctgcggacgatgtgtgtgtgaaagggcgcgtcagccataagaagccatatgcgtgcgagccggtccccaccgtccccgcggcgttgtcaccatcatcatgaggccactggagcagcctcaggcgctgctgccggggggccgggcgcggggtgcgtcgggctctgcaggttggcactcacacccagcgcgcaggatggcaggaatagcacatttcaaacctacaagaaagaagtgtgcctcccccgtcattcgatgcaccctggcccctgggccatctgctgtgaatgccagaccagattcgggggccgcctgcctgtgtccagggtggaagcagcactgccttactgggtccctctgtccctgagaccccgaaagcagcacccctgctggatgcatgctgctggcacaactgctggcggatctgcggtgatgagtgcctgttgtccaagttccagcagctccaggccccctaccaggaccagctaccggctcctgcagcgcgtctgctgcccctcggcctcctgaccctcctccaggccatcccgagggtcatcatggccattcgccagtgttttggggtttgaagttggaatcttcagctactgtcaagaacagccacaaaaatgtgtcacgatcaagatctttgagagtccaccaatcaggaggcgtctgtgacagtcgctgtcttctcagaacagaatccacacccaggattcaacccaaatgatttctcatcaggtgattcttggttgtagcaaagttcatgtgaatgtgggtgagtttctgttatgaatgtggtcaataaatgttatttgtgaaactct

SEQ ID NO: 74528 - protein, 167 aa, Artificial Sequence
  derived and/or modified sequence
MEPAAGSSMEPSADWLATAAARGRVEEVRALLEAGALPNAPNSYGRRPIQVMMMGSARVAELLLLHGAEPNCADPATLTRPVHDAAREGFLDTLVVLHRAGARLDVRDAWGRLPVDLAEELGHRDVARYLRAAAGGTRGSNHARIDAAEGPSEMIGNHLWVCRSRHA

SEQ ID NO: 74529 - DNA, 504 bp, Artificial Sequence
  derived and/or modified sequence
atggagcccgccgccggcagcagcatggagcccagcgccgactggctggccaccgccgccgccagaggcagagtggaggaggtgagagccctgctggaggccggcgccctgcccaacgcccccaacagctacggcagaagacccatccaggtgatgatgatgggcagcgccagagtggccgagctgctgctgctgcacggcgccgagcccaactgcgccgaccccgccaccctgaccagacccgtgcacgacgccgccagagagggcttcctggacaccctggtggtgctgcacagagccggcgccagactggacgtgagagacgcctggggcagactgcccgtggacctggccgaggagctgggccacagagacgtggccagatacctgagagccgccgccggcggcaccagaggcagcaaccacgccagaatcgacgccgccgagggccccagcgagatgatcggcaaccacctgtgggtgtgcagaagcagacacgcctag

SEQ ID NO: 74530 - DNA, 880 bp, Artificial Sequence
  derived and/or modified sequence
ggagagggggagagcaggcagcgggcggcggggagcagcatggagccggcggcggggagcagcatggagccttcggctgactggctggccacggccgcggcccggggtcgggtagaggaggtgcgggcgctgctggaggcgggggcgctgcccaacgcaccgaatagttacggtcggaggccgatccaggtcatgatgatgggcagcgcccgagtggcggagctgctgctgctccacggcgcggagcccaactgcgccgaccccgccactctcacccgacccgtgcacgacgctgcccgggagggcttcctggacacgctggtggtgctgcaccgggccggggcgcggctggacgtgcgcgatgcctggggccgtctgcccgtggacctggctgaggagctgggccatcgcgatgtcgcacggtacctgcgcgcggctgcggggggcaccagaggcagtaaccatgcccgcatagatgccgcggaaggtccctcagaaatgatcggaaaccatttgtgggtttgtagaagcaggcatgcgtagggaagctacgggattccgccgaggagcgccagagcctgaggcgccctttggttatcgcaagctggctggctcactccgcaccaggtgcaaaagatgcctggggatgcgggaagggaaaggccacatcttcacgccttcgcgcctggcattacatccccgattgaaagaaccagagaggctctgagaaacctcgggaaacttagatcatcagtcaccgaaggtcctacagggccacaactgcccccgccacaacccaccccgctttcgtagttttcatttagaaaatagagcttttaaaaatgtcctgccttttaacgtagatatatgccttccccca

SEQ ID NO: 74531 - DNA, 716 bp, Artificial Sequence
  derived and/or modified sequence
ctcctccgagcactcgctcacggcgtccccttgcctggaaagataccgcggtccctccagaggatttgagggacagggtcggagggggctcttccgccagcaccggaggaagaaagaggaggggctggctggtcaccagagggtggggcggaccgcgtgcgctcggcggctgcggagagggggagagcaggcagcgggcggcggggagcagcatggagccggcggcggggagcagcatggagccttcggctgactggctggccacggccgcggcccggggtcgggtagaggaggtgcgggcgctgctggaggcgggggcgctgcccaacgcaccgaatagttacggtcggaggccgatccaggtcatgatgatgggcagcgcccgagtggcggagctgctgctgctccacggcgcggagcccaactgcgccgaccccgccactctcacccgacccgtgcacgacgctgcccgggagggcttcctggacacgctggtggtgctgcaccgggccggggcgcggctggacgtgcgcgatgcctggggccgtctgcccgtggacctggctgaggagctgggccatcgcgatgtcgcacggtacctgcgcgcggctgcggggggcaccagaggcagtaaccatgcccgcatagatgccgcggaaggtccctcagaaatgatcggaaaccatttgtgggtttgtagaagcaggcatgcgtag

SEQ ID NO: 74532 - DNA, 504 bp, Artificial Sequence
  derived and/or modified sequence
atggaacccgctgcgggctcctctatggaacctagcgccgattggctggcaaccgctgcagcaagaggtagggtggaggaggtgagagcacttcttgaagccggtgccctgccaaatgcccccaattcttacggtcgccggcctatccaggtcatgatgatgggttctgctagggttgccgagttgttgcttctgcacggcgcggagcccaactgtgccgatccagccaccctgactcgtcccgtccacgatgcagctcgtgaaggcttcttggatactttggtcgttttgcatagggccggtgcccggctggacgtccgagacgcctggggccggctgcccgtggacctggctgaggagttgggacacagagacgtcgcccggtatctgagagctgctgctggtggcacccgaggcagtaatcacgctcgaatcgatgccgctgaaggcccctcggaaatgattggtaatcacctgtgggtctgtaggagcaggcatgcttag

SEQ ID NO: 74533 - DNA, 504 bp, Artificial Sequence
  derived and/or modified sequence
atggagccagccgcgggctccagtatggagccatctgccgattggctggccacagccgccgcacgtgggagggtcgaagaagtgcgagcactcctggaagcaggggcacttcctaacgcccccaatagttacggcaggcgccccattcaggttatgatgatgggatctgctagggttgccgagctccttctcctgcatggtgctgaacctaattgtgccgatccggctacactcacgcggcctgtccatgatgccgcccgagagggctttcttgacactttagtggtattacatagagccggcgctcgactggacgtgcgggatgcctgggggcggttgcccgtggacttagctgaagagttaggccatcgcgatgttgccaggtatctgcgtgcggctgcgggaggaactaggggctctaaccacgctagaatcgacgctgcggagggcccttccgaaatgattggcaaccatctgtgggtttgcagatctcgacacgcgtag

SEQ ID NO: 74534 - DNA, 504 bp, Artificial Sequence
  derived and/or modified sequence
atggagcctgctgctggcagctccatggagcccagcgctgactggctggccacagctgctgcccggggccgggtggaggaggtgcgggccctgctggaggccggggccctgcccaatgcccccaacagctatggccggcggcccatccaggtgatgatgatgggcagcgcccgggtggccgagctgctgctgctgcacggggctgagcccaactgtgccgaccctgccaccctgaccaggcctgtgcatgatgctgcccgggagggcttcctggacaccctggtggtgctgcaccgggccggggcccggctggatgtgagagatgcctggggccgcctgcctgtggacctggccgaggagctgggccacagagatgtggcccgctacctgcgggctgctgctgggggcacccggggcagcaaccacgccagaattgatgctgctgagggccccagcgagatgattggcaaccacctgtgggtgtgccgcagcagacatgcctag

SEQ ID NO: 74535 - DNA, 504 bp, Artificial Sequence
  derived and/or modified sequence
atggagcccgccgccggcagcagcatggagcccagcgccgactggttagctactgctgccgctagaggcagggttgaggaagttagagcactgctggaggccggcgcactgccaaacgccccaaattcttatggtaggcgtcccattcaagtgatgatgatgggttcggcgagagtcgctgaactgcttctgctgcacggagccgaaccaaactgcgctgatccagccacactgaccagaccagtgcatgacgcagcgagagaggggttcctggatactctggtggtgctccaccgagccggcgctcgactagacgtgcgagacgcgtggggccgcctccctgtggatctcgccgaggaactcgggcatcgcgacgtggctagatacctgcgagccgccgcaggtggtacccggggcagtaaccacgcccggatcgacgccgctgaggggccctcagagatgatcgggaaccacctatgggtttgtcggtcaagacatgcatag

SEQ ID NO: 74536 - DNA, 504 bp, Artificial Sequence
  derived and/or modified sequence
atggagcccgccgccggcagcagcatggagcccagcgccgactggctggccactgctgcagctcgaggtcgtgtagaggaagtccgcgccctcctggaggccggagctttgcccaatgctcccaactcctatggcaggcgccctattcaggtgatgatgatgggttcggctagggtagcggagctgcttttgttgcacggcgccgagccaaactgcgctgatccagcaacacttactcgacctgttcacgatgctgcgcgcgagggattcctcgataccctggtggtgctgcatagggccggcgccaggctcgacgtcagggatgcctggggcagactccccgtggatctggctgaggagctgggacatcgggacgtcgcacgctatctaagagcagctgccggtggcacaaggggctcaaaccatgcaagaatcgatgcagctgaaggtccctcggagatgatcggaaaccacctctgggtgtgtaggagtcggcacgcatag

SEQ ID NO: 74537 - DNA, 504 bp, Artificial Sequence
  derived and/or modified sequence
atggagcccgcagccggaagtagtatggagccctcagcggactggttagccaccgcagccgctcggggacgggttgaggaggttcgcgctttgttggaagctggtgcacttcccaacgccccaaattcatacggccgtagaccaattcaggttatgatgatgggcagcgccagggtagccgagcttctcttgcttcatggggctgaaccgaattgcgctgaccctgccaccttgacaagacctgtgcatgatgccgctagggagggatttctggacacccttgttgtactgcatagagctggcgctcggttggatgtgagagacgcctgggggagactgcctgtggatttggctgaggagctcggccacagggatgttgctcgttacctgcgggctgccgctggcggaacccgcggtagcaatcatgcccgaatcgatgcagcagaggggccttctgaaatgatcggaaatcacctgtgggtgtgtagaagccgccatgcttag

SEQ ID NO: 74538 - DNA, 504 bp, Artificial Sequence
  derived and/or modified sequence
atggaacccgctgccggttcatctatggagccgagtgccgattggttggctacggccgcagctagaggacgggtggaggaagtaagagcactgctcgaggctggcgctctacctaatgcgcctaacagctacgggcgtcgtcctatccaggtgatgatgatgggcagcgcaagggtggcagaacttttgctgctccatggtgcagaacctaactgcgccgaccctgccactttgacgagaccagtgcatgacgcggcaagagaaggctttctggacaccctcgtagtgctgcatagggcaggggcacgcctggacgtgagggacgcctggggccgtctcccagtggacctggccgaggagctggggcacagggatgtggcacgctacctacgggctgcggcaggaggcacacgcggtagcaaccatgctaggatcgatgccgcagaaggcccaagtgaaatgatcggaaatcacctgtgggtgtgccgaagtcgccacgcatag

SEQ ID NO: 74539 - protein, 764 aa, Artificial Sequence
  derived and/or modified sequence
MADLDSPPKLSGVQQPSEGVGGGRCSEISAELIRSLTELQELEAVYERLCGEEKVVERELDALLEQQNTIESKMVTLHRMGPNLQLIEGDAKQLAGMITFTCNLAENVSSKVRQLDLAKNRLYQAIQRADDILDLKFCMDGVQTALRSEDYEQAAAHTHRYLCLDKSVIELSRQGKEGSMIDANLKLLQEAEQRLKAIVAEKFAIATKEGDLPQVERFFKIFPLLGLHEEGLRKFSEYLCKQVASKAEENLLMVLGTDMSDRRAAVIFADTLTLLFEGIARIVETHQPIVETYYGPGRLYTLIKYLQVECDRQVEKVVDKFIKQRDYHQQFRHVQNNLMRNSTTEKIEPRELDPILTEVTLMNARSELYLRFLKKRISSDFEVGDSMASEEVKQEHQKCLDKLLNNCLLSCTMQELIGLYVTMEEYFMRETVNKAVALDTYEKGQLTSSMVDDVFYIVKKCIGRALSSSSIDCLCAMINLATTELESDFRDVLCNKLRMGFPATTFQDIQRGVTSAVNIMHSSLQQGKFDTKGIESTDEAKMSFLSDCTKLFSQGIGGEQAQAKFDSCLSDLAAVSNKFRDLLQEGLTELNSTAIKPQVQPWINSFFSVSHNIEEEEFNDYEANDPWVQQFILNLEQQMAEFKASLSPVIYDSLTGLMTSLVAVELEKVVLKSTFNRLGGLQFDKELRSLIAYLTTVTTWTIRDKFARLSQMATILNLERVTEILDYWGPNSGPLTWRLTPAEVRQVLALRIDFRSEDIKRLRL

SEQ ID NO: 74540 - DNA, 2295 bp, Artificial Sequence
  derived and/or modified sequence
atggctgacctagacagcccccccaagctgagcggtgtgcagcaaccatccgagggggtaggtggaggccgctgttccgaaatttccgccgagctgatcaggtcgctgacagagttacaggagctggaagcagtgtacgagagactgtgtggcgaagagaaggttgtggagcgtgaactggatgctctactggagcagcagaacacaatcgaatcaaagatggttactttgcatcgcatgggacctaacctccagctaatagaaggggatgccaagcaacttgccggcatgatcacatttacctgcaatcttgccgagaatgtgtcttctaaggtgcgccagctcgacctggccaaaaatcgtctgtaccaagccattcaaagggctgatgatattctagacctgaaattttgcatggacggggttcagaccgctctccgatctgaggattatgagcaggccgctgcacacactcatcgttacttgtgtctggacaagtctgtgatcgagttgagcaggcaaggcaaggaggggagcatgatagatgccaatctcaaactactccaggaggcggagcagagactcaaagccatcgttgccgagaaatttgctattgcaactaaagagggagaccttcctcaggtcgaacggtttttcaagattttcccactcttgggtcttcacgaggagggactgaggaagttcagcgaatatctgtgcaaacaagtggcctctaaggcggaggagaatctcctgatggtgttaggcacagacatgtccgatagaagagccgcagtgattttcgccgacaccctgaccctcctgttcgaggggatagccaggatcgttgaaacgcaccagcccattgtcgaaacgtactatgggcccggacgtctttatacactcattaagtatcttcaggtggaatgtgaccggcaggtggagaaggtggtggataagtttattaagcagagggattatcaccaacaattccgacacgtacagaacaaccttatgcggaattctactaccgagaaaatcgagccacgcgaactggaccctatcctgactgaggtgaccctgatgaacgctaggtctgaactttatttgcggtttttgaagaagcgcatatccagcgatttcgaggtgggcgatagtatggcgtcggaggaggtgaagcaggagcaccagaaatgcctcgataaactcctgaataactgcctgttgtcttgtaccatgcaggaactcattggactttatgtgacaatggaagaatatttcatgcgggagacagtgaacaaagccgtggctcttgatacttatgagaaaggccaactgacaagttctatggtcgacgatgtgttctatatagtgaaaaaatgtatcggccgcgccctctcttcttcctctatcgattgcctatgcgcaatgataaacctggctaccacagagctggaaagtgatttccgtgatgtgctgtgtaacaagctcaggatgggcttcccggccacgacatttcaggacattcagcgtggggtgacctctgcggtgaatataatgcacagcagtctccaacaggggaagttcgacaccaagggcatagagagcacagatgaggccaagatgtctttccttagtgactgcaccaaactcttctcccagggcataggaggtgagcaggcccaggccaagtttgactcttgcctcagcgacctggcggcagtttccaataagtttcgcgaccttcttcaggaaggcctgaccgaactcaatagcactgctattaagccacaagttcagccttggattaattcattttttagcgttagccataacattgaagaggaggagtttaatgattacgaagccaatgacccatgggtacagcagttcatactaaacttagaacagcagatggcggaattcaaggccagtttatcgccagttatctatgatagcctaaccggactaatgacatcactcgtggccgtggagctggaaaaggtagtgctgaagtctacttttaataggctaggcggtttgcaatttgacaaagagttgcgatctctgattgcctaccttaccaccgtcactacctggacaatcagggacaaatttgcacgactaagccaaatggccaccatccttaatctggaaagagtcaccgaaattttagactattggggccccaactccgggccactgacctggaggcttaccccagctgaggttcggcaagtgctggctctcagaatcgatttcaggtccgaggacatcaagagacttaggctctag

SEQ ID NO: 74541 - DNA, 1014 bp, Artificial Sequence
  derived and/or modified sequence
atggctgatttggattcgccccctaagctctcaggcgtgcagcaaccaagtgagggggttgggggcggtaggtgctcagagatctctgccgagctgattaggtcgctgaccgagttgcaggagcttgaggctgtgtacgaaagactttgtggcgaagagaaggtcgtggagcgagagttggacgcgctgctggagcagcagaacacaattgagagtaaaatggtgacgctgcatcgcatggggccaaatctgcagctgatagaaggggacgcaaagcagctcgccggcatgataactttcacttgtaatctcgccgagaacgtatcctctaaggtccgccagctagatctcgccaagaacaggctgtaccaagccattcagcgtgctgatgatatcttagacttaaagttctgtatggacggagtgcagactgcgctccgcagtgaggattatgagcaggctgcagctcatacccacagatatctgtgcctagataagagtgtgattgaactgtcacgccaagggaaggaaggcagcatgatagacgcaaatctcaagctgctccaagaagctgaacagcggctgaaagctatagtggcagagaaattcgcaatcgcgactaaagagggggatctgccacaagtggagcggttcttcaagatcttcccccttctgggcctccatgaagagggcttgcggaagttctccgagtacctatgcaagcaggtggccagcaaggccgaggagaacttactcatggttctggggaccgatatgtccgataggagagccgcggtaatcttcgccgatactttaactctcctgtttgaagggattgctagaatagtcgaaactcatcagcccatagtggaaacatattatggccctggccgcttatacacactgatcaagtacctccaagttgagtgtgatcgccaagtggagaaagtcgtcgacaaattcataaaacagcgcgattaccatcagcagaacttcgtgttcagcttcttttag

SEQ ID NO: 74542 - DNA, 2295 bp, Artificial Sequence
  derived and/or modified sequence
atggctgacctggacagcccccccaagctgtctggagtgcagcagcccagcgagggcgtgggcggcggccgctgcagcgagatctctgctgagctgatccgcagcctgacagagctgcaggagctggaggccgtgtatgaaaggctgtgtggggaggagaaggtggtggagcgggagctggatgccctgctggagcagcagaacaccatcgagagcaagatggtgaccctgcacaggatgggccccaacctgcagctgattgaaggagatgccaagcagctggccggcatgatcaccttcacctgcaacctggccgagaatgtgagcagcaaggtgcggcagctggacctggccaagaaccggctgtaccaggccatccagagagcagatgacatcctggacctgaagttctgcatggatggagtgcagacagccctgcggagtgaagattatgagcaggccgccgcccacacccaccgctacctgtgcctggacaagtctgtgattgagctgagccggcagggcaaggagggctccatgattgatgccaacctgaagctgctgcaggaggccgagcagaggctgaaggccatcgtggccgagaagtttgccatcgccaccaaggagggggacctgccccaggtggagcgcttcttcaagatcttccccctgctgggcctgcacgaggagggcctgaggaagttcagcgagtacctgtgcaagcaggtggccagcaaggccgaggagaacctgctgatggtgctgggcacagacatgtctgaccggcgggctgctgtgatctttgctgacaccctgaccctgctgtttgagggcatcgcccgcatcgtggagacccaccagcccatcgtggagacctactacggccctggccgcctgtacaccctcatcaagtacctgcaggtggagtgtgaccggcaggtggagaaggtggtggacaagttcatcaagcagagggactaccaccagcagttcagacatgtgcagaacaacctgatgaggaacagcaccacagagaagattgagccccgggagctggaccccatcctgacagaggtgaccctgatgaatgcccggtctgagctgtacctgcgcttcctgaagaagaggatcagcagtgactttgaggtgggggacagcatggccagcgaggaggtgaagcaggagcaccagaagtgcctggacaagctgctgaacaactgcctgctgagctgcaccatgcaggagctgattggcctgtatgtgaccatggaggagtacttcatgagggagaccgtgaacaaggctgtggccctggacacctatgagaagggccagctgaccagctccatggtggatgatgtgttctacatcgtgaagaagtgcatcggccgggccctgagcagcagcagcattgactgcctgtgtgccatgatcaacctggccaccacagagctggagagtgacttcagagatgtgctgtgcaacaagctgaggatgggcttccctgccaccaccttccaggacatccagaggggcgtgaccagcgctgtgaacatcatgcacagcagcctgcagcagggcaagtttgacaccaagggcatcgagagcacagatgaggccaagatgtccttcctgagtgactgcaccaagctgttcagccagggcatcggcggggagcaggcccaggccaagtttgacagctgcctgagtgacctggccgctgtgagcaacaagttccgggacctgctgcaggagggcctgacagagctgaacagcacagccatcaagccccaggtgcagccctggatcaacagcttcttctctgtgagccacaacatcgaggaggaggagttcaatgactatgaggccaatgacccctgggtgcagcagttcatcctgaacctggagcagcagatggccgagttcaaggccagcctgagccctgtgatctatgacagcctgaccggcctgatgaccagcctggtggccgtggagctggagaaggtggtgctgaagagcaccttcaaccggctgggcggcctgcagtttgacaaggagctgcggagcctgattgcctacctgaccaccgtgaccacctggaccatccgggacaagtttgcccggctgagccagatggccaccatcctgaacctggagcgggtgacagagatcctggactactggggccccaacagcggccccctgacctggaggctgaccccagctgaggtgcggcaggtgctggccctgagaattgacttccgctctgaggacatcaagaggctgcggctgtag

SEQ ID NO: 74543 - DNA, 1014 bp, Artificial Sequence
  derived and/or modified sequence
atggctgacctggacagcccccccaagctgtctggagtgcagcagcccagcgagggcgtgggcggcggccgctgcagcgagatctctgctgagctgatccgcagcctgacagagctgcaggagctggaggccgtgtatgaaaggctgtgtggggaggagaaggtggtggagcgggagctggatgccctgctggagcagcagaacaccatcgagagcaagatggtgaccctgcacaggatgggccccaacctgcagctgattgaaggagatgccaagcagctggccggcatgatcaccttcacctgcaacctggccgagaatgtgagcagcaaggtgcggcagctggacctggccaagaaccggctgtaccaggccatccagagagcagatgacatcctggacctgaagttctgcatggatggagtgcagacagccctgcggagtgaagattatgagcaggccgccgcccacacccaccgctacctgtgcctggacaagtctgtgattgagctgagccggcagggcaaggagggctccatgattgatgccaacctgaagctgctgcaggaggccgagcagaggctgaaggccatcgtggccgagaagtttgccatcgccaccaaggagggggacctgccccaggtggagcgcttcttcaagatcttccccctgctgggcctgcacgaggagggcctgaggaagttcagcgagtacctgtgcaagcaggtggccagcaaggccgaggagaacctgctgatggtgctgggcacagacatgtctgaccggcgggctgctgtgatctttgctgacaccctgaccctgctgtttgagggcatcgcccgcatcgtggagacccaccagcccatcgtggagacctactacggccctggccgcctgtacaccctcatcaagtacctgcaggtggagtgtgaccggcaggtggagaaggtggtggacaagttcatcaagcagagggactaccaccagcagaactttgtgttctccttcttctag

SEQ ID NO: 74544 - DNA, 2295 bp, Artificial Sequence
  derived and/or modified sequence
atggccgacctggacagcccccccaagctgagcggcgtgcagcagccatcagagggagtggggggcggacgctgctccgagatctccgcagagctcatccgatcactgactgaactccaggagctggaggctgtgtacgagcgactctgcggcgaggagaaggtggtggaaagagaattggacgccctgttggagcagcagaacacgatcgaaagtaagatggtaaccctccatcgaatgggacctaacctccagctgatcgagggcgacgcaaagcagttggcagggatgattactttcacctgtaatctagcggagaacgtatcaagcaaagttcggcagttagatttggccaagaatcgtttgtaccaggcaatccagcgcgccgatgatatcctggacctgaagttttgcatggatggggtgcagacagccctccgttctgaagattatgaacaagcagcagcccacacacatcggtatctctgtcttgacaaatcggtgatcgaactgagtaggcagggcaaagaggggtcaatgattgatgctaacctgaagttgctgcaggaggcagagcagcggcttaaggccattgtcgcggaaaaattcgcaatcgcgaccaaagagggggatctgccccaggtggagcgcttttttaagatctttccactgcttggtcttcacgaggagggactacgcaagttcagcgagtatctctgtaaacaggtagctagtaaggccgaggagaacttgctaatggtgctcggaaccgacatgtctgaccgaagagctgccgtgatttttgctgatactttaactcttctctttgaaggcattgcccgaatagtggagacccaccagcctatcgtggagacctactacgggccaggacggctctatacccttataaagtatttgcaggtggagtgcgatcggcaggtggagaaagtcgttgataagttcattaagcagagggattaccatcagcagtttcgacatgtccagaataacctcatgcgaaattctaccaccgaaaagatagaaccccgggagttggatcctattctgacggaggtaaccctgatgaatgcgcgctccgagctatacctgagatttctgaaaaagcggatctccagcgattttgaggttggggacagcatggcctccgaggaggtcaagcaagagcaccagaaatgcctcgataaactgttgaacaattgccttctcagctgtactatgcaagagctgatcgggctatacgtcactatggaggagtactttatgcgggagacagtgaataaggccgtggctcttgatacctacgaaaagggacagcttactagcagcatggtcgatgacgtgttttacatcgtgaagaagtgcatcggtcgcgcgttgagcagctcatcgattgactgtctgtgtgctatgatcaatttagcgactaccgagctggaatcagactttcgagatgtactgtgcaacaagctgaggatgggctttccggctacaacattccaggacattcagcggggagtcaccagcgccgttaacatcatgcattcctctttacaacagggtaaatttgacaccaaaggcatagagtccactgacgaggccaaaatgtcatttttgtccgactgtacgaagctctttagccaagggattggcggggagcaggcacaggccaaattcgactcctgccttagcgacctggctgcagtatccaataagttcagggatctgttacaagaggggctgaccgagctgaattctaccgctatcaaaccgcaggtccagccctggataaatagtttcttctctgtctctcataacatcgaagaggaggagtttaatgactacgaagctaacgatccatgggtgcagcaatttatcctcaatcttgagcagcaaatggccgaattcaaggccagtctcagtccagttatatatgatagtctcacgggtctcatgacctccctggttgccgttgaactggagaaagtcgtgctgaagtccacctttaaccgactgggcgggcttcagttcgacaaggagctccgatccctcattgcatacttaaccactgtcaccacgtggactatcagggataagttcgcacgactaagccagatggcgacgatactcaatctggagcgagttaccgaaatcctggactactggggacctaatagtgggcctctgacatggcgtctgactcctgcagaagtgaggcaggttctagctctcagaatcgactttcgatcagaagatatcaagcgcctccgcttgtag

SEQ ID NO: 74545 - DNA, 1014 bp, Artificial Sequence
  derived and/or modified sequence
atggccgacctggacagcccccccaagctgagcggcgtgcagcagccaagcgaaggagtgggaggagggaggtgctctgagatcagtgctgagttgattcggagtcttacagaattgcaagaactggaggctgtgtacgagcgcctgtgtggagaagaaaaagttgtcgagagggagctagatgcacttctggaacagcagaacacgattgagtcaaagatggtgacactccatagaatgggtccaaaccttcagctgatcgagggtgatgcaaaacaactggcgggtatgatcacattcacctgcaatctggccgaaaatgtgagctccaaagtccgacaactggaccttgcaaagaatcgtctatatcaagccatccagcgcgcggacgatattctggacctgaaattctgtatggatggtgttcagacagctcttcgatccgaggactatgagcaggctgctgctcacacacatcgctacttgtgtcttgataagtccgtaattgagctgagccgccaggggaaggagggcagcatgatagatgccaatcttaagttactgcaagaggccgaacagcgcttgaaagccatcgttgccgaaaaattcgccatcgccactaaagagggcgacctaccacaggtcgaacgcttcttcaaaattttcccgctgctggggcttcatgaggaaggattgaggaaattttctgaatacctttgtaagcaagtcgcctccaaggccgaagaaaacctcttaatggttctcgggacggatatgtccgatcggcgggcagcagtcatcttcgctgacaccttgactctgctttttgaggggattgcccggatagtcgaaacccaccagcccattgtcgagacttattatggaccaggtcgtttatacaccctgattaagtacctccaagtggagtgtgacaggcaggtcgagaaagtggtggacaaatttataaagcagcgtgactaccatcaacagaattttgtgtttagttttttttag

SEQ ID NO: 74546 - DNA, 2295 bp, Artificial Sequence
  derived and/or modified sequence
atggctgacctcgactcgccacctaagctgagcggagtacaacagccttccgaaggcgtcgggggaggtcggtgcagtgagatcagcgccgaactgattcgaagcctcaccgagctgcaggaattagaggccgtctacgagcggctgtgtggtgaggagaaagtcgtcgagagagaacttgacgcactgctcgaacaacagaatacaatagaatctaagatggtgacgctgcatcggatgggaccgaatctccaacttatagagggggatgctaagcagcttgccggaatgataacgtttacatgcaatttggccgaaaacgtgagctccaaagtccggcagctcgatctggccaagaaccgactttatcaagctatccagcgcgcagacgacatcttggaccttaaattctgtatggacggtgtccagacagcccttcggtcggaggattatgaacaggccgctgcgcatacccacagatatctctgcctagataagtcagtgatcgaattgagcagacagggcaaagagggttcaatgattgatgcaaacctgaaactccttcaagaggcagagcagcggctgaaagccatagtggctgaaaaatttgccatagcaaccaaagaaggagacttgccccaggtggaacgattttttaagatctttccgttgctgggattgcatgaggaggggctgagaaaattttcagagtacttgtgtaagcaagtggcatccaaagctgaagaaaatcttctaatggtgcttgggaccgatatgtctgataggcgcgctgccgtgatcttcgccgacactctgacgctactgttcgaggggattgcccgtatagtggaaacccaccagccaatcgtagaaacatactatggcccaggacgcttgtacacactgataaagtatttgcaggtcgaatgcgatcggcaggtggagaaagtcgtggataagttcatcaagcagagggattaccaccagcagttccgacacgtccagaacaacctgatgcgcaatagcaccacagagaagattgagccacgcgagctggatcccattctcacagaagtgaccctgatgaacgcaagatccgaattatacctccgatttctcaaaaaaagaatcagtagtgattttgaagtgggtgactcgatggcgtctgaggaggttaaacaggaacaccagaagtgcctcgataagctgcttaacaactgcttgctgagctgtacaatgcaggagctgatagggctgtacgtgaccatggaagaatattttatgcgggaaacagtgaataaggccgtggccctggatacttacgaaaaggggcagctcacctcatccatggtcgatgatgtgttctatatcgtcaagaagtgtataggacgtgcactctcctccagtagcatcgactgtctgtgtgccatgattaatttggcgacaacggaactagagtccgatttccgcgatgtgctctgtaataagctcaggatgggtttccctgctactacttttcaggatatccagcgaggggtaacctcagctgttaacatcatgcactcttcgctccagcagggtaagttcgatactaaaggtatagaaagtacagacgaggctaaaatgtccttcctatcagactgtacaaaactctttagccaggggatcggcggagaacaggcccaggcaaagttcgactcttgtttgtcagacctggcagcagtgtctaataagtttcgggaccttctgcaagagggactgacggagctgaattctaccgccatcaaaccccaagtgcagccgtggattaacagcttcttctccgttagccacaatattgaggaagaggagtttaatgactatgaggccaatgacccttgggtacagcagtttatcttgaacctggaacagcaaatggccgagttcaaagccagcctctcacctgtcatctacgattcactgacaggattgatgacgagcctggtggctgtcgagctggagaaggttgtgctgaagagtactttcaaccgcctcgggggtctgcaatttgataaagagcttagatccctaatagcctacctcacaacagtgactacttggacgatacgggataagtttgcacgcctgtcccagatggccaccattctcaatctagaaagagtgactgaaatacttgattattggggaccgaactccggacccttaacctggcgacttacccctgccgaagtgcgccaggtccttgctttgcgcatcgactttcgctcagaggacataaaacggctccgtttatag

SEQ ID NO: 74547 - DNA, 1014 bp, Artificial Sequence
  derived and/or modified sequence
atggccgatctcgactcaccccctaaactcagcggcgtccagcaaccttccgaaggcgttggaggaggcaggtgcagtgaaatctccgcggagctcattcgttcactcactgaactgcaggaactagaggccgtttacgagagactgtgcggggaggaaaaggttgtagagcgggagctggacgccttgttggagcagcagaatacaatcgagagcaaaatggtgaccttgcacaggatgggcccaaacctgcagctgatcgaaggggatgccaaacaactggcaggtatgatcacatttacttgtaacctagccgagaatgtatcgtctaaggtcaggcagctggacctggccaaaaaccgcctctaccaagccatccaacgcgcagatgatatactcgatctcaagttttgtatggacggcgtgcagactgctttgagatctgaggactatgaacaggcggcagctcacacacaccgatacttgtgcttggacaaatcagtaattgagctcagcaggcagggcaaggagggcagcatgatcgacgctaacctgaaacttctacaggaggctgaacagaggctgaaggcaatcgtcgccgagaagtttgcaatagcaacaaaggagggagatctgcctcaggtcgaaagattttttaagatttttcctttattggggcttcatgaggagggccttcgtaaattttctgaatatctttgcaagcaggtagcctccaaggccgaagaaaatctcctgatggttctgggtaccgacatgtctgatagacgtgcggctgtgatatttgccgatacattaacattactgtttgaggggatcgctagaatcgtcgaaacgcatcaacctattgtggagacgtactacgggcctgggcgactctacactctgatcaaatacctacaggtcgagtgtgataggcaggttgagaaggtcgtcgataagttcatcaagcaacgggactatcatcagcaaaacttcgtgttctctttcttttag

SEQ ID NO: 74548 - DNA, 2734 bp, Artificial Sequence
  derived and/or modified sequence
aagatggcggaccttgattcgcctccgaagctgtcaggggtgcagcagccgtctgagggggtgggaggtggccgctgctccgaaatctccgctgagctcattcgctccctgacagagctgcaggagctggaggctgtatacgaacggctctgcggcgaggagaaagtggtggagagagagctggatgctcttttggaacagcaaaacaccattgaaagtaagatggtcactctccaccgaatgggtcctaatctgcagctgattgagggagatgcaaagcagctggctggaatgatcacctttacctgcaacctggctgagaatgtgtccagcaaagttcgtcagcttgacctggccaagaaccgcctctatcaggccattcagagagctgatgacatcttggacctgaagttctgcatggatggagttcagactgctttgaggagtgaagattatgagcaggctgcagcacatactcatcgctacttgtgcctggacaagtcggtcattgagctcagccgacagggcaaagaggggagcatgattgatgccaacctgaaattgctgcaggaagctgagcaacgtctcaaagccattgtggcagagaagtttgccattgccaccaaggaaggtgatctgccccaggtggagcgcttcttcaagatcttcccactgctgggtttgcatgaggagggattaagaaagttctcggagtacctttgcaagcaggtggccagtaaagctgaggagaatctgctcatggtgctggggacagacatgagtgatcggagagctgcagtcatctttgcagatacacttactcttctgtttgaagggattgcccgcattgtggagacccaccagccaatagtggagacctattatgggccagggagactctataccctgatcaaatatctgcaggtggaatgtgacagacaggtggagaaggtggtagacaagttcatcaagcaaagggactaccaccagcagttccggcatgttcagaacaacctgatgagaaattctacaacagaaaaaatcgaaccaagagaactggaccccatcctgactgaggtcaccctgatgaatgcccgcagtgagctatacttacgcttcctcaagaagaggattagctctgattttgaggtgggagactccatggcctcagaggaagtaaagcaagagcaccagaagtgtctggacaaactcctcaataactgccttttgagctgtaccatgcaggagctaattggcttatatgttaccatggaggagtacttcatgagggagactgtcaataaggctgtggctctggacacctatgagaagggccagctgacatccagcatggtggatgatgtcttctacattgttaagaagtgcattgggcgggctctgtccagctccagcattgactgtctctgtgccatgatcaacctcgccaccacagagctggagtctgacttcagggatgttctgtgtaataagctgcggatgggctttcctgccaccaccttccaggacatccagcgcggggtgacaagtgccgtgaacatcatgcacagcagcctccagcaaggcaaatttgacacaaaaggcatcgagagtactgacgaggcgaagatgtccttcctgagtgactgcaccaagctcttcagccagggcattggaggggagcaggcccaggccaagtttgacagctgcctttctgacttggccgccgtgtccaacaaattccgagacctcttgcaggaagggctgacggagctcaacagcacagccatcaagccacaggtgcagccttggatcaacagctttttctccgtctcccacaacatcgaggaggaagaattcaatgactatgaggccaacgacccttgggtacaacagttcatccttaacctggagcagcaaatggcagagttcaaggccagcctgtccccggtcatctacgacagcctaaccggcctcatgactagccttgttgccgtcgagttggagaaagtggtgctgaaatccacctttaaccggctgggtggtctgcagtttgacaaggagctgaggtcgctcattgcctaccttaccacggtgaccacctggaccatccgagacaagtttgcccggctctcccagatggccaccatcctcaatctggagcgggtgaccgagatcctcgattactggggacccaattccggcccattgacgtggcgcctcacccctgctgaagtgcgccaggtgctggccctgcggatagacttccgcagtgaagatatcaagaggctgcgcctgtagctgcctggatgagcacacctggctcatcacacttgcaggcctgttccctaaggggccccagccaaggagctgagcgaggctgtctggcttgggggagatctgacagcccagacctttctacggctggcagcagagaaacaaagtctggacccactccatgctctgccctcagacctggccaggtgatgctctgggggcagcatctccccaccgagagaagcgggctcctaatgaggtgggaaagccacggcaggcagcgagcagcccaggccagctttctgcatggatggtcagtctcttgccctcaaacactacagcaaacaagctacccctgccagtcctagacaacttgggtacatctggggacctagcagttaggcttgactttgaggagaggctgtgatgtttatgatccctgaataaagctactccttgg

SEQ ID NO: 74549 - DNA, 1017 bp, Artificial Sequence
  derived and/or modified sequence
aagatggcggaccttgattcgcctccgaagctgtcaggggtgcagcagccgtctgagggggtgggaggtggccgctgctccgaaatctccgctgagctcattcgctccctgacagagctgcaggagctggaggctgtatacgaacggctctgcggcgaggagaaagtggtggagagagagctggatgctcttttggaacagcaaaacaccattgaaagtaagatggtcactctccaccgaatgggtcctaatctgcagctgattgagggagatgcaaagcagctggctggaatgatcacctttacctgcaacctggctgagaatgtgtccagcaaagttcgtcagcttgacctggccaagaaccgcctctatcaggccattcagagagctgatgacatcttggacctgaagttctgcatggatggagttcagactgctttgaggagtgaagattatgagcaggctgcagcacatactcatcgctacttgtgcctggacaagtcggtcattgagctcagccgacagggcaaagaggggagcatgattgatgccaacctgaaattgctgcaggaagctgagcaacgtctcaaagccattgtggcagagaagtttgccattgccaccaaggaaggtgatctgccccaggtggagcgcttcttcaagatcttcccactgctgggtttgcatgaggagggattaagaaagttctcggagtacctttgcaagcaggtggccagtaaagctgaggagaatctgctcatggtgctggggacagacatgagtgatcggagagctgcagtcatctttgcagatacacttactcttctgtttgaagggattgcccgcattgtggagacccaccagccaatagtggagacctattatgggccagggagactctataccctgatcaaatatctgcaggtggaatgtgacagacaggtggagaaggtggtagacaagttcatcaagcaaagggactaccaccagcagaactttgttttttccttcttttga

SEQ ID NO: 74550 - DNA, 2295 bp, Artificial Sequence
  derived and/or modified sequence
atggccgacctggacagcccccccaagctgagcggcgtgcagcagcccagcgagggcgtgggcggcggcagatgcagcgagatcagcgccgagctgatcagaagcctgaccgagctgcaggagctggaggccgtgtacgagagactgtgcggcgaggagaaggtggtggagagagagctggacgccctgctggagcagcagaacaccatcgagagcaagatggtgaccctgcacagaatgggccccaacctgcagctgatcgagggcgacgccaagcagctggccggcatgatcaccttcacctgcaacctggccgagaacgtgagcagcaaggtgagacagctggacctggccaagaacagactgtaccaggccatccagagagccgacgacatcctggacctgaagttctgcatggacggcgtgcagaccgccctgagaagcgaggactacgagcaggccgccgcccacacccacagatacctgtgcctggacaagagcgtgatcgagctgagcagacagggcaaggagggcagcatgatcgacgccaacctgaagctgctgcaggaggccgagcagagactgaaggccatcgtggccgagaagttcgccatcgccaccaaggagggcgacctgccccaggtggagagattcttcaagatcttccccctgctgggcctgcacgaggagggcctgagaaagttcagcgagtacctgtgcaagcaggtggccagcaaggccgaggagaacctgctgatggtgctgggcaccgacatgagcgacagaagagccgccgtgatcttcgccgacaccctgaccctgctgttcgagggcatcgccagaatcgtggagacccaccagcccatcgtggagacctactacggccccggcagactgtacaccctgatcaagtacctgcaggtggagtgcgacagacaggtggagaaggtggtggacaagttcatcaagcagagagactaccaccagcagttcagacacgtgcagaacaacctgatgagaaacagcaccaccgagaagatcgagcccagagagctggaccccatcctgaccgaggtgaccctgatgaacgccagaagcgagctgtacctgagattcctgaagaagagaatcagcagcgacttcgaggtgggcgacagcatggccagcgaggaggtgaagcaggagcaccagaagtgcctggacaagctgctgaacaactgcctgctgagctgcaccatgcaggagctgatcggcctgtacgtgaccatggaggagtacttcatgagagagaccgtgaacaaggccgtggccctggacacctacgagaagggccagctgaccagcagcatggtggacgacgtgttctacatcgtgaagaagtgcatcggcagagccctgagcagcagcagcatcgactgcctgtgcgccatgatcaacctggccaccaccgagctggagagcgacttcagagacgtgctgtgcaacaagctgagaatgggcttccccgccaccaccttccaggacatccagagaggcgtgaccagcgccgtgaacatcatgcacagcagcctgcagcagggcaagttcgacaccaagggcatcgagagcaccgacgaggccaagatgagcttcctgagcgactgcaccaagctgttcagccagggcatcggcggcgagcaggcccaggccaagttcgacagctgcctgagcgacctggccgccgtgagcaacaagttcagagacctgctgcaggagggcctgaccgagctgaacagcaccgccatcaagccccaggtgcagccctggatcaacagcttcttcagcgtgagccacaacatcgaggaggaggagttcaacgactacgaggccaacgacccctgggtgcagcagttcatcctgaacctggagcagcagatggccgagttcaaggccagcctgagccccgtgatctacgacagcctgaccggcctgatgaccagcctggtggccgtggagctggagaaggtggtgctgaagagcaccttcaacagactgggcggcctgcagttcgacaaggagctgagaagcctgatcgcctacctgaccaccgtgaccacctggaccatcagagacaagttcgccagactgagccagatggccaccatcctgaacctggagagagtgaccgagatcctggactactggggccccaacagcggccccctgacctggagactgacccccgccgaggtgagacaggtgctggccctgagaatcgacttcagaagcgaggacatcaagagactgagactgtag

SEQ ID NO: 74551 - DNA, 1014 bp, Artificial Sequence
  derived and/or modified sequence
atggccgacctggacagcccccccaagctgagcggcgtgcagcagcccagcgagggcgtgggcggcggcagatgcagcgagatcagcgccgagctgatcagaagcctgaccgagctgcaggagctggaggccgtgtacgagagactgtgcggcgaggagaaggtggtggagagagagctggacgccctgctggagcagcagaacaccatcgagagcaagatggtgaccctgcacagaatgggccccaacctgcagctgatcgagggcgacgccaagcagctggccggcatgatcaccttcacctgcaacctggccgagaacgtgagcagcaaggtgagacagctggacctggccaagaacagactgtaccaggccatccagagagccgacgacatcctggacctgaagttctgcatggacggcgtgcagaccgccctgagaagcgaggactacgagcaggccgccgcccacacccacagatacctgtgcctggacaagagcgtgatcgagctgagcagacagggcaaggagggcagcatgatcgacgccaacctgaagctgctgcaggaggccgagcagagactgaaggccatcgtggccgagaagttcgccatcgccaccaaggagggcgacctgccccaggtggagagattcttcaagatcttccccctgctgggcctgcacgaggagggcctgagaaagttcagcgagtacctgtgcaagcaggtggccagcaaggccgaggagaacctgctgatggtgctgggcaccgacatgagcgacagaagagccgccgtgatcttcgccgacaccctgaccctgctgttcgagggcatcgccagaatcgtggagacccaccagcccatcgtggagacctactacggccccggcagactgtacaccctgatcaagtacctgcaggtggagtgcgacagacaggtggagaaggtggtggacaagttcatcaagcagagagactaccaccagcagaacttcgtgttcagcttcttctag

SEQ ID NO: 74552 - protein, 1414 aa, Artificial Sequence
  derived and/or modified sequence
MAEARKRRELLPLIYHHLLRAGYVRAAREVKEQSGQKCFLAQPVTLLDIYTHWQQTSELGRKRKAEEDAALQAKKTRVSDPISTSESSEEEEEAEAETAKATPRLASTNSSVLGADLPSSMKEKAKAETEKAGKTGNSMPHPATGKTVANLLSGKSPRKSAEPSANTTLVSETEEEGSVPAFGAAAKPGMVSAGQADSSSEDTSSSSDETDVEGKPSVKPAQVKASSVSTKESPARKAAPAPGKVGDVTPQVKGGALPPAKRAKKPEEESESSEEGSESEEEAPAGTRSQVKASEKILQVRAASAPAKGTPGKGATPAPPGKAGAVASQTKAGKPEEDSESSSEESSDSEEETPAAKALLQAKASGKTSQVGAASAPAKESPRKGAAPAPPGKTGPAVAKAQAGKREEDSQSSSEESDSEEEAPAQAKPSGKAPQVRAASAPAKESPRKGAAPAPPRKTGPAAAQVQVGKQEEDSRSSSEESDSDREALAAMNAAQVKPLGKSPQVKPASTMGMGPLGKGAGPVPPGKVGPATPSAQVGKWEEDSESSSEESSDSSDGEVPTAVAPAQEKSLGNILQAKPTSSPAKGPPQKAGPVAVQVKAEKPMDNSESSEESSDSADSEEAPAAMTAAQAKPALKIPQTKACPKKTNTTASAKVAPVRVGTQAPRKAGTATSPAGSSPAVAGGTQRPAEDSSSSEESDSEEEKTGLAVTVGQAKSVGKGLQVKAASVPVKGSLGQGTAPVLPGKTGPTVTQVKAEKQEDSESSEEESDSEEAAASPAQVKTSVKKTQAKANPAAARAPSAKGTISAPGKVVTAAAQAKQRSPSKVKPPVRNPQNSTVLARGPASVPSVGKAVATAAQAQTGPEEDSGSSEEESDSEEEAETLAQVKPSGKTHQIRAALAPAKESPRKGAAPTPPGKTGPSAAQAGKQDDSGSSSEESDSDGEAPAAVTSAQVIKPPLIFVDPNRSPAGPAATPAQAQAASTPRKARASESTARSSSSESEDEDVIPATQCLTPGIRTNVVTMPTAHPRIAPKASMAGASSSKESSRISDGKKQEGPATQVDSAVGTLPATSPQSTSVQAKGTNKLRKPKLPEVQQATKAPESSDDSEDSSDSSSGSEEDGEGPQGAKSAHTLGPTPSRTETLVEETAAESSEDDVVAPSQSLLSGYMTPGLTPANSQASKATPKLDSSPSVSSTLAAKDDPDGKQEAKPQQAAGMLSPKTGGKEAASGTTPQKSRKPKKGAGNPQASTLALQSNITQCLLGQPWPLNEAQVQASVVKVLTELLEQERKKVVDTTKESSRKGWESRKRKLSGDQPAARTPRSKKKKKLGAGEGGEASVSPEKTSTTSKGKAKRDKASGDVKEKKGKGSLGSQGAKDEPEEELQKGMGTVEGGDQSNPKSKKEKKKSDKRKKDK

SEQ ID NO: 74553 - DNA, 4245 bp, Artificial Sequence
  derived and/or modified sequence
atggccgaggccagaaagagaagagagctgctgcccctgatctaccaccacctgctgagagccggctacgtgagagccgccagagaggtgaaggagcagagcggccagaagtgcttcctggcccagcccgtgaccctgctggacatctacacccactggcagcagaccagcgagctgggcagaaagagaaaggccgaggaggacgccgccctgcaggccaagaagaccagagtgagcgaccccatcagcaccagcgagagcagcgaggaggaggaggaggccgaggccgagaccgccaaggccacccccagactggccagcaccaacagcagcgtgctgggcgccgacctgcccagcagcatgaaggagaaggccaaggccgagaccgagaaggccggcaagaccggcaacagcatgccccaccccgccaccggcaagaccgtggccaacctgctgagcggcaagagccccagaaagagcgccgagcccagcgccaacaccaccctggtgagcgagaccgaggaggagggcagcgtgcccgccttcggcgccgccgccaagcccggcatggtgagcgccggccaggccgacagcagcagcgaggacaccagcagcagcagcgacgagaccgacgtggagggcaagcccagcgtgaagcccgcccaggtgaaggccagcagcgtgagcaccaaggagagccccgccagaaaggccgcccccgcccccggcaaggtgggcgacgtgaccccccaggtgaagggcggcgccctgccccccgccaagagagccaagaagcccgaggaggagagcgagagcagcgaggagggcagcgagagcgaggaggaggcccccgccggcaccagaagccaggtgaaggccagcgagaagatcctgcaggtgagagccgccagcgcccccgccaagggcacccccggcaagggcgccacccccgccccccccggcaaggccggcgccgtggccagccagaccaaggccggcaagcccgaggaggacagcgagagcagcagcgaggagagcagcgacagcgaggaggagacccccgccgccaaggccctgctgcaggccaaggccagcggcaagaccagccaggtgggcgccgccagcgcccccgccaaggagagccccagaaagggcgccgcccccgccccccccggcaagaccggccccgccgtggccaaggcccaggccggcaagagagaggaggacagccagagcagcagcgaggagagcgacagcgaggaggaggcccccgcccaggccaagcccagcggcaaggccccccaggtgagagccgccagcgcccccgccaaggagagccccagaaagggcgccgcccccgccccccccagaaagaccggccccgccgccgcccaggtgcaggtgggcaagcaggaggaggacagcagaagcagcagcgaggagagcgacagcgacagagaggccctggccgccatgaacgccgcccaggtgaagcccctgggcaagagcccccaggtgaagcccgccagcaccatgggcatgggccccctgggcaagggcgccggccccgtgccccccggcaaggtgggccccgccacccccagcgcccaggtgggcaagtgggaggaggacagcgagagcagcagcgaggagagcagcgacagcagcgacggcgaggtgcccaccgccgtggcccccgcccaggagaagagcctgggcaacatcctgcaggccaagcccaccagcagccccgccaagggccccccccagaaggccggccccgtggccgtgcaggtgaaggccgagaagcccatggacaacagcgagagcagcgaggagagcagcgacagcgccgacagcgaggaggcccccgccgccatgaccgccgcccaggccaagcccgccctgaagatcccccagaccaaggcctgccccaagaagaccaacaccaccgccagcgccaaggtggcccccgtgagagtgggcacccaggcccccagaaaggccggcaccgccaccagccccgccggcagcagccccgccgtggccggcggcacccagagacccgccgaggacagcagcagcagcgaggagagcgacagcgaggaggagaagaccggcctggccgtgaccgtgggccaggccaagagcgtgggcaagggcctgcaggtgaaggccgccagcgtgcccgtgaagggcagcctgggccagggcaccgcccccgtgctgcccggcaagaccggccccaccgtgacccaggtgaaggccgagaagcaggaggacagcgagagcagcgaggaggagagcgacagcgaggaggccgccgccagccccgcccaggtgaagaccagcgtgaagaagacccaggccaaggccaaccccgccgccgccagagcccccagcgccaagggcaccatcagcgcccccggcaaggtggtgaccgccgccgcccaggccaagcagagaagccccagcaaggtgaagccccccgtgagaaacccccagaacagcaccgtgctggccagaggccccgccagcgtgcccagcgtgggcaaggccgtggccaccgccgcccaggcccagaccggccccgaggaggacagcggcagcagcgaggaggagagcgacagcgaggaggaggccgagaccctggcccaggtgaagcccagcggcaagacccaccagatcagagccgccctggcccccgccaaggagagccccagaaagggcgccgcccccaccccccccggcaagaccggccccagcgccgcccaggccggcaagcaggacgacagcggcagcagcagcgaggagagcgacagcgacggcgaggcccccgccgccgtgaccagcgcccaggtgatcaagccccccctgatcttcgtggaccccaacagaagccccgccggccccgccgccacccccgcccaggcccaggccgccagcacccccagaaaggccagagccagcgagagcaccgccagaagcagcagcagcgagagcgaggacgaggacgtgatccccgccacccagtgcctgacccccggcatcagaaccaacgtggtgaccatgcccaccgcccaccccagaatcgcccccaaggccagcatggccggcgccagcagcagcaaggagagcagcagaatcagcgacggcaagaagcaggagggccccgccacccaggtggacagcgccgtgggcaccctgcccgccaccagcccccagagcaccagcgtgcaggccaagggcaccaacaagctgagaaagcccaagctgcccgaggtgcagcaggccaccaaggcccccgagagcagcgacgacagcgaggacagcagcgacagcagcagcggcagcgaggaggacggcgagggcccccagggcgccaagagcgcccacaccctgggccccacccccagcagaaccgagaccctggtggaggagaccgccgccgagagcagcgaggacgacgtggtggcccccagccagagcctgctgagcggctacatgacccccggcctgacccccgccaacagccaggccagcaaggccacccccaagctggacagcagccccagcgtgagcagcaccctggccgccaaggacgaccccgacggcaagcaggaggccaagccccagcaggccgccggcatgctgagccccaagaccggcggcaaggaggccgccagcggcaccaccccccagaagagcagaaagcccaagaagggcgccggcaacccccaggccagcaccctggccctgcagagcaacatcacccagtgcctgctgggccagccctggcccctgaacgaggcccaggtgcaggccagcgtggtgaaggtgctgaccgagctgctggagcaggagagaaagaaggtggtggacaccaccaaggagagcagcagaaagggctgggagagcagaaagagaaagctgagcggcgaccagcccgccgccagaacccccagaagcaagaagaagaagaagctgggcgccggcgagggcggcgaggccagcgtgagccccgagaagaccagcaccaccagcaagggcaaggccaagagagacaaggccagcggcgacgtgaaggagaagaagggcaagggcagcctgggcagccagggcgccaaggacgagcccgaggaggagctgcagaagggcatgggcaccgtggagggcggcgaccagagcaaccccaagagcaagaaggagaagaagaagagcgacaagagaaagaaggacaagtag

SEQ ID NO: 74554 - DNA, 4245 bp, Artificial Sequence
  derived and/or modified sequence
atggccgaagcgaggaagcgaagggagctcctgccgctgatttaccaccatttactaagggccggctacgtgagggcagctagagaagtcaaggagcaaagcggccagaagtgcttcctcgcccagccagtcactctcctagacatctacacacactggcagcagacttcagaactggggcgcaaaaggaaggctgaagaggacgctgcactgcaggccaagaaaactagggtatccgaccctatctcaaccagcgaaagttcagaggaggaggaagaagctgaggctgaaacagcgaaagccactccacggctggcatccaccaatagtagcgtcttgggagccgacttgccttccagcatgaaagagaaggccaaagctgagacggagaaggcaggaaagactggcaattcaatgccccacccagcaactggcaaaaccgtggccaatctcctgtcaggtaagagcccccgcaagtccgctgagccctccgccaacacgactttggtcagcgagaccgaggaagaggggtcagtgcccgcgtttggagctgccgcgaagcccggtatggtgagtgctggacaggcagatagcagctctgaggataccagctcgagttctgatgaaacagatgtcgaggggaagccaagcgtgaaacccgctcaagtgaaagcatcctctgtatccaccaaagagagccctgcaagaaaggctgctccggcccctgggaaggtaggagatgttactccacaagtgaaagggggcgccctcccgcctgctaagagagctaagaaacccgaagaagagtctgagagttccgaggaggggtctgaatccgaggaagaggctcccgccgggactaggtcccaggtgaaggccagtgagaaaatcctgcaggtccgcgctgcatctgcaccagccaaaggcacacctggaaagggagcaactccagccccgcccgggaaggccggtgcagtcgcctctcaaacgaaggcagggaagccagaagaggactcagagtcatcatctgaagaaagcagcgatagtgaagaggaaactccggccgccaaggctctgctccaggctaaggcctccgggaagacgtctcaggtgggcgccgctagtgcccctgccaaggaatccccccgcaaaggagcagccccagctccgcccggaaaaacagggcctgcggtggcaaaggctcaggcagggaaacgcgaagaagacagtcaatcttcttctgaagagtccgattccgaagaggaggcgccggctcaggcaaagccttccgggaaggctcctcaggtgcgtgccgccagcgcacctgccaaagaatcccctcggaagggggccgcccctgcacctccacgaaaaaccgggccagccgcagcacaggtgcaggtcgggaaacaggaggaggattcccgttcctcctccgaggaatccgactcagatcgggaagccttagccgctatgaatgccgcccaggtcaagccactgggtaaatctccacaggtcaaacctgctagcactatgggcatgggacccctgggcaaaggtgctgggcccgtccctcccgggaaagtgggtcccgctacaccctcggcgcaagtgggaaagtgggaggaagatagtgagtcttcaagcgaggagagtagcgactcatctgatggcgaggtgcccacagctgtggcaccagctcaggagaaatcccttggaaatatcttacaggccaaacctacgagtagcccagccaagggacctccgcagaaagccggaccagtggcagttcaggtcaaggctgagaaacccatggataattccgagtctagtgaggagtctagtgatagcgctgattctgaggaggctccagcggcaatgacagccgcgcaggccaaacccgcactgaaaattcctcagactaaagcctgtccaaagaagaccaatactacagcctcagccaaagttgcgcctgtgcgggtcggcacacaggcccccaggaaggcaggcaccgccacatctcccgcggggtcaagtccggctgtcgcaggaggtactcagcgccctgcagaggattcttcttcctcagaggaatcagattctgaggaagaaaagactggcctggctgtgaccgtcgggcaggccaagtccgtaggaaagggtctccaggtaaaggccgcaagcgtccccgtcaaaggtagtctgggtcagggcacagctccagttcttcctggtaaaaccggaccgacagtgacacaggtgaaggcagagaaacaggaggacagcgaaagctcagaagaggagtctgactcagaggaagcagccgcgagtcccgctcaggtgaagacctctgttaaaaaaacccaggccaaggctaatcccgccgcggcccgcgccccctcagccaagggtacgatttccgccccaggaaaagtggtcacagccgcagctcaggccaaacaaaggagcccgagtaaggtgaagcctccagtgagaaatcctcagaacagcactgtcctcgccaggggacctgcttctgtccccagcgtcggcaaagcggtagcaactgctgctcaggctcagactgggcccgaggaagatagcggaagctctgaagaagaatccgattccgaagaggaggcggaaactctggcccaggtaaagcccagcggcaagacccaccagatccgagctgctctggcgccagccaaggaatcccctaggaaaggtgccgcgcccactcccccgggcaaaaccggacccagcgctgcacaggctgggaaacaggacgattctggctctagcagcgaggagtctgattcagacggtgaagctcccgccgcagtcacctctgcccaagtaatcaagccgcccttaatctttgtagatcccaataggagcccagcggggcctgccgccactcccgctcaggcacaggccgcgtccacccccaggaaggcccgagctagtgaaagcacagcacggtcttcgtcctccgagtccgaggacgaggacgtaattccagctacccagtgtcttacccccgggattcggaccaatgttgtgacaatgcctaccgctcacccccgcatcgcacctaaagccagcatggccggtgcatctagcagtaaagagtcctccaggatctccgacggaaaaaagcaggaagggcctgccactcaggtggatagcgctgtcggaacactgcctgccacctcgccgcaaagtacatccgtccaggccaaaggtaccaataaactgcggaaacctaagctgccggaagtgcagcaggccactaaagcccccgagtcttccgatgacagcgaggactcctcagatagtagctctgggtccgaagaagacggagagggcccacagggagctaaatcggcccacaccctcggccccactccctctcgtaccgagacattggtcgaagaaactgccgctgagtcctccgaagatgatgtcgtggccccgtcccagagcctgttatccggctacatgactcccgggcttaccccagccaacagtcaggcttctaaagctacacctaaactcgacagttcccccagcgttagtagtaccttagccgccaaggatgatccggacggcaaacaagaggccaagcctcagcaggccgctggaatgctcagccccaaaaccggaggcaaggaggcagccagcggcaccacgcctcagaaatcccgcaagccaaaaaagggcgctgggaacccacaggcttccacactggcattgcagagtaacatcactcaatgcctgttgggccaaccctggcctctgaatgaggcacaagtccaggcctccgtggtcaaggtcctaactgagctcctggagcaggagcgtaaaaaggtggtggacaccacaaaggagtctagccgaaaaggatgggaaagccggaagcggaagctgagcggcgaccagcctgccgcccgaactccccgaagtaagaaaaagaagaaattgggcgctggagaaggcggagaagcttcagtgtctcccgagaaaacctcaacaacctctaaggggaaagccaaacgtgataaagcctctggagacgtgaaagaaaagaagggtaaaggaagcctgggcagccaaggcgccaaagacgaacccgaggaggaattgcaaaaaggcatggggaccgtcgaagggggggaccagtctaacccgaagtccaaaaaagaaaagaagaaaagcgacaagcgaaagaaggacaaatag

SEQ ID NO: 74555 - DNA, 4245 bp, Artificial Sequence
  derived and/or modified sequence
atggccgaggccaggaagagaagagagctgctgcccctcatctaccaccacctgctgcgggccggctacgtgcgggccgcccgggaggtgaaggagcagagcggccagaagtgcttcctggcccagcctgtgaccctgctggacatctacacccactggcagcagaccagcgagctgggcaggaagaggaaggccgaggaggatgctgccctgcaggccaagaagaccagggtgtctgaccccatcagcaccagcgagagcagcgaggaggaggaggaggccgaggccgagacagccaaggccaccccccggctggccagcaccaacagctctgtgctgggcgctgacctgcccagctccatgaaggagaaggccaaggccgagacagagaaggccggcaagacaggcaacagcatgccccacccagccaccgggaagacagtggccaacctgctgagcggcaagagccccaggaagtctgctgagcccagcgccaacaccaccctggtgtctgaaacagaggaggagggctctgtgcctgccttcggggctgctgccaagccaggcatggtgtctgctggccaggccgacagcagcagcgaggacaccagcagcagcagtgatgaaacagatgtggagggcaagcccagcgtgaagccagcccaggtgaaggccagctctgtgtccaccaaggagagccctgccaggaaggccgccccagcccctgggaaggtgggagatgtgaccccccaggtgaagggcggggccctgcccccagccaagagggccaagaagccagaggaggagagcgagagcagcgaggagggcagcgagagcgaggaggaggccccagctggcaccaggagccaggtgaaggccagcgagaagatcctgcaggtgcgggccgccagcgccccagccaagggcaccccaggaaaaggagccaccccagcccctcctgggaaggccggggctgtggccagccagaccaaggccggcaagccagaagaagattctgagagcagcagcgaggagagcagtgacagcgaggaggagaccccagctgccaaggccctgctgcaggccaaggccagcggcaagaccagccaggtgggcgccgccagcgccccagccaaggagagccccaggaagggggccgccccagcccctcctgggaagacaggccctgctgtggccaaggcccaggccggcaagcgggaggaggacagccagagcagcagcgaggagagtgacagcgaggaggaggccccagcccaggccaagcccagcggcaaggccccccaggtgcgggccgccagcgccccagccaaggagagccccaggaaaggagctgccccagccccacccaggaagacaggccctgctgctgcccaggtgcaggtgggcaagcaggaggaggacagccgcagcagcagcgaggagagtgacagcgaccgggaggccctggccgccatgaatgctgcccaggtgaagcccctgggcaagagcccccaggtgaagccagccagcaccatgggcatgggccccctgggcaaaggagctggccctgtgcccccaggcaaggtgggccctgccaccccatctgcccaggtgggcaagtgggaggaggacagcgagagcagcagcgaggagagcagtgacagcagtgatggagaggtgcccacagctgtggccccagcccaggagaagagcctgggcaacatcctgcaggccaagcccaccagcagccctgccaagggccccccccagaaggccggccctgtggccgtgcaggtgaaggccgagaagcccatggacaacagcgagagcagcgaggagagcagtgacagcgctgacagcgaggaggccccagctgccatgacagctgcccaggccaagccagccctgaagatcccccagaccaaggcctgccccaagaagaccaacaccacagccagcgccaaggtggcccctgtgcgggtgggcacccaggcccccaggaaggccggcacagccaccagccctgctggcagcagccctgctgtggccggcggcacccagaggcctgctgaggacagcagcagcagcgaggagagtgacagcgaggaggagaagacaggcctggccgtgacagtgggccaggccaagtctgtgggcaagggcctgcaggtgaaggccgcctctgtgcctgtgaagggcagcctgggccagggcacagcccctgtgctgcccgggaagacaggccccaccgtgacccaggtgaaggccgagaagcaggaggacagcgagagcagcgaggaggagagtgacagcgaggaggccgccgccagccctgcccaggtgaagacctctgtgaagaagacccaggccaaggccaacccagctgctgcccgggcccccagcgccaagggcaccatcagcgcccctgggaaggtggtgacagctgctgcccaggccaagcagaggagccccagcaaggtgaagccccctgtgaggaacccccagaacagcacagtgctggcccggggccctgcctctgtgcccagcgtgggcaaggctgtggccacagctgcccaggcccagacaggccctgaggaggacagcggcagcagcgaggaggagagtgacagcgaggaggaggccgagaccctggcccaggtgaagcccagcggcaagacccaccagatccgggccgccctggccccagccaaggagagccccaggaaaggagctgcccccaccccacctgggaagacaggccccagcgctgcccaggccggcaagcaggatgacagcggcagcagcagcgaggagagtgacagtgatggagaggccccagctgctgtgaccagcgcccaggtgatcaagcccccactcatctttgtggaccccaacagaagccctgctggccctgctgccaccccagcccaggcccaggccgccagcacccccaggaaggcccgggccagcgagagcacagcccggagcagcagcagcgagagtgaagatgaagatgtgatcccagccacccagtgcctgaccccaggcatccgcaccaacgtggtgaccatgcccacagcccaccccagaattgcccccaaggcctccatggccggggccagcagcagcaaggagagcagccgcatcagtgatggcaagaagcaggagggccctgccacccaggtggacagcgctgtgggcaccctgcctgccaccagcccccagagcacctctgtgcaggccaagggcaccaacaagctgaggaagcccaagctgcctgaggtgcagcaggccaccaaggcccctgagagcagtgatgacagcgaggacagcagtgacagcagcagcggcagcgaggaggatggagagggcccccagggcgccaagagcgcccacaccctgggccccacccccagcaggacagagaccctggtggaggagacagctgctgagagcagtgaagatgatgtggtggcccccagccagagcctgctgagcggctacatgaccccaggcctgaccccagccaacagccaggccagcaaggccacccccaagctggacagcagccccagcgtgagcagcaccctggccgccaaggatgatcctgatggcaagcaggaggccaagccccagcaggccgccggcatgctgagccccaagacaggaggcaaggaggccgccagcggcaccaccccccagaagagcaggaagcccaagaagggagctggcaacccccaggccagcaccctggccctgcagagcaacatcacccagtgcctgctgggccagccctggcccctgaatgaggcccaggtgcaggcctctgtggtgaaggtgctgacagagctgctggagcaggagaggaagaaggtggtggacaccaccaaggagagcagcaggaagggctgggagagcaggaagaggaagctgagcggggaccagcctgctgcccggacccccaggagcaagaagaagaagaagctgggcgctggggagggcggggaggcctctgtgtccccagagaagaccagcaccaccagcaagggcaaggccaagagggacaaggccagcggagatgtgaaggagaagaagggcaagggcagcctgggcagccagggcgccaaggatgagcctgaggaggagctgcagaagggcatgggcaccgtggagggcggggaccagagcaaccccaagagcaagaaggagaagaagaagagtgacaagaggaagaaggacaagtag

SEQ ID NO: 74556 - DNA, 4245 bp, Artificial Sequence
  derived and/or modified sequence
atggccgaggcccggaagcggcgggagctgctgcccctgatctaccatcaccttttaagagccggctatgttcgtgctgcccgggaggtgaaggagcagtccggacagaagtgttttctggcccagcccgtcacactgcttgatatctacacacactggcagcagacttcagagctgggaaggaagcgcaaggccgaggaggacgctgcgctgcaagcaaaaaagacgcgggtatctgacccaatcagcacgtctgagagttctgaggaggaggaggaggcagaagcggaaacagctaaagccacccctagattggcgtctacaaatagctccgtgttgggtgccgatctccccagttcaatgaaagaaaaagcaaaagctgagactgaaaaggcgggcaagaccggaaattcgatgcctcatcctgcgacgggaaaaaccgtggccaacttgttgagtgggaaatcacctcgcaaaagcgccgaaccttccgcgaatacaaccctggtcagtgaaactgaagaagagggatcagtaccggcgtttggcgcggccgcgaagccagggatggtgagtgccgggcaggccgattctagctccgaagacacgtcaagcagttctgacgaaacagatgttgaggggaaaccttctgtcaagccagcccaggtcaaagcaagttcagtcagcaccaaagagagcccagctcggaaagcagccccagcccccggcaaagtgggtgacgtcacaccccaggtgaagggaggcgcccttccacctgcgaagcgagccaagaagcccgaggaggagagcgagagctcagaagaaggctcagagagtgaagaggaagctcctgccggaacccggtcacaagtgaaggctagcgagaagatcctccaagtgcgggctgcctcagcccctgcgaagggaaccccaggcaagggggcgacaccggcaccaccagggaaagccggcgccgtggcatcgcaaaccaaggccggcaagcctgaagaagacagcgaaagcagttccgaagaaagctccgacagcgaagaagagacaccagcggctaaggccttattgcaggctaaagccagcggaaagacctcccaagtcggggcggcttccgccccagctaaagagagtccgcggaagggcgcagcacctgcacctcctgggaagactggtccagcagtggccaaggcgcaggctggtaaacgagaggaggactcccagtcatcgtccgaggagtccgatagtgaggaagaagcacccgcgcaggccaagcctagtggtaaagctcctcaggttcgagccgcctccgcaccagccaaggaatcgcctcgaaaaggagccgccccagcaccacccaggaagacaggaccagcagcagcccaggtgcaggtcggtaagcaggaagaagattctaggtcatcctccgaggaatccgacagtgatagagaggcactagcagcgatgaatgcagctcaagttaaacctctaggtaagtcccctcaggtgaaaccagcctccaccatgggtatgggacctctcggcaagggtgccgggccagtcccacccgggaaggtcgggcccgcgactcccagcgcccaagtgggcaagtgggaagaagacagtgagagtagctccgaagaatcatccgacagcagcgacggagaggtccccaccgccgtcgcccctgctcaggaaaagtcgctcggaaatattttacaggctaaaccgacctccagccctgccaagggacccccacagaaagccgggcctgtggccgtgcaggtcaaagctgaaaagcctatggacaatagcgagtcctccgaggagtcaagcgatagcgcggacagtgaggaagcaccagcggcaatgacagcagctcaggccaagcctgcactaaaaattccacagacaaaggcctgtcccaagaaaacaaacactactgcttcagccaaagtggcccctgtgagagtgggcactcaggctcctagaaaagctggtactgccacttctccagccggttccagccccgcagttgccggcggcacacaacgtcctgccgaagattcaagttcatccgaggagtccgacagtgaggaggagaaaaccggtctggcagtcacagttggacaggcaaaatcagttggaaaaggcctgcaggtgaaagctgcctccgtgccggtgaagggctcgcttggacaaggaaccgctccagtcctgccaggcaagacaggccccaccgtgacccaggtgaaggctgagaaacaagaggacagtgagtcttcagaggaggagtccgactccgaagaagctgcagccagtcccgcgcaggttaagacatctgtgaagaaaactcaggcgaaagccaatcctgcagctgcgcgcgcgccatcagctaaaggaacaatttcggcacctggcaaggtcgtcaccgccgcagcccaggccaagcagcgctccccctcgaaagtgaagccccctgtccgcaacccacagaactcaacagtgctggccagggggcccgcctccgtgccaagcgtaggtaaggccgtggcaaccgctgcgcaggcccagactgggcctgaggaggatagcggcagctccgaggaagagagtgatagcgaagaagaggccgaaaccctggcccaggtgaagccttccggaaagacgcaccagatcagggccgccctggctcccgccaaggagtctccacggaaaggagcagcccccactccaccaggcaaaactgggccaagcgccgcccaggccggcaagcaggatgatagcggaagctcttccgaggagtccgactctgacggcgaagcccctgctgccgtgaccagcgcacaggtaattaagcctcctctcatcttcgtggatccaaaccggagcccggccggtccggccgcaacgcctgctcaggctcaagccgcgtccacgcccaggaaagctcgggcgagcgaaagcactgctagaagcagctcgagtgaaagcgaagatgaagacgtgattcccgccacacagtgcctcactccaggaatcagaaccaacgtcgtcaccatgcctacagcccacccgaggatagcacctaaagcctccatggcaggtgcctcatcaagtaaagaaagtagtcgaattagtgacggaaagaagcaagaggggccagctacacaggtggattctgcggttggaacacttcctgcaacatcgccccagtctacttccgtgcaggctaaaggtaccaacaaactcagaaagcccaaactacctgaggtacagcaggccacaaaggctccagagagctcagacgactctgaagacagcagcgattctagcagtggcagcgaggaggacggggaaggaccacaaggagcaaaatctgcccatactcttggccccaccccaagccgtacagagacactggtggaagagacagccgctgagtcctctgaggacgacgtggtagctcctagtcaaagcctgctgtccgggtatatgacacctggactaactcccgccaacagccaggcttcaaaggcgaccccaaagctcgactcctctccgagcgtatcatcaactctagcagccaaggatgatccagatgggaagcaggaagctaaacctcagcaggccgctggaatgctatcacctaagactggggggaaggaagccgcctctggaacaacgcctcagaagtcacgaaagcctaaaaaaggtgcgggcaatccccaggcctccacgctcgccctgcagtccaacattacccaatgcctcctgggtcagccctggccactcaatgaggcccaagtgcaggccagcgttgtaaaagtgcttactgaactactggaacaggaacggaagaaggtggtagacaccactaaggagagcagccgaaagggctgggaatcacgcaagaggaagttatctggggaccagcctgcggcccgcacacctcgctcgaaaaaaaagaaaaagctgggcgcaggagaagggggggaagcgagtgtgtcaccagaaaagacatccaccacttcaaagggaaaagctaaaagggataaggcctcaggcgacgtgaaggagaagaaaggcaaagggtcactgggatcccagggcgccaaggatgaacctgaggaggaattgcagaaaggaatggggacagtcgaaggaggagatcaatccaatccaaagtcaaaaaaggagaagaagaaatcagacaagcggaagaaagacaaatag

SEQ ID NO: 74557 - DNA, 4245 bp, Artificial Sequence
  derived and/or modified sequence
atggctgaagcgagaaagcgcagagagttacttccattaatctaccaccacttactgcgcgcagggtatgtccgggctgcccgtgaagttaaggagcagagtggtcagaaatgctttcttgcccagcccgtgactctactcgacatctatacacactggcaacagacctctgagttgggtagaaaacgcaaggccgaggaggatgccgcactacaagctaaaaagacaagagtcagtgaccctatctctacctccgaaagtagcgaggaagaggaggaggcggaggcggagactgcaaaggcgactccaagactggccagcaccaattcttcggttctcggcgctgacctgccatcttcgatgaaggagaaggcaaaggctgagactgagaaggccggaaagacagggaactccatgccacacccagctacagggaaaaccgtggccaatttgttgtcggggaaatcgccccgaaaatccgcggaaccatccgcaaacactaccctggtgagcgaaaccgaagaggaaggctccgtccccgcttttggggcagccgcaaagccaggaatggtttccgccggtcaggctgactcaagttccgaagacacatcctcctcttcagatgaaacagacgtcgaaggcaagccttccgtgaaaccagcacaagtaaaagccagttccgtcagcaccaaggagtccccagcacgtaaggctgcacccgcaccagggaaagtgggggatgttaccccgcaggtaaagggcggagctctgcctcccgcaaaacgggcaaagaagccggaggaggaaagtgaatcgtcagaggaaggtagcgagagtgaggaggaagcacctgcgggaactcgctctcaggtgaaggcgagtgagaaaatcctgcaggtcagggctgcatcagccccagcaaaagggacgccaggaaaaggggcaactccagcacctcccggaaaggccggagccgttgcatctcagacgaaagccggaaagcccgaagaagactcagaatctagctctgaagaatcttcagattctgaggaggaaacacctgcagccaaagctctgctccaggccaaagctagtggtaagacatctcaggttggcgcagcttcagctcccgctaaagagagcccccgtaaaggcgcagctcccgcaccccctggaaagaccggccctgcagttgcaaaagctcaggcagggaagagggaggaggactctcagtcatcaagcgaagagtctgacagcgaagaggaggcgcctgcgcaggctaagccttcaggcaaagcgccacaggtacgagccgcttctgccccagcaaaagagagccctcgtaagggagctgctccagcgccaccacgtaagactggccctgccgctgctcaagtccaggtcggcaagcaggaagaagactcccggtctagttcggaggagtcagattccgatcgcgaggccctagcagcaatgaacgccgcacaggtgaagcccctggggaaatcccctcaagtgaaacccgcaagtacaatggggatggggcctctgggcaagggagccggaccagttccacccggtaaagttgggcctgcaacgcctagcgcgcaggtagggaaatgggaagaggacagcgagtcatctagcgaagagtctagtgactcttccgatggtgaggtgcccacagccgtggcccctgcgcaggaaaaatcccttggaaacattctacaggcaaaacctacttcatcaccggcaaagggtcccccacaaaaggcaggccctgtggcggttcaggttaaagctgagaaacccatggataactcagagagctccgaggagtccagcgactctgctgactccgaagaggcgcctgctgccatgactgcagctcaagccaagcctgctctcaagatccctcagaccaaggcgtgccccaagaagaccaacacaacggcaagcgcaaaggtggccccagtgagggtaggtacccaggcgccaaggaaggctggtactgctacatcccccgcaggcagtagccctgccgtagctggaggaacacagagacccgctgaggatagctcaagctcggaggaatccgactccgaagaggaaaagaccggtctcgctgtaacagtcgggcaggccaaaagtgtgggcaaagggcttcaggtgaaggcagccagtgtaccggttaaaggaagcctggggcagggaactgccccagtcttgcctgggaagactggaccaacagtcactcaggtcaaagccgaaaagcaagaggactccgaatcgagtgaggaggagtcggacagcgaagaagctgcagccagcccagcccaggtcaagacctcagtgaagaaaacccaagctaaagccaacccagcagcagccagggctccaagcgcaaagggtacaatcagtgccccaggcaaggttgtgacggcagccgcacaggccaagcagcggtcacctagtaaggtcaaacccccagtccggaatccacagaactccaccgtattagccaggggcccagcgagtgtgcctagcgtcgggaaagcagttgcaactgctgcccaggcccagacagggccagaagaggattctggaagcagtgaagaggaatctgactcagaagaagaggctgaaactctggcacaggtcaagcccagcgggaagacacaccagattcgtgccgctctcgctccagcaaaagaatccccccgaaagggcgctgccccaaccccgccaggcaagacaggccctagcgcagcccaggctggtaaacaggacgattcgggcagctcatcggaagagtctgactctgatggtgaggccccagctgctgtcacatcagcgcaggtcataaagccacccctgatttttgtggaccctaaccgcagtcccgcagggcctgccgcaacccccgctcaggcccaggccgctagtacaccacgaaaagcacgcgcttccgagtccactgctcgatcctcctcttccgaaagcgaggatgaggatgttatcccagctacgcagtgcctaacgcctgggatccggaccaacgtggtgaccatgcctactgcccatccccgtatcgccccaaaggcgagtatggctggcgcaagcagtagcaaggaaagttcccgcatctcagacggaaagaagcaggaaggtccagccacccaggtagattccgctgtcggcacactcccggctacctccccacagtccaccagtgtacaagctaagggaaccaacaagttaaggaagccgaagcttccagaggtccagcaagcgacaaaggccccagagtctagcgacgattctgaagactcgtccgactccagcagcgggtcagaagaggacggcgagggaccccaaggagcaaagagcgcacacaccttgggcccaacccctagcaggacagagactttggtcgaagaaactgctgccgagagctctgaggacgacgtggtggccccaagccaaagcctgctgtccgggtatatgacgccaggactcactcctgcaaactcccaggcctctaaagccacaccaaagctggattcctcccctagtgtttccagcacactcgcggcaaaagatgatcctgacggcaagcaggaagcaaaaccacagcaggcagccggtatgctctcgccgaaaaccggcggtaaggaagccgcttctggaacaacaccccaaaagtctcgaaaacccaaaaagggtgcaggcaaccctcaggccagtactctagctctgcaatctaacataactcagtgtttgctggggcaaccatggcctttaaacgaagcacaagttcaagctagcgtggtgaaagtgctgacggagctgctcgaacaggaaagaaagaaggtggtcgatactacaaaggaatcctccaggaagggctgggagagccggaaaagaaagttgtccggcgaccagcccgctgccagaactccgagatccaagaaaaagaaaaaactgggtgccggtgaaggtggagaggctagcgttagcccagagaagacctctactacgtctaaaggcaaggcaaaaagggacaaggctagcggtgatgttaaggaaaagaaaggcaagggttccctcggtagccagggggcaaaagacgaacccgaagaggagcttcagaaaggtatgggcaccgtagaggggggagatcaaagcaatcccaaatccaagaaggagaagaagaaatcagacaaacgcaagaaggataaatag

SEQ ID NO: 74558 - DNA, 4272 bp, Artificial Sequence
  derived and/or modified sequence
ggtagccggccggccgggggtcgcgggtatggccgaggccaggaagcggcgggagctacttcccctgatctaccaccatctgctgcgggctggctatgtgcgtgcggcgcgggaagtgaaggagcagagcggccagaagtgtttcctggctcagcccgtaacccttctggacatctatacacactggcaacaaacctcagagcttggtcggaagcggaaggcagaggaagatgcggcactgcaagctaagaaaacccgtgtgtcagaccccatcagcacctcggagagctcggaagaggaggaagaagcagaagccgaaaccgccaaagccaccccaagactagcatctaccaactcctcagtcctgggggcggacttgccatcaagcatgaaagaaaaagccaaggcagagacagagaaagctggcaagactgggaattccatgccacaccctgccactgggaagacggtggccaaccttctttctgggaagtctcccaggaagtcagcagagccctcagcaaatactacgttggtctcagaaactgaggaggagggcagcgtcccggcctttggagctgctgccaagcctgggatggtgtcagcgggccaggccgacagctccagcgaggacacctccagctccagtgatgagacagacgtggaggggaaaccctcagtaaaaccagcccaggtcaaagcctcatcagtttctactaaggagtctccagcaagaaaggcggccccagcccctgggaaggtgggggatgtgacaccccaggtcaaaggaggggccctgcccccagccaagagggccaagaagccagaagaggagtcagagagtagtgaggagggatctgaaagtgaggaggaggcccctgcagggacacgaagccaggtaaaggcctctgaaaaaattctccaggtcagagctgcctcagcccctgccaaggggacccctgggaaaggggctaccccagcaccccctgggaaggcaggggctgtagcctcccagaccaaggcagggaagccagaggaggactcagagagcagcagcgaggagtcatctgacagtgaggaggagacgccagctgccaaggccctgcttcaggcgaaggcctcaggaaaaacctctcaggtcggagctgcctcagcccctgccaaggagtcccccaggaaaggagctgccccagcgccccctgggaagacagggcctgcagttgccaaggcccaggcggggaagcgggaggaggactcgcagagcagcagcgaggaatcggacagtgaggaggaggcgcctgctcaggcgaagccttcagggaaggccccccaggtcagagccgcctcggcccctgccaaggagtcccccaggaaaggggctgccccagcacctcctaggaaaacagggcctgcagccgcccaggtccaggtggggaagcaggaggaggactcaagaagcagcagcgaggagtcagacagtgacagagaggcactggcagccatgaatgcagctcaggtgaagcccttggggaaaagcccccaggtgaaacctgcctctaccatgggcatggggcccttggggaaaggcgccggcccagtgccacccgggaaggtggggcctgcaaccccctcagcccaggtggggaagtgggaggaggactcagagagcagtagtgaggagtcatcagacagcagtgatggagaggtgcccacagctgtggccccggctcaggaaaagtccttggggaacatcctccaggccaaacccacctccagtcctgccaaggggccccctcagaaggcagggcctgtagccgtccaggtcaaggctgaaaagcccatggacaactcggagagcagcgaggagtcatcggacagtgcggacagtgaggaggcaccagcagccatgactgcagctcaggcaaaaccagctctgaaaattcctcagaccaaggcctgcccaaagaaaaccaataccactgcatctgccaaggtcgcccctgtgcgagtgggcacccaagccccccggaaagcaggaactgcgacttctccagcaggctcatccccagctgtggctgggggcacccagagaccagcagaggattcttcaagcagtgaggaatcagatagtgaggaagagaagacaggtcttgcagtaaccgtgggacaggcaaagtctgtggggaaaggcctccaggtgaaagcagcctcagtgcctgtcaaggggtccttggggcaagggactgctccagtactccctgggaagacggggcctacagtcacccaggtgaaagctgaaaagcaggaagactctgagagcagtgaggaggaatcagacagtgaggaagcagctgcatctccagcacaggtgaaaacctcagtaaagaaaacccaggccaaagccaacccagctgccgccagagcaccttcagcaaaagggacaatttcagcccctggaaaagttgtcactgcagctgctcaagccaagcagaggtctccatccaaggtgaagccaccagtgagaaacccccagaacagtaccgtcttggcgaggggcccagcatctgtgccatctgtggggaaggccgtggctacagcagctcaggcccagacagggccagaggaggactcagggagcagtgaggaggagtcagacagtgaggaggaggcggagacgctggctcaggtgaagccttcagggaagacccaccagatcagagctgccttggctcctgccaaggagtcccccaggaaaggggctgccccaacacctcctgggaagacagggccttcggctgcccaggcagggaagcaggatgactcagggagcagcagcgaggaatcagacagtgatggggaggcaccggcagctgtgacctctgcccaggtgattaaaccccctctgatttttgtcgaccctaatcgtagtccagctggcccagctgctacacccgcacaagcccaggctgcaagcaccccgaggaaggcccgagcctcggagagcacagccaggagctcctcctccgagagcgaggatgaggacgtgatccccgctacacagtgcttgactcctggcatcagaaccaatgtggtgaccatgcccactgcccacccaagaatagcccccaaagccagcatggctggggccagcagcagcaaggagtccagtcggatatcagatggcaagaaacaggagggaccagccactcaggttgacagtgctgtgggaacactccctgcaacaagtccccagagcacctccgtccaggccaaagggaccaacaagctcagaaaacctaagcttcctgaggtccagcaggccaccaaagcccctgagagctcagatgacagtgaggacagcagcgacagttcttcagggagtgaggaagatggtgaagggccccagggggccaagtcagcccacacgctgggtcccaccccctccaggacagagaccctggtggaggagaccgcagcagagtccagcgaggatgatgtggtggcgccatcccagtctctcctctcaggttatatgacccctggactaaccccagccaattcccaggcctcaaaagccactcccaagctagactccagcccctcagtttcctctactctggccgccaaagatgacccagatggcaagcaggaggcaaagccccaacaggcagcaggcatgttgtcccctaaaacaggtggaaaagaggctgcttcaggcaccacacctcagaagtcccggaagcccaagaaaggggctgggaacccccaagcctcaaccctggcgctgcaaagcaacatcacccagtgcctcctgggccaaccctggcccctgaatgaggcccaggtgcaggcctcagtggtgaaggtcctgactgagctgctggaacaggaaagaaagaaggtggtggacaccaccaaggagagcagcaggaagggctgggagagccgcaagcggaagctatcgggagaccagccagctgccaggacccccaggagcaagaagaagaagaagctgggggccggggaaggtggggaggcctctgtttccccagaaaagacctccacgacttccaaggggaaagcaaagagagacaaagcaagtggtgatgtcaaggagaagaaagggaaggggtctcttggctcccaaggggccaaggacgagccagaagaggagcttcagaaggggatggggacggttgaaggtggagatcaaagcaacccaaagagcaagaaggagaagaagaaatccgacaagagaaaaaaagacaaaga

SEQ ID NO: 74559 - protein, 985 aa, Artificial Sequence
  derived and/or modified sequence
QPPLVQAIFSGDPEEIRMLIHKTEDVNTLDSEKRTPLHVAAFLGDAEIIELLILSGARVNAKDNMWLTPLHRAVASRSEEAVQVLIKHSADVNARDKNWQTPLHVAAANKAVKCAEVIIPLLSSVNVSDRGGRTALHHAALNGHVEMVNLLLAKGANINAFDKKDRRALHWAAYMGHLDVVALLINHGAEVTCKDKKGYTPLHAAASNGQINVVKHLLNLGVEIDEINVYGNTALHIACYNGQDAVVNELIDYGANVNQPNNNGFTPLHFAAASTHGALCLELLVNNGADVNIQSKDGKSPLHMTAVHGRFTRSQTLIQNGGEIDCVDKDGNTPLHVAARYGHELLINTLITSGADTAKCGIHSMFPLHLAALNAHSDCCRKLLSSGFEIDTPDKFGRTCLHAAAAGGNVECIKLLQSSGADFHKKDKCGRTPLHYAAANCHFHCIETLVTTGANVNETDDWGRTALHYAAASDMDRNKTILGNAHDNSEELERARELKEKEATLCLEFLLQNDANPSIRDKEGYNSIHYAAAYGHRQCLELLLERTNSGFEESDSGATKSPLHLAAYNGHHQALEVLLQSLVDLDIRDEKGRTALDLAAFKGHTECVEALINQGASIFVKDNVTKRTPLHASVINGHTLCLRLLLEIADNPEAVDVKDAKGQTPLMLAVAYGHIDAVSLLLEKEANVDTVDILGCTALHRGIMTGHEECVQMLLEQEVSILCKDSRGRTPLHYAAARGHATWLSELLQMALSEEDCCFKDNQGYTPLHWACYNGNENCIEVLLEQKCFRKFIGNPFTPLHCAIINDHGNCASLLLGAIDSSIVSCRDDKGRTPLHAAAFADHVECLQLLLRHSAPVNAVDNSGKTALMMAAENGQAGAVDILVNSAQADLTVKDKDLNTPLHLACSKGHEKCALLILDKIQDESLINEKNNALQTPLHVAARNGLKVVVEELLAKGACVLAVDENASRSNGPRSTPGTAVQKEE

SEQ ID NO: 74560 - protein, 507 aa, Artificial Sequence
  derived and/or modified sequence
MWLTPLHRAVASRSEEAVQVLIKHSADVNARDKNWQTPLHVAAANKAVKCAEVIIPLLSSVNVSDRGGRTALHHAALNGHVEMVNLLLAKGANINAFDKKDRRALHWAAYMGHLDVVALLINHGAEVTCKDKKGYTPLHAAASNGQINVVKHLLNLGVEIDEINVYGNTALHIACYNGQDAVVNELIDYGANVNQPNNNGFTPLHFAAASTHGALCLELLVNNGADVNIQSKDGKSPLHMTAVHGRFTRSQTLIQNGGEIDCVDKDGNTPLHVAARYGHELLINTLITSGADTAKCGIHSMFPLHLAALNAHSDCCRKLLSSGFEIDTPDKFGRTCLHAAAAGGNVECIKLLQSSGADFHKKDKCGRTPLHYAAANCHFHCIETLVTTGANVNETDDWGRTALHYAAASDMDRNKTILGNAHDNSEELERARELKEKEATLCLEFLLQNDANPSIRDKEGYNSIHYAAAYGHRQCLELVSCFVLFSLTHTHTHTPNHRGINCFFPEL

SEQ ID NO: 74561 - DNA, 2958 bp, Artificial Sequence
  derived and/or modified sequence
cagccccccctggtgcaggccatcttcagcggcgaccccgaggagatcagaatgctgatccacaagaccgaggacgtgaacaccctggacagcgagaagagaacccccctgcacgtggccgccttcctgggcgacgccgagatcatcgagctgctgatcctgagcggcgccagagtgaacgccaaggacaacatgtggctgacccccctgcacagagccgtggccagcagaagcgaggaggccgtgcaggtgctgatcaagcacagcgccgacgtgaacgccagagacaagaactggcagacccccctgcacgtggccgccgccaacaaggccgtgaagtgcgccgaggtgatcatccccctgctgagcagcgtgaacgtgagcgacagaggcggcagaaccgccctgcaccacgccgccctgaacggccacgtggagatggtgaacctgctgctggccaagggcgccaacatcaacgccttcgacaagaaggacagaagagccctgcactgggccgcctacatgggccacctggacgtggtggccctgctgatcaaccacggcgccgaggtgacctgcaaggacaagaagggctacacccccctgcacgccgccgccagcaacggccagatcaacgtggtgaagcacctgctgaacctgggcgtggagatcgacgagatcaacgtgtacggcaacaccgccctgcacatcgcctgctacaacggccaggacgccgtggtgaacgagctgatcgactacggcgccaacgtgaaccagcccaacaacaacggcttcacccccctgcacttcgccgccgccagcacccacggcgccctgtgcctggagctgctggtgaacaacggcgccgacgtgaacatccagagcaaggacggcaagagccccctgcacatgaccgccgtgcacggcagattcaccagaagccagaccctgatccagaacggcggcgagatcgactgcgtggacaaggacggcaacacccccctgcacgtggccgccagatacggccacgagctgctgatcaacaccctgatcaccagcggcgccgacaccgccaagtgcggcatccacagcatgttccccctgcacctggccgccctgaacgcccacagcgactgctgcagaaagctgctgagcagcggcttcgagatcgacacccccgacaagttcggcagaacctgcctgcacgccgccgccgccggcggcaacgtggagtgcatcaagctgctgcagagcagcggcgccgacttccacaagaaggacaagtgcggcagaacccccctgcactacgccgccgccaactgccacttccactgcatcgagaccctggtgaccaccggcgccaacgtgaacgagaccgacgactggggcagaaccgccctgcactacgccgccgccagcgacatggacagaaacaagaccatcctgggcaacgcccacgacaacagcgaggagctggagagagccagagagctgaaggagaaggaggccaccctgtgcctggagttcctgctgcagaacgacgccaaccccagcatcagagacaaggagggctacaacagcatccactacgccgccgcctacggccacagacagtgcctggagctgctgctggagagaaccaacagcggcttcgaggagagcgacagcggcgccaccaagagccccctgcacctggccgcctacaacggccaccaccaggccctggaggtgctgctgcagagcctggtggacctggacatcagagacgagaagggcagaaccgccctggacctggccgccttcaagggccacaccgagtgcgtggaggccctgatcaaccagggcgccagcatcttcgtgaaggacaacgtgaccaagagaacccccctgcacgccagcgtgatcaacggccacaccctgtgcctgagactgctgctggagatcgccgacaaccccgaggccgtggacgtgaaggacgccaagggccagacccccctgatgctggccgtggcctacggccacatcgacgccgtgagcctgctgctggagaaggaggccaacgtggacaccgtggacatcctgggctgcaccgccctgcacagaggcatcatgaccggccacgaggagtgcgtgcagatgctgctggagcaggaggtgagcatcctgtgcaaggacagcagaggcagaacccccctgcactacgccgccgccagaggccacgccacctggctgagcgagctgctgcagatggccctgagcgaggaggactgctgcttcaaggacaaccagggctacacccccctgcactgggcctgctacaacggcaacgagaactgcatcgaggtgctgctggagcagaagtgcttcagaaagttcatcggcaaccccttcacccccctgcactgcgccatcatcaacgaccacggcaactgcgccagcctgctgctgggcgccatcgacagcagcatcgtgagctgcagagacgacaagggcagaacccccctgcacgccgccgccttcgccgaccacgtggagtgcctgcagctgctgctgagacacagcgcccccgtgaacgccgtggacaacagcggcaagaccgccctgatgatggccgccgagaacggccaggccggcgccgtggacatcctggtgaacagcgcccaggccgacctgaccgtgaaggacaaggacctgaacacccccctgcacctggcctgcagcaagggccacgagaagtgcgccctgctgatcctggacaagatccaggacgagagcctgatcaacgagaagaacaacgccctgcagacccccctgcacgtggccgccagaaacggcctgaaggtggtggtggaggagctgctggccaagggcgcctgcgtgctggccgtggacgagaacgccagcagaagcaacggccccagaagcacccccggcaccgccgtgcagaaggaggagtag

SEQ ID NO: 74562 - DNA, 2760 bp, Artificial Sequence
  derived and/or modified sequence
atgctgatccacaagaccgaggacgtgaacaccctggacagcgagaagagaacccccctgcacgtggccgccttcctgggcgacgccgagatcatcgagctgctgatcctgagcggcgccagagtgaacgccaaggacaacatgtggctgacccccctgcacagagccgtggccagcagaagcgaggaggccgtgcaggtgctgatcaagcacagcgccgacgtgaacgccagagacaagaactggcagacccccctgcacgtggccgccgccaacaaggccgtgaagtgcgccgaggtgatcatccccctgctgagcagcgtgaacgtgagcgacagaggcggcagaaccgccctgcaccacgccgccctgaacggccacgtggagatggtgaacctgctgctggccaagggcgccaacatcaacgccttcgacaagaaggacagaagagccctgcactgggccgcctacatgggccacctggacgtggtggccctgctgatcaaccacggcgccgaggtgacctgcaaggacaagaagggctacacccccctgcacgccgccgccagcaacggccagatcaacgtggtgaagcacctgctgaacctgggcgtggagatcgacgagatcaacgtgtacggcaacaccgccctgcacatcgcctgctacaacggccaggacgccgtggtgaacgagctgatcgactacggcgccaacgtgaaccagcccaacaacaacggcttcacccccctgcacttcgccgccgccagcacccacggcgccctgtgcctggagctgctggtgaacaacggcgccgacgtgaacatccagagcaaggacggcaagagccccctgcacatgaccgccgtgcacggcagattcaccagaagccagaccctgatccagaacggcggcgagatcgactgcgtggacaaggacggcaacacccccctgcacgtggccgccagatacggccacgagctgctgatcaacaccctgatcaccagcggcgccgacaccgccaagtgcggcatccacagcatgttccccctgcacctggccgccctgaacgcccacagcgactgctgcagaaagctgctgagcagcggcttcgagatcgacacccccgacaagttcggcagaacctgcctgcacgccgccgccgccggcggcaacgtggagtgcatcaagctgctgcagagcagcggcgccgacttccacaagaaggacaagtgcggcagaacccccctgcactacgccgccgccaactgccacttccactgcatcgagaccctggtgaccaccggcgccaacgtgaacgagaccgacgactggggcagaaccgccctgcactacgccgccgccagcgacatggacagaaacaagaccatcctgggcaacgcccacgacaacagcgaggagctggagagagccagagagctgaaggagaaggaggccaccctgtgcctggagttcctgctgcagaacgacgccaaccccagcatcagagacaaggagggctacaacagcatccactacgccgccgcctacggccacagacagtgcctggagctgctgctggagagaaccaacagcggcttcgaggagagcgacagcggcgccaccaagagccccctgcacctggccgcctacaacggccaccaccaggccctggaggtgctgctgcagagcctggtggacctggacatcagagacgagaagggcagaaccgccctggacctggccgccttcaagggccacaccgagtgcgtggaggccctgatcaaccagggcgccagcatcttcgtgaaggacaacgtgaccaagagaacccccctgcacgccagcgtgatcaacggccacaccctgtgcctgagactgctgctggagatcgccgacaaccccgaggccgtggacgtgaaggacgccaagggccagacccccctgatgctggccgtggcctacggccacatcgacgccgtgagcctgctgctggagaaggaggccaacgtggacaccgtggacatcctgggctgcaccgccctgcacagaggcatcatgaccggccacgaggagtgcgtgcagatgctgctggagcaggaggtgagcatcctgtgcaaggacagcagaggcagaacccccctgcactacgccgccgccagaggccacgccacctggctgagcgagctgctgcagatggccctgagcgaggaggactgctgcttcaaggacaaccagggctacacccccctgcactgggcctgctacaacggcaacgagaactgcatcgaggtgctgctggagcagaagtgcttcagaaagttcatcggcaaccccttcacccccctgcactgcgccatcatcaacgaccacggcaactgcgccagcctgctgctgggcgccatcgacagcagcatcgtgagctgcagagacgacaagggcagaacccccctgcacgccgccgccttcgccgaccacgtggagtgcctgcagctgctgctgagacacagcgcccccgtgaacgccgtggacaacagcggcaagaccgccctgatgatggccgccgagaacggccaggccggcgccgtggacatcctggtgaacagcgcccaggccgacctgaccgtgaaggacaaggacctgaacacccccctgcacctggcctgcagcaagggccacgagaagtgcgccctgctgatcctggacaagatccaggacgagagcctgatcaacgagaagaacaacgccctgcagacctag

SEQ ID NO: 74563 - DNA, 2760 bp, Artificial Sequence
  derived and/or modified sequence
ctgctgatctacaagaccgagatcatcagcaccctggacagcgagaagagaacccccctgcacgtggccgccttcctgggcgacgccgagatcatcgagctgctgatcctgagcggcgccagagtgaacgccaaggacaacatgtggctgacccccctgcacagagccgtggccagcagaagcgaggaggccgtgcaggtgctgatcaagcacagcgccgacgtgaacgccagagacaagaactggcagacccccctgcacgtggccgccgccaacaaggccgtgaagtgcgccgaggtgatcatccccctgctgagcagcgtgaacgtgagcgacagaggcggcagaaccgccctgcaccacgccgccctgaacggccacgtggagatggtgaacctgctgctggccaagggcgccaacatcaacgccttcgacaagaaggacagaagagccctgcactgggccgcctacatgggccacctggacgtggtggccctgctgatcaaccacggcgccgaggtgacctgcaaggacaagaagggctacacccccctgcacgccgccgccagcaacggccagatcaacgtggtgaagcacctgctgaacctgggcgtggagatcgacgagatcaacgtgtacggcaacaccgccctgcacatcgcctgctacaacggccaggacgccgtggtgaacgagctgatcgactacggcgccaacgtgaaccagcccaacaacaacggcttcacccccctgcacttcgccgccgccagcacccacggcgccctgtgcctggagctgctggtgaacaacggcgccgacgtgaacatccagagcaaggacggcaagagccccctgcacatgaccgccgtgcacggcagattcaccagaagccagaccctgatccagaacggcggcgagatcgactgcgtggacaaggacggcaacacccccctgcacgtggccgccagatacggccacgagctgctgatcaacaccctgatcaccagcggcgccgacaccgccaagtgcggcatccacagcatgttccccctgcacctggccgccctgaacgcccacagcgactgctgcagaaagctgctgagcagcggcttcgagatcgacacccccgacaagttcggcagaacctgcctgcacgccgccgccgccggcggcaacgtggagtgcatcaagctgctgcagagcagcggcgccgacttccacaagaaggacaagtgcggcagaacccccctgcactacgccgccgccaactgccacttccactgcatcgagaccctggtgaccaccggcgccaacgtgaacgagaccgacgactggggcagaaccgccctgcactacgccgccgccagcgacatggacagaaacaagaccatcctgggcaacgcccacgacaacagcgaggagctggagagagccagagagctgaaggagaaggaggccaccctgtgcctggagttcctgctgcagaacgacgccaaccccagcatcagagacaaggagggctacaacagcatccactacgccgccgcctacggccacagacagtgcctggagctgctgctggagagaaccaacagcggcttcgaggagagcgacagcggcgccaccaagagccccctgcacctggccgcctacaacggccaccaccaggccctggaggtgctgctgcagagcctggtggacctggacatcagagacgagaagggcagaaccgccctggacctggccgccttcaagggccacaccgagtgcgtggaggccctgatcaaccagggcgccagcatcttcgtgaaggacaacgtgaccaagagaacccccctgcacgccagcgtgatcaacggccacaccctgtgcctgagactgctgctggagatcgccgacaaccccgaggccgtggacgtgaaggacgccaagggccagacccccctgatgctggccgtggcctacggccacatcgacgccgtgagcctgctgctggagaaggaggccaacgtggacaccgtggacatcctgggctgcaccgccctgcacagaggcatcatgaccggccacgaggagtgcgtgcagatgctgctggagcaggaggtgagcatcctgtgcaaggacagcagaggcagaacccccctgcactacgccgccgccagaggccacgccacctggctgagcgagctgctgcagatggccctgagcgaggaggactgctgcttcaaggacaaccagggctacacccccctgcactgggcctgctacaacggcaacgagaactgcatcgaggtgctgctggagcagaagtgcttcagaaagttcatcggcaaccccttcacccccctgcactgcgccatcatcaacgaccacggcaactgcgccagcctgctgctgggcgccatcgacagcagcatcgtgagctgcagagacgacaagggcagaacccccctgcacgccgccgccttcgccgaccacgtggagtgcctgcagctgctgctgagacacagcgcccccgtgaacgccgtggacaacagcggcaagaccgccctgatgatggccgccgagaacggccaggccggcgccgtggacatcctggtgaacagcgcccaggccgacctgaccgtgaaggacaaggacctgaacacccccctgcacctggcctgcagcaagggccacgagaagtgcgccctgctgatcctggacaagatccaggacgagagcctgatcaacgagaagaacaacgccctgcagacctag

SEQ ID NO: 74564 - DNA, 1740 bp, Artificial Sequence
  derived and/or modified sequence
atggccgtgctgaagctgaccgaccagccccccctggtgcaggccatcttcagcggcgaccccgaggagatcagaatgctgatccacaagaccgaggacgtgaacaccctggacagcgagaagagaacccccctgcacgtggccgccttcctgggcgacgccgagatcatcgagctgctgatcctgagcggcgccagagtgaacgccaaggacaacatgtggctgacccccctgcacagagccgtggccagcagaagcgaggaggccgtgcaggtgctgatcaagcacagcgccgacgtgaacgccagagacaagaactggcagacccccctgcacgtggccgccgccaacaaggccgtgaagtgcgccgaggtgatcatccccctgctgagcagcgtgaacgtgagcgacagaggcggcagaaccgccctgcaccacgccgccctgaacggccacgtggagatggtgaacctgctgctggccaagggcgccaacatcaacgccttcgacaagaaggacagaagagccctgcactgggccgcctacatgggccacctggacgtggtggccctgctgatcaaccacggcgccgaggtgacctgcaaggacaagaagggctacacccccctgcacgccgccgccagcaacggccagatcaacgtggtgaagcacctgctgaacctgggcgtggagatcgacgagatcaacgtgtacggcaacaccgccctgcacatcgcctgctacaacggccaggacgccgtggtgaacgagctgatcgactacggcgccaacgtgaaccagcccaacaacaacggcttcacccccctgcacttcgccgccgccagcacccacggcgccctgtgcctggagctgctggtgaacaacggcgccgacgtgaacatccagagcaaggacggcaagagccccctgcacatgaccgccgtgcacggcagattcaccagaagccagaccctgatccagaacggcggcgagatcgactgcgtggacaaggacggcaacacccccctgcacgtggccgccagatacggccacgagctgctgatcaacaccctgatcaccagcggcgccgacaccgccaagtgcggcatccacagcatgttccccctgcacctggccgccctgaacgcccacagcgactgctgcagaaagctgctgagcagcggcttcgagatcgacacccccgacaagttcggcagaacctgcctgcacgccgccgccgccggcggcaacgtggagtgcatcaagctgctgcagagcagcggcgccgacttccacaagaaggacaagtgcggcagaacccccctgcactacgccgccgccaactgccacttccactgcatcgagaccctggtgaccaccggcgccaacgtgaacgagaccgacgactggggcagaaccgccctgcactacgccgccgccagcgacatggacagaaacaagaccatcctgggcaacgcccacgacaacagcgaggagctggagagagccagagagctgaaggagaaggaggccaccctgtgcctggagttcctgctgcagaacgacgccaaccccagcatcagagacaaggagggctacaacagcatccactacgccgccgcctacggccacagacagtgcctggagctggtgagctgcttcgtgctgttcagcctgacccacacccacacccacacccccaaccacagaggcatcaactgcttcttccccgagctgtag

SEQ ID NO: 74565 - DNA, 1524 bp, Artificial Sequence
  derived and/or modified sequence
atgtggctgacccccctgcacagagccgtggccagcagaagcgaggaggccgtgcaggtgctgatcaagcacagcgccgacgtgaacgccagagacaagaactggcagacccccctgcacgtggccgccgccaacaaggccgtgaagtgcgccgaggtgatcatccccctgctgagcagcgtgaacgtgagcgacagaggcggcagaaccgccctgcaccacgccgccctgaacggccacgtggagatggtgaacctgctgctggccaagggcgccaacatcaacgccttcgacaagaaggacagaagagccctgcactgggccgcctacatgggccacctggacgtggtggccctgctgatcaaccacggcgccgaggtgacctgcaaggacaagaagggctacacccccctgcacgccgccgccagcaacggccagatcaacgtggtgaagcacctgctgaacctgggcgtggagatcgacgagatcaacgtgtacggcaacaccgccctgcacatcgcctgctacaacggccaggacgccgtggtgaacgagctgatcgactacggcgccaacgtgaaccagcccaacaacaacggcttcacccccctgcacttcgccgccgccagcacccacggcgccctgtgcctggagctgctggtgaacaacggcgccgacgtgaacatccagagcaaggacggcaagagccccctgcacatgaccgccgtgcacggcagattcaccagaagccagaccctgatccagaacggcggcgagatcgactgcgtggacaaggacggcaacacccccctgcacgtggccgccagatacggccacgagctgctgatcaacaccctgatcaccagcggcgccgacaccgccaagtgcggcatccacagcatgttccccctgcacctggccgccctgaacgcccacagcgactgctgcagaaagctgctgagcagcggcttcgagatcgacacccccgacaagttcggcagaacctgcctgcacgccgccgccgccggcggcaacgtggagtgcatcaagctgctgcagagcagcggcgccgacttccacaagaaggacaagtgcggcagaacccccctgcactacgccgccgccaactgccacttccactgcatcgagaccctggtgaccaccggcgccaacgtgaacgagaccgacgactggggcagaaccgccctgcactacgccgccgccagcgacatggacagaaacaagaccatcctgggcaacgcccacgacaacagcgaggagctggagagagccagagagctgaaggagaaggaggccaccctgtgcctggagttcctgctgcagaacgacgccaaccccagcatcagagacaaggagggctacaacagcatccactacgccgccgcctacggccacagacagtgcctggagctggtgagctgcttcgtgctgttcagcctgacccacacccacacccacacccccaaccacagaggcatcaactgcttcttccccgagctgtag

SEQ ID NO: 74566 - DNA, 2958 bp, Artificial Sequence
  derived and/or modified sequence
cagccccccttggtgcaggccatctttagcggagatcccgaagaaattcgtatgctcatacacaaaactgaggatgtgaatacactagacagcgaaaagcggacccccctgcacgtggccgcgttcctgggggatgctgaaattattgaactgttgatcctcagtggagctagagtgaacgcaaaggataacatgtggctcacccctctccacagggccgtagctagcaggtctgaggaagccgttcaggtgctgatcaaacactctgccgacgtcaacgctcgtgacaagaactggcagacccccctccacgttgctgccgctaacaaagctgtcaaatgtgccgaagttattattcctctgctatcgtctgtgaacgtgagcgaccgtggcggacgcaccgccctacaccacgccgccctcaacgggcatgttgaaatggtcaacctgttacttgccaagggggctaacattaacgctttcgataagaaagacaggagagctttgcattgggcagcttatatgggacatcttgacgtggtagcactactgataaatcacggcgctgaagtcacatgtaaagacaagaagggatatacaccccttcatgctgccgcgtccaacgggcaaatcaatgtggtgaaacacttgctaaatctgggggtggaaattgacgaaatcaacgtgtacggaaacacagcactacacattgcttgctataacggacaggacgccgtggtcaatgagcttatcgattacggcgcaaatgtaaaccaacccaataataacggtttcaccccgctccactttgccgccgcctctacgcatggggcgctatgcctggaactgctcgtgaacaacggcgcagatgtcaatattcagtctaaagatgggaagtcacctctgcatatgactgcggtacacgggagatttacacgcagccagacactcatccagaacggaggagaaattgattgtgtggacaaggacggtaataccccactccacgtggcagcccgctacgggcacgaactcctaattaacaccctcattacaagtggtgccgacaccgccaaatgcggcattcattccatgtttcccttacacttggccgctctcaacgcgcatagcgactgttgtcggaagttactcagttccggctttgagattgataccccagacaagtttggcagaacgtgtttgcatgccgccgcagcaggagggaatgtagagtgtattaagttactgcagagcagcggtgcggatttccataagaaggacaaatgtggccgcacacctctccactatgcagcagccaattgccactttcactgtatagagacactggtgaccacaggggcaaacgtcaatgagactgacgattgggggcgcaccgctttgcattatgccgccgcaagtgatatggatcggaataagacaatcctcggcaacgctcatgacaacagtgaggaactggagcgtgcaagggaactgaaggagaaggaggccaccttgtgcctggaatttcttctgcagaatgacgccaatccttcaatccgagacaaagagggatacaacagcatccattatgctgctgcatatggacataggcaatgcctggagctgcttctcgagcgaaccaactctggttttgaggagagcgattcaggcgccactaagtcccccctgcacctagcagcttacaacggacatcaccaggctttagaggtgcttctgcaatctttagtagacctcgatatcagggatgagaaggggcgtacagccctggacctggccgcttttaaggggcacaccgagtgcgttgaggcattgatcaaccagggagcgtcaatattcgtgaaggataacgtgaccaagcgcactcccttgcatgcttccgtgatcaacggccacaccctttgtcttaggctactactggaaatcgcggataatcctgaggccgtggacgtgaaagacgcgaagggccagacaccactgatgctcgcggtggcgtacgggcacatcgatgcggtaagtctgctgctggagaaggaggccaacgtggataccgtggatatcctgggctgtacggctctccataggggtatcatgaccggtcatgaagagtgtgtgcagatgttgctcgagcaggaggtgagtatcttgtgtaaagattcgcgcggccgaaccccgcttcactatgccgccgcccggggtcacgcaacttggctctcagaattgctgcaaatggccctctcagaagaagactgttgctttaaagataatcagggttatacccctctacactgggcctgttacaacggcaacgagaactgcatcgaggtactcctggaacagaagtgctttagaaagttcattggaaacccttttactcctcttcactgtgcgattattaacgaccacggaaactgcgcctcattactgctcggagcgatcgattcttccatcgtctcctgtagggatgataaaggcagaacccccctgcatgcagccgcttttgctgatcacgtggagtgcctccagctactactgaggcactccgcacctgtcaatgccgtggacaattctggcaaaaccgccctgatgatggccgcagagaatggacaggctggcgcagtggatattcttgtcaactccgcacaggccgacctcacagttaaagataaggacctgaacacaccgttgcacttagcatgtagcaaaggacatgagaaatgcgccttgctgattttagataagatccaggacgagtcccttataaacgagaaaaataatgcgttgcagaccccactgcacgtggcggctaggaatggtctcaaggtcgttgtcgaagagctcctagcaaaaggagcgtgtgtgctggctgtcgacgagaatgcaagtcgttcaaatggacccaggtccacacccggcacagccgtgcagaaggaggagtag

SEQ ID NO: 74567 - DNA, 2760 bp, Artificial Sequence
  derived and/or modified sequence
atgctaattcacaagaccgaggacgtgaataccctcgattccgagaagcgcactcctttacacgtagcggccttcctaggcgatgccgagatcatcgagctgctcatcttgtcgggtgcgagagtgaatgcaaaggacaatatgtggctgacgcccctccacagggccgttgccagccgatctgaggaagccgtgcaggtcctcatcaagcattcagctgatgtcaacgcacgcgataagaattggcagacgccactacacgttgctgccgccaacaaggccgttaaatgtgcagaggtcatcatcccccttctttcatcagtgaatgtttctgatcggggaggaagaaccgccctgcatcacgccgcactgaacggtcatgtagagatggtcaacttattactcgccaagggtgcgaatattaacgcattcgataagaaggacaggcgcgcactccactgggcggcctacatgggccaccttgatgtggtggctctcctgatcaaccatggcgccgaggtgacctgtaaggacaagaagggttatacccccctccatgctgccgcgagcaatgggcaaatcaacgtggtcaagcacctgctcaacctcggcgtggagatcgacgagattaacgtatatggcaataccgccctgcatatcgcttgttataacggccaggacgctgtcgtgaatgagctcatagactacggcgccaacgtgaaccagccaaataacaatgggtttaccccactccacttcgccgccgccagtacacatggggccctgtgtctggagttgttggttaacaacggcgctgacgtgaatattcagagtaaagatgggaagagtcccttacatatgacagccgtccacggcagatttacgagatcacagactttgattcagaacggaggcgagatcgactgtgtggataaggatggtaacactccgcttcatgtagccgctcgctatgggcacgagttgttgatcaacactctgattacctctggggcggacacagccaaatgtggaatacacagcatgtttcccctgcatttggcggcactgaacgctcactccgattgttgcaggaaattactgtcttccggattcgaaattgacacacccgacaagtttggaagaacttgcctgcacgcagccgctgcaggtggaaacgtagaatgcataaagctcctgcagtcatcaggagcggactttcacaagaaagataagtgtggccgtacacccctgcactacgccgccgccaattgccattttcattgcattgagacactcgtgactacaggggccaacgtgaacgaaaccgacgactgggggaggacagcactgcattatgcagcagcatctgacatggaccgaaataaaaccatcttggggaacgctcacgacaattccgaggagctcgagagagccagggagctgaaggaaaaagaggccaccttgtgtctagagtttttactccaaaacgacgccaaccctagtattcgcgataaagaaggatacaactcaattcattacgccgccgcctacggccatagacagtgcctggagctgctcctcgagaggactaatagcggtttcgaggagtccgactccggggccaccaagtctcccctgcatctggcagcatataatggtcaccaccaggcactggaggtcttgcttcagagtcttgtcgaccttgacattagggatgaaaaaggtcgaacggctctcgacctcgccgcctttaaaggtcacaccgagtgtgtagaggctctcatcaatcagggcgcttccatcttcgtgaaggataacgtcacaaagcgcacgccgctgcatgcgagcgtcatcaacgggcacactctgtgtctccggctgctactagaaatcgccgacaaccctgaggccgtggacgtgaaagacgcaaaaggtcagaccccactgatgcttgccgttgcctatggacacatcgacgcggtctctctgctgttggaaaaggaggccaatgtggacacagtggacattctagggtgcactgcgttgcaccggggcatcatgaccggacacgaggagtgcgtccagatgcttctggagcaagaagtctcaatcctatgtaaggattcacggggtagaactccccttcactacgcagccgccagaggccacgcaacatggctctccgaacttcttcagatggctctatccgaggaggactgttgttttaaagataatcaaggatacactccactgcactgggcctgctacaacggaaatgaaaactgtatcgaggtgctgctggaacagaagtgtttcaggaagtttattggaaatcctttcactcctctgcattgcgctataatcaacgaccatgggaactgcgcctctctccttttgggggctatagatagctccattgtgagttgtcgcgatgacaaaggaagaactccgcttcacgccgccgcatttgccgaccatgtcgagtgcctccagctgctgctgaggcattcagcacctgtgaatgctgtcgataacagcgggaagacagcactcatgatggctgcagaaaatggacaggctggcgcagttgatatattggtaaacagcgcacaggccgaccttactgtgaaggataaggacttaaatacacccctacacttggcttgctccaaaggtcacgaaaaatgcgcactgctgattctggacaagatccaggacgagtctcttatcaacgaaaaaaacaatgcactgcagacctag

SEQ ID NO: 74568 - DNA, 2760 bp, Artificial Sequence
  derived and/or modified sequence
ctgctcatctacaaaacagagatcatttcgaccctggactctgagaagaggactccactgcacgtcgcagcctttctgggggatgcggagattatcgagttattaatcctcagtggcgcccgggtgaatgcaaaggacaatatgtggctgacaccgttgcacagggctgtggcttcgaggtccgaggaagccgtccaggtcctcataaaacactctgccgatgtaaacgcccgggataagaattggcagacaccattgcatgtcgccgccgctaacaaagctgtgaagtgcgccgaagttatcatcccgctgctgagttcagtaaacgtgagtgaccgaggtggacgtaccgcgctccaccacgcagccctgaatggacatgttgagatggttaatctccttctcgctaagggtgctaatatcaatgctttcgataagaaagataggcgcgcgctccattgggctgcttatatggggcatctggacgtcgtggctctgctaattaaccacggagctgaggttacctgtaaagataagaagggctacacccccctgcacgctgccgcatctaacggacaaatcaacgtggttaaacatctgcttaatcttggagtcgagatcgacgaaataaacgtctacggcaatacggcgctacatattgcctgctataatggacaggacgctgtggtgaatgaattgatagactatggggccaatgttaatcaaccaaacaacaacggctttaccccattgcatttcgccgccgctagcactcacggggccctgtgcctcgagctgctagtcaacaatggagctgacgtcaatatacagagtaaagacggcaagagcccactgcacatgaccgctgtgcatgggcgtttcacccgcagccagacactgatacagaacgggggagagattgactgcgtggacaaagatggtaacactcctctgcacgtggccgccagatatggacacgaactgcttatcaacactctcattacgagcggcgccgataccgctaaatgtggcattcatagtatgttccctcttcatctggccgccctgaatgcgcattcggattgctgcagaaaactcctgtcaagtggttttgaaatcgatacccctgacaagtttggcaggacctgtctgcacgcagctgccgcaggcggtaacgtggaatgtatcaaactgttacagagctccggcgccgatttccacaagaaggacaagtgtgggaggactcctttacactatgccgctgctaactgtcacttccattgtatcgagacacttgtgacaacaggggccaacgttaacgagaccgatgactgggggcgcaccgcgctgcattacgctgctgccagcgatatggacaggaataaaaccattctcggaaacgcccatgataattccgaggaactggaacgggcccgtgagctcaaagagaaagaagcgacgttgtgtctggaatttctcctgcaaaatgatgcgaaccctagcattagggacaaggaagggtacaactcaatccattatgcagccgcatatgggcatcgacagtgtttagagctcctactggagaggaccaattcaggatttgaggaatccgactctggggctacgaaatctcccctccatcttgctgcctataacggtcatcatcaggcattggaagtccttctgcaaagcctggttgatttggacatccgagatgaaaagggtcgaaccgcattggacttggccgctttcaaggggcacaccgaatgtgtagaggccctaattaatcagggagcatctatatttgttaaggataacgtcaccaaacgtacacctctccacgcttccgttatcaacggccatactctttgtttgcgactactgctggagatcgccgacaatccggaggcagttgacgttaaggacgccaaaggacagacaccgttgatgctggcagtggcctacgggcacatagatgcagtttccctgctgctcgagaaggaggcgaacgtagacactgtcgacatcctgggatgtacagctttgcatagggggatcatgacaggacacgaagaatgcgtccagatgctcctggaacaggaggtttcaatcttatgtaaagatagcagagggcgtacaccgctgcactatgctgctgcacgcggccacgctacatggctgtctgagctgctgcagatggccctgagcgaggaggattgctgctttaaggacaatcagggctacacccctctccattgggcttgctacaacggcaacgaaaattgtatcgaggtgttgctggagcaaaagtgcttcaggaaattcattggcaacccattcacacctctgcattgcgctatcatcaacgatcatggcaattgtgctagtctgctgctcggcgccattgattctagtatcgtctcctgtcgggatgataaggggcgaacacctctccatgctgccgctttcgccgaccacgtggagtgcctgcagctccttctcaggcacagcgcaccagttaacgcagtggacaatagtgggaagacggccctaatgatggccgcggagaacggtcaggccggggccgttgacattctggttaactcagcgcaagcggacctcacggtaaaagacaaggatctgaatactccactgcatctggcatgcagtaagggccacgagaagtgcgcgttgttgatattggataagatacaagacgaatccctcatcaacgaaaagaataacgccttgcagacctag

SEQ ID NO: 74569 - DNA, 1740 bp, Artificial Sequence
  derived and/or modified sequence
atggctgtcctcaagctgactgaccaaccaccactcgtgcaggccatcttttcgggagatccagaggaaatacgcatgctcatccataaaacagaagacgtcaacacgttggacagcgagaaacgcacaccacttcacgtggcggcatttctcggcgacgccgaaattattgaactgctcatcctgtccggcgcgcgggtcaatgccaaggataacatgtggctgacgcccctgcacagagcagtggcttctaggtccgaggaggccgtacaagttttgatcaaacacagcgcagatgtgaatgcaagggacaagaattggcagactccccttcatgtcgcagccgcgaataaagctgtgaaatgcgctgaagtcatcatccctctgctgagttccgtaaacgtaagtgaccggggcggacggactgctctacatcatgccgccctgaacggtcatgttgaaatggttaatttgctgctcgcaaagggggctaacatcaatgcattcgacaaaaaagacagaagggccctgcattgggcggcgtatatgggccatctggacgtagtcgcgctgttaatcaaccacggtgccgaagtgacatgcaaggacaaaaaaggatacaccccactccacgctgccgcttctaacggccagatcaacgtcgtgaaacatctcttaaacctcggggtcgagattgatgagattaatgtgtacgggaacactgcgctgcatatagcatgttacaatggacaggatgctgtggtgaatgaactgatcgactatggggctaacgtgaatcagcctaacaataacgggtttacaccattgcacttcgccgccgcttccacacacggcgccttatgcttggagctcctggttaataacggcgctgatgtgaatatccagagcaaggatggaaagtccccccttcacatgactgccgtgcatggacggttcacccgcagccagacactcatacagaatggaggagaaattgattgcgttgataaggacgggaacacccccctgcacgtggccgctcgctacggacatgagttgctgatcaatactctaattactagtggcgcagacacagctaagtgcggtattcacagcatgttccctctccatctggcagccctcaatgcacactcagactgctgtcgtaagctcttatcttctggatttgaaatagatacaccagacaagtttggtagaacctgcctgcacgccgctgctgctggcggcaacgtagaatgcatcaaactgctccaaagttcaggtgccgatttccataagaaggataagtgtggacgcactccactgcattacgcagccgccaattgccatttccattgcatcgagaccctcgtcactacgggtgccaatgtgaacgagacagatgattgggggagaaccgcactgcactacgcagctgcttctgacatggatcggaataagacgatcttgggtaatgcgcacgataattccgaagaactggagcgtgccagagagctaaaggaaaaagaggcgaccctgtgtctcgagttcctcctccagaacgatgctaacccctcaattcgagacaaggagggatataactctattcactatgctgctgcgtatggtcatagacagtgcctggaactcgtctcctgctttgtgctgttttcccttacgcacacccacacacatacccctaaccaccgaggcatcaactgtttttttccggaactgtag

SEQ ID NO: 74570 - DNA, 2760 bp, Artificial Sequence
  derived and/or modified sequence
atgctcatccataagaccgaagacgtgaacaccttggattcagaaaagcgaacccctctccacgtagctgcatttctaggcgatgctgagatcatcgagcttctgatactaagtggggcccgggtcaatgcaaaggataatatgtggttgactccactgcatagggccgtggcctcaaggagcgaagaagccgtgcaggtactaataaagcattctgccgacgtaaatgccagagataagaactggcagacaccgttgcacgtagctgcggccaacaaggctgtgaaatgcgccgaagtcatcatccctctgctgtccagcgtgaacgtgtcagacaggggtggacgcactgccctacaccatgctgctcttaatgggcacgtcgaaatggtgaatctgctactcgccaagggagccaacataaacgcctttgataaaaaagacaggcgtgccttgcattgggcagcttacatgggccacctcgatgtggttgccctgctaatcaaccacggcgccgaggtaacctgcaaggacaagaagggctacacacctctgcacgccgctgcttccaatgggcagattaacgtagttaaacacctacttaacctgggagtggaaatcgacgaaattaacgtttatgggaataccgcactgcacatcgcctgctataacgggcaggacgcagtggtaaacgagttgatcgactacggtgccaatgtcaaccagcccaataataatggcttcactcctctgcatttcgccgcggcctcaacacacggcgccctctgcctggagctgttggttaataatggcgcagacgtgaatatccaatcaaaggatggcaagtctcctctgcacatgactgcagtgcatggccgctttacaagatcccagacactgatccagaacggcggtgaaatcgactgcgtggataaggacgggaacacaccgttacatgtggctgcaagatatgggcatgaattgctcatcaacaccctgatcacttccggtgcggataccgctaaatgcggcatacacagcatgttccccctccacctggcagcgttaaatgcccactctgactgttgtcgcaaactgctgtctagtgggtttgaaattgatactcctgataagttcggccggacgtgcctgcacgctgccgccgcaggaggcaacgttgagtgcatcaaattgctgcaatcatccggagccgatttccataagaaagataaatgcggccgcacccctctccattatgcagcggctaactgtcactttcattgcattgaaacactggtaaccaccggcgctaacgtcaatgagaccgacgactgggggcggactgccctgcattatgcggccgccagtgatatggatcgtaataaaactatcctgggaaacgcccatgataattctgaggaactcgaaagggcccgtgagcttaaagagaaggaggccactctgtgcctggagttcctcctgcaaaatgatgccaacccaagcatcagggataaggagggttacaattccatccactacgccgccgcttacggtcatagacagtgtctagagctgctgctcgaacggaccaactcggggtttgaggagagtgacagtggggccacaaagtccccactccatctcgcagcctacaacggacatcatcaggctctggaggtgctgctccagtctcttgtggatctggatatcagggatgagaagggccgcacagcattggacctggcagccttcaaaggccacactgagtgcgtggaagcattgatcaatcagggtgctagcatatttgtgaaagataacgttacaaaacggaccccactgcatgctagtgtcatcaacggccacaccctgtgtctacggctactgctagagatcgcggataaccctgaggctgtagatgtaaaggatgccaaagggcagacccctttgatgttggcggtggcctatgggcatattgacgctgtttccttgctgcttgaaaaggaggctaacgtggatactgtggatatcctgggttgtaccgctctccatcgcgggattatgacaggacacgaagagtgtgtgcagatgttgctggaacaggaggtgagcatcctttgtaaggactcccggggtagaacccccttacactatgcagccgccagaggtcacgccacctggttgtcagagctgctacaaatggctctcagcgaggaagattgttgtttcaaagataaccagggttacacacctctccactgggcctgctataatgggaatgagaactgcatagaggttttgctagagcagaagtgtttccgaaaatttataggaaacccctttacccctctgcactgcgctatcattaatgaccatggaaactgtgctagcctcttgctgggagctatagactccagcatagtcagttgtagggatgataaggggcggactccactgcacgcagccgccttcgcggatcacgtcgagtgcctgcagctcttgctcagacatagtgcccctgtcaacgccgtcgataattctggcaaaactgctctcatgatggccgctgaaaatggccaggcaggcgctgtagatattctggttaatagcgcccaggccgacctaaccgtcaaggacaaggacctaaacacacccttacacctggcctgcagtaagggacatgagaaatgcgcgctgcttatcttggacaagatccaggacgagagtctgatcaacgagaagaacaacgctcttcagacttag

SEQ ID NO: 74571 - DNA, 1524 bp, Artificial Sequence
  derived and/or modified sequence
atgtggttgacacctctgcatagggccgtggcttccagaagcgaggaagcagttcaggttttgattaagcattccgcggacgtaaacgcaagggacaagaattggcagacgccccttcacgttgcggctgcaaataaagctgtaaagtgcgccgaagtcattatccctttgctctcttctgtgaacgtgtctgatcggggaggtcggacagcgctccatcacgcagcactgaatggccacgtggagatggtgaatctcctactggccaagggagccaatatcaacgcatttgataaaaaggaccggcgggcactgcactgggccgcttatatgggtcacctggatgtcgtcgctttgctgataaatcatggagcagaggtgacctgtaaggataagaaaggatacactccacttcacgcagctgcaagcaatggtcaaatcaacgtagtcaaacacctgctcaacctgggggtagaaattgatgagatcaacgtttatggcaatacagcgcttcatatcgcatgttataatgggcaggacgcagttgtgaatgagctcatagactacggagccaatgtgaaccagccgaataacaatggcttcacccctctacacttcgccgccgcgtccactcatggcgcgctgtgtctggagctcctcgtcaacaatggagcagatgtgaacatccagtctaaagacggtaagtcaccccttcacatgaccgctgtccacggaagattcacaaggtctcagaccctcattcagaacggcggcgagatcgactgcgtcgataaggacggaaatacgcccctgcacgttgcagcacgatacgggcatgaacttcttattaacactctaatcacctccggagcggatacagcgaagtgcggcatccatagcatgtttcctctgcatttggcagccctgaacgctcattcggactgctgccgcaaattactcagctccgggtttgaaatcgatactcctgacaagtttggcaggacctgtttgcatgccgctgccgcaggagggaatgtggaatgtattaagcttttacaatcttcgggcgctgattttcataagaaggacaaatgcggccgaactccactgcactacgctgccgccaactgccatttccactgtattgaaacattggttaccacgggagccaatgtgaatgaaaccgatgattgggggagaacagccctgcactatgcagcggcctccgacatggataggaacaagaccattcttggaaacgcgcatgacaattccgaggagttggagagagcgagagagctgaaagagaaagaggcaacgctgtgtttggaatttttgctgcagaacgacgccaatcctagcattagagataaagagggatacaacagcatccactatgccgctgcttatgggcacagacagtgcctggaactggtgagttgttttgtactgttctctctaacccacacccacactcacacacccaatcatcgcgggatcaattgttttttccctgaactttag

SEQ ID NO: 74572 - DNA, 2958 bp, Artificial Sequence
  derived and/or modified sequence
cagccccccctggtgcaggccatcttcagcggggaccctgaggagatccgcatgctgatccacaagacagaagatgtgaacaccctggacagcgagaagaggacccccctgcacgtggccgccttcctgggagatgctgagatcatcgagctgctgatcctgagcggggcccgggtgaatgccaaggacaacatgtggctgacccccctgcacagagctgtggccagccgctctgaggaggccgtgcaggtgctgatcaagcacagcgcagatgtgaatgcccgggacaagaactggcagacccccctgcacgtggccgccgccaacaaggctgtgaagtgtgccgaggtgatcatccccctgctgagctctgtgaatgtgtctgacagaggaggccgcacagccctgcaccacgccgccctgaatggccacgtggagatggtgaacctgctgctggccaagggggccaacatcaatgcctttgacaagaaggaccggcgggccctgcactgggccgcctacatgggccacctggatgtggtggccctgctgatcaaccacggggctgaggtgacctgcaaggacaagaagggctacacccccctgcacgccgccgccagcaatggccagatcaacgtggtgaagcacctgctgaacctgggcgtggagattgatgagatcaacgtgtatggcaacacagccctgcacatcgcctgctacaacggccaggatgctgtggtgaatgagctgattgattatggagccaacgtgaaccagcccaacaacaacggcttcacccccctgcactttgctgctgccagcacccacggggccctgtgcctggagctgctggtgaacaatggagcagatgtgaacatccagagcaaggatggcaagagccccctgcacatgacagctgtgcacggccgcttcaccaggagccagaccctcatccagaatggaggagaaattgactgtgtggacaaggatggcaacacccccctgcacgtggccgcccgctatggccacgagctgctgatcaacaccctcatcaccagcggggctgacacagccaagtgtggcatccacagcatgttccccctgcacctggccgccctgaatgcccacagcgactgctgcaggaagctgctgagcagcggctttgaaattgacaccccagacaagtttggccgcacctgcctgcatgctgctgctgctggaggaaatgtggagtgcatcaagctgctgcagagcagtggagctgacttccacaagaaggacaagtgtggccgcacccccctgcactatgctgctgccaactgccacttccactgcatcgagaccctggtgaccaccggggccaacgtgaatgaaacagatgactggggccgcacagccctgcactacgccgccgccagtgacatggacaggaacaagaccatcctgggcaatgcccatgacaacagcgaggagctggagcgggcccgggagctgaaggagaaggaggccaccctgtgcctggagttcctgctgcagaatgatgccaaccccagcatccgggacaaggagggctacaacagcatccactatgctgctgcctacggccaccggcagtgcctggagctgctgctggagaggaccaacagcggctttgaggagagtgacagcggggccaccaagagccccctgcacctggccgcctacaacggccaccaccaggccctggaggtgctgctgcagagcctggtggacctggacatcagagatgagaagggccgcacagccctggacctggccgccttcaagggccacacagaatgtgtggaggccctgatcaaccagggcgccagcatctttgtgaaggacaacgtgaccaagaggacccccctgcacgccagcgtcatcaatggccacaccctgtgcctgcggctgctgctggagattgctgacaaccctgaggccgtggatgtgaaggatgccaagggccagacccccctgatgctggccgtggcctacggccacattgatgctgtgtccctgctgctggagaaggaggccaacgtggacacagtggacatcctgggctgcacagccctgcaccggggcatcatgactggacatgaagaatgtgtgcagatgctgctggagcaggaggtgtccatcctgtgcaaggacagccggggccgcacccccctgcactatgctgctgcccggggccacgccacctggctgtctgagctgctgcagatggccctgtctgaggaggactgctgcttcaaggacaaccagggctacacccccctgcactgggcctgctacaatggaaatgaaaactgcatcgaggtgctgctggagcagaagtgcttcaggaagttcatcggcaaccccttcacccccctgcactgtgccatcatcaatgaccacggcaactgtgccagcctgctgctgggcgccatcgacagcagcatcgtgtcctgcagagatgacaagggccgcacccccctgcatgctgctgcctttgctgaccacgtggagtgcctgcagctgctgctgcggcacagcgcccctgtgaatgctgtggacaacagcggcaagacagccctgatgatggccgcagaaaatggccaggccggggctgtggacatcctggtgaacagcgcccaggccgacctgactgtgaaggacaaggacctgaacacccccctgcacctggcctgcagcaagggccacgagaagtgtgccctgctgatcctggacaagatccaggatgagagcctcatcaatgagaagaacaatgccctgcagacccccctgcacgtggccgccagaaatggcctgaaggtggtggtggaggagctgctggccaagggggcctgtgtgctggccgtggatgaaaatgccagccgcagcaatggccccaggagcaccccaggcacagctgtgcagaaggaggagtag

SEQ ID NO: 74573 - DNA, 2760 bp, Artificial Sequence
  derived and/or modified sequence
atgctgatccacaagacagaagatgtgaacaccctggacagcgagaagaggacccccctgcacgtggccgccttcctgggagatgctgagatcatcgagctgctgatcctgagcggggcccgggtgaatgccaaggacaacatgtggctgacccccctgcacagagctgtggccagccgctctgaggaggccgtgcaggtgctgatcaagcacagcgcagatgtgaatgcccgggacaagaactggcagacccccctgcacgtggccgccgccaacaaggctgtgaagtgtgccgaggtgatcatccccctgctgagctctgtgaatgtgtctgaccggggcggccgcacagccctgcaccacgccgccctgaatggacatgtggagatggtgaacctgctgctggccaagggggccaacatcaatgcctttgacaagaaggacagaagagccctgcactgggccgcctacatgggccacctggatgtggtggccctgctgatcaaccacggggctgaggtgacctgcaaggacaagaagggctacacccccctgcatgctgctgccagcaatggccagatcaacgtggtgaagcacctgctgaacctgggcgtggagattgatgagatcaacgtgtatggcaacacagccctgcacatcgcctgctacaacggccaggatgctgtggtgaatgagctgattgattatggagccaacgtgaaccagcccaacaacaacggcttcacccccctgcactttgctgctgccagcacccatggagccctgtgcctggagctgctggtgaacaacggggctgatgtgaacatccagagcaaggatggcaagagccccctgcacatgacagctgtgcacggccgcttcaccaggagccagaccctcatccagaatggaggagaaattgactgtgtggacaaggatggcaacacccccctgcacgtggccgcccgctatggccacgagctgctgatcaacaccctcatcaccagcggggctgacacagccaagtgtggcatccacagcatgttccccctgcacctggccgccctgaatgcccacagcgactgctgcaggaagctgctgagcagcggctttgaaattgacaccccagacaagtttggaagaacctgcctgcacgccgctgctgctggaggaaatgtggagtgcatcaagctgctgcagagcagcggggctgacttccacaagaaggacaagtgtggccgcacccccctgcactacgccgccgccaactgccacttccactgcatcgagaccctggtgaccactggagccaacgtgaatgaaacagatgactggggccgcacagccctgcactatgctgctgccagtgacatggacaggaacaagaccatcctgggcaatgcccatgacaacagcgaggagctggagcgggcccgggagctgaaggagaaggaggccaccctgtgcctggagttcctgctgcagaatgatgccaaccccagcatccgggacaaggagggctacaacagcatccactacgccgccgcctacggccaccggcagtgcctggagctgctgctggagaggaccaacagcggctttgaggagagtgacagcggggccaccaagagccccctgcacctggccgcctacaacggccaccaccaggccctggaggtgctgctgcagagcctggtggacctggacatcagagatgagaagggccgcacagccctggacctggccgccttcaagggccacacagaatgtgtggaggccctgatcaaccagggcgccagcatctttgtgaaggacaacgtgaccaagaggacccccctgcacgccagcgtcatcaatggccacaccctgtgcctgcggctgctgctggagattgctgacaaccctgaggccgtggatgtgaaggatgccaagggccagacccccctgatgctggccgtggcctacggccacattgatgctgtgtccctgctgctggagaaggaggccaacgtggacacagtggacatcctgggctgcacagccctgcaccggggcatcatgacaggccacgaggagtgtgtgcagatgctgctggagcaggaggtgtccatcctgtgcaaggacagccggggccgcacccccctgcactacgccgccgcccggggccacgccacctggctgtctgagctgctgcagatggccctgtctgaggaggactgctgcttcaaggacaaccagggctacacccccctgcactgggcctgctacaatggaaatgaaaactgcatcgaggtgctgctggagcagaagtgcttcaggaagttcatcggcaaccccttcacccccctgcactgtgccatcatcaatgaccacggcaactgtgccagcctgctgctgggcgccatcgacagcagcatcgtgtcctgcagagatgacaagggccgcacccccctgcacgccgccgcctttgctgaccacgtggagtgcctgcagctgctgctgcggcacagcgcccctgtgaatgctgtggacaacagcggcaagacagccctgatgatggctgctgaaaatggccaggccggggctgtggacatcctggtgaacagcgcccaggccgacctgactgtgaaggacaaggacctgaacacccccctgcacctggcctgcagcaaaggacatgagaagtgtgccctgctgatcctggacaagatccaggatgagagcctcatcaatgagaagaacaatgccctgcagacctag

SEQ ID NO: 74574 - DNA, 2760 bp, Artificial Sequence
  derived and/or modified sequence
ctgctgatctacaagacagagatcatcagcaccctggacagcgagaagaggacccccctgcacgtggccgccttcctgggagatgctgagatcatcgagctgctgatcctgagcggggcccgggtgaatgccaaggacaacatgtggctgacccccctgcacagagctgtggccagccgctctgaggaggccgtgcaggtgctgatcaagcacagcgcagatgtgaatgcccgggacaagaactggcagacccccctgcacgtggccgccgccaacaaggctgtgaagtgtgccgaggtgatcatccccctgctgagctctgtgaatgtgtctgaccggggcggccgcacagccctgcaccacgccgccctgaatggacatgtggagatggtgaacctgctgctggccaagggggccaacatcaatgcctttgacaagaaggacagaagagccctgcactgggccgcctacatgggccacctggatgtggtggccctgctgatcaaccacggggctgaggtgacctgcaaggacaagaagggctacacccccctgcatgctgctgccagcaatggccagatcaacgtggtgaagcacctgctgaacctgggcgtggagattgatgagatcaacgtgtatggcaacacagccctgcacatcgcctgctacaacggccaggatgctgtggtgaatgagctgattgattatggagccaacgtgaaccagcccaacaacaacggcttcacccccctgcactttgctgctgccagcacccatggagccctgtgcctggagctgctggtgaacaacggggctgatgtgaacatccagagcaaggatggcaagagccccctgcacatgacagctgtgcacggccgcttcaccaggagccagaccctcatccagaatggaggagaaattgactgtgtggacaaggatggcaacacccccctgcacgtggccgcccgctatggccacgagctgctgatcaacaccctcatcaccagcggggctgacacagccaagtgtggcatccacagcatgttccccctgcacctggccgccctgaatgcccacagcgactgctgcaggaagctgctgagcagcggctttgaaattgacaccccagacaagtttggaagaacctgcctgcacgccgctgctgctggaggaaatgtggagtgcatcaagctgctgcagagcagcggggctgacttccacaagaaggacaagtgtggccgcacccccctgcactacgccgccgccaactgccacttccactgcatcgagaccctggtgaccactggagccaacgtgaatgaaacagatgactggggccgcacagccctgcactatgctgctgccagtgacatggacaggaacaagaccatcctgggcaatgcccatgacaacagcgaggagctggagcgggcccgggagctgaaggagaaggaggccaccctgtgcctggagttcctgctgcagaatgatgccaaccccagcatccgggacaaggagggctacaacagcatccactacgccgccgcctacggccaccggcagtgcctggagctgctgctggagaggaccaacagcggctttgaggagagtgacagcggggccaccaagagccccctgcacctggccgcctacaacggccaccaccaggccctggaggtgctgctgcagagcctggtggacctggacatcagagatgagaagggccgcacagccctggacctggccgccttcaagggccacacagaatgtgtggaggccctgatcaaccagggcgccagcatctttgtgaaggacaacgtgaccaagaggacccccctgcacgccagcgtcatcaatggccacaccctgtgcctgcggctgctgctggagattgctgacaaccctgaggccgtggatgtgaaggatgccaagggccagacccccctgatgctggccgtggcctacggccacattgatgctgtgtccctgctgctggagaaggaggccaacgtggacacagtggacatcctgggctgcacagccctgcaccggggcatcatgacaggccacgaggagtgtgtgcagatgctgctggagcaggaggtgtccatcctgtgcaaggacagccggggccgcacccccctgcactacgccgccgcccggggccacgccacctggctgtctgagctgctgcagatggccctgtctgaggaggactgctgcttcaaggacaaccagggctacacccccctgcactgggcctgctacaatggaaatgaaaactgcatcgaggtgctgctggagcagaagtgcttcaggaagttcatcggcaaccccttcacccccctgcactgtgccatcatcaatgaccacggcaactgtgccagcctgctgctgggcgccatcgacagcagcatcgtgtcctgcagagatgacaagggccgcacccccctgcacgccgccgcctttgctgaccacgtggagtgcctgcagctgctgctgcggcacagcgcccctgtgaatgctgtggacaacagcggcaagacagccctgatgatggctgctgaaaatggccaggccggggctgtggacatcctggtgaacagcgcccaggccgacctgactgtgaaggacaaggacctgaacacccccctgcacctggcctgcagcaaaggacatgagaagtgtgccctgctgatcctggacaagatccaggatgagagcctcatcaatgagaagaacaatgccctgcagacctag

SEQ ID NO: 74575 - DNA, 1740 bp, Artificial Sequence
  derived and/or modified sequence
atggctgtgctgaagctgacagaccagccccccctggtgcaggccatcttcagcggggaccctgaggagatccgcatgctgatccacaagacagaagatgtgaacaccctggacagcgagaagaggacccccctgcacgtggccgccttcctgggagatgctgagatcatcgagctgctgatcctgagcggggcccgggtgaatgccaaggacaacatgtggctgacccccctgcacagagctgtggccagccgctctgaggaggccgtgcaggtgctgatcaagcacagcgcagatgtgaatgcccgggacaagaactggcagacccccctgcacgtggccgccgccaacaaggctgtgaagtgtgccgaggtgatcatccccctgctgagctctgtgaatgtgtctgacagaggaggccgcacagccctgcaccacgccgccctgaatggccacgtggagatggtgaacctgctgctggccaagggggccaacatcaatgcctttgacaagaaggaccggcgggccctgcactgggccgcctacatgggccacctggatgtggtggccctgctgatcaaccacggggctgaggtgacctgcaaggacaagaagggctacacccccctgcacgccgccgccagcaatggccagatcaacgtggtgaagcacctgctgaacctgggcgtggagattgatgagatcaacgtgtatggcaacacagccctgcacatcgcctgctacaacggccaggatgctgtggtgaatgagctgattgattatggagccaacgtgaaccagcccaacaacaacggcttcacccccctgcactttgctgctgccagcacccacggggccctgtgcctggagctgctggtgaacaatggagcagatgtgaacatccagagcaaggatggcaagagccccctgcacatgacagctgtgcacggccgcttcaccaggagccagaccctcatccagaatggaggagaaattgactgtgtggacaaggatggcaacacccccctgcacgtggccgcccgctatggccacgagctgctgatcaacaccctcatcaccagcggggctgacacagccaagtgtggcatccacagcatgttccccctgcacctggccgccctgaatgcccacagcgactgctgcaggaagctgctgagcagcggctttgaaattgacaccccagacaagtttggccgcacctgcctgcatgctgctgctgctggaggaaatgtggagtgcatcaagctgctgcagagcagtggagctgacttccacaagaaggacaagtgtggccgcacccccctgcactatgctgctgccaactgccacttccactgcatcgagaccctggtgaccaccggggccaacgtgaatgaaacagatgactggggccgcacagccctgcactacgccgccgccagtgacatggacaggaacaagaccatcctgggcaatgcccatgacaacagcgaggagctggagcgggcccgggagctgaaggagaaggaggccaccctgtgcctggagttcctgctgcagaatgatgccaaccccagcatccgggacaaggagggctacaacagcatccactatgctgctgcctacggccaccggcagtgcctggagctggtgtcctgctttgtgctcttcagcctgacccacacccacacccacacccccaaccaccggggcatcaactgcttcttccctgagctgtag

SEQ ID NO: 74576 - DNA, 1524 bp, Artificial Sequence
  derived and/or modified sequence
atgtggctgacccccctgcacagagctgtggccagccgctctgaggaggccgtgcaggtgctgatcaagcacagcgcagatgtgaatgcccgggacaagaactggcagacccccctgcacgtggccgccgccaacaaggctgtgaagtgtgccgaggtgatcatccccctgctgagctctgtgaatgtgtctgacagaggaggccgcacagccctgcaccacgccgccctgaatggccacgtggagatggtgaacctgctgctggccaagggggccaacatcaatgcctttgacaagaaggaccggcgggccctgcactgggccgcctacatgggccacctggatgtggtggccctgctgatcaaccacggggctgaggtgacctgcaaggacaagaagggctacacccccctgcacgccgccgccagcaatggccagatcaacgtggtgaagcacctgctgaacctgggcgtggagattgatgagatcaacgtgtatggcaacacagccctgcacatcgcctgctacaacggccaggatgctgtggtgaatgagctgattgattatggagccaacgtgaaccagcccaacaacaacggcttcacccccctgcactttgctgctgccagcacccacggggccctgtgcctggagctgctggtgaacaatggagcagatgtgaacatccagagcaaggatggcaagagccccctgcacatgacagctgtgcacggccgcttcaccaggagccagaccctcatccagaatggaggagaaattgactgtgtggacaaggatggcaacacccccctgcacgtggccgcccgctatggccacgagctgctgatcaacaccctcatcaccagcggggctgacacagccaagtgtggcatccacagcatgttccccctgcacctggccgccctgaatgcccacagcgactgctgcaggaagctgctgagcagcggctttgaaattgacaccccagacaagtttggccgcacctgcctgcatgctgctgctgctggaggaaatgtggagtgcatcaagctgctgcagagcagtggagctgacttccacaagaaggacaagtgtggccgcacccccctgcactatgctgctgccaactgccacttccactgcatcgagaccctggtgaccaccggggccaacgtgaatgaaacagatgactggggccgcacagccctgcactacgccgccgccagtgacatggacaggaacaagaccatcctgggcaatgcccatgacaacagcgaggagctggagcgggcccgggagctgaaggagaaggaggccaccctgtgcctggagttcctgctgcagaatgatgccaaccccagcatccgggacaaggagggctacaacagcatccactatgctgctgcctacggccaccggcagtgcctggagctggtgtcctgctttgtgctcttcagcctgacccacacccacacccacacccccaaccaccggggcatcaactgcttcttccctgagctgtag

SEQ ID NO: 74577 - DNA, 2958 bp, Artificial Sequence
  derived and/or modified sequence
cagccaccattggttcaggcaatcttcagcggtgatccagaggagatccggatgctcatccataaaactgaagatgtgaatactctggattctgagaaacgaacccctcttcatgtggccgcatttctgggagatgcagagatcattgaactcctgattttgtcaggagctcgtgtaaatgccaaggacaacatgtggctgactccactgcaccgggctgttgcttccagaagtgaagaagcagtacaggttttgattaagcactcagctgatgtcaatgcaagggacaagaactggcagacccctcttcatgtggcagcagccaacaaggctgtcaaatgtgcagaagtgatcattcccctgctgagcagtgtcaatgtctccgaccgaggggggcgcacagccttgcaccatgcggctctgaacggccacgtggagatggtcaatttactcttggccaaaggggcaaatatcaatgcatttgacaagaaggaccggcgtgctctgcactgggcagcatacatgggccacttggatgttgtagcattgctcattaaccatggcgcagaagtgacctgtaaggataagaagggttatacccctctgcatgctgcagcctccaatggacagattaatgttgtcaagcatctcctgaacctgggggtggagattgatgaaatcaatgtctatggaaatacagcgcttcacatcgcctgctacaatggacaggatgctgtggttaacgagttgattgactacggtgctaacgtgaaccagccaaacaataatgggttcacccctttgcattttgctgctgcctccactcatggtgctttgtgtcttgaattgttagtaaacaacggggcagatgttaacattcagagtaaagatggcaaaagtccactgcacatgacagctgtccatggaaggttcacacggtcacagaccctcattcagaatggaggtgaaattgactgtgtggataaggacggcaacactcctctccatgtggctgcaagatacggtcatgagcttttgattaacaccttaataaccagcggagctgacacagccaagtgtggaatccatagcatgttccctttacatttagctgccctaaatgctcactctgactgctgcagaaagttgttatcatcgggctttgaaatagacaccccagataaatttggaagaacgtgccttcatgctgctgctgcaggaggtaatgtggaatgtataaaactcttgcagagcagcggagcagatttccataaaaaggacaagtgtgggaggacccctttgcactatgcagctgcgaattgtcatttccactgtattgagacattagtgaccacaggggccaacgttaatgaaacagatgactggggacgcacagctttgcattacgccgctgcatcagacatggatagaaataagactatcttaggaaatgcccatgataattcagaagaacttgaaagagccagggagctgaaggaaaaggaagccacactatgtctagagtttctgcttcaaaatgatgcaaatccatctatccgggacaaggaaggttacaatagcatacattatgctgccgcctatgggcacaggcagtgtctggaattgcttttggaaagaacaaacagtggatttgaagaatcagattctggtgctactaagagtccactccacttagctgcctacaatgggcaccatcaagccttggaagtccttctgcagtcgttggtggacctggacatcagggatgagaaaggccgcactgctctggatctggctgcctttaaaggacacacagaatgtgtggaagcgcttatcaatcagggcgcatccatctttgtgaaagacaatgtaaccaaaagaaccccacttcatgcctcagtaattaatggtcacacactgtgtttacggctgttgctagaaattgcagacaacccggaggcggtcgatgtgaaagatgccaaaggacaaacaccactgatgcttgcagtagcatatggacatattgacgctgtttcattgttacttgaaaaggaagccaacgtagacactgttgacatcctaggatgcacagctttacacagagggattatgacaggacacgaggaatgtgtgcaaatgctgctggaacaagaagtgtcaattctctgtaaagattccagagggaggacgcccttgcactatgcagctgctcgtggccacgccacgtggctgagcgagctgctccaaatggctctttctgaggaggactgttgtttcaaagataaccaaggctacacgccgctgcactgggcttgttacaatggtaatgaaaactgtatagaggtacttttggagcaaaaatgttttcgcaaatttatcggtaatccctttactccactgcactgtgcaataatcaatgatcatgggaattgtgcatcattgctgcttggggccatagattccagtatcgtcagttgtagagatgacaaaggcaggacaccccttcatgcggcagcatttgctgatcatgtggagtgcttgcagcttcttctgagacacagtgctccagtgaacgcagtagataattcagggaaaacagcactgatgatggctgctgagaatgggcaggcaggcgctgtggatattttggtgaacagtgcccaggctgatctgactgtaaaggataaggacttgaatacacccttacatttggcttgtagtaaaggtcatgaaaaatgtgccttgttaatacttgacaagatacaagacgagagccttattaatgaaaaaaataatgcactgcagacacccctccacgtcgctgcgcgcaatggcttaaaggtggtagttgaggagttgctggccaaaggggcctgtgtacttgctgtagatgaaaatgcttctaggtcaaatggaccccgttccacacctggaaccgctgtacaaaaagaagaatga

SEQ ID NO: 74578 - DNA, 3686 bp, Artificial Sequence
  derived and/or modified sequence
ttcagaggctgcgtctttcaggaggccagccaccattggttcaggcaatcttcagcggtgatccagaggagatccggatgctcatccataaaactgaagatgtgaatactctggattctgagaaacgaacccctcttcatgtggccgcatttctgggagatgcagagatcattgaactcctgattttgtcaggagctcgtgtaaatgccaaggacaacatgtggctgactccactgcaccgggctgttgcttccagaagtgaagaagcagtacaggttttgattaagcactcagctgatgtcaatgcaagggacaagaactggcagacccctcttcatgtggcagcagccaacaaggctgtcaaatgtgcagaagtgatcattcccctgctgagcagtgtcaatgtctccgaccgaggggggcgcacagccttgcaccatgcggctctgaacggccacgtggagatggtcaatttactcttggccaaaggggcaaatatcaatgcatttgacaagaaggaccggcgtgctctgcactgggcagcatacatgggccacttggatgttgtagcattgctcattaaccatggcgcagaagtgacctgtaaggataagaagggttatacccctctgcatgctgcagcctccaatggacagattaatgttgtcaagcatctcctgaacctgggggtggagattgatgaaatcaatgtctatggaaatacagcgcttcacatcgcctgctacaatggacaggatgctgtggttaacgagttgattgactacggtgctaacgtgaaccagccaaacaataatgggttcacccctttgcattttgctgctgcctccactcatggtgctttgtgtcttgaattgttagtaaacaacggggcagatgttaacattcagagtaaagatggcaaaagtccactgcacatgacagctgtccatggaaggttcacacggtcacagaccctcattcagaatggaggtgaaattgactgtgtggataaggacggcaacactcctctccatgtggctgcaagatacggtcatgagcttttgattaacaccttaataaccagcggagctgacacagccaagtgtggaatccatagcatgttccctttacatttagctgccctaaatgctcactctgactgctgcagaaagttgttatcatcgggctttgaaatagacaccccagataaatttggaagaacgtgccttcatgctgctgctgcaggaggtaatgtggaatgtataaaactcttgcagagcagcggagcagatttccataaaaaggacaagtgtgggaggacccctttgcactatgcagctgcgaattgtcatttccactgtattgagacattagtgaccacaggggccaacgttaatgaaacagatgactggggacgcacagctttgcattacgccgctgcatcagacatggatagaaataagactatcttaggaaatgcccatgataattcagaagaacttgaaagagccagggagctgaaggaaaaggaagccacactatgtctagagtttctgcttcaaaatgatgcaaatccatctatccgggacaaggaaggttacaatagcatacattatgctgccgcctatgggcacaggcagtgtctggaattgcttttggaaagaacaaacagtggatttgaagaatcagattctggtgctactaagagtccactccacttagctgcctacaatgggcaccatcaagccttggaagtccttctgcagtcgttggtggacctggacatcagggatgagaaaggccgcactgctctggatctggctgcctttaaaggacacacagaatgtgtggaagcgcttatcaatcagggcgcatccatctttgtgaaagacaatgtaaccaaaagaaccccacttcatgcctcagtaattaatggtcacacactgtgtttacggctgttgctagaaattgcagacaacccggaggcggtcgatgtgaaagatgccaaaggacaaacaccactgatgcttgcagtagcatatggacatattgacgctgtttcattgttacttgaaaaggaagccaacgtagacactgttgacatcctaggatgcacagctttacacagagggattatgacaggacacgaggaatgtgtgcaaatgctgctggaacaagaagtgtcaattctctgtaaagattccagagggaggacgcccttgcactatgcagctgctcgtggccacgccacgtggctgagcgagctgctccaaatggctctttctgaggaggactgttgtttcaaagataaccaaggctacacgccgctgcactgggcttgttacaatggtaatgaaaactgtatagaggtacttttggagcaaaaatgttttcgcaaatttatcggtaatccctttactccactgcactgtgcaataatcaatgatcatgggaattgtgcatcattgctgcttggggccatagattccagtatcgtcagttgtagagatgacaaaggcaggacaccccttcatgcggcagcatttgctgatcatgtggagtgcttgcagcttcttctgagacacagtgctccagtgaacgcagtagataattcagggaaaacagcactgatgatggctgctgagaatgggcaggcaggcgctgtggatattttggtgaacagtgcccaggctgatctgactgtaaaggataaggacttgaatacacccttacatttggcttgtagtaaaggtcatgaaaaatgtgccttgttaatacttgacaagatacaagacgagagccttattaatgaaaaaaataatgcactgcagacgtaagtgtaactactaaagttggacttgaacccagggtcatagtcatttattcaataagtattaagagcctgctgtgtgccagactagctctggggagcacagtggtgaaagatgcagtcctggcttcccctgcatgaaggtgacagtcacatacctacaagtgctgaccaagctgggcagttttagttagaatccttcttttgatatgtcttcatttaattttgtgaagtctctctttttctttgctgatatttctggggtaatattataaatttagtgggctgttagaaaaattttatggactgacatatttggggaaactatttgtattatgtattagcattatgtattctgactggaaaatgacagttttgcaaatcagtttcccagaatacatttgaagagtttctaagctatttgtcttgattatattttaatataattcagtgtaacccttggtgtgaaagatctaaaagctgtttcattttccgctttaggaaattatttatgcatttgttttaaaggcaaaggaatttttttcatttaagattcttaagccgggcgtggtggctcatgcctttaatcccagcactttgggaggccgaggcagttggattacttgaggccaggagttcatgacccgcctggccaacatggtgaaaccccgtctctactaaaaatacaacaacaacaaaattagctgggcatgatggtgggtgcctgtaacctcagctacttgggaggctgaggcaggagaatcacttgaacctgggaggtggaggttgctgtgagctgagatcgtgccactgcaccactccagcctgggcaacaagagcgagactgtccccccac

SEQ ID NO: 74579 - DNA, 3609 bp, Artificial Sequence
  derived and/or modified sequence
cttcttatctataaaacagagataatatcaaccttagattctgagaaacgaacccctcttcatgtggccgcatttctgggagatgcagagatcattgaactcctgattttgtcaggagctcgtgtaaatgccaaggacaacatgtggctgactccactgcaccgggctgttgcttccagaagtgaagaagcagtacaggttttgattaagcactcagctgatgtcaatgcaagggacaagaactggcagacccctcttcatgtggcagcagccaacaaggctgtcaaatgtgcagaagtgatcattcccctgctgagcagtgtcaatgtctccgaccgaggggggcgcacagccttgcaccatgcggctctgaacggccacgtggagatggtcaatttactcttggccaaaggggcaaatatcaatgcatttgacaagaaggaccggcgtgctctgcactgggcagcatacatgggccacttggatgttgtagcattgctcattaaccatggcgcagaagtgacctgtaaggataagaagggttatacccctctgcatgctgcagcctccaatggacagattaatgttgtcaagcatctcctgaacctgggggtggagattgatgaaatcaatgtctatggaaatacagcgcttcacatcgcctgctacaatggacaggatgctgtggttaacgagttgattgactacggtgctaacgtgaaccagccaaacaataatgggttcacccctttgcattttgctgctgcctccactcatggtgctttgtgtcttgaattgttagtaaacaacggggcagatgttaacattcagagtaaagatggcaaaagtccactgcacatgacagctgtccatggaaggttcacacggtcacagaccctcattcagaatggaggtgaaattgactgtgtggataaggacggcaacactcctctccatgtggctgcaagatacggtcatgagcttttgattaacaccttaataaccagcggagctgacacagccaagtgtggaatccatagcatgttccctttacatttagctgccctaaatgctcactctgactgctgcagaaagttgttatcatcgggctttgaaatagacaccccagataaatttggaagaacgtgccttcatgctgctgctgcaggaggtaatgtggaatgtataaaactcttgcagagcagcggagcagatttccataaaaaggacaagtgtgggaggacccctttgcactatgcagctgcgaattgtcatttccactgtattgagacattagtgaccacaggggccaacgttaatgaaacagatgactggggacgcacagctttgcattacgccgctgcatcagacatggatagaaataagactatcttaggaaatgcccatgataattcagaagaacttgaaagagccagggagctgaaggaaaaggaagccacactatgtctagagtttctgcttcaaaatgatgcaaatccatctatccgggacaaggaaggttacaatagcatacattatgctgccgcctatgggcacaggcagtgtctggaattgcttttggaaagaacaaacagtggatttgaagaatcagattctggtgctactaagagtccactccacttagctgcctacaatgggcaccatcaagccttggaagtccttctgcagtcgttggtggacctggacatcagggatgagaaaggccgcactgctctggatctggctgcctttaaaggacacacagaatgtgtggaagcgcttatcaatcagggcgcatccatctttgtgaaagacaatgtaaccaaaagaaccccacttcatgcctcagtaattaatggtcacacactgtgtttacggctgttgctagaaattgcagacaacccggaggcggtcgatgtgaaagatgccaaaggacaaacaccactgatgcttgcagtagcatatggacatattgacgctgtttcattgttacttgaaaaggaagccaacgtagacactgttgacatcctaggatgcacagctttacacagagggattatgacaggacacgaggaatgtgtgcaaatgctgctggaacaagaagtgtcaattctctgtaaagattccagagggaggacgcccttgcactatgcagctgctcgtggccacgccacgtggctgagcgagctgctccaaatggctctttctgaggaggactgttgtttcaaagataaccaaggctacacgccgctgcactgggcttgttacaatggtaatgaaaactgtatagaggtacttttggagcaaaaatgttttcgcaaatttatcggtaatccctttactccactgcactgtgcaataatcaatgatcatgggaattgtgcatcattgctgcttggggccatagattccagtatcgtcagttgtagagatgacaaaggcaggacaccccttcatgcggcagcatttgctgatcatgtggagtgcttgcagcttcttctgagacacagtgctccagtgaacgcagtagataattcagggaaaacagcactgatgatggctgctgagaatgggcaggcaggcgctgtggatattttggtgaacagtgcccaggctgatctgactgtaaaggataaggacttgaatacacccttacatttggcttgtagtaaaggtcatgaaaaatgtgccttgttaatacttgacaagatacaagacgagagccttattaatgaaaaaaataatgcactgcagacgtaagtgtaactactaaagttggacttgaacccagggtcatagtcatttattcaataagtattaagagcctgctgtgtgccagactagctctggggagcacagtggtgaaagatgcagtcctggcttcccctgcatgaaggtgacagtcacatacctacaagtgctgaccaagctgggcagttttagttagaatccttcttttgatatgtcttcatttaattttgtgaagtctctctttttctttgctgatatttctggggtaatattataaatttagtgggctgttagaaaaattttatggactgacatatttggggaaactatttgtattatgtattagcattatgtattctgactggaaaatgacagttttgcaaatcagtttcccagaatacatttgaagagtttctaagctatttgtcttgattatattttaatataattcagtgtaacccttggtgtgaaagatctaaaagctgtttcattttccgctttaggaaattatttatgcatttgttttaaaggcaaaggaatttttttcatttaagattcttaagccgggcgtggtggctcatgcctttaatcccagcactttgggaggccgaggcagttggattacttgaggccaggagttcatgacccgcctggccaacatggtgaaaccccgtctctactaaaaatacaacaacaacaaaattagctgggcatgatggtgggtgcctgtaacctcagctacttgggaggctgaggcaggagaatcacttgaacctgggaggtggaggttgctgtgagctgagatcgtgccactgcaccactccagcctgggcaacaagagcgagactgtccccccac

SEQ ID NO: 74580 - DNA, 2958 bp, Artificial Sequence
  derived and/or modified sequence
cagccccccctggtgcaggccatcttcagcggcgaccccgaggagatacgcatgctgatacacaaaacagaggatgtaaacacgctggatagcgagaagcggactcccctacatgtcgccgcattcctcggcgatgctgaaatcatagagctcctgatcttaagcggcgctcgggttaacgcaaaagataacatgtggttgacccctcttcacagggctgtcgcatcccgctcggaggaagccgtgcaagtactgatcaaacattccgcagatgtgaatgctcgcgataagaattggcagaccccactgcacgttgccgctgctaataaagccgtgaaatgcgctgaagtgataataccgctcctgagctctgtcaatgtatccgaccggggcggcaggactgcactgcaccacgcggccctgaacggacatgtggagatggttaacttgctgctagccaagggggcgaatatcaatgccttcgacaagaaagaccgacgcgccttacattgggcagcatatatgggtcatcttgacgtggttgccctactaattaaccacggtgccgaagttacgtgtaaggataaaaaaggctatactcccttacacgcagccgcatcaaatggacaaattaacgttgtgaaacatttgctgaacttgggggtagagattgatgagattaacgtgtatggtaataccgctcttcatattgcatgctacaacggtcaggacgctgtggtgaacgaactcatagattatggcgcgaacgttaaccagcccaacaataacgggtttacccccctccactttgccgccgccagtactcacggcgcactctgcctggagctgctggtgaacaatggagcggatgtcaacattcagagtaaagatggaaagtcccctcttcacatgaccgcagttcacggccgctttacgcgttctcagacccttattcagaacggaggtgaaatcgactgcgttgacaaagatgggaataccccacttcacgtcgctgcacgctacggtcatgaactcctaattaataccttgatcacatctggagccgacactgccaagtgtggtatccattccatgtttccattacacctggccgcccttaacgctcacagtgattgctgtagaaagttacttagcagcggttttgaaatcgatacacccgataaattcggtcggacctgcttgcacgccgccgccgccggtgggaacgtagagtgtattaagctcctgcagtctagcggggccgatttccacaagaaggataagtgcggtcgaacgccccttcactacgcagcagcgaactgtcattttcactgtattgaaacactggtgaccactggcgcaaatgtgaacgagacagacgattggggccggaccgccttacattacgccgccgcatccgacatggataggaataagactattttagggaacgcacacgacaattcggaggagcttgagcgggcccgtgagctcaaagaaaaggaggcgactctttgtcttgagtttctcctgcagaacgacgctaatccatctatccgggacaaggaggggtacaactctatccattacgccgctgcatacgggcaccgacagtgcctggagcttttgttggagaggaccaacagtggtttcgaggaaagtgattctggcgctactaaatctcccctccacctggcggcttataatggccaccaccaagccctggaagtgctgctccagtctctcgtagacttagatattcgagacgagaagggcagaacagccttggatcttgccgcctttaaaggccatactgagtgcgtggaagctctaatcaaccaaggggccagtatttttgtaaaggacaacgtcaccaaaaggacacccctacatgccagtgtgattaatgggcacaccctgtgccttcggctgctcctcgaaattgcagataatcccgaggccgttgatgtcaaggacgcaaagggccagactcccctgatgctcgcagttgcctacggtcacattgacgccgtttcccttttattggaaaaagaggctaacgtagataccgtggatatccttggctgtacggccctgcaccgcggaataatgaccgggcacgaagagtgcgtgcagatgttgctggaacaggaggtgagtatcctctgtaaggattctagaggccgtacccctctccactacgccgctgccagggggcacgctacatggttatccgaacttctgcagatggctctgagcgaagaagattgctgttttaaggacaaccagggttatacccctctgcactgggcttgttacaatggaaacgaaaactgcatcgaggtgttgctggaacagaagtgctttcgcaaattcattggtaatcccttcactccccttcactgtgcaatcattaacgaccacgggaactgtgcaagtctcctccttggcgccattgacagtagtattgtgagctgtagagacgacaaaggaaggacccctcttcacgccgccgcctttgctgatcacgttgaatgccttcagctgttactgcgacacagtgcgccagtaaacgctgtagataatagcggcaaaactgctctcatgatggccgcagagaatggccaggctggcgcagttgatattctggtgaacagtgcccaggctgacctgactgtgaaggataaggatttgaataccccactccacctggcatgttctaaaggtcatgagaagtgcgctctgctgattctggataaaattcaggacgaaagtctgattaatgaaaagaacaatgctctgcagacgccacttcacgttgccgcacggaatgggttaaaagtggtcgtcgaagaacttctcgcaaaaggcgcttgtgtattggccgtcgatgagaacgcgtcaagatccaacggcccacgcagcacgcctggaaccgccgttcagaaggaagaatag

SEQ ID NO: 74581 - DNA, 2760 bp, Artificial Sequence
  derived and/or modified sequence
atgctgatccacaagaccgaggacgtgaacaccctggacagcgagaagcgcactcctcttcacgtggccgcgtttctgggcgacgcagagatcatcgagttgctaatccttagtggagccagggtaaacgctaaagataatatgtggcttaccccactgcacagggctgtggcttcgaggagcgaggaagccgtgcaggtgttgatcaagcattccgcggacgtgaatgctcgcgacaagaattggcagaccccccttcatgtggcagcagcaaacaaggcggtgaaatgtgctgaggtgattatccctctgttatctagcgtaaacgtgagcgatcgcggtggaaggactgcactgcaccatgccgccctcaacggccatgtcgaaatggtcaatttgctgctcgctaagggcgctaacataaatgctttcgataagaaggatagacgggccctccactgggctgcttacatggggcacctagatgtggtcgccctactcataaaccatggggcagaagttacctgcaaggataaaaaagggtacacccctctccacgcagccgcgtctaacggccagatcaacgtggttaaacatttgcttaatctcggcgtagaaatcgacgaaattaacgtgtacgggaacacagccctacatattgcctgctacaatggccaggacgccgtagtcaatgagctgatcgactacggtgcaaatgtgaaccagcccaacaataacggcttcaccccacttcacttcgctgcggctagcacccatggagctctctgccttgagctgctcgtcaataatggcgcagatgtgaatattcagtcgaaagatggcaagtcacccttgcacatgaccgcagtccatgggagatttaccaggagccagaccctgatccagaatggcggtgagatagactgcgtcgataaggacggcaacactcctttgcacgtggccgcaagatatggccacgagcttctgatcaacactttaattacaagcggcgcagataccgcgaagtgcggcatacatagcatgtttccccttcacttggcagcacttaatgctcactctgactgttgccgtaaactgctgagcagcggctttgagatcgacacccccgataaattcgggagaacttgtctacacgccgcagccgccggcggcaatgttgagtgcatcaagctcctccagtcaagcggagcagacttccacaagaaagataagtgcggaagaactccattacactacgcagccgccaactgtcactttcattgcatagagaccctcgtgacgactggcgccaatgttaacgagactgacgattgggggagaacagcgctgcattatgccgcagcctcagacatggataggaataaaacaattctgggcaacgcacatgataactcagaggagttagagcgagccagagagctcaaagaaaaagaggccaccctgtgcctcgagttcctgctgcagaacgatgccaacccgtccatccgggataaagaaggatacaacagtatccattacgctgcagcatacggccatcgccagtgtctcgagctgcttctggaaagaaccaactctggattcgaagaatcagactcaggcgccacaaagagccctctgcacctggcggcttataatggccaccaccaagctctcgaggtcctcctccagtctctcgtggacctggatatacgggatgagaaaggccggacagctctggaccttgccgccttcaaaggccacacagagtgcgtggaagcactgatcaaccaaggggcgtctatattcgtcaaagataatgttacgaagcggactccactgcacgcatcggttattaacgggcataccctgtgcctgaggcttctgctcgaaatcgcagacaatccagaggccgttgacgtgaaggatgcgaaggggcagaccccccttatgctggcagtcgcctatgggcacattgacgctgtgtctctgctgcttgagaaggaggcaaatgtggacactgtggatattctcggatgtacggccctacacaggggaattatgactggacacgaggagtgcgtgcaaatgctcctcgaacaggaagtttccatactgtgtaaggactccagaggccggactcctctgcactatgccgccgcccgcggacatgccacctggttatcagagctgttgcaaatggccctctctgaagaagactgctgttttaaggacaaccagggctatacgcccctgcactgggcctgttataatggcaacgaaaactgcatcgaagtgctcctcgaacaaaagtgctttcgtaagtttatcggtaatccttttactcccctgcattgtgctatcattaacgatcatgggaactgcgcttcccttctgcttggggctatagactctagcatcgtgtcgtgtcgtgacgacaaaggtcgaactcccctgcatgcggccgccttcgccgaccatgttgaatgcctgcaactgctgctgaggcactctgctccagtgaatgcagtggacaatagcggtaagacagctcttatgatggccgcagagaatgggcaggccggcgccgtggacatattggtgaatagcgcacaggccgacttgactgtgaaggataaagacttgaacaccccacttcatctggcttgttcaaagggacatgaaaagtgcgcactgctgatactcgataagattcaggatgagtcactgattaatgagaagaacaatgcactgcaaacttag

SEQ ID NO: 74582 - DNA, 2760 bp, Artificial Sequence
  derived and/or modified sequence
ctgctgatctacaagaccgagatcatcagcaccctggacagcgagaaaaggacgccacttcacgtcgctgcattcttgggggacgccgaaatcatcgagcttctgatcctgtccggtgccagagtcaacgcaaaagacaatatgtggcttacccccctccaccgcgcagtagcttcaaggtctgaggaagcggttcaggtgctcatcaagcactccgcggacgtcaacgccagagataaaaattggcaaacccccttgcacgtagctgcagccaataaggcagtgaagtgtgccgaggtcatcattcctctcctgtctagtgtgaatgtgagtgacagaggcggaaggaccgcgctgcatcacgcagccctgaatgggcacgtcgaaatggtcaatctgctccttgctaaaggtgcaaacattaacgccttcgacaagaaggatcgcagggccctccattgggccgcctatatggggcacctggatgtggtggccctgctgatcaatcacggcgccgaagtgacctgtaaggataagaaaggctatactccattacacgctgccgctagtaacggtcagataaacgtggtgaagcacctgctaaacctgggcgtcgaaatcgacgagatcaacgtgtatgggaacaccgcgctgcatatagcgtgttacaacggtcaagatgctgttgtaaacgagctgattgactatggtgccaatgtgaaccagcccaataataacggctttaccccccttcacttcgcagctgcttctacacacggtgctctgtgtctggaactgctggtcaataacggcgccgacgtgaacattcagagcaaggacgggaagagccctctccatatgaccgcggtgcacggtaggttcaccagaagccaaacgttgatccaaaatggcggagaaattgactgcgtggataaggacggaaacacgccactccacgtggcagccaggtatgggcacgaactgctgatcaacactttgataactagtggcgccgacaccgccaaatgtggaatacacagcatgttccctctgcatcttgctgccttgaatgcccattctgattgctgcaggaaactactttcttccggttttgaaattgatacccccgacaagtttgggcgaacctgcctgcacgctgctgccgcagggggcaatgtggaatgcattaagctgctacagtcttctggagcggatttccacaagaaggataagtgtggccgcacaccactccactacgcagcagcgaactgccattttcattgcattgaaaccctcgtcaccaccggcgccaatgtaaacgagactgatgattggggccgcaccgcactacattacgccgccgccagcgatatggatcgtaacaaaaccattctgggcaatgctcacgacaattctgaagaattagagagagctagagaactcaaggagaaggaagcgaccctgtgcctggagtttctcctgcagaatgatgctaatcctagtatccgagacaaagagggatacaattcaattcactacgcggctgcctatggccaccgccagtgcttggagctgctcctggagcgaacgaatagtggatttgaagagagtgacagtggggcaactaaaagccctcttcatctcgctgcatacaacggacatcaccaagccctggaggtactgctccagagtctggttgatctggatatacgggacgagaaggggagaacagcactagacttggccgccttcaagggccatacggagtgtgttgaggccctcattaaccagggagcctctattttcgttaaagacaacgtgaccaagagaacaccattgcacgcgagcgtgattaacggccatactttatgcttgcgcctgcttctcgaaattgcagataaccccgaagctgtagatgttaaagatgcgaaggggcaaacacccctaatgttagcagtggcctatggtcacatagatgcagtgagccttcttctggagaaagaggcaaatgtcgacaccgtggatattctcggttgcacagctctgcatagaggaatcatgacgggacacgaagaatgcgtccaaatgcttctggaacaggaagtctccattctgtgcaaagactctagagggcgaaccccactccattacgctgctgcccgaggccacgcaacgtggttgtccgagttgttgcagatggccctgtcagaggaggactgctgctttaaagataaccagggctataccccacttcactgggcttgttacaatggaaacgaaaactgcatcgaggtcctgttggagcagaaatgcttccgcaagtttatcggcaacccttttacccccctccactgcgccattataaacgaccatggaaattgcgcctcactcctgctcggggctatcgattcgtcaatcgtgagctgccgagatgacaagggccgcacgcccttgcacgccgccgccttcgcggaccacgtggaatgcctccaacttttactccgtcacagtgcccctgtgaacgccgtcgacaattccggaaaaacggccctgatgatggcagcagaaaatggccaggccggagctgtcgatattttggtgaactctgcccaagctgatctcacagtgaaagacaaggatttgaacactcctctgcatctggcatgcagcaagggccatgaaaagtgcgcactgctcatcctcgacaagatccaggacgagtctctgatcaacgagaagaataatgctctgcagacctag

SEQ ID NO: 74583 - DNA, 1740 bp, Artificial Sequence
  derived and/or modified sequence
atggccgtgctgaagctgaccgaccagccccccctggtgcaggccatcttctcgggggatcccgaggaaatacgtatgctcatccataagacagaagatgtgaacaccctggatagcgaaaagagaaccccgctccacgtggctgcttttctgggggacgccgagatcatcgagctgctgatcttgtccggggccagagtgaatgcaaaggacaacatgtggctaacaccactgcaccgcgcggtggcctcgaggtctgaggaagccgttcaggtgcttatcaagcatagcgccgatgtgaacgccagggataaaaactggcaaacccctctgcacgtggcagctgctaataaggctgtaaagtgtgctgaagtaatcatccccctactgagttcggtgaacgtgtccgatcgtggtggaagaactgctctgcatcatgctgcactaaacgggcacgtcgaaatggtgaatttactgctagcgaaaggggcaaacatcaacgcttttgataagaaggacagacgtgctttacattgggccgcgtacatgggccacctggatgtcgtggctctgttgattaaccacggggctgaggtgacatgtaaggacaagaaaggctacacacccctgcacgctgccgcctctaatgggcagataaatgtcgtcaagcatttgctgaacctgggcgtggagatcgatgagataaatgtctacggtaacaccgcactacacattgcttgctacaacggtcaggatgccgtggttaacgagctgatagattacggggccaatgtgaaccaacccaataacaacggattcacaccactacactttgcagctgcttcaacacatggcgccctttgccttgagctgttggtaaataacggcgctgatgtgaatatacaaagcaaagacggcaagagcccgctccatatgacggcagtgcacggccgcttcacgaggtctcagaccctaatccaaaacgggggagaaattgattgtgtcgataaagacggtaacacgcccctccacgtagctgccaggtacgggcacgaattactgattaataccctgatcacaagtggcgcggacacagctaaatgcggtatccattccatgtttccacttcacctggccgctctcaacgcccactccgattgttgccgaaagttgctcagtagcgggttcgagattgacacacctgacaaattcggtcgtacctgtctccacgcagccgccgccggcggcaacgtggaatgcatcaaactgctgcaatcgtctggcgctgactttcacaaaaaagataagtgtggtcggactcccctacactatgcggctgcgaattgccacttccattgtatagaaactctggttaccacaggcgctaacgtgaatgagaccgatgactggggcaggacagccctccactacgccgctgcttccgacatggacaggaacaaaacaattttgggcaatgctcacgataattccgaggaactggaacgggccagggaactgaaagaaaaggaagcgaccctttgcctggaatttctgctgcagaacgatgccaacccatccatcagggacaaggagggatataactcaatccactacgcagcagcctatgggcaccgacagtgtctggaactggtgagttgttttgttctgttctcactaactcatacacatacccacaccccaaaccaccgcgggattaactgctttttccccgagctgtag

SEQ ID NO: 74584 - DNA, 2760 bp, Artificial Sequence
  derived and/or modified sequence
atgctgatccacaagaccgaggacgtgaacaccctggacagcgagaagcgaacacccctgcacgtggcggcctttttgggagacgccgaaattatcgaactgctgatcctgagtggtgcccgcgtgaatgcaaaggacaatatgtggctgactcctcttcatagggccgttgcaagtaggtccgaagaagctgtgcaggtgctgataaagcactcggcagacgtgaacgctcgggataagaactggcagactcctctgcacgtggcggcggccaataaagcggtcaaatgcgccgaagtgataatccctctccttagcagtgtaaatgtgtcggatcgtggagggaggaccgccctgcaccacgccgctctcaatggtcacgtcgagatggtgaatttactgttggccaagggggccaatatcaacgcttttgacaaaaaagatcgtcgtgctttgcattgggctgcctatatgggtcatctggacgtagtcgccctgttgatcaaccatggcgcagaggtaacctgcaaggataaaaagggctacacgccactgcacgctgccgcctctaatgggcagataaacgtcgttaagcatttgctgaatctgggcgtagagatcgatgagattaacgtgtatggaaacaccgcacttcacatcgcctgctataacggccaagacgcggtggtgaacgagttaatagattacggggctaatgtgaaccagccaaataacaatggatttacacctctgcacttcgctgcagcgtctactcatggtgcactttgtctagaactgttagtcaataacggcgccgatgtcaacattcaaagtaaggacggcaaatcaccactgcatatgactgcagtacacggtcgtttcacaaggagtcagacattaatccaaaacgggggcgagattgattgtgttgataaggacggaaacacccctcttcatgtggccgccagatatggacacgaactgttaataaacacactgatcactagtggagccgacacggccaaatgtgggatccactccatgtttcctctgcacctcgccgctctaaacgcccacagtgattgctgccgtaagttactctcctctgggttcgagattgatacaccagacaaattcggccgcacctgcctgcacgccgccgccgcaggggggaacgttgagtgcattaagctgctgcagagttccggagccgatttccataaaaaagataagtgtggccgcacccccttgcactacgcggcggctaattgtcatttccactgtatcgagacccttgtgactactggggccaacgtgaacgagacggatgactggggccggaccgcacttcattatgctgctgcttctgacatggatcgtaacaaaaccatacttggcaacgctcacgacaatagcgaagagctggagcgggcaagggaacttaaagagaaggaggcaactctgtgcctggaattccttctccaaaacgacgccaaccccagcatcagggacaaagaaggctacaatagtattcattatgccgccgcctatggtcacaggcagtgcctggagctgcttcttgagcgaacgaattcaggtttcgaggagagtgactccggcgcaacgaagagccctctgcacttagctgcgtacaacggacatcaccaggcactggaagtgttgttacagtctctagtcgatctagacataagggacgagaaggggcggactgccctggatcttgccgctttcaagggccataccgaatgtgtggaagcgcttatcaatcagggggcgtcaatcttcgtcaaggataacgttactaaaaggacccccctgcacgccagtgtgattaacggccacaccctatgcctgagactgcttcttgaaattgcagacaaccctgaggccgtggatgtgaaggacgctaagggccagaccccacttatgctagcggtcgcttatgggcacatagacgccgtgagcttacttctcgaaaaggaagcgaacgtcgatactgtggatatcctggggtgcacggccctgcacaggggtatcatgactggacatgaggaatgtgtgcagatgctcttagaacaggaggtttcaatcctgtgcaaggattccaggggacggactcccttgcactacgccgcggcaaggggccatgccacctggctgagtgaactgttgcagatggccctctccgaggaagattgctgctttaaggataaccagggctacacaccgctgcactgggcttgctacaatggcaatgaaaattgtattgaagtcctcttggagcagaagtgtttccggaaatttatcggaaatccattcacccccctccattgtgccataataaatgaccatggcaattgcgcctccctgctactgggcgctatcgactcaagcatcgtgagctgtcgggatgacaaaggaaggaccccattgcatgctgccgcctttgcggaccacgtagagtgcctgcagctcctgctgcgtcacagtgcgcccgttaatgcagtggataacagcggcaaaactgccctgatgatggctgccgagaatggacaggccggcgctgttgatatccttgtgaactcggcgcaggcagatctaaccgtgaaggacaaggaccttaacacgccactacacctggcctgttcaaaggggcacgaaaagtgcgcgctgcttatcctggataaaattcaggatgaatccttgattaatgagaaaaataacgcccttcaaacttag

SEQ ID NO: 74585 - DNA, 1524 bp, Artificial Sequence
  derived and/or modified sequence
atgtggctgacccccctgcaccgggccgtggccagccggagcgaggaggctgtgcaggttctcatcaagcatagcgcggatgtcaatgccagggacaagaattggcagacacctctccatgtcgcagccgcaaacaaagccgtgaagtgcgcagaagtaatcattcctcttctgtcctcggtgaacgtctcagatcgcggtggtaggaccgccctgcaccatgccgcccttaatgggcatgtggagatggtcaacctcctgctggccaaaggtgccaacatcaatgccttcgataagaaggatcggagagctctgcattgggcagcctacatgggacacttggacgtcgtggctttgctgatcaaccatggcgccgaggtgacatgcaaggacaagaagggctacactcccctgcatgccgctgccagtaacggacagataaacgtggttaagcacctgctgaatttgggggtggaaatcgatgaaattaatgtgtatggaaatacagccctgcatatagcgtgctataacggccaggacgccgtcgtgaatgagctgatagactatggagctaacgttaaccagccaaacaataatggatttacgcccctgcactttgctgctgcaagcacgcatggggctttgtgtctggaactactagttaacaatggagcagatgtgaacatacaatctaaggatgggaaatcccctcttcatatgacagcggttcacggcagattcacaagaagtcagactttgattcagaacggcggcgagattgactgcgtggacaaggacggaaatactccactccacgtcgcggctaggtatggccacgaactcttgatcaataccctaatcacaagcggcgccgacactgccaagtgcggcatccatagtatgttccccctgcatctggccgccttgaacgctcactccgattgttgccgaaagctgctgagcagcggcttcgagattgacacacccgataagttcggacggacatgtctacacgctgctgccgcgggtggcaatgtggaatgtataaagctgttacagagcagcggagcagatttccataaaaaagataagtgcggtcggacccccctgcactacgctgccgcaaattgtcacttccactgtattgagaccctcgtcactactggagcgaacgtgaacgaaactgatgattggggcaggacagccttacattacgctgcggctagcgacatggaccggaataagactatcttgggaaacgcccatgacaatagcgaggagctcgagcgagcgagagaattgaaggagaaggaggccaccctttgtctggaattcttactgcaaaacgacgccaatccaagtatccgcgataaggagggatataactccatccactacgcggccgcctacggacacagacagtgcctagaattggtatcttgcttcgtgcttttcagtctgacccatacccatactcatacccccaatcataggggtataaactgtttttttcccgagctctag

SEQ ID NO: 74586 - DNA, 2724 bp, Artificial Sequence
  derived and/or modified sequence
actagccagtgtcagcctctcggcgggaggaggcggcggcggaggaggagcagggggagggctgtcaaattcgggagccagattttttcccttctcctggcaatcccttccgcttccccggctcccggcgtgacatctgcgggccggggacctgcatgtgtgtgcgcgcgaaggagcggaagaatggcagtgctcaaactcaccgaccagccaccattggttcaggcaatcttcagcggtgatccagaggagatccggatgctcatccataaaactgaagatgtgaatactctggattctgagaaacgaacccctcttcatgtggccgcatttctgggagatgcagagatcattgaactcctgattttgtcaggagctcgtgtaaatgccaaggacaacatgtggctgactccactgcaccgggctgttgcttccagaagtgaagaagcagtacaggttttgattaagcactcagctgatgtcaatgcaagggacaagaactggcagacccctcttcatgtggcagcagccaacaaggctgtcaaatgtgcagaagtgatcattcccctgctgagcagtgtcaatgtctccgaccgaggggggcgcacagccttgcaccatgcggctctgaacggccacgtggagatggtcaatttactcttggccaaaggggcaaatatcaatgcatttgacaagaaggaccggcgtgctctgcactgggcagcatacatgggccacttggatgttgtagcattgctcattaaccatggcgcagaagtgacctgtaaggataagaagggttatacccctctgcatgctgcagcctccaatggacagattaatgttgtcaagcatctcctgaacctgggggtggagattgatgaaatcaatgtctatggaaatacagcgcttcacatcgcctgctacaatggacaggatgctgtggttaacgagttgattgactacggtgctaacgtgaaccagccaaacaataatgggttcacccctttgcattttgctgctgcctccactcatggtgctttgtgtcttgaattgttagtaaacaacggggcagatgttaacattcagagtaaagatggcaaaagtccactgcacatgacagctgtccatggaaggttcacacggtcacagaccctcattcagaatggaggtgaaattgactgtgtggataaggacggcaacactcctctccatgtggctgcaagatacggtcatgagcttttgattaacaccttaataaccagcggagctgacacagccaagtgtggaatccatagcatgttccctttacatttagctgccctaaatgctcactctgactgctgcagaaagttgttatcatcgggctttgaaatagacaccccagataaatttggaagaacgtgccttcatgctgctgctgcaggaggtaatgtggaatgtataaaactcttgcagagcagcggagcagatttccataaaaaggacaagtgtgggaggacccctttgcactatgcagctgcgaattgtcatttccactgtattgagacattagtgaccacaggggccaacgttaatgaaacagatgactggggacgcacagctttgcattacgccgctgcatcagacatggatagaaataagactatcttaggaaatgcccatgataattcagaagaacttgaaagagccagggagctgaaggaaaaggaagccacactatgtctagagtttctgcttcaaaatgatgcaaatccatctatccgggacaaggaaggttacaatagcatacattatgctgccgcctatgggcacaggcagtgtctggaattggtgagttgttttgttttgttttctctaacacacacacacacacataccccaaatcacagaggcattaactgtttttttccagagttgtagctctggcttgtgtaaaaagtgggtccatgaatcaggatttcatgaattctgatttcaaaaagtgttttttctactgcaccatgctgccttccattgcaggttagagccccaccaccacccaaggcttttaagcacagcacaaaagcatggtagtcatcgatataaggcagtaccatttctgcctcctaacaccagcattgccatggaagttggtatagacctattagcaaatatggctttgtgtttagatcccatataagaaatgctcctcacaaaatgtgtatgcgtgtgtgtgtgtgtgtgtgtgtgtgtgtgtgtgtgtggtaatcagtggcagagtgaaggctttctactgtcactacatattatgagcctgccttccaaaatatacttaagacacagctgtctttaattggttttctctatgaaaaccatgtcataattgtcatgataaaacaaacttttattatacagtttgttattatagtcttaataatgtgtgctgttctatagtacttttgtgagttatctttaatccttcatagtctagaaactcaggataattatcctaacaccttctttgtatagaaataacatatcgcatgcaatatcttcattttttcaggaagaccattttggtaccattatttctgttattcaagtaagagtttttcctgtccataagaaggtttcacaaattttgtctgaaaatgaaattacccccctttgattagatcaacatttgccctgtgtaatttacaaagagatgactatttgtgacaattataaaacattcaaaaa

SEQ ID NO: 74587 - DNA, 3660 bp, Artificial Sequence
  derived and/or modified sequence
cagccaccattggttcaggcaatcttcagcggtgatccagaggagatccggatgctcatccataaaactgaagatgtgaatactctggattctgagaaacgaacccctcttcatgtggccgcatttctgggagatgcagagatcattgaactcctgattttgtcaggagctcgtgtaaatgccaaggacaacatgtggctgactccactgcaccgggctgttgcttccagaagtgaagaagcagtacaggttttgattaagcactcagctgatgtcaatgcaagggacaagaactggcagacccctcttcatgtggcagcagccaacaaggctgtcaaatgtgcagaagtgatcattcccctgctgagcagtgtcaatgtctccgaccgaggggggcgcacagccttgcaccatgcggctctgaacggccacgtggagatggtcaatttactcttggccaaaggggcaaatatcaatgcatttgacaagaaggaccggcgtgctctgcactgggcagcatacatgggccacttggatgttgtagcattgctcattaaccatggcgcagaagtgacctgtaaggataagaagggttatacccctctgcatgctgcagcctccaatggacagattaatgttgtcaagcatctcctgaacctgggggtggagattgatgaaatcaatgtctatggaaatacagcgcttcacatcgcctgctacaatggacaggatgctgtggttaacgagttgattgactacggtgctaacgtgaaccagccaaacaataatgggttcacccctttgcattttgctgctgcctccactcatggtgctttgtgtcttgaattgttagtaaacaacggggcagatgttaacattcagagtaaagatggcaaaagtccactgcacatgacagctgtccatggaaggttcacacggtcacagaccctcattcagaatggaggtgaaattgactgtgtggataaggacggcaacactcctctccatgtggctgcaagatacggtcatgagcttttgattaacaccttaataaccagcggagctgacacagccaagtgtggaatccatagcatgttccctttacatttagctgccctaaatgctcactctgactgctgcagaaagttgttatcatcgggctttgaaatagacaccccagataaatttggaagaacgtgccttcatgctgctgctgcaggaggtaatgtggaatgtataaaactcttgcagagcagcggagcagatttccataaaaaggacaagtgtgggaggacccctttgcactatgcagctgcgaattgtcatttccactgtattgagacattagtgaccacaggggccaacgttaatgaaacagatgactggggacgcacagctttgcattacgccgctgcatcagacatggatagaaataagactatcttaggaaatgcccatgataattcagaagaacttgaaagagccagggagctgaaggaaaaggaagccacactatgtctagagtttctgcttcaaaatgatgcaaatccatctatccgggacaaggaaggttacaatagcatacattatgctgccgcctatgggcacaggcagtgtctggaattgcttttggaaagaacaaacagtggatttgaagaatcagattctggtgctactaagagtccactccacttagctgcctacaatgggcaccatcaagccttggaagtccttctgcagtcgttggtggacctggacatcagggatgagaaaggccgcactgctctggatctggctgcctttaaaggacacacagaatgtgtggaagcgcttatcaatcagggcgcatccatctttgtgaaagacaatgtaaccaaaagaaccccacttcatgcctcagtaattaatggtcacacactgtgtttacggctgttgctagaaattgcagacaacccggaggcggtcgatgtgaaagatgccaaaggacaaacaccactgatgcttgcagtagcatatggacatattgacgctgtttcattgttacttgaaaaggaagccaacgtagacactgttgacatcctaggatgcacagctttacacagagggattatgacaggacacgaggaatgtgtgcaaatgctgctggaacaagaagtgtcaattctctgtaaagattccagagggaggacgcccttgcactatgcagctgctcgtggccacgccacgtggctgagcgagctgctccaaatggctctttctgaggaggactgttgtttcaaagataaccaaggctacacgccgctgcactgggcttgttacaatggtaatgaaaactgtatagaggtacttttggagcaaaaatgttttcgcaaatttatcggtaatccctttactccactgcactgtgcaataatcaatgatcatgggaattgtgcatcattgctgcttggggccatagattccagtatcgtcagttgtagagatgacaaaggcaggacaccccttcatgcggcagcatttgctgatcatgtggagtgcttgcagcttcttctgagacacagtgctccagtgaacgcagtagataattcagggaaaacagcactgatgatggctgctgagaatgggcaggcaggcgctgtggatattttggtgaacagtgcccaggctgatctgactgtaaaggataaggacttgaatacacccttacatttggcttgtagtaaaggtcatgaaaaatgtgccttgttaatacttgacaagatacaagacgagagccttattaatgaaaaaaataatgcactgcagacgtaagtgtaactactaaagttggacttgaacccagggtcatagtcatttattcaataagtattaagagcctgctgtgtgccagactagctctggggagcacagtggtgaaagatgcagtcctggcttcccctgcatgaaggtgacagtcacatacctacaagtgctgaccaagctgggcagttttagttagaatccttcttttgatatgtcttcatttaattttgtgaagtctctctttttctttgctgatatttctggggtaatattataaatttagtgggctgttagaaaaattttatggactgacatatttggggaaactatttgtattatgtattagcattatgtattctgactggaaaatgacagttttgcaaatcagtttcccagaatacatttgaagagtttctaagctatttgtcttgattatattttaatataattcagtgtaacccttggtgtgaaagatctaaaagctgtttcattttccgctttaggaaattatttatgcatttgttttaaaggcaaaggaatttttttcatttaagattcttaagccgggcgtggtggctcatgcctttaatcccagcactttgggaggccgaggcagttggattacttgaggccaggagttcatgacccgcctggccaacatggtgaaaccccgtctctactaaaaatacaacaacaacaaaattagctgggcatgatggtgggtgcctgtaacctcagctacttgggaggctgaggcaggagaatcacttgaacctgggaggtggaggttgctgtgagctgagatcgtgccactgcaccactccagcctgggcaacaagagcgagactgtccccccac

SEQ ID NO: 74588 - DNA, 1994 bp, Artificial Sequence
  derived and/or modified sequence
tgcaaaccccactagccagtgtcagcctctcggcgggaggaggcggcggcggaggaggagcagggggagggctgtcaaattcgggagccagattttttcccttctcctggcaatcccttccgcttccccggctcccggcgtgacatctgcgggccggggacctgcatgtgtgtgcgcgcgaaggagcggaagaatggcagtgctcaaactcaccgaccagccaccattggttcaggcaatcttcagcggtgatccagaggagatccggatgctcatccataaaactgaagatgtgaatactctggagctcgtgtaaatgccaaggacaacatgtggctgactccactgcaccgggctgttgcttccagaagtgaagaagcagtacaggttttgattaagcactcagctgatgtcaatgcaagggacaagaactggcagacccctcttcatgtggcagcagccaacaaggctgtcaaatgtgcagaagtgatcattcccctgctgagcagtgtcaatgtctccgaccgaggggggcgcacagccttgcaccatgcggctctgaacggccacgtggagatggtcaatttactcttggccaaaggggcaaatatcaatgcatttgacaagaaggaccggcgtgctctgcactgggcagcatacatgggccacttggatgttgtagcattgctcattaaccatggcgcagaagtgacctgtaaggataagaagggttatacccctctgcatgctgcagcctccaatggacagattaatgttgtcaagcatctcctgaacctgggggtggagattgatgaaatcaatgtctatggaaatacagcgcttcacatcgcctgctacaatggacaggatgctgtggttaacgagttgattgactacggtgctaacgtgaaccagccaaacaataatgggttcacccctttgcattttgctgctgcctccactcatggtgctttgtgtcttgaattgttagtaaacaacggggcagatgttaacattcagagtaaagatggcaaaagtccactgcacatgacagctgtccatggaaggttcacacggtcacagaccctcattcagaatggaggtgaaattgactgtgtggataaggacggcaacactcctctccatgtggctgcaagatacggtcatgagcttttgattaacaccttaataaccagcggagctgacacagccaagtgtggaatccatagcatgttccctttacatttagctgccctaaatgctcactctgactgctgcagaaagttgttatcatcgggctttgaaatagacaccccagataaatttggaagaacgtgccttcatgctgctgctgcaggaggtaatgtggaatgtataaaactcttgcagagcagcggagcagatttccataaaaaggacaagtgtgggaggacccctttgcactatgcagctgcgaattgtcatttccactgtattgagacattagtgaccacaggggccaacgttaatgaaacagatgactggggacgcacagctttgcattacgccgctgcatcagacatggatagaaataagactatcttaggaaatgcccatgataattcagaagaacttgaaagagccagggagctgaaggaaaaggaagccacactatgtctagagtttctgcttcaaaatgatgcaaatccatctatccgggacaaggaaggttacaatagcatacattatgctgccgcctatgggcacaggcagtgtctggaattggtgagttgttttgttttgttttctctaacacacacacacacacataccccaaatcacagaggcattaactgtttttttccagagttgtagctctggcttgtgtaaaaagtgggtccatgaatcaggatttcatgaattctgatttcaaaaagtgttttttctactgcaccatgctgccttccattgcaggttagagccccaccaccacccaaggcttttaagcacagcac

SEQ ID NO: 74589 - DNA, 2958 bp, Artificial Sequence
  derived and/or modified sequence
caaccaccgctcgtccaggcaatcttttctggcgatcctgaagagattcgcatgttgatccataagaccgaggacgttaatacgctggattccgagaagagaacccctctgcacgtagccgctttcttgggagacgcggagataatcgaattactgattctttcaggggctcgcgtcaacgccaaggacaacatgtggctcacccccctgcaccgagcagtggccagtcgaagtgaggaagctgtccaggtgctcatcaagcatagcgccgatgtcaacgccagggataagaactggcagaccccgttgcacgtggccgctgcgaataaggcggtgaaatgtgccgaagtcattatcccactgctttcctctgtgaacgtttccgatagaggagggcgtaccgccttacaccacgcagccttaaatggtcatgtggagatggtgaacctcttgctggcgaagggcgcaaatattaacgccttcgacaagaaagataggagggcactgcactgggctgcatacatgggacatctagacgtggttgccctgctcatcaaccatggagccgaagtgacttgcaaagataaaaaagggtatacacctcttcacgctgccgcatcaaatggccagattaacgtcgttaagcaccttctgaacctgggggttgagatcgatgaaataaacgtatacgggaatactgccctgcatatcgcatgctataatggtcaagatgcggtcgtcaatgagctgattgactacggtgcgaacgttaaccaacccaacaataatggctttactcctctgcattttgcggctgcctcaacacacggcgctctgtgcctcgagttactggtaaataacggggcagatgtcaatattcagagcaaagacggtaaatcccctctgcacatgactgctgtgcacggtcggtttacccgtagtcagaccttgattcaaaacggcggtgaaattgattgtgtggacaaagacggcaacaccccactgcatgtggctgccaggtatgggcacgaactccttatcaatactcttattacttctggtgcagacaccgctaaatgtggaatacatagtatgtttccgctgcatttggctgcccttaatgcacatagcgactgctgtagaaaattattgagctcaggtttcgagattgatacgcctgacaaattcggtagaacatgtctccatgcagctgctgccggagggaatgttgaatgcatcaaactcttacagtctagtggcgctgacttccacaaaaaagacaaatgcggcagaacaccactgcactacgcagctgccaattgccattttcactgtattgaaactctcgttaccactggagctaatgtgaacgagaccgacgactggggacggaccgccctgcattacgccgctgcaagcgatatggataggaataaaaccatcttaggaaatgcccatgataattcagaggagttggaaagagcacgggaattaaaggagaaagaggccacactgtgcctggagttcctactgcagaacgacgcaaacccgtccatcagagacaaagaaggatacaacagcattcattatgccgcagcatacggacatcggcagtgtctggagttactgctggagcgaacaaatagcggtttcgaggaatcagacagtggcgctaccaagtcccccctgcacctagcagcctataacgggcaccatcaggctctggaggtgttgctacaaagcctcgtcgatttggatatcagggacgaaaaggggaggaccgctctcgacctggctgcttttaagggtcataccgagtgcgtcgaggcgctgataaatcagggggcatccatcttcgtgaaagacaatgtcactaagcgcacaccgttgcacgcaagcgtaatcaacgggcacactctttgtctccgtctgttgctcgaaattgcagacaacccagaagcagtcgatgtgaaggatgccaagggtcaaactccccttatgctagccgttgcatacgggcacatcgacgccgtgtcgctgcttctagagaaggaggccaatgtcgacacagttgacatactcggttgcacagccctccatcgaggaatcatgaccggccacgaagagtgcgtccagatgctgctcgaacaggaagtatctattctctgcaaagatagcagaggcaggactcctcttcattatgctgcggctcgtggacacgccacctggcttagtgaactcttgcagatggcgctctccgaggaggactgttgcttcaaggacaatcaaggctatacaccacttcactgggcctgttataatgggaacgaaaattgcatcgaggtactgctggagcagaagtgcttccggaaatttatcggcaacccattcactcccctgcattgcgcaatcataaacgatcacgggaactgtgcctcactgctcctgggagccatcgattcgagcatcgtgtcctgccgggacgataaaggccgaactccgctgcacgccgctgcttttgctgatcacgttgaatgtcttcagctactgctgcgccactctgcgccagtcaatgccgtcgataactcgggaaagactgccctgatgatggccgcagagaacggccaggcaggagcagtggacattctggtgaactccgcccaggctgacctgacagtcaaggataaagacctgaacaccccactccatcttgcatgcagtaagggtcatgagaagtgcgccttgcttatcctggataagatccaggatgagtctctgatcaatgaaaagaataatgctctacagacccctctgcacgtggcggctaggaatggcttaaaagtagtggtcgaagaactccttgccaagggagcatgtgtgctcgcggtcgatgagaacgcttctcgcagtaacggacccaggagtactccaggcacagccgtccagaaagaagaatag

SEQ ID NO: 74590 - DNA, 2760 bp, Artificial Sequence
  derived and/or modified sequence
atgctgatccacaagaccgaggatgttaacacactcgattcagagaagcgaacaccactgcatgttgcagcctttttaggcgatgctgaaattatcgagctgctgattcttagcggtgccagggtgaacgccaaggataacatgtggttaacacccctccaccgggcagtggcgagtcgctccgaggaggccgttcaggtgctgattaaacactctgccgatgtcaatgctagagataaaaactggcagacaccacttcacgtggctgcagctaataaggcggtcaaatgcgctgaggtgattatccctttgctgagctctgtaaatgtgtctgacaggggcggacggacagccttgcaccacgccgctttaaacggccatgttgaaatggtaaacctactcctcgccaagggagcaaatataaacgccttcgacaagaaggatcgaagagcgcttcattgggcagcatacatgggccatctggacgtggtcgctctcctgatcaatcacggggctgaggtcacttgtaaggataagaagggatatacccccctccacgctgctgcctcgaacgggcagattaacgttgtgaagcacctgctgaatttaggagtggaaatcgacgagatcaatgtgtacggaaacaccgctctacacattgcttgttataatggccaggatgccgtagtgaatgaactgatcgattatggtgccaacgttaatcagcccaacaacaacggttttaccccattgcattttgccgcagcgagtacacatggcgctctgtgcctggagttgctagtcaataacggagcggacgttaacatccagtcaaaggatggcaagtcccccctgcacatgacagccgttcacggcagattcacccgctctcagaccctcatccagaacgggggagagattgactgcgttgacaaagatggcaatacacctctccatgttgcggctaggtacggccacgaacttctcataaataccctgatcacgagcggtgcggatacagccaagtgcgggatccactccatgttcccccttcatctcgccgcactgaacgcgcattcagattgctgccgtaagctcctgtcttccgggtttgaaattgatacaccagacaaatttggaagaacctgcctacatgccgcagctgctgggggtaatgtagagtgtatcaaacttttgcaatcatcaggagcggatttccataagaaagataagtgcgggaggactccccttcattacgccgctgctaattgccactttcactgcattgagactctggtcactacaggagcaaacgtgaacgaaactgatgattggggtaggacggcgctccactatgcggcagcatctgacatggaccgcaataagaccattctgggaaacgcacacgataattcagaagagctagagagagccagagagcttaaggaaaaggaggccacactttgtctggagttcttgttgcagaacgacgcaaatccgagtatccgcgacaaggaaggctataattctatccattacgcagccgcatatgggcaccggcagtgccttgagttgcttctcgagcggacaaacagtggatttgaggaaagcgactcaggggcaaccaagtctccactgcacctcgccgcttacaacggtcatcatcaagcactagaggtgctgctgcagtctcttgtggacctggacatcagagacgagaagggcaggactgctctcgacctggctgctttcaagggtcatacggaatgcgtggaagctctgattaaccaaggcgctagcatcttcgtgaaggacaatgttacgaagagaactccgttgcacgcgtctgtgatcaatggacacactctctgcctcaggttgttgctcgagattgccgacaatcccgaggctgtggatgtgaaagatgccaagggacagactcccctgatgttggcagtcgcctacggtcatatcgacgctgtgagcctcttactggagaaggaggcaaatgtggacactgtcgatattttaggctgtacggccttgcatagaggcataatgactggtcatgaagaatgtgtgcagatgctacttgagcaggaagtatcaattttgtgtaaagattcccgcggtcggaccccattacactacgccgcagcaaggggccacgcaacttggctttctgagcttcttcagatggctttatctgaggaggattgctgcttcaaagataatcagggttacacaccactgcactgggcctgctacaatgggaatgagaactgtatcgaggtgttgttagaacaaaagtgcttcaggaaattcatcgggaacccctttactccactgcattgcgccattatcaacgaccacggaaattgtgcgtccctcctgctgggggcaatagactccagcattgtatcctgccgagacgacaagggacgcactcccctgcacgccgcagccttcgcagaccacgtagagtgcctgcagcttcttctgaggcacagcgccccagtgaacgccgtcgataattcaggcaaaacagcactgatgatggctgccgaaaatggacaggctggcgctgtggatattctggtcaactcagcgcaggccgacctgactgtaaaggataaagatctgaatactccattacacctggcctgcagtaaggggcatgaaaaatgcgccctgctgatcctggacaaaattcaagatgaatctctgattaacgagaagaacaacgctcttcagacttag

SEQ ID NO: 74591 - DNA, 2760 bp, Artificial Sequence
  derived and/or modified sequence
cttttgatttacaaaacggagattatcagcaccctcgacagcgaaaaaagaacaccactgcatgtggcagcttttctgggggacgcagagattatcgagctgctgattctgagcggagcacgagtgaatgccaaggacaacatgtggctgacccctctgcacagagccgtcgcctctcgcagcgaggaggccgtccaggtgttgatcaagcattcagcagacgtcaacgcaagagataagaactggcagactcctttacacgtggccgctgccaacaaggcagtgaaatgtgccgaggtgataatcccactgctgagcagcgtgaatgtaagcgacaggggaggtaggacggcattgcatcacgccgctctgaatggccatgtggagatggtaaacctgcttcttgccaaaggagcgaatattaatgcgttcgataagaaagaccggcgagcgctgcactgggccgcttacatgggccacctggacgtggttgccctcctaatcaaccacggcgctgaagtaacctgcaaagataaaaaggggtacaccccactacacgccgctgctagtaatgggcagattaatgtggtaaaacacctcctgaacctcggtgtggagattgatgagataaatgtgtacggcaacactgcacttcacattgcgtgttacaacgggcaggacgctgttgtaaacgaacttatcgactacggggctaacgtcaaccagcctaataataatgggttcactccgttgcacttcgcagctgcctcaactcacggcgcactctgcctggagctcctggtgaataatggggctgatgtgaacattcagtcaaaagatggcaagagccctctacacatgacagccgtgcatggacgctttacccgaagtcagacacttatccagaatggaggcgaaatcgactgcgtagataaagatggcaataccccgctgcatgtggccgcacgctacgggcatgagctcctcatcaatactcttattacttctggcgcagacaccgccaagtgcggaatacattcaatgttccccctccatctggccgcacttaatgcacactcggactgctgccgtaagctcctgagctcaggttttgaaatcgacacacccgataagtttggacgtacttgtctgcacgccgcagcagcgggaggaaatgtcgagtgcattaaattgctgcaaagtagcggggctgatttccacaagaaggacaagtgtggaagaacgccgctgcactacgctgcagccaattgccattttcattgtatcgagacactggtcaccactggcgcaaacgtaaacgaaacggacgactggggtcgaacagctctccactacgcggctgcaagcgacatggataggaacaaaacgatcctgggcaatgcccacgacaacagtgaggagctcgagcgggcacgagagttgaaggaaaaggaggcgacactgtgtctcgaatttctcttacaaaacgacgcgaatccaagtattcgcgataaagaagggtataattctatccattacgctgcagcctacgggcatcggcaatgtctggaactcctgctggagaggacaaacagcggattcgaagagtcggacagtggcgcaaccaaaagcccactgcacctggccgcatataatgggcaccaccaggccctggaggttctgctgcagagtctggttgatttagacatccgggacgagaagggcagaaccgccctggatcttgccgctttcaagggccataccgaatgtgtcgaggccctcatcaatcagggggcttcgatttttgtgaaggacaacgttactaagagaaccccactgcatgcctcggtcatcaacggtcacaccctgtgcttacgcctgttgcttgaaatcgcagacaatcccgaagccgttgatgttaaggatgctaaggggcagaccccattgatgctcgcggtcgcttacgggcatatcgacgcagtctccctccttctagaaaaggaggccaatgttgataccgtagacatcctgggatgcacagctctacaccgcggaataatgacgggtcacgaagagtgcgttcagatgctgctggaacaggaggtctcaatcctttgcaaggatagcagagggagaaccccactgcactacgccgctgctagaggacatgctacgtggctgtccgaattgctgcagatggccttgagtgaagaggactgttgctttaaagataaccagggatatactcccctgcactgggcctgttataacggtaacgagaactgcatcgaggtgttgctggagcagaaatgtttcagaaagttcatagggaaccctttcacaccactgcattgtgccatcatcaatgatcatggaaattgcgctagccttctgctcggtgcgatcgacagctctatagtctcctgtcgcgatgacaaaggccgaacacctctccatgcagcagcgtttgccgaccatgtcgagtgcctccagcttttgcttcggcattcagccccagtcaatgctgttgacaacagcggtaagactgccttgatgatggcagcagagaacgggcaagcaggcgctgtagatattcttgtgaacagcgctcaagcggacctaacagtgaaagataaggatctgaataccccactgcacctggcgtgctctaaaggacatgagaaatgcgcactcctaattctcgataaaattcaggacgaatccctgattaatgaaaagaacaacgccctgcagacttag

SEQ ID NO: 74592 - DNA, 1740 bp, Artificial Sequence
  derived and/or modified sequence
atggcggtgttaaagcttacagaccaaccacctctcgtccaggcaattttttcaggggacccagaagaaatccgtatgctgatccataaaactgaagacgttaacaccctcgactccgagaagaggaccccccttcacgtcgccgcattcttaggtgacgccgagattatcgagttactgatcttgtctggtgccagagtaaacgccaaggacaacatgtggctgaccccactccatcgggctgtggcatcccgttctgaagaggctgtgcaggtgctgattaaacatagcgctgacgtgaacgctagagataaaaattggcagactccccttcacgttgcggctgctaacaaagccgtgaagtgtgctgaggtgattattccattgctgagttccgtaaatgtgtctgacagagggggacggactgccctgcaccatgctgctctaaatgggcatgtggagatggtgaacctgcttcttgcgaaaggagccaacatcaacgcctttgataagaaggaccgcagggccctgcattgggcagcttacatggggcatctcgacgtggtagcgctcctcatcaaccatggtgccgaggtcacttgtaaagataagaaaggctacactccactgcatgctgctgccagcaacggccaaatcaacgtagtgaagcatctgttaaatctgggcgtagaaatagacgagatcaacgtatatgggaataccgcacttcacattgcctgttacaacggccaagacgccgtcgtcaacgagctgatcgattacggagccaatgtgaatcagcctaacaataacggcttcacgcctctccacttcgctgccgctagcacccacggcgctctctgcttagagctgctcgtgaacaatggggctgacgttaacatacaatccaaggacggcaagtctcccctgcacatgaccgcggtgcacgggcgatttaccaggagccaaactcttattcagaatggcggagagatcgattgcgtggataaagatggtaacaccccattgcacgttgcagctaggtacggccatgaactcctgatcaatacactcattaccagcggcgctgacactgctaaatgcgggatacattcaatgttcccgctccacctggcggcactgaatgcccacagcgactgctgtcgcaagcttctgagcagcgggttcgagattgacacccccgacaagtttggccgaacctgcctgcatgcagccgctgcgggagggaacgtcgaatgtatcaagctgctgcagagcagtggcgcagatttccacaagaaagacaaatgtggtagaacacctctgcattacgccgcagcaaattgtcacttccactgcattgagactttggtcacaaccggagccaatgtgaatgaaacggacgattggggaagaaccgccctccactatgctgctgcttccgacatggacaggaataagacgattttgggcaatgctcacgacaacagcgaggagctggaaagagctcgtgagcttaaagagaaggaagccactctgtgccttgagtttctcctacaaaatgacgcaaatcctagcattagggataaagaggggtataattcaatccactatgcagcagcttatgggcacagacaatgccttgaacttgtctcatgttttgtcctattctcacttacccacacccacacccacacgcccaatcatcggggtatcaactgcttttttccagaattgtag

SEQ ID NO: 74593 - DNA, 2760 bp, Artificial Sequence
  derived and/or modified sequence
atgctcatacataaaaccgaagacgtcaataccctcgatagcgagaaaaggacccccctgcatgtcgctgccttcctcggcgatgccgagataatcgagcttctgatcctttctggagcacgcgtgaacgccaaggacaacatgtggctgactcccttacatcgtgctgtcgcaagccgaagcgaagaagctgttcaagtattaatcaaacacagtgccgacgttaatgctagggataaaaattggcagactccactacatgttgcagcggcaaacaaagcggtcaaatgcgccgaggtgattatcccattgctgtcttccgtcaatgtgagcgatcgaggcggacggacggcgctgcaccatgccgctctaaacggccacgtggaaatggtgaacctactgctcgcaaagggagccaatatcaatgcatttgataagaaagatcgccgagcgctgcactgggcggcatacatgggccacctggacgtcgtggcattgttgataaaccacggcgcagaagtgacttgtaaggacaagaagggttacacccctcttcatgctgcagcctctaacggtcagatcaatgtcgtaaagcacctccttaatcttggggtagagatcgacgagattaacgtgtatggcaacactgccttgcacatcgcttgctacaacggccaagatgccgtggtgaatgagttgatcgattacggtgctaacgttaaccagcccaacaataacggtttcactcctctgcactttgcagctgcatcaacccacggagctctgtgtttggagttactcgttaacaacggcgcagacgtcaatattcagagtaaggatggtaagtccccacttcatatgaccgcagtccacgggagattcacccgctcacagacattaatccagaacggtggggagattgactgcgtcgacaaagatggaaatacacccctccatgtggctgctcggtacggacacgaacttctgatcaacacccttatcacctccggtgcagataccgccaaatgcggaatccatagtatgttccccctgcatcttgcggctctaaacgctcactctgattgttgcaggaaactgctgagcagtggctttgagatcgatactcccgataaattcgggagaacttgtctgcatgccgcagcagctggagggaatgttgagtgcattaaacttcttcaatcaagcggggctgattttcacaaaaaagacaagtgcgggagaacccccctgcactatgccgctgctaattgccatttccattgcatcgagacgctggtgaccacaggtgctaacgtcaatgaaacagacgactggggacgtacggcactgcattatgcagcagccagtgacatggatcgtaataagactatcttgggaaatgcccatgacaattccgaagaactcgaacgggcacgggaactgaaggagaaagaagccactctgtgcttggagttcttgctgcagaacgacgcaaatcccagtatcagagataaggaaggctataattctattcactatgcagccgcatatggtcaccggcagtgcctcgaattgctgttagaacgcaccaactccggattcgaggagagtgatagtggagccacaaagagcccgttgcaccttgccgcttacaatggccatcatcaggccttagaggtgttgcttcagagtttggtggatctggacattagagacgaaaagggcaggaccgcattagatttggcggctttcaagggacacacagaatgcgttgaggctttaattaaccagggggcttcaatcttcgtaaaagacaacgtcaccaagagaaccccccttcacgccagcgtgataaatggacacacgctttgcttgaggcttctcctagagattgcagacaatccggaggccgtggacgttaaggacgcgaagggacagacgccattaatgctagcagtggcctacgggcatatcgacgcagtcagtctgctgttagaaaaggaggctaacgtcgataccgttgacatcctcggatgcaccgcactgcaccggggaattatgacagggcatgaagagtgcgtgcagatgctgctggagcaggaggtgagcatcctttgcaaggactcaagaggcaggactcctcttcactacgcggctgcacggggacatgccacatggctgtcagaactgctgcaaatggcactgagcgaggaggactgctgctttaaagataaccagggttatactccacttcattgggcatgttataatggcaacgaaaactgtattgaagtccttctggagcagaaatgctttcgaaaattcattggcaatccgttcacccccctgcactgcgccattattaatgatcatggaaattgtgcttcgttgctcttaggcgcaatcgactcgtctatcgtgagctgtagagacgacaagggaaggactccactgcatgctgccgcatttgcagaccacgtcgaatgtctgcagctgctgttaagacacagtgctcccgttaatgcagtggataacagcggaaagacagccttgatgatggcggctgagaatggtcaagccggagctgtggacatcctggtgaactcggcgcaggcagatttaacagtgaaggataaggatctgaacacccctcttcatctggcctgcagcaaaggacatgagaaatgtgctttactgatattggataagatccaagatgaatctctgattaatgagaaaaacaacgctctccagacttag

SEQ ID NO: 74594 - DNA, 1524 bp, Artificial Sequence
  derived and/or modified sequence
atgtggctaactcctctacaccgggctgtggcctcaaggagcgaggaagctgtgcaggtcttgatcaagcactccgcagacgtgaacgcacgggacaagaactggcaaacaccgctacacgtagcggctgccaacaaggccgttaagtgcgccgaggttataatacccctcctctcctcagttaatgtgtcagatcggggaggaagaacggccctccaccacgccgctctcaatgggcacgtcgagatggtaaatttgttattagccaaaggggcaaacataaacgcgttcgacaagaaagacaggagggctcttcactgggctgcatacatggggcacctcgatgtggtggctctgctcatcaatcacggggctgaggtgacatgtaaggacaaaaaaggctacacccctctccacgctgccgcatcaaacggccagattaatgtcgtaaaacacctgctgaacctcggggtggagatcgatgagattaacgtgtacgggaacactgcgctgcacatcgcctgctataacggacaagatgcagtcgtgaacgagttaatcgactatggtgcgaatgtcaatcaaccgaacaataacggtttcactccactgcactttgccgcagcttcaacacatggggcactgtgcttagagcttctggtgaacaatggcgctgacgtgaacatccagagtaaagacggcaaaagtccactccacatgaccgcagtccacgggaggtttacacgtagccagactcttattcagaacggtggcgaaattgactgtgtggataaggacggcaacacgccgctgcacgtggccgcaagatacggacatgagctgttaatcaatacgctgataacctctggcgctgacactgccaagtgtggtattcactccatgtttccccttcatctggccgcactgaatgctcattcagactgttgcaggaaactgctttccagtgggtttgagatagacacccccgataaatttggaagaacatgcctgcatgcagccgctgcagggggaaatgtagagtgtatcaagctgctgcagagctctggcgcagactttcataagaaagacaagtgtggcaggacccccctccattacgctgccgctaactgccacttccactgtatagaaacactcgtcactacaggggctaatgtgaatgagaccgacgactgggggcgtactgccctgcattacgctgccgctagcgatatggacaggaataagacaatcctaggtaatgcccatgataacagcgaggagctggaacgggctcgtgagctgaaggaaaaagaggcaaccctatgtcttgaattcttgctgcagaatgatgccaatccgtctatccgagataaagaaggttataacagcatccactacgcagccgcttatggtcacaggcaatgtctcgaactcgtttcatgtttcgtgttattttcacttacccatacccatacgcacacaccaaatcacaggggcattaattgcttctttcccgaactgtag

SEQ ID NO: 74595 - protein, 120 aa, Artificial Sequence
  derived and/or modified sequence
MGSSSEASFRSAQASCSGARRQGLGRGDQNLSVMPPNGRAQTHTPGWVSDPLVLGAQVHGGCRGIEALSVSSGSWSSATVWILTGLSRPFLPGATVLRDRPLGSAFELSYDQKKAPLRLQ

SEQ ID NO: 74596 - DNA, 363 bp, Artificial Sequence
  derived and/or modified sequence
atgggcagcagcagcgaggccagcttcagaagcgcccaggccagctgcagcggcgccagaagacagggcctgggcagaggcgaccagaacctgagcgtgatgccccccaacggcagagcccagacccacacccccggctgggtgagcgaccccctggtgctgggcgcccaggtgcacggcggctgcagaggcatcgaggccctgagcgtgagcagcggcagctggagcagcgccaccgtgtggatcctgaccggcctgagcagacccttcctgcccggcgccaccgtgctgagagacagacccctgggcagcgccttcgagctgagctacgaccagaagaaggcccccctgagactgcagtag

SEQ ID NO: 74597 - DNA, 363 bp, Artificial Sequence
  derived and/or modified sequence
atgggttcatcaagcgaggcctcatttcgaagtgcccaagccagttgctcaggagctaggcgccagggcctcggaaggggcgaccaaaatttatccgtaatgccacctaatggccgtgcccagacccacaccccagggtgggtgtctgacccccttgttttaggggctcaggttcacggcgggtgccgcgggattgaagcactgtcagtgtcaagtggctcttggagctctgctactgtctggatacttactgggctctcacgcccttttcttcctggagccaccgtgctccgagacagaccattaggtagcgcctttgagctgtcttacgaccagaaaaaagcccctctgagactgcagtag

SEQ ID NO: 74598 - DNA, 363 bp, Artificial Sequence
  derived and/or modified sequence
atgggcagcagcagcgaggccagcttccgcagcgcccaggccagctgcagcggggcccggcggcagggcctgggccgcggggaccagaacctgtctgtgatgcccccaaatggccgggcccagacccacaccccaggctgggtgtctgaccccctggtgctgggcgcccaggtgcatggaggctgccggggcatcgaggccctgtctgtgagcagcggctcctggagcagcgccaccgtgtggatcctgaccggcctgagccggcccttcctgcccggggccaccgtgctgcgggaccggcccctgggcagcgcctttgagctgtcctatgaccagaagaaggcccccctgcggctgcagtag

SEQ ID NO: 74599 - DNA, 363 bp, Artificial Sequence
  derived and/or modified sequence
atgggcagcagcagcgaggccagcttccggagcgcccaggccagctgtagcggagcaaggcggcaagggctcggtcgcggcgaccaaaacttgagtgtgatgccgccaaacggccgggcccagacacacactcctggatgggtaagtgatcccttagtcttgggcgcacaagtgcacggagggtgccggggcatcgaagccctctctgtctctagcggatcctggagtagtgctacagtttggatcctgacaggcctcagccggccatttttgcctggagccactgtattaagagatcgcccacttggctcagcttttgagctatcctacgaccagaaaaaggccccccttcgtctgcagtag

SEQ ID NO: 74600 - DNA, 363 bp, Artificial Sequence
  derived and/or modified sequence
atggggagtagcagcgaggcgagcttccgctccgcacaggcctcttgttccggcgctaggcgccaaggtctcgggagaggggaccagaatctgtctgttatgcctccgaatggacgtgctcaaacccataccccaggttgggtctctgatccattggttttaggggctcaagttcacggtgggtgccggggaattgaggccctttctgtgtcttccggatcctggtcctccgctaccgtatggatactcacaggcctgtctcggccttttcttcccggtgctactgttctgcgcgaccggcctcttggctcagcatttgagctgagctatgaccagaagaaggcacccctgcggctgcagtag

SEQ ID NO: 74601 - DNA, 363 bp, Artificial Sequence
  derived and/or modified sequence
atgggatcttcctctgaggcgagcttcagatctgctcaagcttcctgcagtggggccaggaggcagggcctgggcaggggagaccagaacctctcggtgatgcctccgaatggcagggctcagacacacacacctggctgggtttcagatcccttagttttgggtgcccaagttcacggagggtgccggggaatagaagctctgtcagtctcgtctggatcttggtcctcagcaactgtctggatcctgacaggtctctccaggcctttccttcctggagccacagtgcttagagacaggccactggggtcagcatttgagctcagctatgatcagaaaaaagcaccgttgaggttgcagtga

SEQ ID NO: 74602 - protein, 86 aa, Artificial Sequence
  derived and/or modified sequence
MGSSSEASFRSAQASCSGARRQGLGRGDQNLSVMPPNGRAQTHTPGWVSDPLVLGAQVHGGCRGIEALSVSSGSWSSATVWILTVQ

SEQ ID NO: 74603 - DNA, 261 bp, Artificial Sequence
  derived and/or modified sequence
atgggcagcagcagcgaggccagcttcagaagcgcccaggccagctgcagcggcgccagaagacagggcctgggcagaggcgaccagaacctgagcgtgatgccccccaacggcagagcccagacccacacccccggctgggtgagcgaccccctggtgctgggcgcccaggtgcacggcggctgcagaggcatcgaggccctgagcgtgagcagcggcagctggagcagcgccaccgtgtggatcctgaccgtgcagtag

SEQ ID NO: 74604 - DNA, 261 bp, Artificial Sequence
  derived and/or modified sequence
atggggtcttcttccgaagcctcatttcggtctgcacaagcctcctgttccggcgctagacggcagggtctgggacggggagaccagaatttgtctgtgatgccacctaatggcagggcccagacccacacgccagggtgggtttctgacccactcgtcttaggggctcaggtacacgggggatgtcggggcattgaagccctttctgtctctagcggatcctggagctccgcaaccgtatggatcctcacggtccaatag

SEQ ID NO: 74605 - DNA, 261 bp, Artificial Sequence
  derived and/or modified sequence
atgggcagcagcagcgaggccagcttccgcagcgcccaggccagctgcagcggggcccggcggcagggcctgggccgcggggaccagaacctgtctgtgatgcccccaaatggccgggcccagacccacaccccaggctgggtgtctgaccccctggtgctgggcgcccaggtgcatggaggctgccggggcatcgaggccctgtctgtgagcagcggctcctggagcagcgccaccgtgtggatcctgactgtgcagtag

SEQ ID NO: 74606 - DNA, 261 bp, Artificial Sequence
  derived and/or modified sequence
atgggcagcagcagcgaggccagcttccggagcgcccaggccagctgctcaggagctagacggcagggattggggcgtggcgatcagaacctgtcagtcatgcctcccaacggcagagcccaaacccatactcctggctgggtaagcgatcccctcgttcttggcgctcaagtgcacggcggttgccgtgggatcgaggctctaagtgtttccagcggctcatggtcatccgcaactgtgtggatactgacagtgcagtag

SEQ ID NO: 74607 - DNA, 261 bp, Artificial Sequence
  derived and/or modified sequence
atggggtcttcttctgaggcctccttcagatcagctcaggctagttgttcaggcgctcggaggcaggggttaggccgtggggatcaaaatctgagcgtgatgccacctaacgggagagcccagacccacacgccaggctgggtgtcagatccattggtcctgggagcgcaggttcacggtggctgtcggggaattgaagctctttctgtgtcctccggctcttggagcagcgccactgtatggatcctcaccgtgcagtag

SEQ ID NO: 74608 - DNA, 777 bp, Artificial Sequence
  derived and/or modified sequence
ccctgagaggccgtgctcgggctcgcctgctcagctcactccgaaagcctctgctcagacctgcacccagtcacagcagcacagatgtgcaggaggagaccatttccacggaccctccgactcctaggaggcagtcccttagggactggccctaacaacaaatgaggagaagccaagttctctgctttctgcagacagggcctcccctggatgggatcttcctctgaggcgagcttcagatctgctcaagcttcctgcagtggggccaggaggcagggcctgggcaggggagaccagaacctctcggtgatgcctccgaatggcagggctcagacacacacacctggctgggtttcagatcccttagttttgggtgcccaagttcacggagggtgccggggaatagaagctctgtcagtctcgtctggatcttggtcctcagcaactgtctggatcctgacagtgcagtaagagcttgcctggcctgtgtgcagagctgcctcatcctgaaattctgggagttgaaagccccagggcaacccttaaccaatgggggaaaagcattggtgtgtaaatcccccagcttccctgggtgggctgcagctgagccatagtctacatgacacttccgaggatccccagtgggcatgacctcaatcgcccacattggatgccacaacctgcactggcttttctcccttccctgtgggtctctctctgcacttcctcccttgtgcattctaggttcaccttccaaataaatgatgtgcactcagg

SEQ ID NO: 74609 - protein, 39 aa, Artificial Sequence
  derived and/or modified sequence
MATNFLAHEKIWFDKFKYDDAERRFYEQMNGPVAGASRQ

SEQ ID NO: 74610 - protein, 262 aa, Artificial Sequence
  derived and/or modified sequence
MATNFLAHEKIWFDKFKYDDAERRFYEQMNGPVAGASRQENGASVILRDIARARENIQKSLAGSSGPGASSGTSGDHVVQELQQAISKLEARLNVLEKSSPGHRATAPQTQHVSPMRQVEPPAKKPATPAEDDEDDDIDLFGSDNEEEDKEAAQLREERLRQYAEKKAKKPALVAKSSILLDVKPWDDETDMAQLEACVRSIQLDGLVWGASKLVPVGYGIRKLQIQCVVEDDKVGTDLLEEEITKFEEHVQSVDIAAFNKI

SEQ ID NO: 74611 - DNA, 192 bp, Artificial Sequence
  derived and/or modified sequence
atggccacgaatttccttgcccacgaaaagatatggttcgacaagttcaaatatgatgatgctgaaagaaggttttacgagcaaatgaatggccctgtcgccggcgcttccaggcaggagaatggagctagcgtgattctgcgggacatcgcacgggcacgagagaacatccagaaatctcttgccggctag

SEQ ID NO: 74612 - DNA, 789 bp, Artificial Sequence
  derived and/or modified sequence
atggctaccaattttttggcccatgaaaagatttggttcgacaaattcaagtatgatgacgctgaaaggaggttctatgaacaaatgaacggtcccgtggccggtgcatctagacaggaaaatggcgccagtgtgattctgagggacattgccagggccagagagaatattcagaaatcgctggctgggtcaagcggccccggggcatcctcaggcacctctggtgatcacgtggtgcaggaactacagcaggcaattagcaaacttgaggcaagactaaacgtccttgaaaaatcctctcccgggcacagagccacagccccacagacccagcatgtatcacctatgcggcaggtcgagcccccagccaaaaaaccggctacaccagccgaggacgacgaggatgacgacattgatctgtttgggtccgacaatgaggaggaagataaagaagctgcccagctgcgcgaggaaagactccgccagtatgcagaaaagaaagccaagaagccagctctcgtcgctaaatcttcgatcttgctagatgtgaaaccttgggatgacgagacagatatggcacagcttgaggcctgcgtgaggtctatccagcttgatgggctagtgtggggcgcctctaagctggtcccagtgggatacgggatacgaaaactccaaatccaatgcgtagtggaagacgacaaggtggggaccgacctgctggaagaagagatcacaaaatttgaggagcacgtgcagtccgttgatatagcagcatttaataaaatctag

SEQ ID NO: 74613 - DNA, 192 bp, Artificial Sequence
  derived and/or modified sequence
atggccaccaacttcctggcccacgagaagatctggtttgacaagttcaagtatgatgatgctgagcggcgcttctatgagcagatgaatggacctgtggccggggccagccggcaggagaatggagccagcgtcatcctgcgggacatcgcccgggcccgggagaacatccagaagagcctggccggctag

SEQ ID NO: 74614 - DNA, 789 bp, Artificial Sequence
  derived and/or modified sequence
atggccaccaacttcctggcccacgagaagatctggtttgacaagttcaagtatgatgatgctgagcggcgcttctatgagcagatgaatggacctgtggccggggccagccggcaggagaatggagccagcgtcatcctgcgggacatcgcccgggcccgggagaacatccagaagagcctggccggcagcagcggccctggggccagcagcggcaccagcggggaccacgtggtgcaggagctgcagcaggccatcagcaagctggaggcccggctgaatgtgctggagaagagcagccctggccaccgggccacagccccccagacccagcacgtgagccccatgaggcaggtggagcccccagccaagaagccagccaccccagcagaagatgatgaagatgatgacatcgacctgtttggaagtgacaatgaggaggaggacaaggaggccgcccagctgcgggaggagcggctgcggcagtatgcagagaagaaggccaagaagccagccctggtggccaagagcagcatcctgctggatgtgaagccctgggatgatgaaacagacatggcccagctggaggcctgtgtgcgcagcatccagctggatggcctggtgtggggcgccagcaagctggtgcctgtgggctacggcatcaggaagctgcagatccagtgtgtggtggaggatgacaaggtgggcacagacctgctggaggaggagatcaccaagtttgaggagcacgtgcagagcgtggacattgctgccttcaacaagatctag

SEQ ID NO: 74615 - DNA, 192 bp, Artificial Sequence
  derived and/or modified sequence
atggccaccaacttcctggcccacgagaagatctggttcgacaagtttaaatacgacgacgcagagaggagattttacgagcaaatgaacgggcccgtcgccggggccagtagacaggagaatggtgcgtccgtcatactcagagatatcgcaagagcccgcgaaaatattcagaagagtcttgccggctag

SEQ ID NO: 74616 - DNA, 789 bp, Artificial Sequence
  derived and/or modified sequence
atggccaccaacttcctggcccacgagaagatctggttcgacaagtttaaatatgacgatgccgaacggagattctacgagcagatgaatggacccgtggcgggggcctcaaggcaagaaaatggggcctctgtcatcctgagagatatagcaagagcccgggagaatattcagaagtcccttgctgggtcatctggtcccggtgcatcaagtggcacaagcggggaccacgtggtgcaagaattacagcaggctatctcaaaactcgaggcgaggctgaacgtactcgagaaatcatccccgggtcaccgggctactgcacctcagactcagcacgtgtctcccatgaggcaggtggaacctcccgccaaaaaaccagcaacccccgcggaggatgatgaagacgatgatattgacttattcggcagcgataatgaagaggaggataaagaggccgcacaactgagggaggagcgcctccgacagtacgctgagaaaaaggctaagaagcccgcgctggttgcaaaaagctccattctgttagatgttaaaccttgggatgatgaaacagatatggcccagctggaggcttgtgtgcgctccatccagctcgatgggctggtgtggggagccagtaagcttgtccccgtcggatacggaatccgaaagctccagattcaatgtgttgtcgaggatgacaaagttggaactgacctgttagaagaggagattacaaagtttgaagaacatgttcaaagtgtggacatagcggcgtttaataaaatctag

SEQ ID NO: 74617 - DNA, 192 bp, Artificial Sequence
  derived and/or modified sequence
atggccaccaatttcctagcccacgagaaaatctggttcgataaattcaagtacgacgatgctgaacggaggttctacgagcagatgaacgggccagtggctggcgcttctagacaggagaatggcgctagtgttatactgagggatatagcaagagccagagaaaacattcagaagagccttgcagggtag

SEQ ID NO: 74618 - DNA, 789 bp, Artificial Sequence
  derived and/or modified sequence
atggccaccaatttcttggctcacgaaaaaatttggttcgacaaattcaaatatgacgacgccgagcggaggttctatgagcagatgaacggtccggtggctggtgcttcccgacaggagaacggcgcatcggtcatcttgcgtgacatcgcgcgagccagagaaaacattcagaaaagccttgccggttcttctggacctggagcatctagcggaacaagcggtgaccatgtggttcaagagctccaacaggcaatttccaagctggaggctcggcttaatgtgttagaaaaaagtagccccggacacagggctacagcgccacagacacagcacgtgtccccaatgagacaggtggagccacccgctaaaaagccagccacgcccgcagaggacgacgaggacgatgacattgatctgttcggctctgataacgaagaggaagacaaagaggcagctcagctccgggaggagcgcctccgacagtacgccgagaagaaagccaagaaaccagctctggtggctaaatcctcaattttgctggacgtgaagccttgggatgatgagacggacatggcgcagttagaggcatgcgtgcggtcaatccagcttgatggactcgtttggggtgctagcaaacttgtccccgtgggttacggaatcaggaagctgcaaattcagtgcgtggttgaagacgacaaagtcggcacagacctacttgaagaggagatcaccaagtttgaagaacacgttcagagtgtggatatagccgcattcaataagatttag

SEQ ID NO: 74619 - DNA, 192 bp, Artificial Sequence
  derived and/or modified sequence
atggccaccaacttcctggcccacgagaagatctggttcgacaagttcaagtacgacgacgccgagagaagattctacgagcagatgaacggccccgtggccggcgccagcagacaggagaacggcgccagcgtgatcctgagagacatcgccagagccagagagaacatccagaagagcctggccggctag

SEQ ID NO: 74620 - DNA, 789 bp, Artificial Sequence
  derived and/or modified sequence
atggccaccaacttcctggcccacgagaagatctggttcgacaagttcaagtacgacgacgccgagagaagattctacgagcagatgaacggccccgtggccggcgccagcagacaggagaacggcgccagcgtgatcctgagagacatcgccagagccagagagaacatccagaagagcctggccggcagcagcggccccggcgccagcagcggcaccagcggcgaccacgtggtgcaggagctgcagcaggccatcagcaagctggaggccagactgaacgtgctggagaagagcagccccggccacagagccaccgccccccagacccagcacgtgagccccatgagacaggtggagccccccgccaagaagcccgccacccccgccgaggacgacgaggacgacgacatcgacctgttcggcagcgacaacgaggaggaggacaaggaggccgcccagctgagagaggagagactgagacagtacgccgagaagaaggccaagaagcccgccctggtggccaagagcagcatcctgctggacgtgaagccctgggacgacgagaccgacatggcccagctggaggcctgcgtgagaagcatccagctggacggcctggtgtggggcgccagcaagctggtgcccgtgggctacggcatcagaaagctgcagatccagtgcgtggtggaggacgacaaggtgggcaccgacctgctggaggaggagatcaccaagttcgaggagcacgtgcagagcgtggacatcgccgccttcaacaagatctag

SEQ ID NO: 74621 - DNA, 770 bp, Artificial Sequence
  derived and/or modified sequence
cgtccgccgattcctcctccttggtcgccgcgtccttggctggcgtatgtgtggagacctccaggccgtgcagcaccttggtggccacagctctccaggatgtcctcaccttcctcagggccctgccctcctgacctggagtgttctggaaagctcctcctgagcttggataaactgcaggagcgaaggggctgaccgtttgtcgggacgcagttgaaagagtcgctgtgtcctgctccgggctctcctgctggagaggagaggcttgcacgtgcctgtcgtctgcgcaagctttgaagctcagacttggtctctgttaggagagatggtgcgctgcgtccggcagggcctgcctaggctccaactgacagtaatcccaagagctcccctttcaggggatgacggagtgacgtcacctgtgtggactcagctgccacctgggattgtggtggcggcgggtctgtctggcgctcagcttccatctccaccagtgtcacctccacaccacctcgccaagcagcttctggaaaggcccccggccgccccgggctgacctgctgctgtgtctgacccgcagaaaaatggctacaaacttcctagcacatgagaagatctggttcgacaagttcaaatatgacgacgcagaaaggagattctacgagcagatgaacgggcctgtggcaggtgcctcccgccaggagaacggcgccagcgtgatcctccgtgacattgcgagagccagagagaacatccagaaatccctggctgga

SEQ ID NO: 74622 - DNA, 926 bp, Artificial Sequence
  derived and/or modified sequence
ccctttcatcagtcttcccgcgtccgccgattcctcctccttggtcgccgcgtccttggctggcgtcagaaaaatggctacaaacttcctagcacatgagaagatctggttcgacaagttcaaatatgacgacgcagaaaggagattctacgagcagatgaacgggcctgtggcaggtgcctcccgccaggagaacggcgccagcgtgatcctccgtgacattgcgagagccagagagaacatccagaaatccctggctggaagctcaggccccggggcctccagcggcaccagcggagaccacgtggtacaggagctgcagcaggccatctccaagctggaggcccggctgaacgtgctggagaagagctcgcctggccaccgggccacggccccacagacccagcacgtatctcccatgcgccaagtggagcccccagccaagaagccagccacaccagcagaggatgacgaggatgatgacattgacctgtttggcagtgacaatgaggaggaggacaaggaggcggcacagctgcgggaggagcggctacggcagtacgcggagaagaaggccaagaagcctgcactggtggccaagtcctccatcctgctggatgtcaagccttgggatgatgagacggacatggcccagctggaggcctgtgtgcgctctatccagctggacgggctggtctggggggcttccaagctggtgcccgtgggctacggtatccggaagctacagattcagtgtgtggtggaggacgacaaggtggggacagacttgctggaggaggagatcaccaagtttgaggagcacgtgcagagtgtcgatatcgcagctttcaacaagatctgaagcctgagtgtgtgtacgtgcgcgcgtgcgtgaggccctgccacgattaaagactgagaccggc

SEQ ID NO: 74623 - DNA, 805 bp, Artificial Sequence
  derived and/or modified sequence
cagactgctgtgctagcaatcagtgagactccgtgggcgtaggaccctctgagccaggtgcgggatataatcttgtggtgcgccgttttttaagccggtccgaaaagcgcaatattcgggtgggagtgacccgatttcccagctcagaacctgaggacgcagccatggagcggtcggccttcatggagctggatgctgggagcaggctggtgatgcatctccgcgagtggccagccctgctggtcagcagcacgggctggacagagtttgaacaacttactcttgatggacacaaccttccttctcttgtctgtgtgataacagggtcggtggacctgggtgtctgtctgcacatgtcctccagtggcctggacctgcccatgaaggtggtggacatgttcgggtgctgtttgcctgtgtgtgccgtgaacttcaagtgtttacatgagctggtgaaacatgaagaaaatggcctggtctttgaggactcagaggaactggcagctctgcagatgcttttctcaaactttcctgatcctgcaggcaagctaaaccagttttggaagaacctgcgggagtcgcagcagctccgatgggatgagagctgggtgcagactgtgctccctttggttatggacatacaactcctgggccagaggctaaaaccccgggacccctgctgtccttcccgcagcttcttctcggagtctcagggcaaacccttttgagcagcgcctcccagtggccagaagctgaaatgacggcagtggtgccgcctggtgaatgaattggttctgtgacccgg

SEQ ID NO: 74624 - protein, 1069 aa, Artificial Sequence
  derived and/or modified sequence
MVVPEKEQSWIPKIFKKKTCTTFIVDSTDPGGTLCQCGRPRTAHPAVAMEDAFGAAVVTVWDSDAHTTEKPTDAYGELDFTGAGRKHSNFLRLSDRTDPAAVYSLVTRTWGFRAPNLVVSVLGGSGGPVLQTWLQDLLRRGLVRAAQSTGAWIVTGGLHTGIGRHVGVAVRDHQMASTGGTKVVAMGVAPWGVVRNRDTLINPKGSFPARYRWRGDPEDGVQFPLDYNYSAFFLVDDGTHGCLGGENRFRLRLESYISQQKTGVGGTGIDIPVLLLLIDGDEKMLTRIENATQAQLPCLLVAGSGGAADCLAETLEDTLAPGSGGARQGEARDRIRRFFPKGDLEVLQAQVERIMTRKELLTVYSSEDGSEEFETIVLKALVKACGSSEASAYLDELRLAVAWNRVDIAQSELFRGDIQWRSFHLEASLMDALLNDRPEFVRLLISHGLSLGHFLTPMRLAQLYSAAPSNSLIRNLLDQASHSAGTKAPALKGGAAELRPPDVGHVLRMLLGKMCAPRYPSGGAWDPHPGQGFGESMYLLSDKATSPLSLDAGLGQAPWSDLLLWALLLNRAQMAMYFWEMGSNAVSSALGACLLLRVMARLEPDAEEAARRKDLAFKFEGMGVDLFGECYRSSEVRAARLLLRRCPLWGDATCLQLAMQADARAFFAQDGVQSLLTQKWWGDMASTTPIWALVLAFFCPPLIYTRLITFRKSEEEPTREELEFDMDSVINGEGPVGLTPGLYHLGRTVLCIDFMVFTVRLLHIFTVNKQLGPKIVIVSKMMKDVFFFLFFLGVWLVAYGVATEGLLRPRDSDFPSILRRVFYRPYLQIFGQIPQEDMDVALMEHSNCSSEPGFWAHPPGAQAGTCVSQYANWLVVLLLVIFLLVANILLVNLLIAMFSYTFGKVQGNSDLYWKAQRYRLIREFHSRPALAPPFIVISHLRLLLRQLCRRPRSPQPSSPALEHFRVYLSKEAERKLLTWESVHKENFLLARARDKRESDSERLKRTSQKVDLALKQLGHIREYEQRLKVLEREVQQCSRVLGWVAEALSRSALLPPGGPPPPDLPGSKD

SEQ ID NO: 74625 - DNA, 3210 bp, Artificial Sequence
  derived and/or modified sequence
atggtggtgcccgagaaggagcagagctggatccccaagatcttcaagaagaagacctgcaccaccttcatcgtggacagcaccgaccccggcggcaccctgtgccagtgcggcagacccagaaccgcccaccccgccgtggccatggaggacgccttcggcgccgccgtggtgaccgtgtgggacagcgacgcccacaccaccgagaagcccaccgacgcctacggcgagctggacttcaccggcgccggcagaaagcacagcaacttcctgagactgagcgacagaaccgaccccgccgccgtgtacagcctggtgaccagaacctggggcttcagagcccccaacctggtggtgagcgtgctgggcggcagcggcggccccgtgctgcagacctggctgcaggacctgctgagaagaggcctggtgagagccgcccagagcaccggcgcctggatcgtgaccggcggcctgcacaccggcatcggcagacacgtgggcgtggccgtgagagaccaccagatggccagcaccggcggcaccaaggtggtggccatgggcgtggccccctggggcgtggtgagaaacagagacaccctgatcaaccccaagggcagcttccccgccagatacagatggagaggcgaccccgaggacggcgtgcagttccccctggactacaactacagcgccttcttcctggtggacgacggcacccacggctgcctgggcggcgagaacagattcagactgagactggagagctacatcagccagcagaagaccggcgtgggcggcaccggcatcgacatccccgtgctgctgctgctgatcgacggcgacgagaagatgctgaccagaatcgagaacgccacccaggcccagctgccctgcctgctggtggccggcagcggcggcgccgccgactgcctggccgagaccctggaggacaccctggcccccggcagcggcggcgccagacagggcgaggccagagacagaatcagaagattcttccccaagggcgacctggaggtgctgcaggcccaggtggagagaatcatgaccagaaaggagctgctgaccgtgtacagcagcgaggacggcagcgaggagttcgagaccatcgtgctgaaggccctggtgaaggcctgcggcagcagcgaggccagcgcctacctggacgagctgagactggccgtggcctggaacagagtggacatcgcccagagcgagctgttcagaggcgacatccagtggagaagcttccacctggaggccagcctgatggacgccctgctgaacgacagacccgagttcgtgagactgctgatcagccacggcctgagcctgggccacttcctgacccccatgagactggcccagctgtacagcgccgcccccagcaacagcctgatcagaaacctgctggaccaggccagccacagcgccggcaccaaggcccccgccctgaagggcggcgccgccgagctgagaccccccgacgtgggccacgtgctgagaatgctgctgggcaagatgtgcgcccccagataccccagcggcggcgcctgggacccccaccccggccagggcttcggcgagagcatgtacctgctgagcgacaaggccaccagccccctgagcctggacgccggcctgggccaggccccctggagcgacctgctgctgtgggccctgctgctgaacagagcccagatggccatgtacttctgggagatgggcagcaacgccgtgagcagcgccctgggcgcctgcctgctgctgagagtgatggccagactggagcccgacgccgaggaggccgccagaagaaaggacctggccttcaagttcgagggcatgggcgtggacctgttcggcgagtgctacagaagcagcgaggtgagagccgccagactgctgctgagaagatgccccctgtggggcgacgccacctgcctgcagctggccatgcaggccgacgccagagccttcttcgcccaggacggcgtgcagagcctgctgacccagaagtggtggggcgacatggccagcaccacccccatctgggccctggtgctggccttcttctgcccccccctgatctacaccagactgatcaccttcagaaagagcgaggaggagcccaccagagaggagctggagttcgacatggacagcgtgatcaacggcgagggccccgtgggcctgacccccggcctgtaccacctgggcagaaccgtgctgtgcatcgacttcatggtgttcaccgtgagactgctgcacatcttcaccgtgaacaagcagctgggccccaagatcgtgatcgtgagcaagatgatgaaggacgtgttcttcttcctgttcttcctgggcgtgtggctggtggcctacggcgtggccaccgagggcctgctgagacccagagacagcgacttccccagcatcctgagaagagtgttctacagaccctacctgcagatcttcggccagatcccccaggaggacatggacgtggccctgatggagcacagcaactgcagcagcgagcccggcttctgggcccacccccccggcgcccaggccggcacctgcgtgagccagtacgccaactggctggtggtgctgctgctggtgatcttcctgctggtggccaacatcctgctggtgaacctgctgatcgccatgttcagctacaccttcggcaaggtgcagggcaacagcgacctgtactggaaggcccagagatacagactgatcagagagttccacagcagacccgccctggccccccccttcatcgtgatcagccacctgagactgctgctgagacagctgtgcagaagacccagaagcccccagcccagcagccccgccctggagcacttcagagtgtacctgagcaaggaggccgagagaaagctgctgacctgggagagcgtgcacaaggagaacttcctgctggccagagccagagacaagagagagagcgacagcgagagactgaagagaaccagccagaaggtggacctggccctgaagcagctgggccacatcagagagtacgagcagagactgaaggtgctggagagagaggtgcagcagtgcagcagagtgctgggctgggtggccgaggccctgagcagaagcgccctgctgccccccggcggcccccccccccccgacctgcccggcagcaaggactag

SEQ ID NO: 74626 - DNA, 3210 bp, Artificial Sequence
  derived and/or modified sequence
atggttgtgcccgagaaggagcagagttggattcccaaaatttttaagaagaaaacctgcacgacctttatagtcgacagcaccgatcctggcggtacattgtgccagtgcggacgaccgcgtactgcgcacccggccgtggccatggaggacgcctttggcgctgccgtagtcaccgtgtgggatagcgacgcgcatacaaccgaaaagccaactgacgcatacggcgagcttgactttacgggagccggccggaagcattcgaatttcctgcgcctttctgatcgtactgacccagccgcagtctattctctggtgactcgaacctgggggttccgtgccccaaatctggttgtctccgtcttaggcggctctggtggccccgtcctgcagacttggttacaggatctcctgaggcggggactggtccgggctgctcagtcaacgggggcctggattgtgacagggggacttcacactggtattggccggcatgtgggagtcgccgtgagggatcaccaaatggcttctacaggcgggaccaaggtagtggctatgggagtggccccgtggggggtggttcggaatcgtgacactctgattaaccctaagggttcgttccctgcccggtatagatggcgcggcgatccagaggacggggtccaatttcccctcgattacaactacagtgcttttttcctcgtcgacgacggcacgcatggctgtctgggaggggagaacagattccgcctgcgcctcgaatcttatatttcacagcagaagacaggagtaggcgggacaggaatagacatacctgtgctgcttctcctaattgatggagacgagaaaatgctcacacgcatcgagaacgccacacaggcacagctgccttgcctgctggtcgccgggtcgggcggcgccgcagactgtctggctgaaactctggaagataccttggcaccggggagtggtggagctcgtcaaggcgaggctcgcgaccgtattaggcggttctttcccaagggggacctggaggttctgcaggctcaggtcgaacgcatcatgacaaggaaggaattactaaccgtttattcctcagaagacggcagtgaggagttcgagacaatagtgctgaaagcgcttgtgaaggcctgcggctcatctgaggcaagtgcctatcttgacgaattgaggctggctgtagcctggaacagagtagacatcgcacaaagcgaactctttcgcggtgacatccagtggaggtcattccacctcgaagcatcacttatggatgcgctcctgaacgaccgcccggagttcgtgaggcttttaatatctcatggactttcccttgggcactttttgacacccatgcggctcgcccaactctattccgctgcccctagtaattccctaattcgcaatctgctggaccaagccagccattccgctggtacaaaagcccctgctttgaaaggtggtgccgccgagctgcggcccccagatgtgggacacgtactgagaatgttgctaggaaagatgtgtgctccaaggtacccatccggcggcgcttgggaccctcacccaggtcagggtttcggagaatcaatgtacttactgtcagataaagccacctcaccactgtcactggacgctgggctggggcaagccccttggagcgacctcctcttgtgggctctcctccttaacagggctcagatggcaatgtacttctgggagatgggctctaatgctgtgtcatcagccctgggagcctgtctgctgctgagggtgatggcccgcctcgaacctgacgctgaggaggctgcaagacggaaggacctggcctttaagttcgaaggaatgggagtggatctgttcggtgaatgttaccgatcctcggaggtgagagcagccagacttctgctccgacgctgtcccctgtggggtgacgcaacctgcctacaactcgcaatgcaggctgacgccagagctttttttgcgcaagatggcgtgcagagtctgctgacgcaaaagtggtggggagatatggccagcacaacccccatctgggctctggtgctcgcttttttctgtccccccctgatatacaccaggctgatcacatttaggaaaagtgaggaagaacctacccgggaggagctggaatttgacatggattccgtgatcaatggggagggccctgtgggattgacccctggcctttaccatttgggaagaaccgtgttatgtattgatttcatggtgtttacggtccgcctccttcatatcttcacggtgaataagcaattgggccctaagatcgtgatcgtttctaaaatgatgaaagacgtgtttttcttcctctttttcctaggagtgtggctcgttgcatacggggtggccaccgaaggcctcctgcgcccacgggactcggattttccttctattcttagaagagtcttttatcgaccatatctgcaaatatttggccagatcccacaggaggatatggacgtggccctgatggaacacagcaactgcagcagcgaacccgggttttgggcgcacccccctggagcgcaggccggcacatgtgtttctcaatatgctaattggcttgtggttctgttgctcgtcatctttttattggttgccaacatcctgttggttaatcttctgattgccatgttcagctataccttcggaaaagtccagggtaattcagatctctactggaaagcccagaggtataggctgatccgggagttccacagtaggccggccctggcacctcctttcatcgttatcagtcacctgcgcctcctgttgagacaactatgtcggaggccaagatccccacagcctagctcacccgctctggaacatttcagggtgtacctgagtaaggaggctgagaggaaactgctcacttgggagtccgtccacaaggagaactttctacttgctcgtgccagggacaaacgtgaatccgacagcgagcggctgaagcgaacaagtcagaaagtggatctggcccttaagcaattgggacatattagggaatacgagcagaggttaaaagtgctcgaacgtgaggtccagcaatgtagccgcgtattgggatgggtggcggaggcgctgtcacgaagtgccctgctcccacccggtggccctccacccccagatctgccaggaagtaaggattag

SEQ ID NO: 74627 - DNA, 3210 bp, Artificial Sequence
  derived and/or modified sequence
atggtggtgcctgagaaggagcagagctggatccccaagatcttcaagaagaagacctgcaccaccttcatcgtggacagcacagaccccggcggcaccctgtgccagtgtggccggcccaggacagcccaccctgctgtggccatggaggatgcctttggagctgctgtggtgacagtgtgggacagtgatgcccacaccacagagaagcccacagatgcctatggagagctggacttcaccggggccggcaggaagcacagcaacttcctgcggctgagtgacagaacagatcctgctgctgtgtacagcctggtgaccaggacctggggcttccgggcccccaacctggtggtgtctgtgctgggcggcagcggcggccctgtgctgcagacctggctgcaggacctgctgcggcggggcctggtgcgggccgcccagagcactggagcctggatcgtgactggaggcctgcacacaggcatcggcagacatgtgggcgtggccgtgcgggaccaccagatggccagcactggaggcaccaaggtggtggccatgggcgtggccccctggggcgtggtgaggaacagagacaccctcatcaaccccaagggcagcttccctgcccgctaccgctggaggggggaccctgaagatggagtgcagttccccctggactacaactacagcgccttcttcctggtggatgatggcacccacggctgcctgggcggggagaaccgcttccggctgcggctggagagctacatcagccagcagaagacaggagtgggcggcactggaattgacatccctgtgctgctgctgctgattgatggagatgagaagatgctgaccagaattgaaaatgccacccaggcccagctgccctgcctgctggtggccggcagcggcggcgctgctgactgcctggccgagaccctggaggacaccctggcccctggcagcggcggggcccggcagggcgaggcccgggaccgcatccgccgcttcttccccaagggggacctggaggtgctgcaggcccaggtggagcgcatcatgaccaggaaggagctgctgactgtgtacagcagtgaagatggcagcgaggagtttgagaccatcgtgctgaaggccctggtgaaggcctgtggcagcagcgaggccagcgcctacctggatgagctgcggctggccgtggcctggaacagagtggacatcgcccagagcgagctgttccggggggacatccagtggaggagcttccacctggaggccagcctgatggatgccctgctgaatgacaggcctgagtttgtgcggctgctgatcagccacggcctgagcctgggccacttcctgacccccatgaggctggcccagctgtacagcgctgcccccagcaacagcctcatccggaacctgctggaccaggccagccacagcgctggcaccaaggccccagccctgaagggcggcgctgctgagctgcggcccccagatgtgggccacgtgctgaggatgctgctgggcaagatgtgtgccccccgctaccccagcggcggggcctgggacccccaccctggccagggctttggagagagcatgtacctgctgagtgacaaggccaccagccccctgagcctggatgctggcctgggccaggccccctggagcgacctgctgctgtgggccctgctgctgaacagagcccagatggccatgtacttctgggagatgggcagcaatgctgtgagcagcgccctgggcgcctgcctgctgctgcgggtgatggcccggctggagccagatgctgaggaggccgcccggaggaaggacctggccttcaagtttgagggcatgggcgtggacctgtttggagagtgctaccgcagcagcgaggtgcgggccgcccggctgctgctgcggcgctgccccctgtggggagatgccacctgcctgcagctggccatgcaggctgatgcccgggccttctttgcccaggatggagtgcagagcctgctgacccagaagtggtggggagacatggccagcaccacccccatctgggccctggtgctggccttcttctgccccccactcatctacaccaggctcatcaccttcaggaagtctgaggaggagcccacccgggaggagctggagtttgacatggacagcgtcatcaatggagagggccctgtgggcctgaccccaggcctgtaccacctgggccgcacagtgctgtgcatcgacttcatggtgttcaccgtgcggctgctgcacatcttcaccgtgaacaagcagctgggccccaagatcgtgattgtgtccaagatgatgaaggatgtgttcttcttcctgttcttcctgggcgtgtggctggtggcctatggagtggccacagagggcctgctgcggccccgggacagcgacttccccagcatcctgcggcgggtcttctaccggccctacctgcagatcttcggccagatcccccaggaggacatggatgtggccctgatggagcacagcaactgcagcagcgagcccggcttctgggcccaccccccaggggcccaggccggcacctgtgtgtcccagtatgccaactggctggtggtgctgctgctggtgatcttcctgctggtggccaacatcctgctggtgaacctgctgattgccatgttctcctacaccttcggcaaggtgcagggcaacagcgacctgtactggaaggcccagcgctaccgcctcatccgggagttccacagcaggcctgccctggccccacccttcatcgtcatcagccacctgcggctgctgctgcggcagctgtgcagaagacccaggagcccccagcccagcagccctgccctggagcacttccgggtgtacctgagcaaggaggccgagaggaagctgctgacctgggagagcgtgcacaaggagaacttcctgctggcccgggcccgggacaagcgggagagtgacagcgagcggctgaagaggaccagccagaaggtggacctggccctgaagcagctgggccacatccgggagtatgagcagaggctgaaggtgctggagcgggaggtgcagcagtgcagccgggtgctgggctgggtggccgaggccctgagccgcagcgccctgctgcccccaggcggccccccacctccagacctgcccggcagcaaggactag

SEQ ID NO: 74628 - DNA, 3210 bp, Artificial Sequence
  derived and/or modified sequence
atggtggtgcccgagaaggagcagagctggatccccaagatcttcaaaaagaagacctgtacaactttcatagttgatagtactgacccaggaggaaccctgtgtcaatgcggcagaccccgaactgcacaccctgcggtggcaatggaggatgcatttggagccgctgtcgtgaccgtgtgggattccgacgcccacaccaccgaaaaacctactgacgcctacggagaactagacttcaccggcgctggacgcaagcattccaattttttgaggctgtcagaccgcacagatcctgcagccgtgtacagtctggtgacaaggacgtgggggtttcgcgcccctaacctggtggtatcggtgctgggcggctctgggggtccagttctccaaacctggttacaggaccttttaaggagaggccttgtccgggccgcccagagcactggagcatggatcgtcacaggaggcctccataccggcattggcagacacgtgggggtcgccgtaagggatcaccagatggcttctacaggcggaacaaaggtggtcgccatgggagtggcgccctggggagtggtccgaaatcgtgacacgctgataaaccctaaaggtagtttccccgcgcgctaccgctggcggggtgatccagaggacggcgtccagttccccctggattataactacagtgcatttttcttagtggacgatggcacccacggatgcctgggcggcgaaaatagattccgactgcggcttgaatcttacattagtcagcaaaaaacaggggttggaggtactgggattgacatccccgtgctgcttctcctgatcgacggcgatgaaaaaatgctgacacgtatcgaaaatgctacccaggctcagctgccttgcctgttggtggctggatccggcggggcagctgactgtcttgcagaaaccttggaggacactttagctcccgggtccggcggagcccggcagggcgaagctcgggaccgcattcgcaggttcttcccaaaaggagaccttgaagtgctgcaggctcaggtggaaagaatcatgaccaggaaggaactcctgaccgtttatagttcagaggatggttccgaagagttcgagacaattgtgctgaaggccctggttaaggcatgtgggagctcagaggcttcagcctacttggatgagctgaggttagccgtcgcatggaaccgggtggacatagcccaatcagaactgttccgcggcgacatacaatggcgaagtttccacttggaagcatcgctcatggatgccctgctgaacgatagacccgagttcgtgaggctccttatttcccatggtctgagccttggacactttcttacccctatgcgtctggcgcagctatacagcgctgcgccctctaacagtctcattcgtaatctgctggatcaggcttctcattcagcagggacgaaggcgccagcgctcaaaggaggtgccgccgagctcagacccccagacgtgggacatgttctcaggatgctgctgggcaagatgtgcgcccccagatatccatccgggggagcatgggacccccaccctggacagggctttggcgagagcatgtacctcttaagcgacaaggctacaagtccgctatccttggacgctggactgggccaggccccatggtcagacctgttgctttgggcactgttgttgaaccgcgctcagatggcgatgtacttttgggaaatgggctctaatgccgtttcaagcgcgctgggggcatgcctgttgcttcgggttatggcaaggctcgagcctgatgcagaggaggcagcacggagaaaagacctggcctttaagttcgaaggcatgggggtagacttgttcggcgagtgttatagatcctctgaggttagggcggcacggcttttactgcggagatgccctctgtggggggacgccacctgtcttcaattggctatgcaagcagatgctagggcctttttcgcccaggatggcgtccagagccttctgacccagaagtggtggggtgacatggcctctactaccccaatttgggcactcgtactggccttcttttgcccccccctgatctacacccggctgattactttccggaaatcagaggaggagccaacccgggaagagctggagttcgatatggacagtgtcatcaacggagaaggtcccgtgggcctgacgcccggactttaccacctggggcggactgtcctctgcattgattttatggtgttcaccgttaggctgctccacatcttcactgtgaacaaacagctcggacctaagatcgtgattgtctcaaaaatgatgaaagatgtctttttttttctgtttttcctcggagtatggttggtcgcatacggcgtagccactgagggtctgctcaggccaagagatagtgatttcccctctatcttgcgcagagttttctaccggccctatctgcagatttttggccaaatcccacaggaggacatggatgtggcactgatggaacattccaactgtagcagcgagccagggttttgggcgcaccctccaggcgcccaagccggtacttgcgtcagtcagtatgccaattggctagttgtgctgttgcttgttatatttctgttggttgcaaatatcctgctagttaatttgttaattgcaatgttttcatataccttcggcaaggttcagggtaactccgacctgtactggaaagctcagaggtacagattgatccgagaattccacagccggcctgcactggcacccccctttattgtcataagtcacttgaggctcctcctgcggcagctctgtaggcggcccaggtctccgcagccaagcagcccggcgcttgagcattttcgcgtatacctctctaaagaggcagagcgtaagctgctcacctgggaatccgtgcataaagagaacttccttctggccagagcgagagacaagcgggagtccgattcagaaaggttgaagcggaccagtcagaaggtggacctggccctcaagcaactgggccatatccgtgaatatgagcagaggcttaaggtgctggagagagaagtgcagcagtgtagccgcgtgctagggtgggtagctgaggctctgtcccggtccgccctcctccccccaggcggaccacccccacccgatctcccaggctcaaaggattag

SEQ ID NO: 74629 - DNA, 3210 bp, Artificial Sequence
  derived and/or modified sequence
atggtcgtgccggagaaagagcagtcgtggatccctaagatctttaagaagaagacatgtaccacttttatcgtggatagcactgatcccggtggaaccttatgccagtgtggtaggcctagaacagctcatcccgcagtcgccatggaggatgctttcggagccgctgtggtgaccgtctgggactctgatgcacacactactgagaaacccactgatgcctacggtgagctggacttcacaggagctggtcgcaagcacagcaattttctaagactgagtgaccggactgatcctgccgctgtatattctctcgtcaccagaacctgggggttccgggcaccaaatttggtcgtgagcgttctcggtggcagcgggggacctgttctccagacatggctccaagatttgcttcggagaggcctggttcgtgctgctcagtctaccggagcttggattgttactggcggactgcacacaggaataggcaggcatgtgggtgtagccgtcagggaccaccagatggccagcaccggcggaactaaggttgtcgcaatgggcgtagcgccttggggcgtagtgagaaatagagacacccttataaaccctaagggcagctttccagccagataccgctggaggggggatcccgaggatggggtccaattcccgttagactataactactctgccttctttctggtcgacgacgggacacacggttgtctggggggagaaaaccgattccgattgcgattggaatcatatatctctcagcagaagacaggagtggggggaactggtattgatatccccgtgctgctgttgcttatagatggtgatgaaaagatgctaactagaattgagaacgccacccaggcacaattgccctgcctgctggttgcgggttccggtggcgctgcagactgcttggccgaaacactagaggatacgctggcaccgggatctggtggcgcacgacagggcgaggcccgagatcgtatccgtcgtttttttcctaagggggatctcgaagtacttcaggcgcaggtggaacgcattatgaccaggaaagagctgctgacggtgtacagcagcgaagatggctcggaggaatttgaaactatcgtactcaaagctttagtgaaggcctgcggctcctccgaagcatccgcctatctggatgagttacgactggccgtcgcatggaatagggtggatatagcccaatcagagttatttcgtggagatattcagtggagaagtttccacctagaagccagcctcatggacgccctgctcaacgatcgcccagaatttgttcggcttctgatctcacacgggttaagcctgggccacttcctgactcccatgaggctggcacaactgtacagcgcagctccctctaatagcttgatccgtaacctgcttgatcaagctagccatagcgctggaacaaaggctccggctctgaaagggggtgctgccgagctgagaccacctgacgtgggacacgtgctcagaatgctcctgggaaaaatgtgtgccccacggtaccctagcggaggtgcctgggacccacaccccggtcagggctttggcgaaagcatgtatctgctctccgataaagccacatccccgctgtccctggacgcgggactgggccaggctccttggagtgacctgcttctctgggccctgctcctgaatcgcgcacagatggccatgtatttttgggagatggggtctaatgccgtttcatccgctctgggggcatgtctgcttctccgggtaatggcccgattagaacctgacgcagaggaagccgcaagacgtaaggatttggcgtttaagttcgagggtatgggtgtagacctcttcggagaatgttatcgatcttccgaggtgcgggcagcccgtctcctgttgaggcggtgccccctgtggggagatgcaacctgtctgcaactggcaatgcaggctgatgcaagggcttttttcgcgcaggatggggtgcagtcactgctgacacaaaagtggtggggggacatggcctctactacgcccatttgggcactagtccttgccttcttttgtcccccactaatctatacccgcctcattacgtttcgcaagtctgaagaggagccaacccgggaggagctcgagttcgacatggattctgtgatcaacggcgaggggcctgtggggctgaccccaggcctgtatcatctgggtaggaccgtcctgtgcattgactttatggtgttcacagtcaggttactccatatctttacggtgaacaaacagttgggacccaaaatcgtgatagtctctaaaatgatgaaggatgtattcttttttctgttctttctgggagtttggctggtggcttacggggtggcgaccgaaggccttctgcgcccacgagactcagatttcccatccattctccgcagagttttttacagaccatacctccagatttttggacaaattccacaggaagacatggatgtggccctgatggaacattccaactgctccagtgaacctgggttttgggcccacccccctggggcacaggcgggaacttgtgtgtcacagtacgctaattggctcgttgtacttctgctcgtgatctttttgcttgtggctaacattctgttggtcaacctactcattgctatgttcagttatacttttgggaaagtacagggaaattctgacctttattggaaagcgcagaggtataggctgatccgggagttccacagtagaccagcccttgcacccccatttatcgtgattagtcacctgagattgcttctcagacagctttgtcgacgccctcggagcccacagcctagctcaccagctctcgaacatttccgggtgtatctatcaaaggaggctgagcggaagcttctcacctgggagagtgtgcataaggaaaacttcctgctcgccagagctcgcgataaacgcgagtcagacagcgagcgcctgaagcgcacttctcagaaggtagatctggctcttaaacaactgggccatattagagagtacgagcagcgtctgaaggtcctggaacgagaggtgcaacagtgctcacgggtgcttggatgggtggcagaggctctctctcgtagtgcactcctgcctccgggagggccacccccacctgacctgcccggttctaaggactag

SEQ ID NO: 74630 - DNA, 3618 bp, Artificial Sequence
  derived and/or modified sequence
ggtctggaagcagagccggcggagggagcgccggggccctgggctgcaggaggttgcggcggccgcggcagcatggtggtgccggagaaggagcagagctggatccccaagatcttcaagaagaagacctgcacgacgttcatagttgactccacagatccgggagggaccttgtgccagtgtgggcgcccccggaccgcccaccccgcagtggccatggaggatgccttcggggcagccgtggtgaccgtgtgggacagcgatgcacacaccacggagaagcccaccgatgcctacggagagctggacttcacgggggccggccgcaagcacagcaatttcctccggctctctgaccgaacggatccagctgcagtttatagtctggtcacacgcacatggggcttccgtgccccgaacctggtggtgtcagtgctggggggatcggggggccccgtcctccagacctggctgcaggacctgctgcgtcgtgggctggtgcgggctgcccagagcacaggagcctggattgtcactgggggtctgcacacgggcatcggccggcatgttggtgtggctgtacgggaccatcagatggccagcactgggggcaccaaggtggtggccatgggtgtggccccctggggtgtggtccggaatagagacaccctcatcaaccccaagggctcgttccctgcgaggtaccggtggcgcggtgacccggaggacggggtccagtttcccctggactacaactactcggccttcttcctggtggacgacggcacacacggctgcctggggggcgagaaccgcttccgcttgcgcctggagtcctacatctcacagcagaagacgggcgtgggagggactggaattgacatccctgtcctgctcctcctgattgatggtgatgagaagatgttgacgcgaatagagaacgccacccaggctcagctcccatgtctcctcgtggctggctcagggggagctgcggactgcctggcggagaccctggaagacactctggccccagggagtgggggagccaggcaaggcgaagcccgagatcgaatcaggcgtttctttcccaaaggggaccttgaggtcctgcaggcccaggtggagaggattatgacccggaaggagctcctgacagtctattcttctgaggatgggtctgaggaattcgagaccatagttttgaaggcccttgtgaaggcctgtgggagctcggaggcctcagcctacctggatgagctgcgtttggctgtggcttggaaccgcgtggacattgcccagagtgaactctttcggggggacatccaatggcggtccttccatctcgaagcttccctcatggacgccctgctgaatgaccggcctgagttcgtgcgcttgctcatttcccacggcctcagcctgggccacttcctgaccccgatgcgcctggcccaactctacagcgcggcgccctccaactcgctcatccgcaaccttttggaccaggcgtcccacagcgcaggcaccaaagccccagccctaaaagggggagctgcggagctccggccccctgacgtggggcatgtgctgaggatgctgctggggaagatgtgcgcgccgaggtacccctccgggggcgcctgggaccctcacccaggccagggcttcggggagagcatgtatctgctctcggacaaggccacctcgccgctctcgctggatgctggcctcgggcaggccccctggagcgacctgcttctttgggcactgttgctgaacagggcacagatggccatgtacttctgggagatgggttccaatgcagtttcctcagctcttggggcctgtttgctgctccgggtgatggcacgcctggagcctgacgctgaggaggcagcacggaggaaagacctggcgttcaagtttgaggggatgggcgttgacctctttggcgagtgctatcgcagcagtgaggtgagggctgcccgcctcctcctccgtcgctgcccgctctggggggatgccacttgcctccagctggccatgcaagctgacgcccgtgccttctttgcccaggatggggtacagtctctgctgacacagaagtggtggggagatatggccagcactacacccatctgggccctggttctcgccttcttttgccctccactcatctacacccgcctcatcaccttcaggaaatcagaagaggagcccacacgggaggagctagagtttgacatggatagtgtcattaatggggaagggcctgtcgggctgaccccgggtttgtaccacctgggccgcactgtcctctgcatcgacttcatggttttcacggtgcggctgcttcacatcttcacggtcaacaaacagctggggcccaagatcgtcatcgtgagcaagatgatgaaggacgtgttcttcttcctcttcttcctcggcgtgtggctggtagcctatggcgtggccacggaggggctcctgaggccacgggacagtgacttcccaagtatcctgcgccgcgtcttctaccgtccctacctgcagatcttcgggcagattccccaggaggacatggacgtggccctcatggagcacagcaactgctcgtcggagcccggcttctgggcacaccctcctggggcccaggcgggcacctgcgtctcccagtatgccaactggctggtggtgctgctcctcgtcatcttcctgctcgtggccaacatcctgctggtcaacttgctcattgccatgttcagttacacattcggcaaagtacagggcaacagcgatctctactggaaggcgcagcgttaccgcctcatccgggaattccactctcggcccgcgctggccccgccctttatcgtcatctcccacttgcgcctcctgctcaggcaattgtgcaggcgaccccggagcccccagccgtcctccccggccctcgagcatttccgggtttacctttctaaggaagccgagcggaagctgctaacgtgggaatcggtgcataaggagaactttctgctggcacgcgctagggacaagcgggagagcgactccgagcgtctgaagcgcacgtcccagaaggtggacttggcactgaaacagctgggacacatccgcgagtacgaacagcgcctgaaagtgctggagcgggaggtccagcagtgtagccgcgtcctggggtgggtggccgaggccctgagccgctctgccttgctgcccccaggtgggccgccaccccctgacctgcctgggtccaaagactgagccctgctggcggacttcaaggagaagcccccacaggggattttgctcctagagtaaggctcatctgggcctcggcccccgcacctggtggccttgtccttgaggtgagccccatgtccatctgggccactgtcaggaccacctttgggagtgtcatccttacaaaccacagcatgcccggctcctcccagaaccagtcccagcctgggaggatcaaggcctggatcccgggccgttatccatctggaggctgcagggtccttggggtaacagggaccacagacccctcaccactcacagattcctcacactggggaaataaagccatttcagagg

SEQ ID NO: 74631 - protein, 248 aa, Artificial Sequence
  derived and/or modified sequence
MASRWQNMGTSVRRRSLQHQEQLEDSKELQPVVSHQETSVGALGSLCRQFQRRLPLRAVNLNLRAGPSWKRLETPEPGQQGLQAAARSAKSALGAVSQRIQESCQSGTKWLVETQVKARRRKRGAQKGSGSPTHSLSQKSTRLSGAAPAHSAADPWEKEHHRLSVRMGSHAHPLRRSRREAAFRSPYSSTEPLCSPSESDSDLEPVGAGIQHLQKLSQELDEAIMAEERKQALSDRQGFILKDVYASP

SEQ ID NO: 74632 - DNA, 747 bp, Artificial Sequence
  derived and/or modified sequence
atggccagccgctggcagaatatgggaacaagcgtgcgtagaaggtccctccagcatcaggagcagttggaggactccaaagaactgcagcctgtagtgtctcaccaggaaacaagcgtgggtgcactgggctcactgtgccgacagttccagcgtcgactgccactgcgcgcagtgaatctgaacctgcgtgctggcccaagttggaagaggttggaaacgccagagcccggacagcagggtttacaagccgcagcacggtctgctaaatcagcgctcggcgccgtgtctcagcgtatccaagagagttgccaaagtgggacaaagtggcttgtagagacacaggtcaaggcacgacggagaaagcgaggggcacagaaggggagtggcagccccacccacagtctgagccaaaagagtacccgcctgtctggggccgcaccggcacatagtgcagcagatccatgggagaaggagcaccacagactgtcggtgaggatggggtcccatgcccatccgctgagacgatctaggagggaggctgcatttcgatctccctacagcagcactgagcctttgtgttccccctcggaaagtgactccgatttagagcctgttggagcagggatccagcacctgcaaaaactgtcgcaggagctggacgaagcaattatggcagaggagcgtaagcaggccctaagtgatcgacaaggcttcatacttaaagacgtttacgcctccccatag

SEQ ID NO: 74633 - DNA, 747 bp, Artificial Sequence
  derived and/or modified sequence
atggccagccgctggcagaacatgggcacctctgtgagaagaagaagcctgcagcaccaggagcagctggaggacagcaaggagctgcagcctgtggtgagccaccaggagacctctgtgggcgccctgggcagcctgtgccggcagttccagaggcggctgcccctgcgggctgtgaacctgaacctgcgggccggccccagctggaagaggctggagaccccagagcccggccagcagggcctgcaggccgccgcccggagcgccaagagcgccctgggcgctgtgtcccagaggatccaggagagctgccagagcggcaccaagtggctggtggagacccaggtgaaggcccggcggaggaagagaggagcccagaagggcagcggcagccccacccacagcctgagccagaagagcacccggctgagcggggccgccccagcccacagcgctgctgacccctgggagaaggagcaccaccggctgtctgtgaggatgggcagccacgcccaccccctgcggcgcagccggcgggaggccgccttccgcagcccctacagcagcacagagcccctgtgcagccccagcgagagtgacagcgacctggagcctgtgggcgccggcatccagcacctgcagaagctgagccaggagctggatgaggccatcatggccgaggagaggaagcaggccctgagtgaccggcagggcttcatcctgaaggatgtgtatgccagcccctag

SEQ ID NO: 74634 - DNA, 747 bp, Artificial Sequence
  derived and/or modified sequence
atggccagccggtggcagaacatgggcaccagcgtgcggcggcggtccctgcagcaccaagaacaactggaagacagcaaggagttgcagccagtcgtgtcacatcaggagactagcgtcggagctctggggtcgctgtgtaggcaattccaaaggcggttgcctcttcgagcggtcaacctcaatctgcgggcaggtccctcttggaaaaggctggaaacccctgagcctggccagcagggattgcaggccgccgccagatctgctaagagcgccctcggcgcggtctctcaacggatccaggagtcctgtcaatctggcacgaagtggctggtagagacgcaggttaaagcaaggcgccgaaagaggggagcgcagaagggaagcgggagtccgacccactctctgtcccagaaatctactcgcctcagtggcgcagcccccgcgcacagcgccgccgacccttgggaaaaggagcaccacagactcagtgttcggatgggatcgcacgcccaccctctgagacgatccaggcgagaggccgcattccgcagtccatattcaagtacagaacccctgtgctcgccctctgagtcagatagcgatctggagccagtgggggccggaatccagcatttgcagaagctgagtcaggagctggatgaggccattatggccgaggagcgcaagcaggcgctttccgatcgtcaaggattcatcctaaaagacgtctacgcatccccctag

SEQ ID NO: 74635 - DNA, 747 bp, Artificial Sequence
  derived and/or modified sequence
atggcaagccgctggcagaacatgggcacaagtgtccgccgtaggagcctgcaacaccaggagcaactagaggattctaaagagttgcagcccgtggtgtcccaccaggagacgtcggtcggggctctaggatcactctgtaggcagtttcagagaaggctgccgctccgggctgtgaaccttaatctgagggccggaccctcttggaaacgactcgagacaccagaacccggtcagcagggcctgcaggcagccgcacggagtgccaaaagtgctttaggcgctgtaagccagagaatccaagaaagttgccaatctggaaccaagtggctagtggaaacacaagtgaaggcccgacggcgtaagcgcggtgctcagaagggaagcggttcgcccacacatagcctgagccagaaaagcacccgcctgagtggcgctgccccagcccacagtgctgcagatccctgggaaaaagagcaccaccggttgtcagtacgaatggggtctcacgcccaccctcttagacgcagccggagggaagctgcatttcgatcaccatatagctctaccgaacctttatgcagtccatccgaatcagatagcgacttggaacccgtgggggctggcattcaacacctgcagaaactgagtcaagagctggacgaagcgataatggcagaggagcgcaagcaggctctcagcgacaggcaaggctttattctgaaggacgtatatgcttcaccctag

SEQ ID NO: 74636 - DNA, 1948 bp, Artificial Sequence
  derived and/or modified sequence
cgcagagtttcaaatcggctgcggtgggcgaggagcagctgtgctgcggctgtgctcggccttagtggtgtcggggtctagtggacagagaagactcttggccaggcagatggcttctcggtggcagaacatggggacctccgtgcgccggagatctctccagcaccaggagcagctggaggacagcaaggagctgcagcctgtggtcagccatcaggagacctctgtaggggccctggggtccctgtgcagacagttccaaaggaggctgcccctgagagccgtcaacctcaacctccgcgcagggccctcctggaaacgcctggaaaccccagagccaggtcagcagggcctccaggctgcagctcgctcagctaagagtgctttgggtgccgtgtcccagagaatccaggagtcctgccaaagtggcaccaagtggctggtggagacccaggtgaaggccaggaggcggaagagaggagcacagaagggcagtggatccccaactcacagcctgagccagaagagcacccggctgtctggagccgcccctgcccactcagccgcagacccctgggagaaggagcatcaccgcctctctgtccggatgggctcacatgcccacccattacggcgatcaaggcgggaggctgccttccggagcccctactcctcaacagagcccctctgctctcccagcgagtctgacagtgacctagagcctgtgggggcgggaattcagcatctccagaagctgtcccaagagctagatgaagccattatggcggaagagagtggtgacatcgtctctctcattcatgactgaggaagtgcctgcaggaaacaagccctgtctgaccgccaaggcttcatactcaaggatgtctatgcttccccgtgagcttcctggaaaaaacccccgggagtcgtcagtacccctgggccactgctaacaagcacctaacaaggggcccagagccccctgctccagccacatctggacccatcagtgactgcctgccatagcctgagagtgtcttggggagaccttgcagagggggagaattgttccttctgctttcctaggggactcttgagcttagaaactcatcgtacacttgaccttgagccttctatttgcctcatctataacatgaagtgctagcatcagatatttgagagctcttagctctgtacccgggtgcctggtttttggggagtcatccgcagagtcactcacccactgtgtttctggtgccaaggctcttgagggccccactctcatccctcctttccctaccagggactcggaggaaggcataggagatatttccaggcttacgaccctgggctcacgggtacctatttatatgctcagtgcagagcactgtggatgtgccaggaggggtagccctgttcaagagcaatttctgccctttgtaaattatttaagaaacctgctttgtcattttattagaaagaaaccagcgtgtgactttcctagataacactgctttctcataataaagactatttgcatttgacatctgttccctttcaccggcaacctccaacctcccccgccctcccacaccactctgggctatagatttgtaatttgtggtttggggtctggccctcatccacctctgctccgagccagtctgcccccaatcccaccccagggagaacatgtagaaagggaaaggtttctcaacttagttcagaccaaaacacattgtaaaggcaaagaaggtttttatttaagtgacaacatttgagagctaaaaaccagctcacatcaaaatcaagacccagttgtaaaaatcttttaactccataatgctgtttttgtcttgttagaaatctgatatcttacattagcgtttctaacggattttgtacaaggcagccataaggaatataataaacctttttcaccacagaa

SEQ ID NO: 74637 - DNA, 1470 bp, Artificial Sequence
  derived and/or modified sequence
ggcgaggagcagctgtgctgcggctgtgctcggccttagtggtgtcggggtctagtggacagagaagactcttggccaggcagatggcttctcggtggcagaacatggggacctccgtgcgccggagatctctccagcaccaggagcagctggaggacagcaaggagctgcagcctgtggtcagccatcaggagacctctgtaggggccctggggtccctgtgcagacagttccaaaggaggctgcccctgagagccgtcaacctcaacctccgcgcagggccctcctggaaacgcctggaaaccccagagccaggtcagcagggcctccaggctgcagctcgctcagctaagagtgctttgggtgccgtgtcccagagaatccaggagtcctgccaaagtggcaccaagtggctggtggagacccaggtgaaggccaggaggcggaagagaggagcacagaagggcagtggatccccaactcacagcctgagccagaagagcacccggctgtctggagccgcccctgcccactcagccgcagacccctgggagaaggagcatcaccgcctctctgtccggatgggctcacatgcccacccattacggcgatcaaggcgggaggctgccttccggagcccctactcctcaacagagcccctctgctctcccagcgagtctgacagtgacctagagcctgtgggggcgggaattcagcatctccagaagctgtcccaagagctagatgaagccattatggcggaagagaggaaacaagccctgtctgaccgccaaggcttcatactcaaggatgtctatgcttccccgtgagcttcctggaaaaaacccccgggagtcgtcagtacccctgggccactgctaacaagcacctaacaaggggcccagagccccctgctccagccacatctggacccatcagtgactgcctgccatagcctgagagtgtcttggggagaccttgcagagggggagaattgttccttctgctttcctaggggactcttgagcttagaaactcatcgtacacttgaccttgagccttctatttgcctcatctataacatgaagtgctagcatcagatatttgagagctcttagctctgtacccgggtgcctggtttttggggagtcatccgcagagtcactcacccactgtgtttctggtgccaaggctcttgagggccccactctcatccctcctttccctaccagggactcggaggaaggcataggagatatttccaggcttacgaccctgggctcacgggtacctatttatatgctcagtgcagagcactgtggatgtgccaggaggggtagccctgttcaagagcaatttctgccctttgtaaattatttaagaaacctgctttgtcattttattagaaagaaaccagcgtgtgactttcctagataacactgctttctcataataaagactatttgcatt

SEQ ID NO: 74638 - DNA, 1515 bp, Artificial Sequence
  derived and/or modified sequence
ggcgaggagcagctgtgctgcggctgtgctcggccttagtggtgtcggggtctagtggacagagaagactcttggccaggcagatggcttctcggtggcagaacatggggacctccgtgcgccggagatctctccagcaccaggagcagctggaggacagcaaggagctgcagcctgtggtcagccatcaggagacctctgtaggggccctggggtccctgtgcagacagttccaaaggaggctgcccctgagagccgtcaacctcaacctccgcgcagggccctcctggaaacgcctggaaaccccagagccaggtcagcagggcctccaggctgcagctcgctcagctaagagtgctttgggtgccgtgtcccagagaatccaggagtcctgccaaagtggcaccaagtggctggtggagacccaggtgaaggccaggaggcggaagagaggagcacagaagggcagtggatccccaactcacagcctgagccagaagagcacccggctgtctggagccgcccctgcccactcagccgcagacccctgggagaaggagcatcaccgcctctctgtccggatgggctcacatgcccacccattacggcgatcaaggcgggaggctgccttccggagcccctactcctcaacagagcccctctgctctcccagcgagtctgacagtgacctagagcctgtgggggcgggaattcagcatctccagaagctgtcccaagagctagatgaagccattatggcggaagagagtggtgacatcgtctctctcattcatgactgaggaagtgcctgcaggaaacaagccctgtctgaccgccaaggcttcatactcaaggatgtctatgcttccccgtgagcttcctggaaaaaacccccgggagtcgtcagtacccctgggccactgctaacaagcacctaacaaggggcccagagccccctgctccagccacatctggacccatcagtgactgcctgccatagcctgagagtgtcttggggagaccttgcagagggggagaattgttccttctgctttcctaggggactcttgagcttagaaactcatcgtacacttgaccttgagccttctatttgcctcatctataacatgaagtgctagcatcagatatttgagagctcttagctctgtacccgggtgcctggtttttggggagtcatccgcagagtcactcacccactgtgtttctggtgccaaggctcttgagggccccactctcatccctcctttccctaccagggactcggaggaaggcataggagatatttccaggcttacgaccctgggctcacgggtacctatttatatgctcagtgcagagcactgtggatgtgccaggaggggtagccctgttcaagagcaatttctgccctttgtaaattatttaagaaacctgctttgtcattttattagaaagaaaccagcgtgtgactttcctagataacactgctttctcataataaagactatttgcatt

SEQ ID NO: 74639 - DNA, 747 bp, Artificial Sequence
  derived and/or modified sequence
atggccagcagatggcagaacatgggcaccagcgtgagaagaagaagcctgcagcaccaggagcagctggaggacagcaaggagctgcagcccgtggtgagccaccaggagaccagcgtgggcgccctgggcagcctgtgcagacagttccagagaagactgcccctgagagccgtgaacctgaacctgagagccggccccagctggaagagactggagacccccgagcccggccagcagggcctgcaggccgccgccagaagcgccaagagcgccctgggcgccgtgagccagagaatccaggagagctgccagagcggcaccaagtggctggtggagacccaggtgaaggccagaagaagaaagagaggcgcccagaagggcagcggcagccccacccacagcctgagccagaagagcaccagactgagcggcgccgcccccgcccacagcgccgccgacccctgggagaaggagcaccacagactgagcgtgagaatgggcagccacgcccaccccctgagaagaagcagaagagaggccgccttcagaagcccctacagcagcaccgagcccctgtgcagccccagcgagagcgacagcgacctggagcccgtgggcgccggcatccagcacctgcagaagctgagccaggagctggacgaggccatcatggccgaggagagaaagcaggccctgagcgacagacagggcttcatcctgaaggacgtgtacgccagcccctag

SEQ ID NO: 74640 - protein, 337 aa, Artificial Sequence
  derived and/or modified sequence
MSNVNLSVSDFWRVMMRVCWLVRQDSRHQRIRLPHLEAVVIGRGPETKITDKKCSRQQVQLKAECNKGYVKVKQVGVNPTSIDSVVIGKDQEVKLQPGQVLHMVNELYPYIVEFEEEAKNPGLETHRKRKRSGNSDSIERDAAQEAEAGTGLEPGSNSGQCSVPLKKGKDAPIKKKVYKDEQVVVIKDKYPKARYHWLVLPWTSISSLKAVAREHLELLKHMHTVGEKVIVDFAGSSKLRFRLGYHAIPSMSHVHLHVISQDFDSPCLKNKKHWNSFNTEYFLESQAVIEMVQEAGRVTVRDGMPELLKLPLRCHECQQLLPSIPQLKEHLRKHWTQ

SEQ ID NO: 74641 - protein, 342 aa, Artificial Sequence
  derived and/or modified sequence
MMRVCWLVRQDSRHQRIRLPHLEAVVIGRGPETKITDKKCSRQQVQLKAECNKGYVKVKQVGVNPTSIDSVVIGKDQEVKLQPGQVLHMVNELYPYIVEFEEEAKNPGLETHRKRKRSGNSDSIERDAAQEAEAGTGLEPGSNSGQCSVPLKKGKDAPIKKESLGHWSQGLKISMQDPKMQVYKDEQVVVIKDKYPKARYHWLVLPWTSISSLKAVAREHLELLKHMHTVGEKVIVDFAGSSKLRFRLGYHAIPSMSHVHLHVISQDFDSPCLKNKKHWNSFNTEYFLESQAVIEMVQEAGRVTVRDGMPELLKLPLRCHECQQLLPSIPQLKEHLRKHWTQ

SEQ ID NO: 74642 - protein, 356 aa, Artificial Sequence
  derived and/or modified sequence
MSNVNLSVSDFWRVMMRVCWLVRQDSRHQRIRLPHLEAVVIGRGPETKITDKKCSRQQVQLKAECNKGYVKVKQVGVNPTSIDSVVIGKDQEVKLQPGQVLHMVNELYPYIVEFEEEAKNPGLETHRKRKRSGNSDSIERDAAQEAEAGTGLEPGSNSGQCSVPLKKGKDAPIKKESLGHWSQGLKISMQDPKMQVYKDEQVVVIKDKYPKARYHWLVLPWTSISSLKAVAREHLELLKHMHTVGEKVIVDFAGSSKLRFRLGYHAIPSMSHVHLHVISQDFDSPCLKNKKHWNSFNTEYFLESQAVIEMVQEAGRVTVRDGMPELLKLPLRCHECQQLLPSIPQLKEHLRKHWTQ

SEQ ID NO: 74643 - DNA, 1014 bp, Artificial Sequence
  derived and/or modified sequence
atgtccaacgttaacttgtcagtgagtgatttctggcgcgtgatgatgcgtgtgtgttggctagtcagacaggattcacgacaccaaaggatccgactcccccatttagaggctgttgtgatcgggcgtgggcctgagacaaagataacagataaaaaatgctctcggcaacaggtccagctgaaggcagaatgtaataagggttacgttaaggttaaacaggtcggcgtgaacccaacctcaattgattcagtggttatcggcaaggatcaggaagtgaagcttcagccgggccaggttttacacatggtgaacgagttgtacccatacattgtcgagttcgaggaagaggctaagaacccgggactcgaaacgcatcgcaaaagaaagagaagtgggaattctgacagcattgagcgggacgccgcccaagaggctgaggccggcaccggcctggagccagggtccaattccggacagtgctccgtccccttgaaaaagggtaaagacgcccccatcaaaaaaaaggtgtacaaggacgaacaggtggtggtgatcaaagacaaataccccaaggcacggtaccattggctagttctgccttggacgtctatctcaagtctcaaagcagtggctagggagcacctggagcttctgaagcatatgcacacggtgggagaaaaggttattgttgatttcgccgggagtagcaaactccgcttccgactgggataccacgccatcccctcaatgtcccacgtgcacctccacgtgataagtcaagactttgactccccttgtttgaaaaataagaaacactggaattcattcaacactgagtactttctggaatcccaagcagtaatcgagatggtgcaggaggccgggcgggttaccgttcgcgacggcatgcctgagctgctgaaactccctctccgatgccatgagtgccagcagctactcccaagtatcccacagctgaaggaacatctgcggaaacactggactcaatag

SEQ ID NO: 74644 - DNA, 1071 bp, Artificial Sequence
  derived and/or modified sequence
atgtctaacgtcaacctgtccgtatctgatttttggagagttatgatgagggtgtgttggctcgtccgacaggactcacggcaccaacggatcaggctgccccacctggaagccgtggtgattggcagaggtcctgaaaccaagattacggacaagaaatgcagtcggcagcaggtacagcttaaggccgaatgcaacaaaggatacgtaaaggtgaaacaggtgggcgtcaatcccacttctattgactcagtggtgattggtaaggaccaggaagtgaagctgcagcccggacaggtcctgcatatggttaatgaactgtacccctatatcgtagaatttgaggaagaagctaaaaatccaggattagaaacccacagaaaacggaagagatccggaaactcagactccatcgaacgcgatgcagcccaagaggccgaggccggaacaggattggaaccgggctccaacagcggacagtgctcagttccattaaaaaagggtaaggatgcccccattaaaaaggagtctcttggacactggtcccaagggctgaagatatctatgcaggacccaaagatgcaggtgtataaagacgagcaggtggttgtcataaaagataagtaccccaaggctcgttaccactggttagtccttccctggacttcaatatctagcctgaaagcggtcgcacgggagcatctcgagctgctgaagcatatgcacactgtcggcgaaaaagtgatcgtggactttgcagggtctagcaagctgcgctttagattaggttaccatgcaattccgtcaatgtcccatgtgcatttgcacgtcattagccaagattttgactcgccatgcctgaagaacaagaagcactggaacagcttcaacacagaatacttcctggagtcccaggcagttatcgaaatggttcaggaagcaggccgagtgacggtgcgggatgggatgcctgagcttctcaaattgcccctgcgatgccatgaatgccaacagctgctgccttccatcccacaattgaaagagcacctaagaaagcattggacacagtag

SEQ ID NO: 74645 - DNA, 1014 bp, Artificial Sequence
  derived and/or modified sequence
atgagcaatgtgaacctgtctgtgtctgacttctggagggtgatgatgagggtgtgctggctggtgcggcaggacagccgccaccagaggatccggctgccccacctggaggccgtggtgattggccggggccctgagaccaagatcacagacaagaagtgcagccggcagcaggtgcagctgaaggccgagtgcaacaagggctacgtgaaggtgaagcaggtgggcgtgaaccccaccagcattgacagcgtggtgattggcaaggaccaggaggtgaagctgcagcccggccaggtgctgcacatggtgaatgagctgtacccctacatcgtggagtttgaggaggaggccaagaaccctggcctggagacccacaggaagaggaagaggagcggcaacagcgacagcattgaaagagatgctgcccaggaggccgaggccggcaccggcctggagcccggcagcaacagcggccagtgcagcgtgcccctgaagaagggcaaggatgcccccatcaagaagaaggtgtacaaggatgagcaggtggtggtgatcaaggacaagtaccccaaggcccgctaccactggctggtgctgccctggaccagcatcagcagcctgaaggctgtggcccgggagcacctggagctgctgaagcacatgcacacagtgggggagaaggtgattgtggactttgctggcagcagcaagctgcgcttccggctgggctaccacgccatccccagcatgagccacgtgcacctgcacgtgatcagccaggactttgacagcccctgcctgaagaacaagaagcactggaacagcttcaacacagagtacttcctggagagccaggccgtgattgagatggtgcaggaggccggccgggtgacagtgagagatggcatgcctgagctgctgaagctgcccctgcgctgccacgagtgccagcagctgctgcccagcatcccccagctgaaggagcacctgaggaagcactggacccagtag

SEQ ID NO: 74646 - DNA, 1071 bp, Artificial Sequence
  derived and/or modified sequence
atgagcaatgtgaacctgtctgtgtctgacttctggagggtgatgatgagggtgtgctggctggtgcggcaggacagccgccaccagaggatccggctgccccacctggaggccgtggtgattggccggggccctgagaccaagatcacagacaagaagtgcagccggcagcaggtgcagctgaaggccgagtgcaacaagggctacgtgaaggtgaagcaggtgggcgtgaaccccaccagcattgacagcgtggtgattggcaaggaccaggaggtgaagctgcagcccggccaggtgctgcacatggtgaatgagctgtacccctacatcgtggagtttgaggaggaggccaagaaccctggcctggagacccacaggaagaggaagaggagcggcaacagcgacagcattgaaagagatgctgcccaggaggccgaggccggcaccggcctggagcccggcagcaacagcggccagtgcagcgtgcccctgaagaagggcaaggatgcccccatcaagaaggagagcctgggccactggagccagggcctgaagatctccatgcaggaccccaagatgcaggtgtacaaggatgagcaggtggtggtgatcaaggacaagtaccccaaggcccgctaccactggctggtgctgccctggaccagcatcagcagcctgaaggctgtggcccgggagcacctggagctgctgaagcacatgcacacagtgggggagaaggtgattgtggactttgctggcagcagcaagctgcgcttccggctgggctaccacgccatccccagcatgagccacgtgcacctgcacgtgatcagccaggactttgacagcccctgcctgaagaacaagaagcactggaacagcttcaacacagagtacttcctggagagccaggccgtcatcgagatggtgcaggaggccggccgggtgacagtgagagatggcatgcctgagctgctgaagctgcccctgcgctgccacgagtgccagcagctgctgcccagcatcccccagctgaaggagcacctgaggaagcactggacccagtag

SEQ ID NO: 74647 - DNA, 1014 bp, Artificial Sequence
  derived and/or modified sequence
atgagcaacgtgaacctgagcgtgagcgacttctggcgggtgatgatgcgagtttgttggctggttcgccaggactcgcggcatcagcggatccgcctcccccatcttgaggcggttgtgattggaagggggccagagaccaagatcacagacaaaaagtgtagtcggcaacaggtccagttaaaggccgaatgtaataagggttatgtcaaagttaagcaagtgggagtgaacccaacctccatcgacagtgtggtgattggcaaagatcaagaagtcaagctgcagccagggcaggttcttcacatggtgaacgagctctacccttacatcgtggagttcgaggaagaggcaaaaaatccaggattggaaactcaccgtaaacgtaagcgcagcggcaattctgacagtatcgagagggacgcagctcaggaggccgaggccgggacaggcctggagcccggctctaactccggacaatgctcagtgccattgaaaaaggggaaagacgcacccatcaaaaaaaaagtgtacaaagacgaacaagtcgtcgttatcaaagataagtacccgaaagcacgctatcactggctggtcctcccctggaccagcatttcatcattgaaggccgtagccagggagcacctggaactgttgaaacacatgcacaccgtgggtgagaaagtcatcgtcgattttgcaggttccagcaagctgcgttttcggctgggctatcatgctattcctagcatgtcacatgtgcatcttcacgtgatcagccaggactttgattccccctgcctgaagaataagaagcactggaacagctttaataccgaatattttctggaatcccaagctgtgattgaaatggtgcaggaggcggggcgggtgacagttcgcgacggtatgcccgagctgctcaagcttccactgcgctgtcatgaatgtcagcaactcttacccagcataccacaactgaaagagcatttaagaaaacactggactcaatag

SEQ ID NO: 74648 - DNA, 1071 bp, Artificial Sequence
  derived and/or modified sequence
atgagcaacgtgaacctgagcgtgagcgacttctggcgggtgatgatgagagtgtgttggctagtacgccaagatagcaggcaccagcggattcgactgccgcacctggaagccgtggtgattggccggggcccagagactaaaattactgacaaaaaatgttcacgccagcaagtgcaactgaaggctgagtgcaacaaggggtatgtgaaggtcaagcaggtaggagttaatcctacctccatcgactctgttgtgatcggtaaagatcaggaagtaaagctgcagccgggccaggttctccatatggtaaacgaactgtacccctatattgtggagttcgaggaagaagctaaaaatcccggactggaaacccacagaaaacgcaagcgctccggtaacagtgacagtatcgagcgcgatgccgcccaggaggcggaagcgggtacaggcctcgaaccaggctccaacagcggtcaatgctcagtgcctctgaagaagggcaaagacgctccaattaaaaaagagtctttaggtcattggtctcagggtctgaagatctccatgcaagatccgaagatgcaggtttacaaggatgaacaggtggtggttattaaggataagtacccaaaggctaggtaccactggctggtactaccatggacgagcatttctagcctaaaagccgttgctcgggagcacctcgaattattgaagcacatgcatactgtcggagaaaaggtcatagttgacttcgccggctcgagtaagttaaggttcaggttgggataccacgctataccaagtatgtcacacgtccaccttcatgtgatcagccaggattttgattcaccttgccttaaaaacaagaaacattggaacagcttcaacacggaatattttctggaaagtcaagccgtcatagagatggtccaggaggctggcagagtaaccgtgagggatggcatgccagaactgctcaaactacctttgcgttgccatgagtgccagcagctgctcccaagtatcccgcagttaaaggagcacctccggaagcactggacccaatag

SEQ ID NO: 74649 - DNA, 1014 bp, Artificial Sequence
  derived and/or modified sequence
atgagcaatgttaacctaagtgtgtccgacttctggagagttatgatgcgagtatgttggctagtgagacaagattccagacaccaaaggataagactaccccacctggaggccgtggtgatcggtcgcggacctgagactaagatcactgataagaaatgttcccggcaacaggtccagctaaaggcagaatgtaacaaagggtatgtgaaagtaaagcaggtgggcgtgaatccgacatcaattgactcagtcgtcattggcaaagaccaggaggtgaagctccagcctggtcaagtccttcatatggtcaacgaactgtacccctatattgtcgaattcgaggaggaggcaaaaaaccctgggctggagacgcatcgaaagagaaagcgtagcgggaattctgatagtatagagcgggatgccgcacaagaggccgaggccggaacaggcctggaaccgggtagtaatagcgggcaatgttcggttccactaaagaagggcaaggatgctccaatcaagaaaaaggtttataaggacgaacaagtcgtggtgatcaaggacaaatatcccaaagcacggtatcactggttggtgctgccgtggacatctatctctagtctgaaggcggtggccagagagcacttagaactgttgaagcatatgcatacagtgggagagaaggtgatcgtggatttcgctggctcgtcaaagctaaggtttcggctgggatatcatgctattcccagtatgtctcacgttcacctccatgtgatctctcaggattttgattcgccatgcttgaaaaataaaaagcattggaatagtttcaatactgagtactttctggagtcacaggctgtgatcgagatggtgcaggaggctggcagggtgaccgttcgggacggcatgcccgagctgttgaaacttccgcttcgctgccatgagtgccagcagcttctcccatcaatcccgcagctaaaggagcacctgagaaagcattggactcagtag

SEQ ID NO: 74650 - DNA, 1071 bp, Artificial Sequence
  derived and/or modified sequence
atgtcaaatgtgaatttgtcggtcagcgatttctggcgcgttatgatgagagtttgctggttggtgcgccaagattccaggcaccaaagaatacgccttccacacctggaggcagtcgtgataggcaggggcccagagaccaagatcaccgacaaaaagtgctcccggcagcaagtgcagctgaaggccgagtgcaataagggctacgttaaggtgaaacaagtgggagtgaaccccacttccatcgatagcgtggttattgggaaggaccaggaggtcaagttacagcccggtcaggtcttgcatatggtgaatgagttgtacccttacattgtggagttcgaagaggaggccaagaatcccggtttggaaacccatcgtaagagaaaacgcagtggtaattcagactccattgaaagggacgctgctcaagaagcagaggccggaactggtctggagcccggatctaactcagggcaatgtagcgtgccactgaagaagggtaaggacgctccgataaaaaaagagtccctgggacactggtcacagggcctcaaaattagcatgcaggatccaaaaatgcaggtctacaaggacgagcaagtagttgtcatcaaggacaagtaccccaaggcccgttatcattggcttgtactcccttggacatcaatcagcagcttgaaggccgttgccagagagcatttagaactcctgaagcatatgcacactgtgggtgagaaggttatagttgattttgccggatcctcaaaactgcgcttcaggctcggctatcacgctatccccagcatgagccacgtccacctacacgtaatctctcaggatttcgacagtccctgtctgaaaaacaaaaagcattggaactcttttaacacagagtatttcctggaatcccaggcagtcattgagatggtgcaggaggcgggtcgtgtgacagtcagggatggaatgcccgagctccttaagctgccattgagatgccacgaatgccagcagctgctcccctccatacctcaactgaaagagcatttaaggaaacattggacacaatag

SEQ ID NO: 74651 - DNA, 2018 bp, Artificial Sequence
  derived and/or modified sequence
agcgccggaagcggtgaggcacagatgagtaacgtgaatttgtccgtctccgacttctggagagtgatgatgcgggtgtgctggttggtgagacaggacagccggcaccagcgaatcagacttccacatttggaagcagttgtgattgggcgtggcccagagaccaagatcactgataagaaatgttctcgacagcaagtacagttgaaagcagagtgtaacaagggatatgtcaaggtaaagcaggtaggagtcaatcccaccagcattgactcagtcgtaattgggaaggaccaagaggtgaagctgcagcctggccaggttctccacatggtgaatgaactttatccatatattgtagagtttgaggaagaggcaaagaaccctggcctggaaacacacaggaagagaaagagatcaggcaacagtgattctatagaaagggatgctgctcaggaagctgaggctgggacagggctggaacctgggagcaactctggccaatgctctgtgcccctaaagaagggaaaagatgcacctatcaaaaaggaatccctgggccactggagtcaaggcttgaagatttctatgcaggaccccaaaatgcaggtttacaaagatgagcaggtggtggtgataaaggataaatacccaaaggcccgttaccattggctggtcttaccgtggacctccatttccagtctgaaggctgtggccagggaacaccttgaactccttaagcatatgcacactgtgggggaaaaggtgattgtagattttgctgggtccagcaaactccgcttccgattgggctaccacgccattccgagtatgagccatgtacatcttcatgtgatcagccaggattttgattctccttgccttaaaaacaaaaaacattggaattctttcaatacagaatacttcctagaatcacaagagtagctgggatttgacttttcttccttgcctgcagctgtgatcgagatggtacaagaggctggtagagtaactgtccgagatgggatgcctgagctcttgaagctgccccttcgttgtcatgagtgccagcagctgctgccttccattcctcagctgaaagaacatctcaggaagcactggacacagtgattctgcagagcctgagctgctgctgtggtgtggcccactggagcaaactgctggcacctattctgggttgcttgtgaacttctactcatttcctaaattaaaacatgcagctttttcacaaatttattctattattgagtggccacaatgtagagtggctcaaagtacttcaggattaggaatttgggtttgtcatagatgtattctctggtgagggtggctgggatatacctgacccaccatcttcagaaggacccatgtcaggtctgaccattgggagcaaagccatgttcacactgacctaatgcagagtatggaagcattgggctggttatacatttctgtttcttagatttatcctccgcctctgtaggcatggacaacctttaatcagagcatctagagtggcctcttgtttatcctgaagatactgatgggtcttgttttctgttagtctgttttgtaatattcttttcccttccttcatggggaggcttagtttgtccagtccttccatgcccttctatcccagattacctaaatgttcccttctcaggaattctgtctcatcagttcttcacagtgagaaaagaggctagatgatggtgtggggggttggagttttcttctaataccgagggttcctggctgtgaggaaacagccacatgttcgtcatgattgagctgtgaagtcttcttggacctgttgtctgaaaataaagttaatttgtttgaggcatctctcttaagtaggtggaaactattgaagttcagctaacaatcacagcataggttctgatgcatggaaaggtggttggtgaatgaaaaagttgcgtagagccactactttctttttccctgagaataaatttggataaaacagttgt

SEQ ID NO: 74652 - DNA, 1143 bp, Artificial Sequence
  derived and/or modified sequence
ggtgaggcacagatgagtaacgtgaatttgtccgtctccgacttctggagagtgatgatgcgggtgtgctggttggtgagacaggacagccggcaccagcgaatcagacttccacatttggaagcagttgtgattgggcgtggcccagagaccaagatcactgataagaaatgttctcgacagcaagtacagttgaaagcagagtgtaacaagggatatgtcaaggtaaagcaggtaggagtcaatcccaccagcattgactcagtcgtaattgggaaggaccaagaggtgaagctgcagcctggccaggttctccacatggtgaatgaactttatccatatattgtagagtttgaggaagaggcaaagaaccctggcctggaaacacacaggaagagaaagagatcaggcaacagtgattctatagaaagggatgctgctcaggaagctgaggctgggacagggctggaacctgggagcaactctggccaatgctctgtgcccctaaagaagggaaaagatgcacctatcaaaaagaaagtttacaaagatgagcaggtggtggtgataaaggataaatacccaaaggcccgttaccattggctggtcttaccgtggacctccatttccagtctgaaggctgtggccagggaacaccttgaactccttaagcatatgcacactgtgggggaaaaggtgattgtagattttgctgggtccagcaaactccgcttccgattgggctaccacgccattccgagtatgagccatgtacatcttcatgtgatcagccaggattttgattctccttgccttaaaaacaaaaaacattggaattctttcaatacagaatacttcctagaatcacaagctgtgatcgagatggtacaagaggctggtagagtaactgtccgagatgggatgcctgagctcttgaagctgccccttcgttgtcatgagtgccagcagctgctgccttccattcctcagctgaaagaacatctcaggaagcactggacacagtgattctgcagagcctgagctgctgctgtggtgtggcccactggagcaaactgctggcacctattctgggttgcttgtgaacttctactcatttcctaaattaaaacatgcagctttttc

SEQ ID NO: 74653 - DNA, 1200 bp, Artificial Sequence
  derived and/or modified sequence
ggtgaggcacagatgagtaacgtgaatttgtccgtctccgacttctggagagtgatgatgcgggtgtgctggttggtgagacaggacagccggcaccagcgaatcagacttccacatttggaagcagttgtgattgggcgtggcccagagaccaagatcactgataagaaatgttctcgacagcaagtacagttgaaagcagagtgtaacaagggatatgtcaaggtaaagcaggtaggagtcaatcccaccagcattgactcagtcgtaattgggaaggaccaagaggtgaagctgcagcctggccaggttctccacatggtgaatgaactttatccatatattgtagagtttgaggaagaggcaaagaaccctggcctggaaacacacaggaagagaaagagatcaggcaacagtgattctatagaaagggatgctgctcaggaagctgaggctgggacagggctggaacctgggagcaactctggccaatgctctgtgcccctaaagaagggaaaagatgcacctatcaaaaaggaatccctgggccactggagtcaaggcttgaagatttctatgcaggaccccaaaatgcaggtttacaaagatgagcaggtggtggtgataaaggataaatacccaaaggcccgttaccattggctggtcttaccgtggacctccatttccagtctgaaggctgtggccagggaacaccttgaactccttaagcatatgcacactgtgggggaaaaggtgattgtagattttgctgggtccagcaaactccgcttccgattgggctaccacgccattccgagtatgagccatgtacatcttcatgtgatcagccaggattttgattctccttgccttaaaaacaaaaaacattggaattctttcaatacagaatacttcctagaatcacaagctgtgatcgagatggtacaagaggctggtagagtaactgtccgagatgggatgcctgagctcttgaagctgccccttcgttgtcatgagtgccagcagctgctgccttccattcctcagctgaaagaacatctcaggaagcactggacacagtgattctgcagagcctgagctgctgctgtggtgtggcccactggagcaaactgctggcacctattctgggttgcttgtgaacttctactcatttcctaaattaaaacatgcagctttttc

SEQ ID NO: 74654 - DNA, 1820 bp, Artificial Sequence
  derived and/or modified sequence
atgagtaacgtgaatttgtccgtctccgacttctggagagtgatgatgcgggtgtgctggttggtgagacaggacagccggcaccagcgaatcagacttccacatttggaagcagttgtgattgggcgtggcccagagaccaagatcactgataagaaatgttctcgacagcaagtacagttgaaagcagagtgtaacaagggatatgtcaaggtaaagcaggtaggagtcaatcccaccagcattgactcagtcgtaattgggaaggaccaagaggtgaagctgcagcctggccaggttctccacatggtgaatgaactttatccatatattgtagagtttgaggaagaggcaaagaaccctggcctggaaacacacaggaagagaaagagatcaggcaacagtgattctatagaaagggatgctgctcaggaagctgaggctgggacagggctggaacctgggagcaactctggccaatgctctgtgcccctaaagaagggaaaagatgcacctatcaaaaaggaatccctgggccactggagtcaaggcttgaagatttctatgcaggaccccaaaatgcaggtttacaaagatgagcaggtggtggtgataaaggataaatacccaaaggcccgttaccattggctggtcttaccgtggacctccatttccagtctgaaggctgtggccagggaacaccttgaactccttaagcatatgcacactgtgggggaaaaggtgattgtagattttgctgggtccagcaaactccgcttccgattgggctaccacgccattccgagtatgagccatgtacatcttcatgtgatcagccaggattttgattctccttgccttaaaaacaaaaaacattggaattctttcaatacagaatacttcctagaatcacaagctgtgatcgagatggtacaagaggctggtagagtaactgtccgagatgggatgcctgagctcttgaagctgccccttcgttgtcatgagtgccagcagctgctgccttccattcctcagctgaaagaacatctcaggaagcactggacacagtgattctgcagagcctgagctgctgctgtggtgtggcccactggagcaaactgctggcacctattctgggttgcttgtgaacttctactcatttcctaaattaaaacatgcagctttttcacaaatttattctattattgagtggccacaatgtagagtggctcaaagtacttcaggattaggaatttgggtttgtcatagatgtattctctggtgagggtggctgggatatacctgacccaccatcttcagaaggacccatgtcaggtctgaccattgggagcaaagccatgttcacactgacctaatgcagagtatggaagcattgggctggttatacatttctgtttcttagatttatcctccgcctctgtaggcatggacaacctttaatcagagcatctagagtggcctcttgtttatcctgaagatactgatgggtcttgttttctgttagtctgttttgtaatattcttttcccttccttcatggggaggcttagtttgtccagtccttccatgcccttctatcccagattacctaaatgttcccttctcaggaattctgtctcatcagttcttcacagtgagaaaagaggctagatgatggtgtggggggttggagttttcttctaataccgagggttcctggctgtgaggaaacagccacatgttcgtcatgattgagctgtgaagtcttcttggacctgttgtctgaaaataaagttaatttgtttgaggcatctctcttaa

SEQ ID NO: 74655 - DNA, 2023 bp, Artificial Sequence
  derived and/or modified sequence
agcgccggaagcggtgaggcacagatgagtaacgtgaatttgtccgtctccgacttctggagagtgatgatgcgggtgtgctggttggtgagacaggacagccggcaccagcgaatcagacttccacatttggaagcagttgtgattgggcgtggcccagagaccaagatcactgataagaaatgttctcgacagcaagtacagttgaaagcagagtgtaacaagggatatgtcaaggtaaagcaggtaggagtcaatcccaccagcattgactcagtcgtaattgggaaggaccaagaggtgaagctgcagcctggccaggttctccacatggtgaatgaactttatccatatattgtagagtttgaggaagaggcaaagaaccctggcctggaaacacacaggaagagaaagagatcaggcaacagtgattctatagaaagggatgctgctcaggaagctgaggctgggacagggctggaacctgggagcaactctggccaatgctctgtgcccctaaagaagggaaaagatgcacctatcaaaaaggaatccctgggccactggagtcaaggcttgaagatttctatgcaggaccccaaaatgcaggtttacaaagatgagcaggtggtggtgataaaggataaatacccaaaggcccgttaccattggctggtcttaccgtggacctccatttccagtctgaaggctgtggccagggaacaccttgaactccttaagcatatgcacactgtgggggaaaaggtgattgtagattttgctgggtccagcaaactccgcttccgattgggctaccacgccattccgagtatgagccatgtacatcttcatgtgatcagccaggattttgattctccttgccttaaaaacaaaaaacattggaattctttcaatacagaatacttcctagaatcacaagagtagctgggatttgacttttcttccttgcctgcagctgtgatcgagatggtacaagaggctggtagagtaactgtccgagatgggatgcctgagctcttgaagctgccccttcgttgtcatgagtgccagcagctgctgccttccattcctcagctgaaagaacatctcaggaagcactggacacagtgattctgcagagcctgagctgctgctgtggtgtggcccactggagcaaactgctggcacctattctgggttgcttgtgaacttctactcatttcctaaattaaaacatgcagctttttcacaaatttattctattattgagtggccacaatgtagagtggctcaaagtacttcaggattaggaatttgggtttgtcatagatgtattctctggtgagggtggctgggatatacctgacccaccatcttcagaaggacccatgtcaggtctgaccattgggagcaaagccatgttcacactgacctaatgcagagtatggaagcattgggctggttatacatttctgtttcttagatttatcctccgcctctgtaggcatggacaacctttaatcagagcatctagagtggcctcttgtttatcctgaagatactgatgggtcttgttttctgttagtctgttttgtaatattcttttcccttccttcatggggaggcttagtttgtccagtccttccatgcccttctatcccagattacctaaatgttcccttctcaggaattctgtctcatcagttcttcacagtgagaaaagaggctagatgatggtgtggggggttggagttttcttctaataccgagggttcctggctgtgaggaaacagccacatgttcgtcatgattgagctgtgaagtcttcttggacctgttgtctgaaaataaagttaatttgtttgaggcatctctcttaagtaggtggaaactattgaagttcagctaacaatcacagcataggttctgatgcatggaaaggtggttggtgaatgaaaaagttgcgtagagccactactttctttttccctgagaataaatttggataaaacagttgtattca

SEQ ID NO: 74656 - DNA, 1455 bp, Artificial Sequence
  derived and/or modified sequence
gaggtgttgctgtgttgcccaagctggacttgaacccctaggctcaagcaatccttccacctcagtctcccaagtagcagggactacagagtgatgatgcgggtgtgctggttggtgagacaggacagccggcaccagcgaatcagacttccacatttggaagcagttgtgattgggcgtggcccagagaccaagatcactgataagaaatgttctcgacagcaagtacagttgaaagcagagtgtaacaagggatatgtcaaggtaaagcaggtaggagtcaatcccaccagcattgactcagtcgtaattgggaaggaccaagaggtgaagctgcagcctggccaggttctccacatggtgaatgaactttatccatatattgtagagtttgaggaagaggcaaagaaccctggcctggaaacacacaggaagagaaagagatcaggcaacagtgattctatagaaagggatgctgctcaggaagctgaggctgggacagggctggaacctgggagcaactctggccaatgctctgtgcccctaaagaagggaaaagatgcacctatcaaaaaggaatccctgggccactggagtcaaggcttgaagatttctatgcaggaccccaaaatgcaggtttacaaagatgagcaggtggtggtgataaaggataaatacccaaaggcccgttaccattggctggtcttaccgtggacctccatttccagtctgaaggctgtggccagggaacaccttgaactccttaagcatatgcacactgtgggggaaaaggtgattgtagattttgctgggtccagcaaactccgcttccgattgggctaccacgccattccgagtatgagccatgtacatcttcatgtgatcagccaggattttgattctccttgccttaaaaacaaaaaacattggaattctttcaatacagaatacttcctagaatcacaagctgtgatcgagatggtacaagaggctggtagagtaactgtccgagatgggatgcctgagctcttgaagctgccccttcgttgtcatgagtgccagcagctgctgccttccattcctcagctgaaagaacatctcaggaagcactggacacagtgattctgcagagcctgagctgctgctgtggtgtggcccactggagcaaactgctggcacctattctgggttgcttgtgaacttctactcatttcctaaattaaaacatgcagctttttcacaaatttattctattattgagtggccacaatgtagagtggctcaaagtacttcaggattaggaatttgggtttgtcatagatgtattctctggtgagggtggctgggatatacctgacccaccatcttcagaaggacccatgtcaggtctgaccattgggagcaaagccatgttcacactgacctaatgcagagtatggaagcattgggctggtt

SEQ ID NO: 74657 - DNA, 2106 bp, Artificial Sequence
  derived and/or modified sequence
attttcacaacagcctcctgagtcccatcattatcatggtttataggtgaggaaattgagactagggtggtgaagtcacttgcctcaagatgaacagctggtagatcacatgcgtggtggcaccgggtgtggccctggaggactcgtgctagtggatctgtttttctagtgattcttttgttttgtcccttagagtgatgatgcgggtgtgctggttggtgagacaggacagccggcaccagcgaatcagacttccacatttggaagcagttgtgattgggcgtggcccagagaccaagatcactgataagaaatgttctcgacagcaagtacagttgaaagcagagtgtaacaagggatatgtcaaggtaaagcaggtaggagtcaatcccaccagcattgactcagtcgtaattgggaaggaccaagaggtgaagctgcagcctggccaggttctccacatggtgaatgaactttatccatatattgtagagtttgaggaagaggcaaagaaccctggcctggaaacacacaggaagagaaagagatcaggcaacagtgattctatagaaagggatgctgctcaggaagctgaggctgggacagggctggaacctgggagcaactctggccaatgctctgtgcccctaaagaagggaaaagatgcacctatcaaaaaggaatccctgggccactggagtcaaggcttgaagatttctatgcaggaccccaaaatgcaggtttacaaagatgagcaggtggtggtgataaaggataaatacccaaaggcccgttaccattggctggtcttaccgtggacctccatttccagtctgaaggctgtggccagggaacaccttgaactccttaagcatatgcacactgtgggggaaaaggtgattgtagattttgctgggtccagcaaactccgcttccgattgggctaccacgccattccgagtatgagccatgtacatcttcatgtgatcagccaggattttgattctccttgccttaaaaacaaaaaacattggaattctttcaatacagaatacttcctagaatcacaagctgtgatcgagatggtacaagaggctggtagagtaactgtccgagatgggatgcctgagctcttgaagctgccccttcgttgtcatgagtgccagcagctgctgccttccattcctcagctgaaagaacatctcaggaagcactggacacagtgattctgcagagcctgagctgctgctgtggtgtggcccactggagcaaactgctggcacctattctgggttgcttgtgaacttctactcatttcctaaattaaaacatgcagctttttcacaaatttattctattattgagtggccacaatgtagagtggctcaaagtacttcaggattaggaatttgggtttgtcatagatgtattctctggtgagggtggctgggatatacctgacccaccatcttcagaaggacccatgtcaggtctgaccattgggagcaaagccatgttcacactgacctaatgcagagtatggaagcattgggctggttatacatttctgtttcttagatttatcctccgcctctgtaggcatggacaacctttaatcagagcatctagagtggcctcttgtttatcctgaagatactgatgggtcttgttttctgttagtctgttttgtaatattcttttcccttccttcatggggaggcttagtttgtccagtccttccatgcccttctatcccagattacctaaatgttcccttctcaggaattctgtctcatcagttcttcacagtgagaaaagaggctagatgatggtgtggggggttggagttttcttctaataccgagggttcctggctgtgaggaaacagccacatgttcgtcatgattgagctgtgaagtcttcttggacctgttgtctgaaaataaagttaatttgtttgaggcatctctcttaagtaggtggaaactattgaagttcagctaacaatcacagcataggttctgatgcatggaaaggtggttggtgaatgaaaaagttgcgtagagccactactttctttttccctgagaataaatttggataaaa

SEQ ID NO: 74658 - DNA, 1014 bp, Artificial Sequence
  derived and/or modified sequence
atgagcaacgtgaacctgagcgtgagcgacttctggagagtgatgatgagagtgtgctggctggtgagacaggacagcagacaccagagaatcagactgccccacctggaggccgtggtgatcggcagaggccccgagaccaagatcaccgacaagaagtgcagcagacagcaggtgcagctgaaggccgagtgcaacaagggctacgtgaaggtgaagcaggtgggcgtgaaccccaccagcatcgacagcgtggtgatcggcaaggaccaggaggtgaagctgcagcccggccaggtgctgcacatggtgaacgagctgtacccctacatcgtggagttcgaggaggaggccaagaaccccggcctggagacccacagaaagagaaagagaagcggcaacagcgacagcatcgagagagacgccgcccaggaggccgaggccggcaccggcctggagcccggcagcaacagcggccagtgcagcgtgcccctgaagaagggcaaggacgcccccatcaagaagaaggtgtacaaggacgagcaggtggtggtgatcaaggacaagtaccccaaggccagataccactggctggtgctgccctggaccagcatcagcagcctgaaggccgtggccagagagcacctggagctgctgaagcacatgcacaccgtgggcgagaaggtgatcgtggacttcgccggcagcagcaagctgagattcagactgggctaccacgccatccccagcatgagccacgtgcacctgcacgtgatcagccaggacttcgacagcccctgcctgaagaacaagaagcactggaacagcttcaacaccgagtacttcctggagagccaggccgtgatcgagatggtgcaggaggccggcagagtgaccgtgagagacggcatgcccgagctgctgaagctgcccctgagatgccacgagtgccagcagctgctgcccagcatcccccagctgaaggagcacctgagaaagcactggacccagtag

SEQ ID NO: 74659 - DNA, 1071 bp, Artificial Sequence
  derived and/or modified sequence
atgagcaacgtgaacctgagcgtgagcgacttctggagagtgatgatgagagtgtgctggctggtgagacaggacagcagacaccagagaatcagactgccccacctggaggccgtggtgatcggcagaggccccgagaccaagatcaccgacaagaagtgcagcagacagcaggtgcagctgaaggccgagtgcaacaagggctacgtgaaggtgaagcaggtgggcgtgaaccccaccagcatcgacagcgtggtgatcggcaaggaccaggaggtgaagctgcagcccggccaggtgctgcacatggtgaacgagctgtacccctacatcgtggagttcgaggaggaggccaagaaccccggcctggagacccacagaaagagaaagagaagcggcaacagcgacagcatcgagagagacgccgcccaggaggccgaggccggcaccggcctggagcccggcagcaacagcggccagtgcagcgtgcccctgaagaagggcaaggacgcccccatcaagaaggagagcctgggccactggagccagggcctgaagatcagcatgcaggaccccaagatgcaggtgtacaaggacgagcaggtggtggtgatcaaggacaagtaccccaaggccagataccactggctggtgctgccctggaccagcatcagcagcctgaaggccgtggccagagagcacctggagctgctgaagcacatgcacaccgtgggcgagaaggtgatcgtggacttcgccggcagcagcaagctgagattcagactgggctaccacgccatccccagcatgagccacgtgcacctgcacgtgatcagccaggacttcgacagcccctgcctgaagaacaagaagcactggaacagcttcaacaccgagtacttcctggagagccaggccgtgatcgagatggtgcaggaggccggcagagtgaccgtgagagacggcatgcccgagctgctgaagctgcccctgagatgccacgagtgccagcagctgctgcccagcatcccccagctgaaggagcacctgagaaagcactggacccagtag

SEQ ID NO: 74660 - protein, 302 aa, Artificial Sequence
  derived and/or modified sequence
MSNVNLSVSDFWRVMMRVCWLVRQDSRHQRIRLPHLEAVVIGRGPETKITDKKCSRQQEFEEEAKNPGLETHRKRKRSGNSDSIERDAAQEAEAGTGLEPGSNSGQCSVPLKKGKDAPIKKESLGHWSQGLKISMQDPKMQVYKDEQVVVIKDKYPKARYHWLVLPWTSISSLKAVAREHLELLKHMHTVGEKVIVDFAGSSKLRFRLGYHAIPSMSHVHLHVISQDFDSPCLKNKKHWNSFNTEYFLESQAVIEMVQEAGRVTVRDGMPELLKLPLRCHECQQLLPSIPQLKEHLRKHWTQ

SEQ ID NO: 74661 - DNA, 909 bp, Artificial Sequence
  derived and/or modified sequence
atgagcaatgtgaatttaagcgtcagcgatttttggagagtgatgatgcgagtctgctggctcgtgagacaagactcacggcatcagcgaatacgccttcctcatctggaagcagtggtaatcggaagagggccagagaccaagattaccgacaagaagtgtagccggcagcaggaattcgaggaggaagccaagaatccgggcttggaaacccacagaaagcgcaagcggtctgggaattcagatagtatagaaagagacgcagctcaggaggcagaggcgggtaccggattggagcctggctccaactcgggacaatgtagcgtcccactgaagaaaggcaaggatgctcctatcaaaaaggaaagtcttggccattggtcccagggactgaagatatctatgcaggatcccaagatgcaggtatacaaagatgaacaagtggtggtgattaaagataaatacccgaaagctcggtatcactggctcgtgctcccctggaccagcatttcaagtctaaaggccgtggcacgcgaacatttggaactcctgaagcacatgcatacggtcggagagaaagttattgtagatttcgcgggtagtagtaaactacgttttcggctcggctaccacgcaatcccctctatgagccatgtccacctgcatgtaatctcgcaggactttgatagcccgtgcttgaaaaacaagaagcactggaatagctttaacactgaatactttctggaatctcaggcagtaatcgagatggtgcaggaagctggtagggtgaccgtccgtgacggtatgcccgagctgctcaaattgccattgcggtgccacgagtgtcagcagctcctgccatctattccacaacttaaggaacatcttcggaagcattggactcaatag

SEQ ID NO: 74662 - DNA, 909 bp, Artificial Sequence
  derived and/or modified sequence
atgagcaatgtgaacctgtctgtgtctgacttctggagggtgatgatgagggtgtgctggctggtgcggcaggacagccgccaccagaggatccggctgccccacctggaggccgtggtgattggccggggccctgagaccaagatcacagacaagaagtgcagccggcagcaggagtttgaggaggaggccaagaaccctggcctggagacccacaggaagaggaagaggagcggcaacagcgacagcattgaaagagatgctgcccaggaggccgaggccggcaccggcctggagcccggcagcaacagcggccagtgcagcgtgcccctgaagaagggcaaggatgcccccatcaagaaggagagcctgggccactggagccagggcctgaagatctccatgcaggaccccaagatgcaggtgtacaaggatgagcaggtggtggtgatcaaggacaagtaccccaaggcccgctaccactggctggtgctgccctggaccagcatcagcagcctgaaggctgtggcccgggagcacctggagctgctgaagcacatgcacacagtgggggagaaggtgattgtggactttgctggcagcagcaagctgcgcttccggctgggctaccacgccatccccagcatgagccacgtgcacctgcacgtgatcagccaggactttgacagcccctgcctgaagaacaagaagcactggaacagcttcaacacagagtacttcctggagagccaggccgtcatcgagatggtgcaggaggccggccgggtgacagtgagagatggcatgcctgagctgctgaagctgcccctgcgctgccacgagtgccagcagctgctgcccagcatcccccagctgaaggagcacctgaggaagcactggacccagtag

SEQ ID NO: 74663 - DNA, 909 bp, Artificial Sequence
  derived and/or modified sequence
atgagcaacgtgaacctgagcgtgagcgacttctggcgggtgatgatgcgcgtctgttggcttgtgagacaggactctaggcaccagagaataagactcccgcatctggaggccgtcgtaattggacgcggtcctgagacaaagatcaccgataagaaatgtagtcgtcagcaggagttcgaagaggaggcaaaaaaccctgggctcgaaacacatcgcaagcgtaaacggtctggaaactctgattctattgaacgagacgcagcgcaggaagccgaagccggcaccgggttagagcccggatcaaattccgggcagtgctcagtgccgctgaaaaaaggcaaggacgcacctattaaaaaagagagcctgggacactggtctcagggactcaaaatctctatgcaggaccccaagatgcaggtgtacaaagacgagcaggtcgtcgtgatcaaggataaatacccgaaagcccgctaccattggctggttctgccctggaccagtattagcagtttgaaggcagtcgcgcgcgaacacttggaactgctgaaacatatgcatactgttggagagaaagttatcgtggacttcgccggcagctcgaagttaagatttcgtctgggttaccacgcgatcccatctatgagccacgttcatttgcacgtcatctcacaagacttcgatagcccctgcctcaagaacaagaagcactggaattcatttaacacggaatacttcctcgaatctcaagccgtgattgaaatggtacaagaagccggtagggtgaccgtgagggatggcatgcctgagctactgaagttacctttacgctgccacgagtgccaacaactgttgccgagtattcctcagctgaaggagcatctgcggaagcactggactcagtag

SEQ ID NO: 74664 - DNA, 909 bp, Artificial Sequence
  derived and/or modified sequence
atgagcaacgtgaacctgtctgtgagcgatttttggcgggtaatgatgcgcgtgtgttggctcgtgagacaggattctaggcatcagcgaatccgcttgccccacctggaggccgtggtaatcggtcgaggccctgagactaagatcacggacaagaaatgttctcgacaacaagaattcgaagaagaggctaagaatccgggactcgagacccatcgcaagaggaaaaggagcggtaactcagattccattgagagagacgccgcacaggaagccgaggccggtacaggcctggagccaggttccaattcaggacagtgctccgtacctttgaaaaaaggcaaggatgctcctataaagaaagagtcactgggtcactggtcacagggcctgaagatctcaatgcaggatcctaaaatgcaggtgtacaaagatgaacaagtagtggtgatcaaggacaagtaccccaaggcacgctatcactggttagttctgccctggacatccatttcctctcttaaggctgtggctagggaacacttggaattattaaagcacatgcacaccgtgggcgagaaggtaatcgttgatttcgctggttctagcaagttacggtttcgactgggctaccacgccattccatctatgtcccacgttcacttgcacgttatttcacaggacttcgactctccttgcctgaagaacaagaagcattggaacagtttcaacaccgagtactttctggaaagccaggccgtcattgaaatggtccaagaggctggcagagtaaccgtgcgggacgggatgcctgagctgctgaaactgccgctccggtgccacgagtgtcaacagctgctccctagcattcctcagctgaaggagcatcttagaaaacattggacacagtag

SEQ ID NO: 74665 - DNA, 1068 bp, Artificial Sequence
  derived and/or modified sequence
gacgtcatcccgcagcgccggaagcggtgaggcacagatgagtaacgtgaatttgtccgtctccgacttctggagagtgatgatgcgggtgtgctggttggtgagacaggacagccggcaccagcgaatcagacttccacatttggaagcagttgtgattgggcgtggcccagagaccaagatcactgataagaaatgttctcgacagcaagagtttgaggaagaggcaaagaaccctggcctggaaacacacaggaagagaaagagatcaggcaacagtgattctatagaaagggatgctgctcaggaagctgaggctgggacagggctggaacctgggagcaactctggccaatgctctgtgcccctaaagaagggaaaagatgcacctatcaaaaaggaatccctgggccactggagtcaaggcttgaagatttctatgcaggaccccaaaatgcaggtttacaaagatgagcaggtggtggtgataaaggataaatacccaaaggcccgttaccattggctggtcttaccgtggacctccatttccagtctgaaggctgtggccagggaacaccttgaactccttaagcatatgcacactgtgggggaaaaggtgattgtagattttgctgggtccagcaaactccgcttccgattgggctaccacgccattccgagtatgagccatgtacatcttcatgtgatcagccaggattttgattctccttgccttaaaaacaaaaaacattggaattctttcaatacagaatacttcctagaatcacaagctgtgatcgagatggtacaagaggctggtagagtaactgtccgagatgggatgcctgagctcttgaagctgccccttcgttgtcatgagtgccagcagctgctgccttccattcctcagctgaaagaacatctcaggaagcactggacacagtgattctgcagagcctgagctgctgctgtggtgtggcccactggagcaaactgctggcacctattctgggttgcttgtgaacttctactcatttcctaaattaaaacatgcagctttttcacaaa

SEQ ID NO: 74666 - DNA, 909 bp, Artificial Sequence
  derived and/or modified sequence
atgagcaacgtgaacctgagcgtgagcgacttctggagagtgatgatgagagtgtgctggctggtgagacaggacagcagacaccagagaatcagactgccccacctggaggccgtggtgatcggcagaggccccgagaccaagatcaccgacaagaagtgcagcagacagcaggagttcgaggaggaggccaagaaccccggcctggagacccacagaaagagaaagagaagcggcaacagcgacagcatcgagagagacgccgcccaggaggccgaggccggcaccggcctggagcccggcagcaacagcggccagtgcagcgtgcccctgaagaagggcaaggacgcccccatcaagaaggagagcctgggccactggagccagggcctgaagatcagcatgcaggaccccaagatgcaggtgtacaaggacgagcaggtggtggtgatcaaggacaagtaccccaaggccagataccactggctggtgctgccctggaccagcatcagcagcctgaaggccgtggccagagagcacctggagctgctgaagcacatgcacaccgtgggcgagaaggtgatcgtggacttcgccggcagcagcaagctgagattcagactgggctaccacgccatccccagcatgagccacgtgcacctgcacgtgatcagccaggacttcgacagcccctgcctgaagaacaagaagcactggaacagcttcaacaccgagtacttcctggagagccaggccgtgatcgagatggtgcaggaggccggcagagtgaccgtgagagacggcatgcccgagctgctgaagctgcccctgagatgccacgagtgccagcagctgctgcccagcatcccccagctgaaggagcacctgagaaagcactggacccagtag

SEQ ID NO: 74667 - DNA, 579 bp, Artificial Sequence
  derived and/or modified sequence
atgatgcgggtgtgttggctggttcgccaggattccagacaccagaggatccgacttccgcatctggaggccgttgttatcggccgcggtccagagacaaaaattactgacaaaaaatgctcccgccagcaagtacagctgaaggccgagtgtaataaggggtacgtcaaagtgaagcaggtcggcgtgaaccccacatctatcgattccgtcgtgattgggaaggatcaagaggtcaaactgcagcccggccaggttctccacatggtgaatgagctctacccttatatcgtggagtttgaggaggaggcgaagaacccggggctggagacccaccgcaagcgtaaacggtctggaaatagtgacagcatcgaacgagacgccgctcaggaggccgaggctggtacagggctggaacctggaagtaactccgggcagtgcagtgtcccccttaaaaaaggcaaggacgctcccatcaagaaggagtcccttggccactggagccagggtctgaagatcagtatgcaggacccaaaaatgcagccctgcacaagctcatgtgaccagccgggattttag

SEQ ID NO: 74668 - DNA, 579 bp, Artificial Sequence
  derived and/or modified sequence
atgatgagggtgtgctggctggtgcggcaggacagccgccaccagaggatccggctgccccacctggaggccgtggtgattggccggggccctgagaccaagatcacagacaagaagtgcagccggcagcaggtgcagctgaaggccgagtgcaacaagggctacgtgaaggtgaagcaggtgggcgtgaaccccaccagcattgacagcgtggtgattggcaaggaccaggaggtgaagctgcagcccggccaggtgctgcacatggtgaatgagctgtacccctacatcgtggagtttgaggaggaggccaagaaccctggcctggagacccacaggaagaggaagaggagcggcaacagcgacagcattgaaagagatgctgcccaggaggccgaggccggcaccggcctggagcccggcagcaacagcggccagtgcagcgtgcccctgaagaagggcaaggatgcccccatcaagaaggagagcctgggccactggagccagggcctgaagatctccatgcaggaccccaagatgcagccctgcaccagcagctgtgaccagcccggcttctag

SEQ ID NO: 74669 - DNA, 579 bp, Artificial Sequence
  derived and/or modified sequence
atgatgcgggtgtgctggctggtgcggcaggacagccggcaccagaggatcagactgccccacctcgaagctgtagttatcggccgcgggcctgaaacaaagataacggacaagaaatgtagcagacagcaagtccagctaaaggctgagtgcaacaaaggctatgtgaaagtcaaacaggtcggggttaatccaaccagtattgacagcgtggtgattggcaaagaccaggaggttaaattgcagcctggacaggtcctgcacatggtgaatgagctctatccatatattgtggagtttgaggaagaggctaaaaatcccggcctcgaaacgcacagaaaaaggaaacgttctgggaactcagactcaatcgagagagacgccgcgcaggaagcggaagcagggaccgggctggagcctgggagtaactccggccagtgctcagttcctctgaagaagggaaaagacgcccccatcaagaaggagagcctcgggcattggtcccaaggtctgaagatttccatgcaggatccgaaaatgcagccatgtacctcatcttgtgaccaacctggcttctag

SEQ ID NO: 74670 - DNA, 579 bp, Artificial Sequence
  derived and/or modified sequence
atgatgagggtgtgttggcttgtacgacaggatagtaggcaccaacggatcaggctgcctcacctcgaagccgtggtgatcgggaggggccctgagacgaagatcactgacaaaaagtgcagtcggcaacaggtgcagcttaaggccgagtgcaacaagggttacgtgaaggtcaagcaggtgggggtgaatcccaccagcatcgatagcgtggtgattggaaaagaccaggaagttaagctgcaaccaggtcaggtcctccacatggttaatgaactgtacccatacattgtagaattcgaagaggaagccaagaatcccggactggagactcacaggaagagaaagcgatcagggaatagcgattccatagaacgcgatgctgcgcaggaggccgaagctgggaccggacttgagccaggtagcaattcagggcagtgctcggttccactgaaaaagggaaaggacgctcctattaaaaaggaatctcttggccactggtcacagggactgaaaatatcgatgcaagaccctaagatgcagccttgcacatccagctgtgaccagcccggtttttag

SEQ ID NO: 74671 - DNA, 579 bp, Artificial Sequence
  derived and/or modified sequence
atgatgagagtgtgctggctggtgagacaggacagcagacaccagagaatcagactgccccacctggaggccgtggtgatcggcagaggccccgagaccaagatcaccgacaagaagtgcagcagacagcaggtgcagctgaaggccgagtgcaacaagggctacgtgaaggtgaagcaggtgggcgtgaaccccaccagcatcgacagcgtggtgatcggcaaggaccaggaggtgaagctgcagcccggccaggtgctgcacatggtgaacgagctgtacccctacatcgtggagttcgaggaggaggccaagaaccccggcctggagacccacagaaagagaaagagaagcggcaacagcgacagcatcgagagagacgccgcccaggaggccgaggccggcaccggcctggagcccggcagcaacagcggccagtgcagcgtgcccctgaagaagggcaaggacgcccccatcaagaaggagagcctgggccactggagccagggcctgaagatcagcatgcaggaccccaagatgcagccctgcaccagcagctgcgaccagcccggcttctag

SEQ ID NO: 74672 - protein, 284 aa, Artificial Sequence
  derived and/or modified sequence
MSNVNLSVSDFWRVMMRVCWLVRQDSRHQRIRLPHLEAVVIGRGPETKITDKKCSRQQVQLKAECNKGYVKVKQVGVNPTSIDSVVIGKDQEVKLQPGQVLHMESLGHWSQGLKISMQDPKMQVYKDEQVVVIKDKYPKARYHWLVLPWTSISSLKAVAREHLELLKHMHTVGEKVIVDFAGSSKLRFRLGYHAIPSMSHVHLHVISQDFDSPCLKNKKHWNSFNTEYFLESQAVIEMVQEAGRVTVRDGMPELLKLPLRCHECQQLLPSIPQLKEHLRKHWTQ

SEQ ID NO: 74673 - DNA, 855 bp, Artificial Sequence
  derived and/or modified sequence
atgtcgaacgtgaatctgagtgttagcgatttctggcgtgtaatgatgcgggtgtgctggctcgtgaggcaagactcaagacaccaacgaataaggctgccacatcttgaagcagtggtgattggcagaggccccgaaacaaagatcaccgataaaaagtgttcgcgacagcaggtccagctgaaagccgagtgtaacaaaggatatgtcaaggtgaagcaagtcggcgtgaatcccacttcaatagacagcgtagtgatcgggaaggaccaggaggtcaagttacagcctgggcaagtgctgcacatggaatcactcggacactggtcgcagggcttgaagatatccatgcaggaccccaagatgcaagtttataaagatgagcaagttgtcgtgatcaaagataagtaccctaaggctagataccattggctggtcctaccttggactagcatcagtagcctgaaggccgtcgcacgggagcatctagagctcctcaaacacatgcacaccgttggtgaaaaggtgatcgtagacttcgccggcagctccaaacttcgctttaggcttggataccatgcaatcccttcaatgtcacacgtgcacctccacgtcataagtcaagactttgactcaccctgcctgaagaacaaaaagcactggaattcctttaatacggagtacttcctggagagtcaggctgtgatcgagatggtgcaggaagcgggacgggttacagtccgggacggcatgcctgagctgttaaagctgcccttaagatgtcatgaatgccagcagcttttacccagcatcccgcagctcaaagaacatcttcgtaagcattggacccagtag

SEQ ID NO: 74674 - DNA, 855 bp, Artificial Sequence
  derived and/or modified sequence
atgagcaatgtgaacctgtctgtgtctgacttctggagggtgatgatgagggtgtgctggctggtgcggcaggacagccgccaccagaggatccggctgccccacctggaggccgtggtgattggccggggccctgagaccaagatcacagacaagaagtgcagccggcagcaggtgcagctgaaggccgagtgcaacaagggctacgtgaaggtgaagcaggtgggcgtgaaccccaccagcattgacagcgtggtgattggcaaggaccaggaggtgaagctgcagcccggccaggtgctgcacatggagagcctgggccactggagccagggcctgaagatctccatgcaggaccccaagatgcaggtgtacaaggatgagcaggtggtggtgatcaaggacaagtaccccaaggcccgctaccactggctggtgctgccctggaccagcatcagcagcctgaaggctgtggcccgggagcacctggagctgctgaagcacatgcacacagtgggggagaaggtgattgtggactttgctggcagcagcaagctgcgcttccggctgggctaccacgccatccccagcatgagccacgtgcacctgcacgtgatcagccaggactttgacagcccctgcctgaagaacaagaagcactggaacagcttcaacacagagtacttcctggagagccaggccgtcatcgagatggtgcaggaggccggccgggtgacagtgagagatggcatgcctgagctgctgaagctgcccctgcgctgccacgagtgccagcagctgctgcccagcatcccccagctgaaggagcacctgaggaagcactggacccagtag

SEQ ID NO: 74675 - DNA, 855 bp, Artificial Sequence
  derived and/or modified sequence
atgagcaacgtgaacctgagcgtgagcgacttctggcgggtgatgatgcgcgtttgctggctggtcagacaggatagccggcaccagcggattaggcttccccatctggaagccgtggtgatcggtcgcggtcctgaaacaaaaatcacagacaagaaatgtagtagacagcaggtccagctgaaggccgaatgtaacaagggctatgtcaaggtgaagcaagtcggtgtgaatcctaccagcatcgattctgtggtgatcggaaaggatcaggaagtcaagctgcagccgggccaagtcctgcatatggaatccttgggtcactggtcccagggtctgaagattagtatgcaagatccaaagatgcaggtctacaaggatgagcaggtggttgtgattaaagacaagtatccgaaggcccggtaccattggctagtgctgccatggacctccatatcctctctgaaggcagttgctagggagcatctcgagctgctgaagcacatgcacacagtgggggagaaggtgatcgtcgacttcgcaggctcatcgaaacttaggtttaggttggggtatcatgccatccctagcatgtcccatgtacatctccacgtcatatcccaggacttcgactccccatgcctgaagaacaagaagcattggaactcatttaatacagaatacttcctggagtctcaggccgtgatcgagatggttcaagaggcgggccgcgtcacagtgcgggacggcatgcccgaattgcttaaactccctctccggtgccacgagtgtcaacagcttttacccagcatcccacagctgaaggaacatctgcggaaacactggacacagtag

SEQ ID NO: 74676 - DNA, 855 bp, Artificial Sequence
  derived and/or modified sequence
atgtctaatgtaaatctgagcgtctcagacttttggagagtgatgatgcgggtgtgctggttggttaggcaagattccaggcatcagcgtataagacttccacacttggaagccgtggtgatcggcagaggacccgaaacaaaaattaccgataagaagtgtagtcgacaacaggtgcagcttaaagcagagtgcaacaaggggtatgtgaaagtaaagcaggtgggggttaatcctacctcaatcgacagcgtggtaattggaaaggaccaggaggtcaagctccaacccggacaggtgctgcacatggaatccttgggacattggagtcagggtctcaagatcagtatgcaggaccctaagatgcaggtctacaaggacgaacaggtcgtggtcatcaaagataaatatcccaaagctcgctaccattggttagtgctcccttggacaagtatctcttccttaaaggccgtggcgagggaacacctggaactcctgaaacacatgcacactgttggcgaaaaagtgatcgtggacttcgccggttcctctaagttgcggttcagactgggatatcacgccattccgtccatgtcccacgtgcacttgcacgtgatcagccaagattttgactctccgtgtctcaagaacaaaaaacactggaattctttcaatactgaatacttcctggaatctcaggccgttattgagatggtacaagaggcagggagagtgaccgtccgggacggcatgcctgagctgttgaagctccctctgaggtgtcacgagtgccagcagctgctgcctagcatcccgcagctgaaggaacatctgagaaagcactggacacaatag

SEQ ID NO: 74677 - DNA, 1740 bp, Artificial Sequence
  derived and/or modified sequence
cagatgagtaacgtgaatttgtccgtctccgacttctggagagtgatgatgcgggtgtgctggttggtgagacaggacagccggcaccagcgaatcagacttccacatttggaagcagttgtgattgggcgtggcccagagaccaagatcactgataagaaatgttctcgacagcaagtacagttgaaagcagagtgtaacaagggatatgtcaaggtaaagcaggtaggagtcaatcccaccagcattgactcagtcgtaattgggaaggaccaagaggtgaagctgcagcctggccaggttctccacatggaatccctgggccactggagtcaaggcttgaagatttctatgcaggaccccaaaatgcaggtttacaaagatgagcaggtggtggtgataaaggataaatacccaaaggcccgttaccattggctggtcttaccgtggacctccatttccagtctgaaggctgtggccagggaacaccttgaactccttaagcatatgcacactgtgggggaaaaggtgattgtagattttgctgggtccagcaaactccgcttccgattgggctaccacgccattccgagtatgagccatgtacatcttcatgtgatcagccaggattttgattctccttgccttaaaaacaaaaaacattggaattctttcaatacagaatacttcctagaatcacaagctgtgatcgagatggtacaagaggctggtagagtaactgtccgagatgggatgcctgagctcttgaagctgccccttcgttgtcatgagtgccagcagctgctgccttccattcctcagctgaaagaacatctcaggaagcactggacacagtgattctgcagagcctgagctgctgctgtggtgtggcccactggagcaaactgctggcacctattctgggttgcttgtgaacttctactcatttcctaaattaaaacatgcagctttttcacaaatttattctattattgagtggccacaatgtagagtggctcaaagtacttcaggattaggaatttgggtttgtcatagatgtattctctggtgagggtggctgggatatacctgacccaccatcttcagaaggacccatgtcaggtctgaccattgggagcaaagccatgttcacactgacctaatgcagagtatggaagcattgggctggttatacatttctgtttcttagatttatcctccgcctctgtaggcatggacaacctttaatcagagcatctagagtggcctcttgtttatcctgaagatactgatgggtcttgttttctgttagtctgttttgtaatattcttttcccttccttcatggggaggcttagtttgtccagtccttccatgcccttctatcccagattacctaaatgttcccttctcaggaattctgtctcatcagttcttcacagtgagaaaagaggctagatgatggtgtggggggttggagttttcttctaataccgagggttcctggctgtgaggaaacagccacatgttcgtcatgattgagctgtgaagtcttcttggacctgttgtctgaaaataaagttaatttgtttgaggcatctctcttaagtaggtggaaactattgaagttcagctaacaatcacagcataggttctgatgcatggaaaggtggttggtgaatgaaaaagttgcgtagagccactactttctttttccctgagaataaatttggataaaaca

SEQ ID NO: 74678 - DNA, 855 bp, Artificial Sequence
  derived and/or modified sequence
atgagcaacgtgaacctgagcgtgagcgacttctggagagtgatgatgagagtgtgctggctggtgagacaggacagcagacaccagagaatcagactgccccacctggaggccgtggtgatcggcagaggccccgagaccaagatcaccgacaagaagtgcagcagacagcaggtgcagctgaaggccgagtgcaacaagggctacgtgaaggtgaagcaggtgggcgtgaaccccaccagcatcgacagcgtggtgatcggcaaggaccaggaggtgaagctgcagcccggccaggtgctgcacatggagagcctgggccactggagccagggcctgaagatcagcatgcaggaccccaagatgcaggtgtacaaggacgagcaggtggtggtgatcaaggacaagtaccccaaggccagataccactggctggtgctgccctggaccagcatcagcagcctgaaggccgtggccagagagcacctggagctgctgaagcacatgcacaccgtgggcgagaaggtgatcgtggacttcgccggcagcagcaagctgagattcagactgggctaccacgccatccccagcatgagccacgtgcacctgcacgtgatcagccaggacttcgacagcccctgcctgaagaacaagaagcactggaacagcttcaacaccgagtacttcctggagagccaggccgtgatcgagatggtgcaggaggccggcagagtgaccgtgagagacggcatgcccgagctgctgaagctgcccctgagatgccacgagtgccagcagctgctgcccagcatcccccagctgaaggagcacctgagaaagcactggacccagtag

SEQ ID NO: 74679 - protein, 1033 aa, Artificial Sequence
  derived and/or modified sequence
MAQGFAVGFDPLGLGDLSSGSLSSLSSRGHLGSDSGSTATRYLLRKQQRLLNGPPRGIRASSPMGRVILINSPIEANSDESDIIHSVRVEKSPAGRLGFSVRGGSEHGLGIFVSKVEEGSSAERAGLCVGDKITEVNGLSLESTTMGSAVKVLTSSSRLHMMVRRMGRVPGIKFSKEKTTWVDVVNRRLVVEKCGSTPSDTSSEDGVRRIVHLYTTSDDFCLGFNIRGGKEFGLGIYVSKVDHGGLAEENGIKVGDQVLAANGVRFDDISHSQAVEVLKGQTHIMLTIKETGRYPAYKEMVSEYCWLDRLSNGVLQQLSPASESSSSVSSCASSAPYSSGSLPSDRMDICLGQEEPGSRGPGWGRADTAMQTEPDAGGRVETWCSVRPTVILRDTAIRSDGPHPGRRLDSALSESPKTALLLALSRPRPPITRSQSYLTLWEEKQQRKKEKSGSPGEKGALQRSKTLMNLFFKGGRQGRLARDGRREAWTLDSGSLAKTYPRLDIEKAGGVGPVQKFVTWRLRRDQERGRALLSARSGSPSSQLPNVDEQVQAWESRRPLIQDLAQRLLTDDEVLAVTRHCSRYVHEGGIEDLVRPLLAILDRPEKLLLLQDIRSVVAPTDLGRFDSMVMLVELEAFEALKSRAVRPPALRPARQDTPPKRHLITPVPDSRGGFYLLPVNGFPEEEDNGELRERLGALKVSPSASAPRHPHKGIPPLQDVPVDAFTPLRIACTPPPQLPPVAPRPLRPNWLLTEPLSREHPPQSQIRGRAQSRSRSRSRSRSRSSRGQGKSPGRRSPSPVPTPAPSMTNGRYHKPRKARPPLPRPLDGEAAKVGAKQGPSESGTEGTAKEAAMKNPSGELKTVTLSKMKQSLGISISGGIESKVQPMVKIEKIFPGGAAFLSGALQAGFELVAVDGENLEQVTHQRAVDTIRRAYRNKAREPMELVVRVPGPSPRPSPSDSSALTDGGLPADHLPAHQPLDAAPVPAHWLPEPPTNPQTPPTDARLLQPTPSPAPSPALQTPDSKPAPSPRIP

SEQ ID NO: 74680 - protein, 208 aa, Artificial Sequence
  derived and/or modified sequence
  misc_feature (1)..(1): Xaa can be any naturally occurring amino acid
XPRPPITRSQSYLTLWEEKQQRKKEKSGSPGEKGALQRSKTLMNLFFKGGRQGRLARDGRREAWTLDSGSLAKTYPRLDIEKAGGVGPVQKFVTWRLRRDQERGRALLSARSGSPSSQLPNVDEQVQAWESRRPLIQDLAQRLLTDDEVLAVTRHCSRYVHEGGIEDLVRPLLAILDRPEKLLLLQDIRSVVAPTDLGRFDSMVMLVE

SEQ ID NO: 74681 - DNA, 3102 bp, Artificial Sequence
  derived and/or modified sequence
atggcccagggctttgcagtcggattcgacccgttgggtctcggggacctgtcttctggaagtctgtccagcttatcgtctaggggccatctggggtccgattctggctccacagctacaaggtatcttctcagaaagcagcagaggctactgaatggacctcccaggggtattcgcgctagctcccctatgggtcgcgtcattttaatcaactcccctattgaagccaactctgacgaatctgacattatacatagtgtgcgtgtcgaaaaatcaccggccgggcgactgggttttagcgtgcgtgggggttctgagcacggactcgggattttcgtgagcaaggtagaggaggggtcgtcagcagaacgcgctgggctctgcgtgggggataagataactgaagtgaatggcctgagtcttgaatctaccaccatggggagtgccgtcaaagttctgacgtcgagtagtaggctccacatgatggtgaggagaatggggagggtcccggggattaagtttagtaaagagaaaacgacttgggtcgatgtggtgaacaggcggctcgtcgtggaaaagtgcgggtctaccccttctgacacgtctagtgaagacggagtcaggcgcatcgttcatttatacaccacgtcagatgacttttgcttaggatttaacattcgcggtgggaaggagtttggtctgggcatatacgtttccaaagtggaccatggcggactggccgaggagaacggcatcaaggtcggggaccaggtacttgcggccaacggtgtgaggtttgacgatatcagccactctcaggccgtggaagttcttaaggggcaaacccacatcatgctgacgatcaaggagacaggacgataccctgcatataaagagatggtgtccgagtactgctggttagatagactctccaatggcgtgctgcagcagctgtcgccagcttccgagtctagcagtagtgtgtctagctgcgcatccagcgctccgtacagttcagggtctctgcccagcgaccgcatggacatctgccttggacaagaagaacccggctccagaggaccaggatggggacgtgccgacacagccatgcagacggaaccagacgccggcggtcgcgtggagacatggtgctctgtccgcccaaccgtcattttacgcgacacagcgatcaggagcgacggcccgcacccgggacgccgattagattcagctctcagcgagagccctaaaaccgcacttctcctcgcactgtcaagacctcggccccctattacccgatctcagagttacctgacactgtgggaggaaaagcaacagaggaaaaaggagaaatccggctctccgggagaaaaaggcgctctgcagaggtcaaagactttaatgaatttgtttttcaaggggggccgacaggggagactggcaagagacggacgacgtgaagcttggacactggacagtggctctttggctaagacctatccgcgcctggatatcgagaaagctggtggagtcggccctgtacagaaatttgtgacttggcgtcttagaagagatcaggaaagaggcagggctttgttatcagcacgttctggcagccccagctctcagttgcctaatgtggacgagcaggtccaggcatgggagagcagacgaccgttaatccaggacttggcccagcgcctgctgactgacgacgaggtcctcgcagtgaccaggcactgtagtaggtacgtgcatgagggaggcatagaagatttagtgaggccgctccttgccatcctggaccgaccagagaaactgcttcttctgcaggacattagaagcgtcgtcgccccaacagaccttggtcggttcgattcgatggtaatgcttgtggagttagaggcttttgaagcgcttaagtctcgcgccgtgagacctcctgccctgaggccggcccgacaggataccccccctaagagacatttaattactcctgtgccagacagtcgtggcgggttctacctcctgccagtcaatggctttcccgaagaagaggacaacggggaactgcgggagcgcctgggcgctctgaaggtgagtccttcagcctccgcacccaggcacccccataaggggataccgcctcttcaggacgtgcccgtagatgcctttacacccctgcgaatcgcttgtactcccccccctcagctgccccccgtagcacctaggcccctacgtcctaactggctgttgacagagccactgagcagagagcatcctcctcagtcacaaatccggggcagagcccagtcacgtagtcgtagccgctcgcgatccagatcgagatctagccgtgggcagggaaagtcacccggtcgcagatccccatcaccggtgcccacaccagcccccagtatgacaaacgggcggtatcataaaccccgcaaagctcgtccccctctgccaaggcccctggatggcgaagcagcaaaggtgggtgctaaacagggacctagcgaatccggtacggaggggactgcgaaagaagcagccatgaagaacccttccggcgagctgaagactgtcaccttgagtaaaatgaagcagtcattaggaatatccattagcggagggattgagtccaaggtccagccgatggtgaaaatagagaagattttccccggcggagctgcattcctgtccggcgcactgcaggcgggcttcgaactggtggcagtagacggcgaaaatttggagcaagtcacacaccaacgcgccgtggatactatcagaagggcctatcgcaataaagcacgcgagccaatggagctcgtagtgagagtgccagggccgtctcctaggccatctccgtccgatagcagtgcactcaccgacggtggcctccctgcggaccatttgccagctcaccaacccctggacgctgcacctgttcccgcacactggctgcccgagccccccaccaatccacagacccctcctactgatgcccgcctcctgcagccgacaccatcacccgcccctagccccgcactgcagactcccgattcaaagcctgccccttcgcccagaatcccatag

SEQ ID NO: 74682 - DNA, 3102 bp, Artificial Sequence
  derived and/or modified sequence
atggcccagggctttgctgtgggctttgaccccctgggcctgggggacctgagcagcggcagcctgagcagcctgagcagccggggccacctgggcagtgacagcggcagcacagccacccgctacctgctgaggaagcagcagaggctgctgaatggccccccccggggcatccgggccagcagccccatgggccgggtcatcctgatcaacagccccatcgaggccaacagtgatgaaagtgacatcatccacagcgtgcgggtggagaagagccctgctggccgcctgggcttctctgtgcggggcggcagcgagcacggcctgggcatctttgtgtccaaggtggaggagggcagcagcgctgagagagctggcctgtgtgtgggggacaagatcacagaggtgaatggcctgagcctggagagcaccaccatgggcagcgctgtgaaggtgctgaccagcagcagccggctgcacatgatggtgcggaggatgggccgggtgcccggcatcaagttcagcaaggagaagaccacctgggtggatgtggtgaacagaaggctggtggtggagaagtgtggcagcacccccagcgacaccagcagtgaagatggagtgcggcgcatcgtgcacctgtacaccaccagtgatgacttctgcctgggcttcaacatccggggcggcaaggagtttggcctgggcatctacgtgtccaaggtggaccatggaggcctggccgaggagaatggcatcaaggtgggggaccaggtgctggccgccaacggggtgcgctttgatgacatcagccacagccaggccgtggaggtgctgaagggccagacccacatcatgctgaccatcaaggagaccggccgctacccagcctacaaggagatggtgtctgagtactgctggctggaccggctgagcaatggagtgctgcagcagctgagccctgccagcgagagcagcagctctgtgagcagctgtgccagcagcgccccctacagcagcggcagcctgcccagcgacaggatggacatctgcctgggccaggaggagcccggcagccggggccctggctggggccgggctgacacagccatgcagacagagccagatgctgggggccgggtggagacctggtgcagcgtgcggcccaccgtcatcctgcgggacacagccatccgcagtgatggcccccaccctggccggcggctggacagcgccctgtctgagagccccaagacagccctgctgctggccctgagccggcccaggcctcccatcaccaggagccagagctacctgaccctgtgggaggagaagcagcagaggaagaaggagaagagcggcagccctggagagaagggggccctgcagaggagcaagaccctgatgaacctcttcttcaagggcggccggcagggccgcctggccagagatggaagaagagaggcctggaccctggacagcggcagcctggccaagacctacccccggctggacatcgagaaggccggcggcgtgggccctgtgcagaagtttgtgacctggaggctgcggcgggaccaggagcggggccgggccctgctgagcgcccggagcggcagccccagcagccagctgcccaacgtggatgagcaggtgcaggcctgggagagcagaagacccctcatccaggacctggcccagaggctgctgacagatgatgaggtgctggccgtgaccaggcactgcagccgctacgtgcatgagggcggcatcgaggacctggtgcggcccctgctggccatcctggacaggcctgagaagctgctgctgctgcaggacatccgctctgtggtggcccccacagacctgggccgctttgacagcatggtgatgctggtggagctggaggcctttgaggccctgaagagcagagctgtgcggcccccagccctgcggcctgcccggcaggacaccccacccaagaggcacctgatcacccctgtgcctgacagccggggcggcttctacctgctgcctgtgaatggcttccctgaggaggaggacaacggggagctgcgggagcggctgggcgccctgaaggtgagccccagcgccagcgcccccaggcacccccacaagggcatcccccccctgcaggatgtgcctgtggatgccttcacccccctgcgcatcgcctgcaccccaccaccccagctgccccctgtggccccccggcccctgcggcccaactggctgctgacagagcccctgagccgggagcaccccccccagagccagatccggggccgggcccagagccgcagccgcagccgcagccgcagccgcagccgcagcagccggggccagggcaagagccctggccgccgcagccccagccctgtgcccaccccagcccccagcatgaccaacggccgctaccacaagcccaggaaggcccggccccccctgccccggcccctggatggagaggccgccaaggtgggcgccaagcagggccccagcgagagcggcacagagggcacagccaaggaggccgccatgaagaaccccagcggggagctgaagacagtgaccctgagcaagatgaagcagagcctgggcatcagcatcagcggcggcatcgagagcaaggtgcagcccatggtgaagattgagaagatcttccctggaggagctgccttcctgagcggggccctgcaggccggctttgagctggtggccgtggatggagagaacctggagcaggtgacccaccagagagctgtggacaccatccggcgggcctacagaaacaaggcccgggagcccatggagctggtggtgcgggtgcccggccccagcccccggcccagccccagcgacagcagcgccctgacagatggcggcctgcctgctgaccacctgcctgcccaccagcccctggatgctgcccctgtgcctgcccactggctgcctgagccccccaccaacccccagaccccacccacagatgcccggctgctgcagcccacccccagccctgcccccagccctgccctgcagaccccagacagcaagccagcccccagcccccgcatcccctag

SEQ ID NO: 74683 - DNA, 3102 bp, Artificial Sequence
  derived and/or modified sequence
atggcccagggcttcgccgtgggcttcgaccccctgggcctgggcgatctctcatccggcagcttatccagcctaagctctcgaggtcatttaggaagcgattctggatccaccgctacacggtacctccttaggaagcaacagcggctgctcaacggtcctcctagagggatcagggcctcctctccaatggggcgagtcatcttaataaactccccaattgaagccaatagtgatgagagtgacattatccactcggttcgggtagaaaaaagtccagcgggaaggttgggctttagtgtgaggggcgggtccgaacacggcttgggtattttcgtgagcaaagtcgaagagggatctagtgccgagcgggcgggcctgtgcgtgggagataagatcactgaggtgaatgggctctccttggagtcaacaactatgggcagcgccgtgaaagtccttacaagcagttccagactccacatgatggtgcggcggatgggtcgggtgccaggtattaagtttagcaaagagaagaccacctgggtagacgtggtaaacagaaggcttgtggtcgagaagtgtggatcaaccccctctgacaccagttccgaggatggtgtgcgtcggatcgtccatttgtatactacatctgatgacttttgtctagggttcaacatacgtgggggaaaggagttcgggctgggcatctacgtttctaaagtggaccacggcggcctggccgaagagaatggaattaaagtaggagatcaagtcttagctgccaacggagtacggttcgatgatatttcccattcacaggctgtggaggttctaaagggccaaacccatatcatgcttaccattaaggaaaccgggcgctacccagcatacaaggagatggtcagcgagtattgttggcttgacagactttctaacggagttctccaacagctcagccctgccagcgagtctagttcgtcagtgagcagctgtgcaagctctgcaccctatagttccgggtctctccctagcgatcgcatggacatttgcctgggccaggaggaacccggtagccgcggccctgggtggggacgcgcagacacagcaatgcagacagaaccagatgctggagggagagtggagacatggtgctctgtcagacccacagtgatactaagggatacagctatccgatcagacggtccacatccaggcaggcggctggactccgccctctcggaatcccccaagacagcgctactgctcgccttgtcccgcccaagaccccctatcacccggtcacagtcttatttgacactctgggaggagaaacaacagcggaagaaagaaaaatccggtagtcccggcgagaaaggagccctacagcgatccaagactctgatgaacctgtttttcaaaggcggacggcagggccgcttagctcgtgacggccggcgggaagcttggacactggatagtggcagcctggcaaaaacctatccaaggctcgatattgagaaagccggcggagttggacccgttcagaagtttgtgacttggcgtcttcgcagagatcaagagagaggaagagccttgctgagtgcacgcagcggatctcccagtagtcagctgccaaacgtcgacgaacaagtccaggcttgggagtctagaagacccttgatccaagaccttgcacagcgtctgctgaccgatgatgaggtactcgctgtgactcgtcactgctcccgttatgtccatgagggaggaattgaggatctagttcgtccactcctggccatcctggatagaccagagaaactactgctgcttcaggatatccgctctgttgttgcgcccactgacttgggacgtttcgactcaatggtgatgcttgtggaattagaggccttcgaggctctgaagtccagggcagtgcgccctcccgctctccgacccgctcgccaggatacccctcccaaaaggcatctcatcacgccagttccagattcccgtgggggattctatctgcttcctgtgaacgggttcccagaggaagaggataacggagaactgcgcgaacggctgggggccctcaaagtgagtccctcagcatcagccccccgacatccgcacaagggcattcctcccctccaggacgtgcctgtggatgctttcactcccctgcgcattgcgtgtaccccacctccacagctgccgcccgtcgccccgcggcccctgcgtcccaactggctgttaaccgagcctctaagtcgtgaacatcccccacagtcccagatccgaggacgagcccagtctcggagccgctccagatctaggagtaggtcaagaagcagccgggggcagggcaaaagtccaggacgccgcagtccttcacccgtgccaacccccgccccctctatgaccaatggccgctaccacaaacccagaaaggcaaggccaccattaccgaggcctctagacggcgaagctgccaaggtgggggcaaagcaggggccatctgagagcgggactgagggcaccgccaaagaggccgctatgaaaaatccatccggagaacttaagaccgtcactttgtctaaaatgaagcagtccctaggaatcagcatcagcggaggcatcgaaagcaaggtgcagccgatggttaaaatcgagaagatcttccctggtggggcggctttcctctccggcgcattacaggctgggttcgagctggtggccgtcgatggcgagaaccttgagcaggtgacccatcaaagagccgtggacacaatccgcagggcttaccggaacaaggcccgagagccaatggaactggtggtgcgtgtccccggacctagcccacggccgtccccctccgacagtagcgccctcacagacgggggactgccggcagaccacctgcctgcccaccagccgctcgatgctgcacctgtgccagcgcattggctgccagaaccacccacaaacccccagacgcccccaaccgatgctaggctgttacaaccaactccatcaccagccccatccccagcactccaaacaccagactccaaaccagcacccagtccgcgcatcccctag

SEQ ID NO: 74684 - DNA, 4013 bp, Artificial Sequence
  derived and/or modified sequence
tcgcctgcgggtggtttgacaaggctggcggcgccacaccagcgaccaggcctggagctcacacttctgagaggcatcgcaagcgagggccttcacgttactgagaccccagccccgcacagaggctcatggcgcagggtttcgcagtgggcttcgacccactgggcctaggagacctgagctccggctctctgagctccctctcctcccgaggccacctaggcagcgactcaggctccaccgcaacgcgatacctgctaaggaagcaacaacggctgctgaacgggcccccccgcggaatccgagcctcatcgcccatgggacgcgtcatcctcatcaactcccccatcgaagccaacagtgatgaaagtgacatcatccattcagtccgggtggagaagagtccagcagggaggctgggcttcagcgtgcgcgggggctcagagcatggcctgggcatcttcgtcagcaaagtggaggaaggcagcagtgcagagcgggctggcctgtgcgtgggggacaagatcacggaggtgaatgggctgagcctggagagcaccaccatgggtagcgccgtaaaggtgctgaccagcagcagccgcctgcacatgatggttcggcgcatgggccgtgtgccgggcatcaagttctccaaggagaagaccacgtgggtggatgtggtgaatcggcgcctggtagtggagaagtgcggttcaacaccctccgacaccagctcagaagatggtgtccggcgcatcgtccacctatacacaacctccgacgacttctgcctgggcttcaacatccgtgggggcaaggagtttggcctgggcatctatgtgtccaaagtggaccatggtgggctggccgaggagaatggcatcaaggtgggggaccaggtcctggcagccaacggtgtcaggtttgacgacatcagccacagccaggccgtggaggtgctgaagggccaaacgcacatcatgctgaccatcaaggagaccggccggtatcctgcctacaaggagatggtttctgagtactgctggctggaccgactgagcaacggggtgctgcagcagctgtccccggcctctgagagcagctccagcgtctcttcgtgcgcctccagcgccccctacagctcgggctccctgccgtcggaccgcatggacatctgcctcgggcaggaggagcccggcagccgcggcccaggctgggggcgggcggacacagccatgcagacggagcccgatgcgggaggccgggtggagacctggtgcagcgtgcggcccacagtcatcctcagggacaccgccatccgctcggacggcccccatcccggccgccgccttgactctgcgctctctgagtctcccaagacggctttgctgctggccctcagccgaccccggccccccatcacgcgctcccagagctatctgaccttgtgggaggagaagcagcagcggaagaaggagaagtcggggtcccctggggagaagggtgccctgcagcgctccaagacgctgatgaacctcttcttcaagggagggcggcaggggaggctagcgcgggacgggcgcagagaggcctggacactggacagcgggagcctggccaaaacttaccctcgcctggacatagagaaagcagggggcgtgggcccggtacagaagtttgtcacctggagactgagacgtgaccaggagaggggccgggccctgctgtctgccaggtctgggagtccctccagccagctgcctaatgtggatgagcaggttcaggcctgggagagccggcggcccctcattcaggacctggcccagaggctgctgactgatgacgaggtgctggctgtcacccgccactgctcccggtatgtgcacgagggaggcatagaggacctggtgaggcccctgctggccatcctcgacaggccggagaagctgctactgctgcaggacatcaggagtgtggtggcccccacagacctgggccgcttcgacagcatggtgatgcttgtggagctggaggcttttgaggccctcaagagcagggcagtccggcctcctgctttgagaccagcccggcaggacacgccacccaagcgtcaccttatcacccccgtgcctgacagccgcggaggcttctacctgctgccggtgaacggcttcccggaagaggaagataatggggagctgagggagcggctgggggccctcaaggtctccccaagtgcctctgcccctcgccacccccataaagggatcccccctctacaagacgtgccagtagatgccttcacccccctccgaattgcctgcacaccccctccccagctaccccccgtggctccccggcccctgcggcctaactggctgctgacagaacccctgagccgagagcaccctccgcagagccagatccggggccgggctcagagccgtagccgcagccgtagccgcagccgcagccgcagcagccggggtcaaggcaagtctccaggtagacgctccccatccccggtgcctacccctgcccccagcatgaccaatgggcgctaccacaagcctcggaaggccagaccccctctgccacgacctctggatggggaggcagccaaggtgggggccaagcaagggccctcggagagtggaactgaggggacggccaaggaggcagccatgaagaaccccagtggcgagctgaagacagtgacactgtccaagatgaagcagtccttaggtatcagcatttctgggggcattgagtccaaggtgcagcccatggtgaagatagagaagatcttccctgggggggccgctttcctcagtggggccctgcaggctggcttcgagcttgtggcagtggacggagagaatctagagcaggtgacccaccagcgtgcagtagacaccatccgtcgggcttatcgaaacaaggcccgggagcccatggagcttgtggtcagggtccccgggcccagcccacggccctcaccctctgactcatcagcccttactgatgggggccttcctgctgaccacttgcctgcccaccaaccccttgatgctgctccagttcctgcccactggctcccagaacctcccaccaatccccagactcctcccactgatgccaggctcctccagccaactcccagcccagccccctccccagccctccagactcctgattctaagcccgcaccctccccacgcatcccatgaccctccccctaacctcagattcacccactgactccagcatcccgttatccccaggacctctcctaccaacttcttcaggactctccagctcctgcccaccctgcctcctcccagtgccacactggtggctcacatctttccactttcttccctcctcagctgtcattaaggctctgccttagtgtccaaggacaaggtgctagtgggcagcctgtgtcacctgcactcactgctccccaacctcccaagccaggatagggggtgagaaagccaaggtctggagcttgggattggtgggcactttctcacatgctgtcccttatgagtcgcccaagcctccagggacacagactctcagacagggccctgaaggggtcaatgcatccattcctcaaccccaagcagcattctgtgcaaggaaacggatgaaaggcttttctagtccctgaaatcctgagagatcatttcacgttggggtccactaagacctcagacattctactggatttgtccttcctccatcaccttttctccccaagagagctctatgagggggaggagaatagccagcaaatggtgggggggggggggtcaaacaagttcctgtactctttatccagcacattcacattatttttaaacaaaaaaattttttttaattttttctttgggtttgtacaagaaatttacagtgtgaaaaatatacaagtgaaaacgaggccataaacctgggtgaagggagaggctgcttggtcacaaacacaaataaacaagacatttctg

SEQ ID NO: 74685 - DNA, 3102 bp, Artificial Sequence
  derived and/or modified sequence
atggctcaaggcttcgccgttggattcgatcccttaggcctgggagatctaagctctggcagcctgtcttctctgtcctcccgaggccacctgggttctgactcagggagcaccgcaacccgttatctgctccggaagcaacaacgcttgctgaacggacctccccgaggcataagagccagcagtcccatgggacgtgtaatcctgattaacagccctattgaggccaactcagatgagtccgacataattcattccgtacgcgtggaaaagagccccgctggacgacttggattttctgtccggggtggatcggaacacggccttggcattttcgtgtctaaggtggaggaaggcagctccgcagaacgcgctgggctgtgtgtgggggacaaaatcacggaggtaaatgggctgagtcttgaatcaaccaccatgggatctgcagtgaaagtgctcacgtcttcttctcgcctgcacatgatggtgaggagaatgggtcgggtgcctggtattaagttttctaaggaaaagacaacctgggtcgacgtggtaaatcggcgtttagtggttgaaaaatgcggatccacaccaagcgatacaagctccgaagacggagtacgacgcatagtccatttatacaccacaagcgacgacttttgtttggggttcaacattagaggagggaaggaattcggactgggaatctatgttagcaaggtcgatcacgggggactagccgaagaaaacggaatcaaggtcggagaccaagtgttagcggcaaatggtgtccggtttgacgatatttctcactcccaagcagtagaggtgctcaagggccagacccacattatgctgaccataaaggagaccggcaggtatccagcctacaaggaaatggtatcggagtactgctggctggaccgactgtccaatggagtgctccagcagctgagccccgcttcagagtcttcctccagcgtctcaagttgtgctagcagcgccccttattcttctgggtccctgcctagtgacaggatggacatctgcctgggacaggaagaaccagggtcaagaggccctggttggggtcgggctgacaccgcaatgcaaaccgagccagatgctggaggtagagtcgagacctggtgcagcgtgcgtcctacagtcattttgagggatacggcgatacggtccgatggcccacacccaggtagaaggctagacagtgccctgtccgaatctcccaagaccgcccttttgttggctttgagccggccacgcccacccatcacacgatcccagagttatctgaccttatgggaagagaagcagcaaaggaaaaaagagaagtctggaagccccggtgaaaagggggctctccagaggagcaagactcttatgaatttgttctttaaaggagggcgacaggggagactggcccgtgacggacggagagaagcctggactctcgactcaggttcgctggcgaaaacgtaccctcgattggatatcgaaaaagcaggaggcgtgggccctgtgcagaaatttgtgacatggcgattgcgtagggatcaggagcgcggacgcgctcttctctcagccaggagcgggtctccatcttcacaattacccaacgtcgatgaacaagttcaggcatgggagtctcgacgacccctgattcaggatctggctcaacggctcctgaccgacgatgaggtgctggccgtgacccgacattgttccaggtacgtgcatgagggagggatagaagacctggtacggccactcctcgcaattttagatcgtcccgagaagctccttctccttcaggacataaggtccgtcgtggcccctacagacctcggtagattcgattcaatggtcatgctagtggagcttgaggctttcgaggctctaaagagcagggcagtgaggcctccggcattgcggcctgcacggcaggacacgccacccaagcgtcacctcatcactcccgtgcctgactctcgtggaggattctacttgctccccgtcaacggttttcccgaagaagaggataatggcgaactgcgagaacggctgggcgctctaaaagttagtcccagcgcttcggccccacggcaccctcacaaaggcattccgcctctgcaggacgtaccagtcgacgcctttacccctcttaggatagcctgcaccccaccccctcaactaccccctgtcgcaccgagaccactccggccaaattggcttttgacagaacccttgtctcgagagcaccctccgcagtctcagatccgcggtcgcgctcaatccaggtcacggtctcgaagccgatcccgatccaggagttctaggggacagggaaagtcccccggtcggagaagtcccagtcccgttccgacccctgctccctctatgacgaacggaagataccacaaaccgaggaaagctaggccacccttgcctcgccctctggacggagaggcagccaaggtaggtgctaaacagggtccaagcgaatctggcaccgagggcaccgccaaagaagccgcaatgaagaatccatcgggtgaattgaagacggtgaccttgtccaagatgaagcagtcgctcggcatctccataagcggaggtatagaaagcaaagttcaaccgatggtgaagattgagaagatcttccctggcggagcagcctttctttccggggcactacaggctggctttgagctggttgctgtggacggggagaacctggaacaggtgactcaccagcgagccgtagataccattagacgtgcgtataggaataaagccagggaacccatggagctggtggtccgggttcccggtccctccccacggccatcaccaagtgacagcagtgctttaaccgacggcggtctgccagcagaccatctgcctgcccaccagcctttagatgcggctccagttccagcgcactggctgccggaaccaccaacaaatccacagactccccctaccgacgctcgcctgttacagcctactcccagcccggctccaagtcccgctcttcagacccctgactccaagccagcgcctagccctcgaataccttag

SEQ ID NO: 74686 - DNA, 3102 bp, Artificial Sequence
  derived and/or modified sequence
atggcccagggcttcgccgtgggcttcgaccccctgggcctgggcgacctgagcagcggcagcctgagcagcctgagcagcagaggccacctgggcagcgacagcggcagcaccgccaccagatacctgctgagaaagcagcagagactgctgaacggcccccccagaggcatcagagccagcagccccatgggcagagtgatcctgatcaacagccccatcgaggccaacagcgacgagagcgacatcatccacagcgtgagagtggagaagagccccgccggcagactgggcttcagcgtgagaggcggcagcgagcacggcctgggcatcttcgtgagcaaggtggaggagggcagcagcgccgagagagccggcctgtgcgtgggcgacaagatcaccgaggtgaacggcctgagcctggagagcaccaccatgggcagcgccgtgaaggtgctgaccagcagcagcagactgcacatgatggtgagaagaatgggcagagtgcccggcatcaagttcagcaaggagaagaccacctgggtggacgtggtgaacagaagactggtggtggagaagtgcggcagcacccccagcgacaccagcagcgaggacggcgtgagaagaatcgtgcacctgtacaccaccagcgacgacttctgcctgggcttcaacatcagaggcggcaaggagttcggcctgggcatctacgtgagcaaggtggaccacggcggcctggccgaggagaacggcatcaaggtgggcgaccaggtgctggccgccaacggcgtgagattcgacgacatcagccacagccaggccgtggaggtgctgaagggccagacccacatcatgctgaccatcaaggagaccggcagataccccgcctacaaggagatggtgagcgagtactgctggctggacagactgagcaacggcgtgctgcagcagctgagccccgccagcgagagcagcagcagcgtgagcagctgcgccagcagcgccccctacagcagcggcagcctgcccagcgacagaatggacatctgcctgggccaggaggagcccggcagcagaggccccggctggggcagagccgacaccgccatgcagaccgagcccgacgccggcggcagagtggagacctggtgcagcgtgagacccaccgtgatcctgagagacaccgccatcagaagcgacggcccccaccccggcagaagactggacagcgccctgagcgagagccccaagaccgccctgctgctggccctgagcagacccagaccccccatcaccagaagccagagctacctgaccctgtgggaggagaagcagcagagaaagaaggagaagagcggcagccccggcgagaagggcgccctgcagagaagcaagaccctgatgaacctgttcttcaagggcggcagacagggcagactggccagagacggcagaagagaggcctggaccctggacagcggcagcctggccaagacctaccccagactggacatcgagaaggccggcggcgtgggccccgtgcagaagttcgtgacctggagactgagaagagaccaggagagaggcagagccctgctgagcgccagaagcggcagccccagcagccagctgcccaacgtggacgagcaggtgcaggcctgggagagcagaagacccctgatccaggacctggcccagagactgctgaccgacgacgaggtgctggccgtgaccagacactgcagcagatacgtgcacgagggcggcatcgaggacctggtgagacccctgctggccatcctggacagacccgagaagctgctgctgctgcaggacatcagaagcgtggtggcccccaccgacctgggcagattcgacagcatggtgatgctggtggagctggaggccttcgaggccctgaagagcagagccgtgagaccccccgccctgagacccgccagacaggacaccccccccaagagacacctgatcacccccgtgcccgacagcagaggcggcttctacctgctgcccgtgaacggcttccccgaggaggaggacaacggcgagctgagagagagactgggcgccctgaaggtgagccccagcgccagcgcccccagacacccccacaagggcatcccccccctgcaggacgtgcccgtggacgccttcacccccctgagaatcgcctgcaccccccccccccagctgccccccgtggcccccagacccctgagacccaactggctgctgaccgagcccctgagcagagagcaccccccccagagccagatcagaggcagagcccagagcagaagcagaagcagaagcagaagcagaagcagaagcagcagaggccagggcaagagccccggcagaagaagccccagccccgtgcccacccccgcccccagcatgaccaacggcagataccacaagcccagaaaggccagaccccccctgcccagacccctggacggcgaggccgccaaggtgggcgccaagcagggccccagcgagagcggcaccgagggcaccgccaaggaggccgccatgaagaaccccagcggcgagctgaagaccgtgaccctgagcaagatgaagcagagcctgggcatcagcatcagcggcggcatcgagagcaaggtgcagcccatggtgaagatcgagaagatcttccccggcggcgccgccttcctgagcggcgccctgcaggccggcttcgagctggtggccgtggacggcgagaacctggagcaggtgacccaccagagagccgtggacaccatcagaagagcctacagaaacaaggccagagagcccatggagctggtggtgagagtgcccggccccagccccagacccagccccagcgacagcagcgccctgaccgacggcggcctgcccgccgaccacctgcccgcccaccagcccctggacgccgcccccgtgcccgcccactggctgcccgagccccccaccaacccccagaccccccccaccgacgccagactgctgcagcccacccccagccccgcccccagccccgccctgcagacccccgacagcaagcccgcccccagccccagaatcccctag

SEQ ID NO: 74687 - protein, 321 aa, Artificial Sequence
  derived and/or modified sequence
MSADNSSTICVCRSVRQELGIAIGFLVPPVLVPNIEDRDELAYHISIMFYIIGGVATLLLILVIIVFKEKPKYPPSRAQSLSYALTSPDASYLGSIARLFKNLNFVLLVITYGLNAGAFYALSTLLNRMVIWHYPGEEVNAGRIGLTIVIAGMLGAVISGIWLDRSKTYKETTLVVYIMTLVGMVVYTFTLNLGHLWVVFITAGTMGFFMTGYLPLGFEFAVELTYPESEGISSGLLNISAQVFGIIFTISQGQIIDNYGTKPGNIFLCVFLTLGAALTAFIKADLRRQKANKETLENKLQEEEEESNTSKVPTAVSEDHL

SEQ ID NO: 74688 - DNA, 966 bp, Artificial Sequence
  derived and/or modified sequence
atgagcgccgacaacagcagcaccatctgcgtgtgcagaagcgtgagacaggagctgggcatcgccatcggcttcctggtgccccccgtgctggtgcccaacatcgaggacagagacgagctggcctaccacatcagcatcatgttctacatcatcggcggcgtggccaccctgctgctgatcctggtgatcatcgtgttcaaggagaagcccaagtacccccccagcagagcccagagcctgagctacgccctgaccagccccgacgccagctacctgggcagcatcgccagactgttcaagaacctgaacttcgtgctgctggtgatcacctacggcctgaacgccggcgccttctacgccctgagcaccctgctgaacagaatggtgatctggcactaccccggcgaggaggtgaacgccggcagaatcggcctgaccatcgtgatcgccggcatgctgggcgccgtgatcagcggcatctggctggacagaagcaagacctacaaggagaccaccctggtggtgtacatcatgaccctggtgggcatggtggtgtacaccttcaccctgaacctgggccacctgtgggtggtgttcatcaccgccggcaccatgggcttcttcatgaccggctacctgcccctgggcttcgagttcgccgtggagctgacctaccccgagagcgagggcatcagcagcggcctgctgaacatcagcgcccaggtgttcggcatcatcttcaccatcagccagggccagatcatcgacaactacggcaccaagcccggcaacatcttcctgtgcgtgttcctgaccctgggcgccgccctgaccgccttcatcaaggccgacctgagaagacagaaggccaacaaggagaccctggagaacaagctgcaggaggaggaggaggagagcaacaccagcaaggtgcccaccgccgtgagcgaggaccacctgtag

SEQ ID NO: 74689 - DNA, 1221 bp, Artificial Sequence
  derived and/or modified sequence
acttctgctttctgacttgattacaggcatctttcctttttcatgctgtgcaaaaacttgagctcagcctctcaccccaacacaattcaagacgcagccttgtcccagcatgagcgcagataacagcagcaccatctgtgtttgtagaagcgtgagacaggagcttggaattgcgattgggttcttggtccctcctgttttggtacccaacattgaagaccgggacgagcttgcctaccacatcagcatcatgttctatataataggaggtgtggccactctcctcctcatccttgtcatcattgtgttcaaggagaaacctaaatatccccccagcagggcccaatccctgagctatgccttgacctctcctgatgcctcatacttaggttccatcgcccggctcttcaaaaatctcaactttgtgctgcttgtcatcacctatggtctgaatgctggtgctttttatgccttgtccactcttctgaatcgcatggtgatctggcactacccgggggaagaagtgaatgctggaagaattggcctgacgatcgtcattgcaggaatgcttggggctgtgatctcaggaatctggctggataggtccaaaacctacaaagagacaaccctggtagtctatatcatgacactggtgggcatggtggtgtacacgtttaccttgaacctgggacacctgtgggtagtgttcatcactgctggcacaatgggcttctttatgactggctatctcccactgggatttgagtttgctgtggagctcacgtacccagaatcagaaggcatctcctccggcctcctcaacatatctgcacaggtatttgggatcatctttaccatctcccagggccagattattgacaactatggaaccaagcctgggaacatcttcctgtgtgtgttccttactcttggagcagccctcactgcattcattaaggcagatctccggagacagaaagcaaacaaagaaactcttgagaacaaactccaagaggaggaggaggagagcaacaccagcaaagtgcccactgctgtgtcagaggatcatctctgagaggaaggtggtgacaactcagggaacacgaacaccccaccttttccttcagcacagctctcaccgccagcacaaagggcttcgctagagatgtttttggagggaatcagtgggactatttgtggcatggatggcctattcctcct

SEQ ID NO: 74690 - DNA, 966 bp, Artificial Sequence
  derived and/or modified sequence
atgtcagctgacaacagctcgacaatttgcgtgtgtcgctctgtgcgccaggaactcgggatcgccatcggcttcctagttccgcccgtgttagtccctaatatcgaggaccgggacgaactagcctaccacatttcaatcatgttttacataattggcggagtggcaaccttactgttaatcctagtgatcattgtgttcaaagagaaaccgaaatatccaccttctcgggcccagtcattatcctatgcccttacctctcctgacgcttcatacctgggctcaatcgctaggctgtttaagaacctgaacttcgtgctgctggtgattacctatggcctcaacgccggagccttttacgctctttcgaccctcctgaacaggatggtgatctggcattaccccggtgaggaagttaacgctggccggatagggctgacaattgtcatagcaggaatgcttggtgccgttataagcgggatttggttagacagatccaaaacatacaaggaaacgacactggttgtctatataatgactctcgtaggcatggtggtttataccttcactcttaatctcggacatctctgggtcgtattcatcaccgccggaacaatggggttcttcatgactgggtatctcccactcggcttcgagtttgcagttgagctgacctacccagagtcggaggggatctcctctggcctcctcaatatctccgcacaggtgttcggtatcatattcacaatttcccaagggcagataatcgacaattatggcaccaaacctggtaacatctttctttgcgtgttcctgactctcggcgctgccctaactgcatttatcaaggccgacctccgaagacagaaagcgaataaggagaccctggagaataaactccaggaagaagaagaggagagtaatacatctaaggtgcccaccgctgtcagcgaggaccacctttag

SEQ ID NO: 74691 - DNA, 966 bp, Artificial Sequence
  derived and/or modified sequence
atgtctgctgacaacagcagcaccatctgtgtgtgccgctctgtgcggcaggagctgggcatcgccatcggcttcctggtgccccctgtgctggtgcccaacatcgaggacagagatgagctggcctaccacatcagcatcatgttctacatcatcggcggcgtggccaccctgctgctgatcctggtgatcatcgtgttcaaggagaagcccaagtacccacccagccgggcccagagcctgtcctatgccctgaccagcccagatgccagctacctgggcagcatcgcccggctcttcaagaacctgaactttgtgctgctggtgatcacctacggcctgaatgctggggccttctacgccctgagcaccctgctgaacaggatggtgatctggcactacccaggagaggaggtgaatgccggccgcatcggcctgaccatcgtgattgctggcatgctgggcgccgtcatcagcggcatctggctggacaggagcaagacctacaaggagaccaccctggtggtgtacatcatgaccctggtgggcatggtggtgtacaccttcaccctgaacctgggccacctgtgggtggtgttcatcacagctggcaccatgggcttcttcatgacaggctacctgcccctgggctttgaatttgctgtggagctgacctacccagagagcgagggcatcagcagcggcctgctgaacatcagcgcccaggtgtttggcatcatcttcaccatcagccagggccagatcatcgacaactacggcaccaagccaggcaacatcttcctgtgtgtgttcctgaccctgggcgccgccctgacagccttcatcaaggctgacctgcggcggcagaaggccaacaaggagaccctggagaacaagctgcaggaggaggaggaggagagcaacaccagcaaggtgcccacagctgtgtctgaggaccacctgtag

SEQ ID NO: 74692 - DNA, 966 bp, Artificial Sequence
  derived and/or modified sequence
atgagcgccgacaacagcagcaccatctgcgtgtgccggagcgtgcgtcaggagttagggattgccattgggtttttagtgccccccgtgcttgtgccgaatatcgaggaccgggacgagctcgcttaccatattagtatcatgttttacataatcgggggagtcgctacgctgctcctgatactggtgattatagtctttaaagagaaacctaagtatcctcccagtagagcccaaagcctgagttacgcattgactagccctgatgccagttacctgggatcaatcgctagattgttcaagaatctgaattttgttttactcgtgattacatacggcctgaacgctggcgcgttctatgcccttagcacactgctgaacagaatggtgatttggcactacccaggcgaagaggtgaatgctgggaggatcggcctgaccatagtcatcgccggaatgctcggggccgtcatctctggcatctggctcgatcgctccaagacctataaggagacaaccctcgtggtatacataatgaccctggtgggcatggttgtgtataccttcaccctgaatctaggtcacctgtgggtggttttcattaccgctggtaccatgggtttctttatgaccgggtatttgccactgggcttcgagtttgccgttgagttgacatacccagaaagcgaggggattagttcgggcctgttgaatatcagcgcacaagtctttgggatcatctttacaatttcacaaggacagattatcgataactatggaacaaaacctggcaacatcttcctgtgcgtttttctaacgttgggggccgcccttacagccttcataaaagcagatttgaggagacagaaagccaataaggagacactcgagaataagctgcaagaagaggaagaggaaagcaataccagtaaagtccccacggcagtgtccgaagatcacttatag

SEQ ID NO: 74693 - DNA, 966 bp, Artificial Sequence
  derived and/or modified sequence
atgtcagctgacaactcgtcaacgatttgcgtgtgtagatccgtgcgccaggaactgggcattgccataggctttctggtgccacccgtcctggtaccaaatatcgaagatcgggacgagctggcttatcatatttctatcatgttttatattataggaggagtggctaccctgctgctcattctggtaattatcgtgttcaaagaaaaaccgaaatatcccccaagtagggctcaaagcctgtcgtacgccctgacttctcccgatgccagctatctcggctcaatcgccaggttgttcaagaatctgaacttcgtactgctggtgattacctatggcctgaacgccggtgccttctacgccctgtctacactcctgaaccggatggtcatatggcattatccgggtgaggaggtgaatgcgggacgtatcgggctgactatcgttattgcgggtatgctaggtgccgtgatttccggaatttggctggacaggtcgaaaacctacaaagagaccacccttgtggtctacattatgacgcttgtcggaatggtcgtttataccttcacactgaacctcggacacttgtgggtggtgttcatcactgccggtactatgggctttttcatgacagggtatttgccacttggcttcgaattcgccgtggaattaacctatcccgaatccgaagggatcagctcaggtctgctgaacatttcggcgcaggttttcgggattatattcacgatttcacaaggccagattatcgataattatgggaccaaacctggcaatatcttcctgtgtgtgtttctcaccttgggcgctgcactgacagctttcataaaggctgacctgaggcgacagaaagcgaataaagaaactttagagaacaagctccaggaggaggaggaagaatccaacacgagtaaagtcccaacagccgtttcagaggaccatctctag

SEQ ID NO: 74694 - protein, 480 aa, Artificial Sequence
  derived and/or modified sequence
LGPTAALSSESRARAAQAGGGPRARARTRGMNLEGGGRGGEFGMSAVSCGNGKLRQWLIDQIDSGKYPGLVWENEEKSIFRIPWKHAGKQDYNREEDAALFKAWALFKGKFREGIDKPDPPTWKTRLRCALNKSNDFEELVERSQLDISDPYKVYRIVPEGAKKGAKQLTLEDPQMSMSHPYTMTTPYPSLPAQVHNYMMPPLDRSWRDYVPDQPHPEIPYQCPMTFGPRGHHWQGPACENGCQVTGTFYACAPPESQAPGVPTEPSIRSAEALAFSDCRLHICLYYREILVKELTTSSPEGCRISHGHTYDASNLDQVLFPYPEDNGQRKNIEKLLSHLERGVVLWMAPDGLYAKRLCQSRIYWDGPLALCNDRPNKLERDQTCKLFDTQQFLSELQAFAHHGRSLPRFQVTLCFGEEFPDPQRQRKLITAHVEPLLARQLYYFAQQNSGHFLRGYDLPEHISNPEDYHRSIRHSSIQE

SEQ ID NO: 74695 - DNA, 1443 bp, Artificial Sequence
  derived and/or modified sequence
ctgggccccaccgccgccctgagcagcgagagcagagccagagccgcccaggccggcggcggccccagagccagagccagaaccagaggcatgaacctggagggcggcggcagaggcggcgagttcggcatgagcgccgtgagctgcggcaacggcaagctgagacagtggctgatcgaccagatcgacagcggcaagtaccccggcctggtgtgggagaacgaggagaagagcatcttcagaatcccctggaagcacgccggcaagcaggactacaacagagaggaggacgccgccctgttcaaggcctgggccctgttcaagggcaagttcagagagggcatcgacaagcccgacccccccacctggaagaccagactgagatgcgccctgaacaagagcaacgacttcgaggagctggtggagagaagccagctggacatcagcgacccctacaaggtgtacagaatcgtgcccgagggcgccaagaagggcgccaagcagctgaccctggaggacccccagatgagcatgagccacccctacaccatgaccaccccctaccccagcctgcccgcccaggtgcacaactacatgatgccccccctggacagaagctggagagactacgtgcccgaccagccccaccccgagatcccctaccagtgccccatgaccttcggccccagaggccaccactggcagggccccgcctgcgagaacggctgccaggtgaccggcaccttctacgcctgcgccccccccgagagccaggcccccggcgtgcccaccgagcccagcatcagaagcgccgaggccctggccttcagcgactgcagactgcacatctgcctgtactacagagagatcctggtgaaggagctgaccaccagcagccccgagggctgcagaatcagccacggccacacctacgacgccagcaacctggaccaggtgctgttcccctaccccgaggacaacggccagagaaagaacatcgagaagctgctgagccacctggagagaggcgtggtgctgtggatggcccccgacggcctgtacgccaagagactgtgccagagcagaatctactgggacggccccctggccctgtgcaacgacagacccaacaagctggagagagaccagacctgcaagctgttcgacacccagcagttcctgagcgagctgcaggccttcgcccaccacggcagaagcctgcccagattccaggtgaccctgtgcttcggcgaggagttccccgacccccagagacagagaaagctgatcaccgcccacgtggagcccctgctggccagacagctgtactacttcgcccagcagaacagcggccacttcctgagaggctacgacctgcccgagcacatcagcaaccccgaggactaccacagaagcatcagacacagcagcatccaggagtag

SEQ ID NO: 74696 - DNA, 1443 bp, Artificial Sequence
  derived and/or modified sequence
ttgggccctaccgccgccctttcctccgaaagtcgggctcgggccgctcaggcgggtggcggacccagagctcgggcgcgcactcgcggcatgaacctggagggcggaggtcgtgggggagaattcgggatgtcagctgtcagctgcgggaacgggaagctgcggcaatggcttatcgaccagatcgactccggcaaataccctggcctggtttgggagaacgaggaaaaaagtatcttccgcataccctggaaacatgccgggaaacaggactataatagggaggaggatgcagccctgttcaaggcttgggccttattcaagggaaagttccgagagggaatcgataagccggaccccccgacctggaagacacgcttgcggtgtgcacttaacaagtcgaatgatttcgaagaattggtcgagagaagccaactggatatatctgatccatataaagtatacaggattgtgcccgaaggagctaagaaaggggcaaagcaattaaccctcgaggaccctcaaatgtccatgtcccacccctacaccatgacaactccctatccatccctccccgcccaggtgcataactacatgatgccacccctcgaccgatcgtggcgtgattacgtgcccgatcagcctcacccagaaataccatatcagtgcccaatgacttttgggcctcggggtcaccattggcaggggcctgcttgcgaaaacggctgccaggttacaggtactttctacgcttgcgctccccccgaatctcaggcaccaggagttccaaccgagccaagcatacggtccgcagaagccctcgcattcagcgattgccggctgcatatatgcctttattatagagaaatacttgttaaagagctcaccacttcctctcccgaggggtgtagaattagccacggacacacgtatgatgcaagcaatctggaccaggtgctcttcccttatcctgaggataacggccaacggaaaaacatagagaagctgctgagtcatctcgagagaggcgttgtactctggatggcgccagatggtctctacgcgaaaaggctgtgccaatctaggatatactgggatggaccccttgcgctctgtaatgacaggccaaacaagctagagcgcgaccagacttgtaaactgtttgacacccagcagttcctgtctgagctgcaagcctttgcacaccatggaagatctttgccaaggtttcaggtaactttatgctttggcgaggagttccctgatccccagcggcagagaaagctgattaccgcccacgtcgaaccactgcttgcaaggcagctatattacttcgcacagcagaactccgggcactttctaaggggctacgacctccccgaacacatttctaaccctgaggactatcaccgtagcatccgacattcttctattcaagaatag

SEQ ID NO: 74697 - DNA, 1443 bp, Artificial Sequence
  derived and/or modified sequence
ctgggccccacagctgccctgagcagcgagagccgggcccgggccgcccaggccggcggcggcccccgggcccgggcccggacccggggcatgaacctggagggcggcggccggggcggggagtttggcatgtctgctgtgtcctgtggaaatggcaagctgcggcagtggctgattgaccagattgacagcggcaagtacccaggcctggtgtgggagaatgaggagaagagcatcttccgcatcccctggaagcatgctgggaagcaggactacaaccgggaggaggatgctgccctcttcaaggcctgggccctcttcaagggcaagttccgggagggcatcgacaagccagacccccccacctggaagacccggctgcgctgtgccctgaacaagagcaatgactttgaggagctggtggagaggagccagctggacatcagtgacccctacaaggtgtacagaattgtgcctgagggcgccaagaagggggccaagcagctgaccctggaggacccccagatgtccatgagccacccctacaccatgaccaccccctaccccagcctgcctgcccaggtgcacaactacatgatgccacccctggaccgctcctggagggactatgtgcctgaccagccccaccctgagatcccctaccagtgccccatgaccttcggcccccggggccaccactggcagggccctgcctgtgaaaatggctgccaggtgacaggcaccttctacgcctgtgcccctcctgagagccaggcccctggggtgcccacagagcccagcatccgctctgctgaggccctggccttcagtgactgccgcctgcacatctgcctgtactaccgggagatcctggtgaaggagctgaccaccagcagccctgagggctgccgcatcagccacggccacacctatgatgccagcaacctggaccaggtgctcttcccctacccagaagataatggccagaggaagaacatcgagaagctgctgagccacctggagcggggcgtggtgctgtggatggccccagatggcctgtatgccaagaggctgtgccagagccgcatctactgggatggccccctggccctgtgcaatgaccggcccaacaagctggagcgggaccagacctgcaagctgtttgacacccagcagttcctgtctgagctgcaggcctttgcccaccacggccgcagcctgccccgcttccaggtgaccctgtgcttcggggaggagttcccagacccccagaggcagaggaagctgatcacagcccacgtggagcccctgctggcccggcagctgtactactttgcccagcagaacagcggccacttcctgcggggctatgacctgcctgagcacatcagcaaccctgaggactaccacaggagcatccgccacagcagcatccaggagtag

SEQ ID NO: 74698 - DNA, 5305 bp, Artificial Sequence
  derived and/or modified sequence
agtttcaccgctcgatcttgggacccaccgctgccctcagctccgagtccagggcgagggcagcgcaggcgggcggaggaccccgggcgcgggcgcggacgcggggcatgaacctggagggcggcggccgaggcggagagttcggcatgagcgcggtgagctgcggcaacgggaagctccgccagtggctgatcgaccagatcgacagcggcaagtaccccgggctggtgtgggagaacgaggagaagagcatcttccgcatcccctggaagcacgcgggcaagcaggactacaaccgcgaggaggacgccgcgctcttcaaggcttgggcactgtttaaaggaaagttccgagaaggcatcgacaagccggaccctcccacctggaagacgcgcctgcggtgcgctttgaacaagagcaatgactttgaggaactggttgagcggagccagctggacatctcagacccgtacaaagtgtacaggattgttcctgagggagccaaaaaaggagccaagcagctcaccctggaggacccgcagatgtccatgagccacccctacaccatgacaacgccttacccttcgctcccagcccaggttcacaactacatgatgccacccctcgaccgaagctggagggactacgtcccggatcagccacacccggaaatcccgtaccaatgtcccatgacgtttggaccccgcggccaccactggcaaggcccagcttgtgaaaatggttgccaggtgacaggaaccttttatgcttgtgccccacctgagtcccaggctcccggagtccccacagagccaagcataaggtctgccgaagccttggcgttctcagactgccggctgcacatctgcctgtactaccgggaaatcctcgtgaaggagctgaccacgtccagccccgagggctgccggatctcccatggacatacgtatgacgccagcaacctggaccaggtcctgttcccctacccagaggacaatggccagaggaaaaacattgagaagctgctgagccacctggagaggggcgtggtcctctggatggcccccgacgggctctatgcgaaaagactgtgccagagcaggatctactgggacgggcccctggcgctgtgcaacgaccggcccaacaaactggagagagaccagacctgcaagctctttgacacacagcagttcttgtcagagctgcaagcgtttgctcaccacggccgctccctgccaagattccaggtgactctatgctttggagaggagtttccagaccctcagaggcaaagaaagctcatcacagctcacgtagaacctctgctagccagacaactatattattttgctcaacaaaacagtggacatttcctgaggggctacgatttaccagaacacatcagcaatccagaagattaccacagatctatccgccattcctctattcaagaatgaaaaatgtcaagatgagtggttttctttttcctttttttttttttttttttgatacggggatacggggtcttgctctgtctcccaggctggagtgcagtgacacaatctcagctcactgtgacctccgcctcctgggttcaagagactctcctgcctcagcctccctggtagctgggattacaggtgtgagccactgcacccacccaagacaagtgattttcattgtaaatatttgactttagtgaaagcgtccaattgactgccctcttactgttttgaggaattcagaagtggagatttcagttcagcggttgaggagaattgcggcgagacaagcatggaaaatcagtgacatctgattggcagatgagcttatttcaaaaggaagggtggctttgcatttcttgtgttctgtagactgccatcattgatgatcactgtgaaaattgaccaagtgatgtgtttacatttactgaaatgcgctctttaatttgttgtagattaggtcttgctggaagacagagaaaacttgcctttcagtattgacactgactagagtgatgactgcttgtaggtatgtctgtgccatttctcagggaagtaagatgtaaattgaagaagcctcacacgtaaaagaaatgtattaatgtatgtaggagctgcagttcttgtggaagacacttgctgagtgaaggaaatgaatctttgactgaagccgtgcctgtagccttggggaggcccatcccccacctgccagcggtttcctggtgtgggtccctctgccccgccctccttcccattggctttctctccttggcctttcctggaagccagttagtaaacttcctattttcttgagtcaaaaaacatgagcgctactcttggatgggacatttttgtctgtcctacaatctagtaatgtctaagtaatggttaagttttcttgtttctgcatctttttgaccctcattctttagagatgctaaaattcttcgcataaagaagaagaaattaaggaacataaatcttaatacttgaactgttgcccttctgtccaagtacttaactatctgttcccttcctctgtgccacgctcctctgtttgtttggctgtccagcgatcagccatggcgacactaaaggaggaggagccggggactcccaggctggagagcactgccaggacccaccactggaagcaggatggagctgactacggaactgcacactcagtgggctgtttctgcttatttcatctgttctatgcttcctcgtgccaattatagtttgacagggccttaaaattacttggctttttccaaatgcttctatttatagaatcccaaagacctccacttgcttaagtatacctatcacttacatttttgtggttttgagaaagtacagcagtagactggggcgtcacctccaggccgtttctcatactacaggatatttactattactcccaggatcagcagaagattgcgtagctctcaaatgtgtgttcctgcttttctaatggatattttaaattcattcaacaagcacctagtaagtgcctgctgtatccctacattacacagttcagcctttatcaagcttagtgagcagtgagcactgaaacattattttttaatgtttaaaaagtttctaatattaaagtcagaatattaatacaattaatattaatattaactacagaaaagacaaacagtagagaacagcaaaaaaataaaaaggatctccttttttcccagcccaaattctcctctctaaaagtgtccacaagaaggggtgtttattcttccaacacatttcacttttctgtaaatatacataaacttaaaaagaaaacctcatggagtcatcttgcacacactttcatgcagtgctctttgtagctaacagtgaagatttacctcgttctgctcagaggccttgctgtggagctccactgccatgtacccagtagggtttgacatttcattagccatgcaacatggatatgtattgggcagcagactgtgtttcgtgaactgcagtgatgtatacatcttatagatgcaaagtattttggggtatattatcctaagggaagataaagatgatattaagaactgctgtttcacggggcccttacctgtgaccctctttgctgaagaatatttaaccccacacagcacttcaaagaagctgtcttggaagtctgtctcaggagcaccctgtcttcttaattctccaagcggatgctccatttcaattgctttgtgacttcttcttctttgtttttttaaatattatgctgctttaacagtggagctgaattttctggaaaatgcttcttggctggggccactacctcctttcctatctttacatctatgtgtatgttgactttttaaaattctgagtgatccagggtatgacctagggaatgaactagctatgaaatactcagggttaggaatcctagcacttgtctcaggactctgaaaaggaacggcttcctcattccttgtcttgataaagtggaattggcaaactagaatttagtttgtactcagtggacagtgctgttgaagatttgaggacttgttaaagagcactgggtcatatggaaaaaatgtatgtgtctcccaggtgcatttcttggtttatgtcttgttcttgagattttgtatatttaggaaaacctcaagcagtaattaatatctcctggaacactatagagaaccaagtgaccgactcatttacaactgaaacctaggaagcccctgagtcctgagcgaaaacaggagagttagtcgccctacagaaaacccagctagactattgggtatgaactaaaaagagactgtgccatggtgagaaaaatgtaaaatcctacagtgaaatgagcagcccttacagtattgttaccaccaagggcaggtaggtattagtgtttgaaaaagctggtctttgagcgagggcataaatacagctagccccaggggtggaacaactctgggagtcttgggtactcgcacctcttggctttgttgatgctccgccaggaaggccacttgtgtgtgcgtgtcagttacttttttagtaacaattcagatccagtgtaaacttccgttcattgctctccagtcacatgcccccacttccccacaggtgaaagtttttctgaaagtgttgggattggttaaggtctttatttgtattacgtatctcccgaagtcctctgtggccagctgcatctgtctgaatggtgcgtgaaggctctcagaccttacacaccattttgtaagttatgttttacatgccccgtttttgagactgatctcgatgcaggtggatctccttgagatcctgatagcctgttacaggaatgaagtaaaggtcagtttttttttgtattgattttcacagctttgaggaacatgcataagaaatgtagctgaagtagaggggacgtgagagaagggccaggccggcaggccaaccctcctccaatggaaattcccgtgttgcttcaaactgagacagatgggacttaacaggcaatggggtccacttccccctcttcagcatcccccgtaccccactttctgctgaaagaactgccagcaggtaggaccccagaggcccccaaatgaaagcttgaatttcccctactggctctgcgttttgctgagatctgtaggaaaggatgcttcacaaactgaggtagataatgctatgctgtcgttggtatacatcatgaatttttatgtaaattgctctgcaaagcaaattgatatgtttgataaatttatgtttttaggtaaataaaaacttttaaaaatttgtta

SEQ ID NO: 74699 - DNA, 1443 bp, Artificial Sequence
  derived and/or modified sequence
ctgggccccaccgccgccctgagcagcgagagccgggcccgggccgctcaggctggcggaggcccaagggcgcgagccaggacacgggggatgaaccttgagggcggggggcgtgggggtgagttcgggatgtcagctgtgagctgcggtaacggcaaactcagacagtggctcattgaccagatcgactctggcaagtaccccgggctggtatgggaaaatgaagagaagtctatcttcagaatcccctggaagcacgccgggaagcaggactataatcgtgaagaggatgctgccctttttaaagcttgggcgctgttcaagggcaagttccgcgagggaatagataaaccagacccgcccacctggaaaactagactccgatgtgcactcaacaagtcaaacgattttgaggaactcgtggaacggtcccagttagatatcagcgatccctataaagtctaccggatcgtaccagaaggagcgaagaagggcgcaaaacagctgacactggaggatccgcagatgtccatgtcacacccttatactatgaccactccctaccctagtcttcctgcccaggttcacaactatatgatgccaccactggataggagttggcgagattacgttccagatcagccccaccccgaaatcccctatcagtgcccaatgacattcggtccacgtggtcatcactggcagggacctgcctgcgagaacggctgtcaggtgactggtaccttctacgcatgcgctcctcccgaatcccaggcccctggcgtgccaacagagccctccatccgatcagctgaggcgctggcttttagcgactgccgcctccacatttgcctgtactatagggaaatcttggttaaggagttgacgacttcctcccccgagggatgtagaattagccatggccacacttatgatgcatcaaacctggatcaggtgctattcccctacccagaagataacgggcaaaggaaaaacatcgaaaagcttctctcacacctcgagaggggcgtggtgctgtggatggcgcctgacgggctttacgccaaacgactgtgccaatcacgcatctactgggatggaccattagccctgtgcaatgatcggccaaacaagctggaacgcgaccagacatgtaagctgttcgacacccagcagtttctgtccgaattgcaggcctttgcacaccacggtcgcagtctccccagattccaagtcaccctctgttttggcgaagaattcccagatccccaacgtcaaagaaaactcatcaccgctcacgttgagccgctgctcgctagacagctatactacttcgctcagcagaacagtggccacttcctgcggggctatgaccttcccgaacacatttccaatcctgaggactaccacaggtctattaggcacagcagcattcaggaatag

SEQ ID NO: 74700 - DNA, 1443 bp, Artificial Sequence
  derived and/or modified sequence
ctggggcctacggccgctctcagctctgaaagtagggctagagccgcacaggcagggggtggtcctagggcccgtgccaggactcggggtatgaatctggaaggaggcggaagaggtggcgagttcgggatgtccgctgtttcatgcgggaatgggaaacttagacaatggctgatcgatcagatcgatagcggaaagtacccaggcctggtttgggagaacgaagagaagtctattttcagaatcccatggaagcacgctggcaagcaggactataacagagaggaggatgctgccttatttaaggcctgggccctctttaagggcaaatttcgagaaggaatcgataaacccgacccccctacctggaagaccaggttgcgatgtgcacttaataagtccaacgactttgaggaactcgttgagagatctcagttggacatctccgatccatacaaagtgtacagaattgtgccggagggcgctaagaaaggcgctaagcagcttaccttggaggacccacagatgtccatgagccatccttacactatgactacaccatacccctcactgcccgctcaggtgcataactatatgatgccgccactggatagaagctggagggactatgtgccagaccagcctcaccccgagattccgtaccagtgcccaatgacctttggccctagagggcatcactggcaggggccagcttgtgaaaacggatgtcaggtgactggcacgttctatgcttgtgccccacccgagtcccaggctcccggagtgcctacagaacctagcattcggagtgccgaggcattggctttcagcgattgcaggctccatatatgcctctactaccgcgaaattctcgtcaaggaactcaccacttcaagccctgagggttgccggatctctcacgggcacacctacgacgcgtccaatcttgaccaggtactgttcccctaccctgaggacaacggacagaggaaaaacatcgagaaactgctgtcacatctggagagaggggttgtcctgtggatggcccctgacggattgtacgccaagaggttgtgccaaagccggatctattgggatgggcctttagccctgtgtaatgacaggcctaacaagctggaacgcgatcagacttgtaaactgtttgatacccaacagttcctctccgagcttcaggcctttgcgcatcacggcagatcactccccagatttcaggtcactttatgttttggggaggagttcccagacccacagcggcagcggaagctcattacagcacacgtggaacccctgctggcaaggcaactgtattacttcgcacagcaaaactcgggacactttctcagagggtatgacttgcccgaacacatttcgaaccctgaggactatcatcggagcatcaggcatagtagcatccaggaatag

SEQ ID NO: 74701 - protein, 80 aa, Artificial Sequence
  derived and/or modified sequence
MKLSGMFLLLSLALFCFLTGVFSQGGQVDCGEFQDPKVYCTRESNPHCGSDGQTYGNKCAFCKAIVKSGGKISLKHPGKC

SEQ ID NO: 74702 - protein, 41 aa, Artificial Sequence
  derived and/or modified sequence
MKLSGMFLLLSLALFCFLTGVFSQGGQVDCGEFQDPKVYCT

SEQ ID NO: 74703 - DNA, 243 bp, Artificial Sequence
  derived and/or modified sequence
atgaaactgagtggaatgttcctgctgctctcccttgcccttttttgttttctgaccggtgtcttttcgcagggaggacaggttgattgtggagagtttcaggacccaaaagtttactgcacacgtgagagtaacccacattgtggaagcgatgggcagacttatgggaacaaatgcgctttttgcaaggccatcgtcaaaagcggaggcaagatctccctcaaacaccccggaaaatgctag

SEQ ID NO: 74704 - DNA, 126 bp, Artificial Sequence
  derived and/or modified sequence
atgaaactgagcggaatgtttctgctgctctctctcgcactcttctgcttccttactggagtttttagccagggaggtcaggttgactgcggcgaattccaggatcccaaggtgtactgtacatag

SEQ ID NO: 74705 - DNA, 243 bp, Artificial Sequence
  derived and/or modified sequence
atgaagctttcaggtatgttcttgttgctttcactggcccttttttgctttctgactggagtttttagccagggcggccaggttgattgcggagaatttcaagacccaaaggtctattgtacacgtgaatccaatcctcattgcgggtccgatggtcagacgtacggaaacaaatgtgccttttgtaaagccatagtgaagtctggaggaaagatttcactaaagcacccaggtaaatgttag

SEQ ID NO: 74706 - DNA, 126 bp, Artificial Sequence
  derived and/or modified sequence
atgaaattaagtggtatgtttctactccttagccttgcactcttttgttttcttaccggcgtcttttcacaggggggtcaggtcgactgcggtgagtttcaagatcccaaagtgtactgtacctag

SEQ ID NO: 74707 - DNA, 300 bp, Artificial Sequence
  derived and/or modified sequence
gtagtgaaactttagaaagaagagccgggaggatgtattggttgttaggaaaatgtaggctaccagtagaaaatgacattctctattaataagatctgagggctttctgggaattgtcttgacagagaacctcagctggacaaagcagccttgatctgagtgagctaactgacacaatgaaactgtcaggcatgtttctgctcctctctctggctcttttctgctttttaacaggtgtcttcagtcagggaggacaggttgactgtggtgagttccaggaccccaaggtctactgcactc

SEQ ID NO: 74708 - DNA, 243 bp, Artificial Sequence
  derived and/or modified sequence
atgaagctgagcggcatgttcctgctgctgagcctggccctgttctgcttcctgaccggcgtgttcagccagggcggccaggtggactgcggcgagttccaggaccccaaggtgtactgcaccagagagagcaacccccactgcggcagcgacggccagacctacggcaacaagtgcgccttctgcaaggccatcgtgaagagcggcggcaagatcagcctgaagcaccccggcaagtgctag

SEQ ID NO: 74709 - DNA, 686 bp, Artificial Sequence
  derived and/or modified sequence
ggaaaatgtaggctaccagtagaaaatgacattctctattaataagatctgaggtgcgacacacataattgtcccaatttttaagattgatggggagcatgaagcatttttttaatgtgttggcaggccccattaaatgcataaactgcataggactcatgtggtctgaatgtattttagggctttctgggaattgtcttgacagagaacctcagctggacaaagcagccttgatctgagtgagctaactgacacaatgaaactgtcaggcatgtttctgctcctctctctggctcttttctgctttttaacaggtgtcttcagtcagggaggacaggttgactgtggtgagttccaggaccccaaggtctactgcactcgggaatctaacccacactgtggctctgatggccagacatatggcaataaatgtgccttctgtaaggccatagtgaaaagtggtggaaagattagcctaaagcatcctggaaaatgctgagttaaagccaatgtttcttggtgacttgccagcttttgcagccttcttttctcacttctgcttatacttttgctggtggattcctttaattcataaagacatacctactctgcctgggtcttgaggagttcaatgtatgtctatttctcttgattcacttgtcaataaagtacattctgcaaaagca

SEQ ID NO: 74710 - DNA, 126 bp, Artificial Sequence
  derived and/or modified sequence
atgaagctgagcggcatgttcctgctgctgagcctggccctgttctgcttcctgaccggcgtgttcagccagggcggccaggtggactgcggcgagttccaggaccccaaggtgtactgcacctag

SEQ ID NO: 74711 - DNA, 243 bp, Artificial Sequence
  derived and/or modified sequence
atgaagttgagtgggatgttcctcctactttctcttgccctattttgcttccttacaggagtgttttcacaaggcgggcaggtagattgcggagaatttcaggaccccaaggtgtattgtactagggagtccaacccacactgcggaagcgacgggcagacctatggtaacaagtgcgccttctgcaaagccatagtaaaatccggcgggaagatcagcctgaagcatccggggaaatgctag

SEQ ID NO: 74712 - DNA, 126 bp, Artificial Sequence
  derived and/or modified sequence
atgaaattgagtggaatgtttctcctcttatctctcgcacttttttgcttcttgaccggtgtgttttctcagggaggacaggtagattgcggcgaatttcaggatccaaaagtgtactgcacatag

SEQ ID NO: 74713 - DNA, 243 bp, Artificial Sequence
  derived and/or modified sequence
atgaagctgagcggcatgttcctgctgctgagcctggccctcttctgcttcctgactggagtcttcagccagggcggccaggtggactgtggggagttccaggaccccaaggtgtactgcacccgggagagcaacccccactgcggcagtgatggccagacctacggcaacaagtgtgccttctgcaaggccatcgtgaagagcggcggcaagatcagcctgaagcaccctggaaaatgttag

SEQ ID NO: 74714 - DNA, 126 bp, Artificial Sequence
  derived and/or modified sequence
atgaagctgagcggcatgttcctgctgctgagcctggccctcttctgcttcctgactggagtcttcagccagggcggccaggtggactgtggggagttccaggaccccaaggtgtactgcacctag

SEQ ID NO: 74715 - DNA, 243 bp, Artificial Sequence
  derived and/or modified sequence
atgaagctgagcggcatgttcctgctgctgagcctggccctgttctgctttctaactggagtattctctcaaggtggtcaggttgattgcggggagtttcaggaccctaaggtctactgtacgagagaatcaaacccccattgtggcagtgacggacagacttatggcaataaatgcgcgttttgcaaggctattgtgaagtccggtggaaaaattagcctcaaacatcccggtaaatgctag

SEQ ID NO: 74716 - DNA, 126 bp, Artificial Sequence
  derived and/or modified sequence
atgaagctgagcggcatgttcctgctgctgagcctggccctgttctgcttcctgaccggagtattctcacagggggggcaagtcgactgcggcgaatttcaggatccgaaagtgtattgtacctag

SEQ ID NO: 74717 - RNA, 243 nt, Artificial Sequence
  derived and/or modified sequence
augaagcuuucagguauguucuuguugcuuucacuggcccuuuuuugcuuucugacuggaguuuuuagccagggcggccagguugauugcggagaauuucaagacccaaaggucuauuguacacgugaauccaauccucauugcggguccgauggucagacguacggaaacaaaugugccuuuuguaaagccauagugaagucuggaggaaagauuucacuaaagcacccagguaaauguuag

SEQ ID NO: 74718 - RNA, 126 nt, Artificial Sequence
  derived and/or modified sequence
augaaauuaagugguauguuucuacuccuuagccuugcacucuuuuguuuucuuaccggcgucuuuucacaggggggucaggucgacugcggugaguuucaagaucccaaaguguacuguaccuag

SEQ ID NO: 74719 - protein, 181 aa, Artificial Sequence
  derived and/or modified sequence
  misc_feature (1)..(1): Xaa can be any naturally occurring amino acid
XLNLLKTLGKDNSKNVFFSPMSMSCALAMVYMGAKGNTAAQMAQILSFNKSGGGGDIHQGFQSLLTEVNKTGTQYLLRMANRESYDMESVLRNLGMTDAFELGKADFSGMSQTDLSLSKVVHKSFVEVNEEGTEAAAATAAIMMMRCARFVPRFCADHPFLFFIQHSKTNGILFCGRFSSP

SEQ ID NO: 74720 - protein, 192 aa, Artificial Sequence
  derived and/or modified sequence
MDVLAEANGTFALNLLKTLGKDNSKNVFFSPMSMSCALAMVYMGAKGNTAAQMAQILSFNKSGGGGDIHQGFQSLLTEVNKTGTQYLLRMANRESYDMESVLRNLGMTDAFELGKADFSGMSQTDLSLSKVVHKSFVEVNEEGTEAAAATAAIMMMRCARFVPRFCADHPFLFFIQHSKTNGILFCGRFSSP

SEQ ID NO: 74721 - DNA, 1495 bp, Artificial Sequence
  derived and/or modified sequence
gattctccgggatattaccggagacggagtgttttattattagcctttcttaggtggacatttccatttgaattaaaagtcctttaggctgggcgtggtgcatggctgtaatctcagcaccttgggaggctgaggcaggaagatcacttgaggccaggcgttggagagcagcctgggcaaggtggcaagaaccttgtctctacaaaaaaaaaagcgtctgccatcatggatgttctcgcagaagcaaatggcacctttgccttaaaccttttgaaaacgctgggtaaagacaactcgaagaatgtgtttttctcacccatgagcatgtcctgtgccctggccatggtctacatgggggcaaagggaaacaccgctgcacagatggcccagatactttctttcaataaaagtggcggtggtggagacatccaccagggcttccagtctcttctcaccgaagtgaacaagactggcacgcagtacttgcttaggatggccaacaggctctttggggaaaagtcttgtgatttcctctcatcttttagagattcctgccaaaaattctaccaagcagagatggaggagcttgactttatcagcgccgtagagaagtccagaaaacacataaacacctgggtagctgaaaagacagaaggtaaaattgcggagttgctctctccgggctcagtggatccattgacaaggctggttctggtgaatgctgtctatttcagaggaaactgggatgaacagtttgacaaggagaacaccgaggagagactgtttaaagtcagcaagaatgaggagaaacctgtgcaaatgatgtttaagcaatctacttttaagaagacctatataggagaaatatttacccaaatcttggtgcttccatatgttggcaaggaactgaatatgatcatcatgcttccggacgagaccactgacttgagaacggtggagaaagaactcacttacgagaagttcgtagaatggacgaggctggacatgatggatgaagaggaggtggaagtgtccctcccgcggtttaaactagaggaaagctacgacatggagagtgtcctgcgcaacctgggcatgactgatgccttcgagctgggcaaggcagacttctctggaatgtcccagacagacctgtctctgtccaaggtcgtgcacaagtcttttgtggaggtcaatgaggaaggcacggaggctgcagccgccacagctgccatcatgatgatgcggtgtgccagattcgtcccccgcttctgcgccgaccaccccttccttttcttcatccagcacagcaagaccaacgggattctcttctgcggccgcttttcctctccgtgaggacagggcagtcttggtgtgcagcccctctcctctctgtcccctgacactccacagtgtgcctgcaacccaagtggccttatccgtgcagtggtggcagttcagaaataaagggcccatttgtgggatgccgcattca

SEQ ID NO: 74722 - DNA, 1338 bp, Artificial Sequence
  derived and/or modified sequence
gtccggcttgggttcccttccggagcctcgcagcggcagagaacggcgacgcggccgggtctgccatcatggatgttctcgcagaagcaaatggcacctttgccttaaaccttttgaaaacgctgggtaaagacaactcgaagaatgtgtttttctcacccatgagcatgtcctgtgccctggccatggtctacatgggggcaaagggaaacaccgctgcacagatggcccagatactttctttcaataaaagtggcggtggtggagacatccaccagggcttccagtctcttctcaccgaagtgaacaagactggcacgcagtacttgcttaggatggccaacaggctctttggggaaaagtcttgtgatttcctctcatcttttagagattcctgccaaaaattctaccaagcagagatggaggagcttgactttatcagcgccgtagagaagtccagaaaacacataaacacctgggtagctgaaaagacagaaggtaaaattgcggagttgctctctccgggctcagtggatccattgacaaggctggttctggtgaatgctgtctatttcagaggaaactgggatgaacagtttgacaaggagaacaccgaggagagactgtttaaagtcagcaagaatgaggagaaacctgtgcaaatgatgtttaagcaatctacttttaagaagacctatataggagaaatatttacccaaatcttggtgcttccatatgttggcaaggaactgaatatgatcatcatgcttccggacgagaccactgacttgagaacggtggagaaagaactcacttacgagaagttcgtagaatggacgaggctggacatgatggatgaagaggaggtggaagtgtccctcccgcggtttaaactagaggaaagctacgacatggagagtgtcctgcgcaacctgggcatgactgatgccttcgagctgggcaaggcagacttctctggaatgtcccagacagacctgtctctgtccaaggtcgtgcacaagtcttttgtggaggtcaatgaggaaggcacggaggctgcagccgccacagctgccatcatgatgatgcggtgtgccagattcgtcccccgcttctgcgccgaccaccccttccttttcttcatccagcacagcaagaccaacgggattctcttctgcggccgcttttcctctccgtgaggacagggcagtcttggtgtgcagcccctctcctctctgtcccctgacactccacagtgtgcctgcaacccaagtggccttatccgtgcagtggtggcagttcagaaataaagggcccatttgtgggatgccgcattca

SEQ ID NO: 74723 - DNA, 1375 bp, Artificial Sequence
  derived and/or modified sequence
ggcggctccggcgcctctgcccgccgttctgctcgctcgctccccgctctggagtacgtgtctggcttgggagccgctcggacacgctggcttgggtctgccatcatggatgttctcgcagaagcaaatggcacctttgccttaaaccttttgaaaacgctgggtaaagacaactcgaagaatgtgtttttctcacccatgagcatgtcctgtgccctggccatggtctacatgggggcaaagggaaacaccgctgcacagatggcccagatactttctttcaataaaagtggcggtggtggagacatccaccagggcttccagtctcttctcaccgaagtgaacaagactggcacgcagtacttgcttaggatggccaacaggctctttggggaaaagtcttgtgatttcctctcatcttttagagattcctgccaaaaattctaccaagcagagatggaggagcttgactttatcagcgccgtagagaagtccagaaaacacataaacacctgggtagctgaaaagacagaaggtaaaattgcggagttgctctctccgggctcagtggatccattgacaaggctggttctggtgaatgctgtctatttcagaggaaactgggatgaacagtttgacaaggagaacaccgaggagagactgtttaaagtcagcaagaatgaggagaaacctgtgcaaatgatgtttaagcaatctacttttaagaagacctatataggagaaatatttacccaaatcttggtgcttccatatgttggcaaggaactgaatatgatcatcatgcttccggacgagaccactgacttgagaacggtggagaaagaactcacttacgagaagttcgtagaatggacgaggctggacatgatggatgaagaggaggtggaagtgtccctcccgcggtttaaactagaggaaagctacgacatggagagtgtcctgcgcaacctgggcatgactgatgccttcgagctgggcaaggcagacttctctggaatgtcccagacagacctgtctctgtccaaggtcgtgcacaagtcttttgtggaggtcaatgaggaaggcacggaggctgcagccgccacagctgccatcatgatgatgcggtgtgccagattcgtcccccgcttctgcgccgaccaccccttccttttcttcatccagcacagcaagaccaacgggattctcttctgcggccgcttttcctctccgtgaggacagggcagtcttggtgtgcagcccctctcctctctgtcccctgacactccacagtgtgcctgcaacccaagtggccttatccgtgcagtggtggcagttcagaaataaagggcccatttgtgggatgccgcattca

SEQ ID NO: 74724 - DNA, 1357 bp, Artificial Sequence
  derived and/or modified sequence
actgcagcctctgcctcccgggttcaagtgattctcctgcctcagcttccccagcaactgagattacaggcacgcgccattacactcggctaatttttgtatttttagtagagacggggttttgccatgttggccaggctggtctggaactcctgacctccagtgatccgcctgcctcggcctcccagtgttgggattactggcgtgagccccgcgcccgcccctggctggcttctttgccgcaagctgtttcatcagcaaagtctttgtgacctgtatctagtctgctcatttttaaatgcgtgttctgcactccccagtggatggccgtgtatcaggagccggcccttttctggaaacaggccagcattcagtctccacagaggcaccataaacacgctggtggggccctgtactgtggtcaaagtcaaggcctccgggcaggactcgcggcccctccggctggcgggtggggttgacccgcacgtcccgccccgcctctcccttcgcgctccggacgggcgacggtagctcgagacccgggactccgcccgcctccccgcgagtatttgaggtccggggcggctccggcgcctctgcccgccgttctgctcgctcgctccccgctctggaaacaccaccgatagccacaccgaagagttctcccatttgctggttcccggacaaaaaagctgctgatcccttgagcacactgcagtgaagctcccagctgacatgtcctgtccatgtaaacagaacttcctccatgtctgccatcatggatgttctcgcagaagcaaatggcacctttgccttaaaccttttgaaaacgctgggtaaagacaactcgaagaatgtgtttttctcacccatgagcatgtcctgtgccctggccatggtctacatgggggcaaagggaaacaccgctgcacagatggcccagatactttctttcaataaaagtggcggtggtggagacatccaccagggcttccagtctcttctcaccgaagtgaacaagactggcacgcagtacttgcttaggatggccaacagggaaagctacgacatggagagtgtcctgcgcaacctgggcatgactgatgccttcgagctgggcaaggcagacttctctggaatgtcccagacagacctgtctctgtccaaggtcgtgcacaagtcttttgtggaggtcaatgaggaaggcacggaggctgcagccgccacagctgccatcatgatgatgcggtgtgccagattcgtcccccgcttctgcgccgaccaccccttccttttcttcatccagcacagcaagaccaacgggattctcttctgcggccgcttttcctctccgtga

SEQ ID NO: 74725 - protein, 247 aa, Artificial Sequence
  derived and/or modified sequence
MSAAPLVGYSSSGSEDESEDGMRTRPGDGSHRRGQSPLPRQRFPVPDSVLNMFPGTEEGPEDDSTKHGGRVRTFPHERGNWATHVYVPYEAKEEFLDLLDVLLPHAQTYVPRLVRMKVFHLSLSQSVVLRHHWILPFVQALKARMTSFHRTFIGLEVTSGHAQFLDLVSEVDRVMEEFNLTTFYQDPSFHLSLAWCVGDARLQLEGQCLQELQAIVDGFEDAEVLLRVHTEQVRCKSGNKFFSMPLK

SEQ ID NO: 74726 - DNA, 744 bp, Artificial Sequence
  derived and/or modified sequence
atgtccgctgctccactcgtgggctactcatcgagcggcagcgaagacgagagcgaggacggcatgagaacaaggcctggggacggttcccaccgtagaggccagtctcctttacctagacagcgatttcctgtgcctgactccgtgctgaacatgttccccggaacggaggagggaccagaggacgacagtaccaagcatggcggaagggtgcgtaccttcccacacgaaagagggaactgggccactcacgtatatgttccttatgaggcaaaggaggaatttctggacctcctcgacgtgctgctgcctcacgcacagacgtacgtgccacgactggtgcggatgaaggtatttcacctgagtctctcacagagcgtggtgctccggcaccactggatactgccattcgtccaggctctcaaggctagaatgactagtttccaccggacatttatcggactcgaggtaacatcgggacacgcccagtttctggacctcgtttctgaggtggaccgggtgatggaggaatttaatttgactactttctatcaggaccctagcttccacctctctctcgcctggtgcgtaggtgacgccaggctccaacttgaaggccagtgtctgcaggaattgcaggcaattgttgacggatttgaagacgccgaggtgctgctgagggtccataccgaacaggtcagatgcaaaagtggtaacaagttctttagtatgcccttgaagtag

SEQ ID NO: 74727 - DNA, 744 bp, Artificial Sequence
  derived and/or modified sequence
atgtctgctgcccccctggtgggctacagcagcagcggctctgaagatgaaagtgaagatggcatgaggaccaggcctggagatggcagccaccggcggggccagagccccctgccccggcagcgcttccctgtgcctgacagcgtgctgaacatgtttcctggaacagaggagggcccagaagatgacagcaccaagcatggaggccgggtgaggaccttcccccatgagcggggcaactgggccacccacgtgtatgtgccctatgaggccaaggaggagttcctggacctgctggatgtgctgctgccccacgcccagacctacgtgccccggctggtgaggatgaaggtgttccacctgagcctgagccagagcgtggtgctgcggcaccactggatcctgccctttgtgcaggccctgaaggccaggatgaccagcttccacaggaccttcatcggcctggaggtgaccagcggccacgcccagttcctggacctggtgtctgaggtggacagagtgatggaggagttcaacctgaccaccttctaccaggaccccagcttccacctgagcctggcctggtgtgtgggagatgcccggctgcagctggagggccagtgcctgcaggagctgcaggccatcgtggatggctttgaagatgctgaggtgctgctgcgggtgcacacagagcaggtgcgctgcaagagcggcaacaagttcttctccatgcccctgaagtag

SEQ ID NO: 74728 - DNA, 744 bp, Artificial Sequence
  derived and/or modified sequence
atgagcgccgcccccctggtgggctacagcagcagcggcagcgaggatgaatcagaagatggaatgcggacacggcctggagatgggtcacatcgtcgggggcaatcccccttaccgcgccagagattccctgttcctgattctgtactgaacatgtttcccggaacggaagaggggccagaggacgactccacgaagcacggaggacgtgtgcgtacatttccgcacgaacggggcaactgggcaacccacgtctatgtgccatacgaggccaaggaagaattcctcgatttattggatgtgctgcttccccatgcgcagacctacgtgccgcgcctggtgcggatgaaagtatttcacctgtccctgagccagtccgtggtgttgaggcaccactggatactgccttttgtgcaggccctgaaggcgcgcatgacatccttccaccgtacattcattggcctcgaagttacaagtgggcatgcgcaattcttggacctcgttagcgaggtggatagggttatggaggagttcaacctcacgactttctaccaagacccatcattccatctgtccctcgcatggtgtgtgggtgacgctcggctgcagctcgagggccagtgtcttcaggagttgcaagcaatcgtggacggcttcgaagacgctgaggtcctgctgcgggtccacacagaacaggtgagatgcaagtctggcaataagttcttttccatgcctctaaagtag

SEQ ID NO: 74729 - DNA, 744 bp, Artificial Sequence
  derived and/or modified sequence
atgtccgccgcacccctggtgggatacagttcctcaggctctgaagatgaatctgaggacgggatgcggacacgtccgggagacgggagccaccggagaggtcagtcccccctccccagacagcgatttcctgttcccgatagtgtactgaacatgttcccgggaaccgaggaggggccagaggatgattccaccaagcatggcggtagagttcggacctttccgcacgaaaggggaaattgggccacccacgtatacgtgccctacgaggcaaaagaagagtttctcgatttgctggatgttcttttacctcacgcacagacatacgtgcccagactggtccgcatgaaagtgttccatctttcattatcccaaagtgtggtcctcaggcatcactggatcttaccatttgtgcaggcactcaaggcacgcatgaccagctttcataggacttttatcggtctggaagtgacaagcggccacgcgcaatttctcgatctagtctctgaggttgatcgcgtgatggaagaatttaacctgacaacattctaccaagaccctagtttccacctcagcttggcttggtgtgtgggcgacgccaggctgcagttggaggggcagtgcttgcaggaactgcaggccatcgtcgacggattcgaagacgccgaagtgcttctcagagtccacacagaacaagtcaggtgtaagtctggtaacaaatttttcagcatgccactcaagtag

SEQ ID NO: 74730 - DNA, 1199 bp, Artificial Sequence
  derived and/or modified sequence
agcggaactccgggtgccggttgaggttgctggtggacctgctctggtggtcttggatgaggccccatgagcgcggcgcccctggtgggctacagcagcagcggctccgaggatgagtccgaggacgggatgcggaccaggccgggggatgggagccaccgtcgtggccagagcccccttcccaggcagagatttccagtacctgacagtgtgctgaacatgttcccgggcaccgaggaggggcctgaagatgacagcacaaaacacgggggacgggtgcgcaccttcccccacgagcgaggcaactgggccacccacgtctatgtaccatatgaagccaaggaggagttcctggatctgcttgatgtgttgctgccccatgcccagacatatgtcccccggctggtaaggatgaaggtgttccacctcagcctgtcccagagtgtggttctgcgccaccactggatcctccccttcgtgcaggctctgaaagcccgtatgacctccttccacaggacctttattgggcttgaggtcacttcagggcatgcccagttcctggacctggtttcagaggtggacagagtcatggaggaattcaacctcaccactttctaccaggatccttctttccacctcagcctggcctggtgtgtgggtgatgcacgtctccagctggaggggcagtgcctgcaggaactacaggcaatcgtggatgggtttgaagatgctgaggtgctgctgcgcgtgcacactgagcaagtccgctgcaagtctgggaacaagttcttctcgatgcctttgaagtgagcaccagaggccttcctcctccagggccctctgcagaccaggctgagatggaggaacctgctaaaatcgatggagatgcttctagcctcccagtaggaggccccagccatgccttcaacctggcaggaggtgtagccactcctcatcctccctgagtgctgatattctctctctctctttctcttcctcttctttctctctcttctcctctctttctctcctctgtctctcttcctctcctctcttcctctcttctctcttcctctcctctctctcttcctcttctctctcttcccctcctgtctctcctcccctcctctcttcctctcctctctcttcctctcctctctctacccctcctgtctctcctcccctcctctctcttcctc

SEQ ID NO: 74731 - DNA, 744 bp, Artificial Sequence
  derived and/or modified sequence
atgagcgccgcccccctggtgggctacagcagcagcggcagcgaggacgagagcgaggacggcatgagaaccagacccggcgacggcagccacagaagaggccagagccccctgcccagacagagattccccgtgcccgacagcgtgctgaacatgttccccggcaccgaggagggccccgaggacgacagcaccaagcacggcggcagagtgagaaccttcccccacgagagaggcaactgggccacccacgtgtacgtgccctacgaggccaaggaggagttcctggacctgctggacgtgctgctgccccacgcccagacctacgtgcccagactggtgagaatgaaggtgttccacctgagcctgagccagagcgtggtgctgagacaccactggatcctgcccttcgtgcaggccctgaaggccagaatgaccagcttccacagaaccttcatcggcctggaggtgaccagcggccacgcccagttcctggacctggtgagcgaggtggacagagtgatggaggagttcaacctgaccaccttctaccaggaccccagcttccacctgagcctggcctggtgcgtgggcgacgccagactgcagctggagggccagtgcctgcaggagctgcaggccatcgtggacggcttcgaggacgccgaggtgctgctgagagtgcacaccgagcaggtgagatgcaagagcggcaacaagttcttcagcatgcccctgaagtag

SEQ ID NO: 74732 - protein, 103 aa, Artificial Sequence
  derived and/or modified sequence
MLKAAAKRPELSGLLKFNNYGILSESPLTSQRTTWLLYQSPSFIPGFAYPSRCLKTIGGVYKQARKKHYIQQLRYGRSEVNVPGSSSKARATVCGRYNDNGAV

SEQ ID NO: 74733 - DNA, 312 bp, Artificial Sequence
  derived and/or modified sequence
atgctgaaggccgccgccaagagacccgagctgagcggcctgctgaagttcaacaactacggcatcctgagcgagagccccctgaccagccagagaaccacctggctgctgtaccagagccccagcttcatccccggcttcgcctaccccagcagatgcctgaagaccatcggcggcgtgtacaagcaggccagaaagaagcactacatccagcagctgagatacggcagaagcgaggtgaacgtgcccggcagcagcagcaaggccagagccaccgtgtgcggcagatacaacgacaacggcgccgtgtag

SEQ ID NO: 74734 - DNA, 312 bp, Artificial Sequence
  derived and/or modified sequence
atgctaaaagctgctgctaaacggccggaattgtcgggtctgctgaagttcaataattacgggattctgtcagaaagcccactcacaagtcagcgcactacatggttgctgtatcagtccccctccttcattcctgggttcgcataccctagtagatgcctcaaaaccataggaggggtctacaagcaagcacggaagaagcactacatacagcaacttcgctacgggcgctcagaggttaacgtccccggtagctcatctaaagctcgcgccacagtctgtggacggtacaatgataatggggccgtgtag

SEQ ID NO: 74735 - DNA, 312 bp, Artificial Sequence
  derived and/or modified sequence
atgctgaaggctgctgccaagaggcctgagctgagcggcctgctgaagttcaacaactacggcatcctgtctgagagccccctgaccagccagaggaccacctggctgctgtaccagagccccagcttcatccctggctttgcctaccccagccgctgcctgaagaccatcggcggcgtgtacaagcaggccaggaagaagcactacatccagcagctgcgctatggccgctctgaggtgaatgtgcccggcagcagcagcaaggcccgggccaccgtgtgtggccgctacaatgacaacggggctgtgtag

SEQ ID NO: 74736 - DNA, 312 bp, Artificial Sequence
  derived and/or modified sequence
atgctgaaggccgccgccaagcggcccgagctgagcggcctgctgaagttcaataactacgggatactgagtgagtcgccgctgaccagtcaaagaaccacatggcttttgtaccagtcaccctcatttatccctggctttgcgtacccctctagatgtctgaagactatcggaggcgtctataagcaggcgcgtaagaagcattatattcagcagctgcgatacggtcggtctgaggttaatgtaccaggatcaagctctaaagccagagcgacagtctgcggaagatacaacgacaacggcgctgtttag

SEQ ID NO: 74737 - DNA, 312 bp, Artificial Sequence
  derived and/or modified sequence
atgctgaaagccgcagccaagcggcctgagctgagcggccttctcaaatttaataattacggaattctttctgagtccccgttgactagccagagaacaacctggttgctgtaccagtcccctagtttcattcctggcttcgcttatccttccagatgtctcaaaacaatcggcggagtgtacaaacaggcacgaaagaaacactatatacagcagctccgctatggacggtctgaagtgaacgttcccggatctagttccaaggccagagccaccgtctgcggcaggtataacgacaacggcgcagtgtag

SEQ ID NO: 74738 - DNA, 812 bp, Artificial Sequence
  derived and/or modified sequence
agggtgacgtagatttttttccttcgccagtctcaccgttacccggggcaacagctgagccgtctgggaagggatgcatcttttcttctgtatgcttgagtcaagaactctaagtcatcttggtaataccgggttggatgcttaaagctgcagcaaaaagaccagaactttcagggcttctcaaatttaataactatggaatcttatcagaaagtccattaacatctcaaagaacaacgtggttattgtatcaatcaccatcctttataccaggatttgcatatccttcaagatgcctgaagacaatcggaggggtatacaagcaagcgaggaaaaaacactatatccaacaactcagatatggcagaagtgaagtcaatgttccgggaagttcttccaaagcaagggccactgtttgtggaagatataatgacaatggtgctgtgtaaacccaaacttttacccttaaaatctctgactctggaaaaactagagaaaatgcatcaagcagcacagaatacaattcgccaacaagaaatggcagaaaaggatcaacggcaaataacccactgaatgataactgagcactttagggaacaacctgccttatctactatttaacaataactagaaaatatgcttctgtgtgctgaaagtagtatgtgttatcaataaaattgatagtattcatagaaatacaaaaatatccaagattgatgaaatttgtattgtgaatgtaaacactctggtttgtattgaacataaacagttaaactatgaaccaagttttatggggtttaagtcatgttttt

SEQ ID NO: 74739 - protein, 70 aa, Artificial Sequence
  derived and/or modified sequence
MAEVKSMFREVLPKQGPLFVEDIMTMVLCKPKLLPLKSLTLEKLEKMHQAAQNTIRQQEMAEKDQRQITH

SEQ ID NO: 74740 - protein, 92 aa, Artificial Sequence
  derived and/or modified sequence
MLKAAAKRPELSGKNTISNNSDMAEVKSMFREVLPKQGPLFVEDIMTMVLCKPKLLPLKSLTLEKLEKMHQAAQNTIRQQEMAEKDQRQITH

SEQ ID NO: 74741 - DNA, 279 bp, Artificial Sequence
  derived and/or modified sequence
atgctgaaggccgccgccaagagacccgagctgagcggcaagaacaccatcagcaacaacagcgacatggccgaggtgaagagcatgttcagagaggtgctgcccaagcagggccccctgttcgtggaggacatcatgaccatggtgctgtgcaagcccaagctgctgcccctgaagagcctgaccctggagaagctggagaagatgcaccaggccgcccagaacaccatcagacagcaggagatggccgagaaggaccagagacagatcacccactag

SEQ ID NO: 74742 - DNA, 279 bp, Artificial Sequence
  derived and/or modified sequence
atgctgaaagccgcggctaagcgacccgagttaagcggaaaaaataccatctctaacaactcagacatggccgaagtgaaatcaatgtttcgagaagtgctcccaaagcaggggcctctattcgttgaggacataatgactatggtcctgtgtaagcctaagttgctccccctgaagtcactgactctggagaagctggagaagatgcatcaggcagcccaaaataccataagacagcaggagatggctgagaaagaccagcgacagataactcactag

SEQ ID NO: 74743 - DNA, 279 bp, Artificial Sequence
  derived and/or modified sequence
atgctgaaggctgctgccaagaggcctgagctgagcggcaagaacaccatcagcaacaacagcgacatggccgaggtgaagtccatgttccgggaggtgctgcccaagcagggccccctgtttgtggaggacatcatgaccatggtgctgtgcaagcccaagctgctgcccctgaagagcctgaccctggagaagctggagaagatgcaccaggccgcccagaacaccatccggcagcaggagatggccgagaaggaccagaggcagatcacccactag

SEQ ID NO: 74744 - DNA, 279 bp, Artificial Sequence
  derived and/or modified sequence
atgctgaaggccgccgccaagcggcccgagctgagcggcaagaacaccatctccaataattcagacatggctgaggtcaagtcaatgtttcgcgaggtccttccaaaacagggccctctctttgtggaggatatcatgacaatggttctctgcaaaccaaagctgctccctcttaagtcactgacgctagagaaactagagaaaatgcaccaggcagcccaaaataccatccgacagcaggaaatggctgagaaagatcagcgtcagatcactcattag

SEQ ID NO: 74745 - DNA, 279 bp, Artificial Sequence
  derived and/or modified sequence
atgctcaaggctgccgctaagagacctgaactgagcgggaaaaatacaatttccaacaactccgacatggccgaagtgaaaagcatgtttcgggaggtgttgccaaagcagggacctctgttcgtcgaagacatcatgactatggtgttgtgtaagccaaagcttctgcccctgaagagcctgactcttgaaaaacttgaaaagatgcaccaggctgctcaaaataccattcgtcagcaggagatggccgagaaagatcaaaggcaaattacacattag

SEQ ID NO: 74746 - DNA, 383 bp, Artificial Sequence
  derived and/or modified sequence
ggggcaacagctgagccgtctgggaagggatgcatctatatggcagaagtgaagtcaatgttccgggaagttcttccaaagcaagggccactgtttgtggaagatataatgacaatggtgctgtgtaaacccaaacttttacccttaaaatctctgactctggaaaaactagagaaaatgcatcaagcagcacagaatacaattcgccaacaagaaatggcagaaaaggatcaacggcaaataacccactgaatgataactgagcactttagggaacaacctgccttatctactatttaacaataactagaaaatatgcttctgtgtgctgaaagtagtatgtgttatcaataaaattgatagtattcatagaaatacaaaaa

SEQ ID NO: 74747 - DNA, 727 bp, Artificial Sequence
  derived and/or modified sequence
agggtgacgtagatttttttccttcgccagtctcaccgttacccggggcaacagctgagccgtctgggaagggatgcatctgaaaaaacactatatccaacaactcagatatggcagaagtgaagtcaatgttccgggaagttcttccaaagcaagggccactgtttgtggaagatataatgacaatggtgctgtgtaaacccaaacttttacccttaaaatctctgactctggaaaaactagagaaaatgcatcaagcagcacagaatacaattcgccaacaagaaatggcagaaaaggatcaacggcaaataacccactgaatgataactgagcactttagggaacaacctgccttatctactatttaacaataactagaaaatatgcttctgtgtgctgaaagtagtatgtgttatcaataaaattgatagtattcatagaaatacaaaaatatccaagattgatgaaatttgtattgtgaatgtaaacactctggtttgtattgaacataaacagttaaactatgaaccaagttttatggggtttaagtcatgtttttagaattgcaaattaaattatttgttcaccattcctattgctatcttttatagataacattcttgggatcttttatagcattcttgggcacaagggattaaatacaacttttatatacagaggatctttacatgtttattaaatctgaatttgaagatacattcca

SEQ ID NO: 74748 - DNA, 2119 bp, Artificial Sequence
  derived and/or modified sequence
tcggaagttactgttgaagctaaggcggccataactgataatggcaaaaggagattcctggcttcctgtttccagggtgacgtagatttttttccttcgccagtctcaccgttacccggggcaacagctgagccgtctgggaagggatgcatcttttcttctgtatgcttgagtcaagaactctaagtcatcttggtaataccgggttggatgcttaaagctgcagcaaaaagaccagaactttcaggaaaaaacactatatccaacaactcagatatggcagaagtgaagtcaatgttccgggaagttcttccaaagcaagggccactgtttgtggaagatataatgacaatggtgctgtgtaaacccaaacttttacccttaaaatctctgactctggaaaaactagagaaaatgcatcaagcagcacagaatacaattcgccaacaagaaatggcagaaaaggatcaacggcaaataacccactgaatgataactgagcactttagggaacaacctgccttatctactatttaacaataactagaaaatatgcttctgtgtgctgaaagtagtatgtgttatcaataaaattgatagtattcatagaaatacaaaaatatccaagattgatgaaatttgtattgtgaatgtaaacactctggtttgtattgaacataaacagttaaactatgaaccaagttttatggggtttaagtcatgtttttagaattgcaaattaaattatttgttcaccattcctattgctatcttttatagataacattcttgggatcttttatagcattcttgggcacaagggattaaatacaacttttatatacagaggatctttacatgtttattaaatctgaatttgaagatacattccaatcttgcataaagtgtttgttgggcttttacattacgtaattaaaaaacaaaattttttaaccaattttatgtgccatgtcacgtttaatgctatcttgtgtgaccagatcccaccagtaatgacaaaactgtcttaaacctcatttttttttttttttgagacaagagtttcactcttgttgcccaaacgagagcaatggcaccatctcgactcactgcaacctctgcctcccaggttcaagcaattctcctgcctcagcctcccaagtagctgggattacacgcatgcgccaccatgcctggctacttttgtatttttaatagagacagggtttcttcatgttggtcaagctggtcatgaactcccaacctcaagtgatccgcccacctcggcctcccaaagtgctgggattacaggcatgagccaccgtgcccagcccttaaatctcatttttaagaaaccctcacctattctgtagtcagctaagcttttaattacattaattttaagcacttgagaataaaatgactgcatttatcatccaagtgtcaaacaattaaaaacctaaaaatggtaactatatataagctgaggtaatatgggcttgataaagcccatgaggtaaatatgaacactaaacttggttttaattctaacagactatatctaaacctgtaagcagtatactcctaacagtaccctcataaattctgaatataattcttgtttgctgcagtcaatatttggcagtttaaattagcacagacgttgaggccttgctgagttattaggctatgtaaaagaggttaaaaatatgatcattctttattgttaattggtaatattttctcatacattaggtaaatgtcaagctttgggtctctggagtataactttttgtaacattagccattatttggtaacagaatttaaggatgatggaatgatggaaggtattacatatttctaaaacttaattaagctctaggtcagataacaatggagtaaagtgatacctgcatttttttccccagtgtaatcttaatttactattgtatttttcacttaaaattttgtagggaaaaaaagttttcaagggaacactaagattaaattgactaggttcaaatatgcttccttatgagattcaaaatttactgtgtgaaattaaagtttaagagacctaaaaaaatgtactcccaataaagaatcaatactgcttca

SEQ ID NO: 74749 - protein, 67 aa, Artificial Sequence
  derived and/or modified sequence
MLKAAAKRPELSGPLFVEDIMTMVLCKPKLLPLKSLTLEKLEKMHQAAQNTIRQQEMAEKDQRQITH

SEQ ID NO: 74750 - DNA, 204 bp, Artificial Sequence
  derived and/or modified sequence
atgctgaaggccgccgccaagagacccgagctgagcggccccctgttcgtggaggacatcatgaccatggtgctgtgcaagcccaagctgctgcccctgaagagcctgaccctggagaagctggagaagatgcaccaggccgcccagaacaccatcagacagcaggagatggccgagaaggaccagagacagatcacccactag

SEQ ID NO: 74751 - DNA, 204 bp, Artificial Sequence
  derived and/or modified sequence
atgctgaaggcggcagcgaagcgtcctgagctgagcggacctctctttgtcgaagatataatgacgatggttttgtgcaagcctaagctgcttcccctgaaatcccttacactcgaaaagttagagaagatgcatcaggctgctcagaatacaatccgtcagcaggaaatggccgaaaaggaccaacgccagattacacattag

SEQ ID NO: 74752 - DNA, 204 bp, Artificial Sequence
  derived and/or modified sequence
atgctgaaggctgctgccaagaggcctgagctgagcggccccctgtttgtggaggacatcatgaccatggtgctgtgcaagcccaagctgctgcccctgaagagcctgaccctggagaagctggagaagatgcaccaggccgcccagaacaccatccggcagcaggagatggccgagaaggaccagaggcagatcacccactag

SEQ ID NO: 74753 - DNA, 204 bp, Artificial Sequence
  derived and/or modified sequence
atgctgaaggccgccgccaagcggcccgagctgagcggccccctgtttgtagaagacatcatgacaatggtgctctgtaaaccaaaactcctgccgttaaagagcttaactcttgagaagttggagaaaatgcatcaggcagcacaaaatacaatccgacagcaggaaatggccgagaaagatcagaggcagattactcattag

SEQ ID NO: 74754 - DNA, 204 bp, Artificial Sequence
  derived and/or modified sequence
atgttgaaggcagccgctaaacggcctgaattaagcggcccactgttcgtggaagacattatgaccatggtgctgtgtaaacctaaacttctacccttaaagagcctcactctcgaaaagctggaaaagatgcatcaggccgcacagaataccatccgccagcaagaaatggccgaaaaagaccagaggcagataacacactag

SEQ ID NO: 74755 - DNA, 492 bp, Artificial Sequence
  derived and/or modified sequence
ggggcaacagctgagccgtctgggaagggatgcatcttttcttctgtatgcttgagtcaagaactctaagtcatcttggtaataccgggttggatgcttaaagctgcagcaaaaagaccagaactttcagggccactgtttgtggaagatataatgacaatggtgctgtgtaaacccaaacttttacccttaaaatctctgactctggaaaaactagagaaaatgcatcaagcagcacagaatacaattcgccaacaagaaatggcagaaaaggatcaacggcaaataacccactgaatgataactgagcactttagggaacaacctgccttatctactatttaacaataactagaaaatatgcttctgtgtgctgaaagtagtatgtgttatcaataaaattgatagtattcatagaaatacaaaaatatccaagattgatgaaatttgtattgtgaatgtaaacactctggtttgtattgaacataaaca

SEQ ID NO: 74756 - protein, 201 aa, Artificial Sequence
  derived and/or modified sequence
MAGKSSLFKVILLGDGGVGKSSLMNRYVTNKFDTQLFHTIGVEFLNKDLEVDGHFVTMQIWDTAGQERFRSLRTPFYRGSDCCLLTFSVDDSQSFQNLSNWKKEFIYYADVKEPESFPFVILGNKIDISERQVSTEEAQAWCRDNGDYPYFETSAKDATNVAAAFEEAVRRVLATEDRSDHLIQTDTVNLHRKPKPSSSCC

SEQ ID NO: 74757 - DNA, 606 bp, Artificial Sequence
  derived and/or modified sequence
atggccggcaagagcagcctgttcaaggtgatcctgctgggcgacggcggcgtgggcaagagcagcctgatgaacagatacgtgaccaacaagttcgacacccagctgttccacaccatcggcgtggagttcctgaacaaggacctggaggtggacggccacttcgtgaccatgcagatctgggacaccgccggccaggagagattcagaagcctgagaacccccttctacagaggcagcgactgctgcctgctgaccttcagcgtggacgacagccagagcttccagaacctgagcaactggaagaaggagttcatctactacgccgacgtgaaggagcccgagagcttccccttcgtgatcctgggcaacaagatcgacatcagcgagagacaggtgagcaccgaggaggcccaggcctggtgcagagacaacggcgactacccctacttcgagaccagcgccaaggacgccaccaacgtggccgccgccttcgaggaggccgtgagaagagtgctggccaccgaggacagaagcgaccacctgatccagaccgacaccgtgaacctgcacagaaagcccaagcccagcagcagctgctgctag

SEQ ID NO: 74758 - DNA, 606 bp, Artificial Sequence
  derived and/or modified sequence
atggctggaaagtcgtctttgtttaaggtgatactcctaggggatgggggagtgggaaaaagttccctcatgaatcggtatgtgacgaacaagtttgatacccagttgttccacacaatcggagtggaatttttgaacaaggacctggaggtcgacgggcatttcgtcacaatgcaaatctgggataccgcggggcaggagagattcagatctctgaggaccccattctatcggggctccgattgttgcctactgactttttctgtggatgatagtcagtccttccagaacctctcaaattggaaaaaggaattcatttactacgctgacgtgaaagaacctgagtccttccccttcgtgattctgggcaacaaaatcgatattagcgaaagacaagtgagtacagaggaagcccaagcctggtgtagggacaacggggactacccgtattttgaaacctccgccaaggacgccactaacgtcgcagcggccttcgaggaagccgtccgccgagtgcttgccactgaggatcgttccgatcatctgattcagacggacacggtcaacctccaccgtaaaccgaagccctctagctcctgctgctag

SEQ ID NO: 74759 - DNA, 606 bp, Artificial Sequence
  derived and/or modified sequence
atggccggcaagagcagcctcttcaaggtgatcctgctgggagatggaggagtgggcaagagcagcctgatgaacagatatgtgaccaacaagtttgacacccagctgttccacaccatcggcgtggagttcctgaacaaggacctggaggtggatggccactttgtgaccatgcagatctgggacacagctggccaggagcgcttccgcagcctgcggacccccttctaccggggcagtgactgctgcctgctgaccttctctgtggatgacagccagagcttccagaacctgagcaactggaagaaggagttcatctactatgcagatgtgaaggagcctgagagcttcccctttgtgatcctgggcaacaagattgacatcagcgagcggcaggtgtccacagaggaggcccaggcctggtgccgggacaatggagactacccctactttgagaccagcgccaaggatgccaccaacgtggccgccgcctttgaggaggccgtgcggcgggtgctggccacagaggacagaagtgaccacctgatccagacagacacagtgaacctgcacaggaagcccaagcccagcagcagctgctgctag

SEQ ID NO: 74760 - DNA, 606 bp, Artificial Sequence
  derived and/or modified sequence
atggccggcaagagcagcctgttcaaggtgatcctgctgggcgacgggggtgtggggaagtcctccctcatgaaccgctacgtcacaaacaagttcgacacccaactattccataccataggagtggagtttctcaataaggacctggaagtggacggccacttcgttaccatgcagatttgggatacggccggccaggagaggtttcggagtctgcgcactcccttctacaggggatccgactgttgtctgctgaccttctccgtggacgattcccagagcttccagaacctgtcaaactggaagaaggagttcatctattacgctgacgttaaagaaccggagtcgttccccttcgtgattctaggaaacaagattgacatcagtgaacgccaggttagtacagaagaagctcaggcatggtgtcgagataatggcgactatccatactttgagacctctgcaaaggatgctacgaacgtggccgctgccttcgaagaggccgtgaggagggtgttggccacagaggacaggtcagatcacctgatccagaccgacactgtgaatctccacaggaagcctaaaccatctagctcatgctgctag

SEQ ID NO: 74761 - DNA, 606 bp, Artificial Sequence
  derived and/or modified sequence
atggcgggaaaaagctctctgtttaaggtgattcttctgggagatggaggcgttggcaaatcaagtttaatgaatcggtatgtgaccaacaagtttgacacccaactctttcacactatcggagtagaattcctcaataaggatctggaagtagacggccattttgttaccatgcagatttgggatacagcgggacaggagaggttcagaagcctgaggaccccgttctaccggggaagtgactgctgtctgctgacattctcggttgacgactctcagtctttccagaatttaagcaactggaaaaaggagtttatttactacgccgatgtgaaagaacccgagagctttccattcgtaatcctgggcaacaagatcgatatatcagaacggcaggtctccaccgaggaggcgcaagcctggtgtcgcgacaatggggattatccttatttcgagactagcgctaaagacgctaccaacgtggctgccgcatttgaggaggcagtgaggagggtcctcgctaccgaggaccgtagcgatcatcttattcaaactgataccgttaaccttcatcgtaagcctaagccctcatcctcctgctgttag

SEQ ID NO: 74762 - DNA, 2039 bp, Artificial Sequence
  derived and/or modified sequence
gccatgttgttccctccgcgctggacgggagcagctggagcgggagcctggctgcgctaccgcggctgcctcctgctgtgcaggtccccgaccctctctctgtcctcattgcgcccagacgggccggcccagagctcccgggtcgtctttcgtgtggccgcgagacactcttgcactcctgtaatgagcctggcactgtgatgaaacacttttcccgtgtcgtttgagtgcatcttctcaacaaccctaggagggttcttgaagcttttgagattaacaatggcaggaaaatcatcactttttaaagtaattctccttggagatggtggagttgggaagagttcacttatgaacagatatgtaactaataagtttgatacccagctcttccatacaataggtgtggaatttttaaataaagatttggaagtggatggacattttgttaccatgcagatttgggacacggcaggtcaggagcgattccgaagcctgaggacaccattttacagaggttctgactgctgcctgcttacttttagtgtcgatgattcacaaagcttccagaacttaagtaactggaagaaagaattcatatattatgcagatgtgaaagagcctgagagctttccttttgtgattctgggtaacaagattgacataagcgaacggcaggtgtctacagaagaagcccaagcttggtgcagggacaacggcgactatccttattttgaaacaagtgcaaaagatgccacaaatgtggcagcagcctttgaggaagcggttcgaagagttcttgctaccgaggataggtcagatcatttgattcagacagacacagtcaatcttcaccgaaagcccaagcctagctcatcttgctgttgattgttagattgttgatgcattctaaccaactcacacatatacacaaaatcaacatggggatggagaagagaattagcgtttgcagcagtgtatcatctactaataaaattaaactaatgttgctgcttcattagttggtgggagaagggacacatccactcttggaggaatatatttactcaataatggcaccttacatttataaattgtaacagttgtctaataacgtttctttaatttaaatatgtaagttgcagagctaataaatgaaatgaccaagactttaattataataaaaataagaaacttgactattctagaagttatacttggattttttcctgggaaaatggagaactactttttatatgtgtatgtttttatgcaattagcattgtattcttggttcagggaaatactttcctaaagcaataatgttagatattaaagattaaaatctaatgtatttgcaatgcattgttaatttacttcttcattctcttcaaaatgatttaaccattcctgttttcattctacatactagaattactctcactagtaattactcatcatttgtgtgccattcatgcacccccacccccataaatcatgttccacagtctcaggcggagggtgggcccccagtggtacaagagttgcttcatacagtctgtaatacatccagctaaattcaagttgtctatgaatggaaagcctttccatagatagagttcagttttaagaaaaaggctaactactgaacttggagaacagacaaatgtgcatttgataactgatgtaataattacaatgtactgtgtggaagatacaaaattacaattcgattaatggactaaatatttttgttactttcttgacccttggggaaagtttcttaattgaagttaaaacattcctttataacacaagacacaagctgactttatcactctcagaagaaatactaagaaggattgtactttgtgagagggtaaacgaagacatctttattcggcaatgtatttacttagtgtcttctctattactgaacatttagtgatttgctctcaaggagattttttgttagaaaaagacttgttgcagtgatcagacttgataaagcaaattgtggtcttttgtggatgaagttcata

SEQ ID NO: 74763 - protein, 309 aa, Artificial Sequence
  derived and/or modified sequence
MNGTYNTCGSSDLTWPPAIKLGFYAYLGVLLVLGLLLNSLALWVFCCRMQQWTETRIYMTNLAVADLCLLCTLPFVLHSLRDTSDTPLCQLSQGIYLTNRYMSISLVTAIAVDRYVAVRHPLRARGLRSPRQAAAVCAVLWVLVIGSLVARWLLGIQEGGFCFRSTRHNFNSMAFPLLGFYLPLAVVVFCSLKVVTALAQRPPTDVGQAEATRKAARMVWANLLVFVVCFLPLHVGLTVRLAVGWNACALLETIRRALYITSKLSDANCCLDAICYYYMAKEFQEASALAVAPSAKAHKSQDSLCVTLA

SEQ ID NO: 74764 - protein, 340 aa, Artificial Sequence
  derived and/or modified sequence
MLSGSRAVPTPHRGSEELLKYMLHSPCVSLTMNGTYNTCGSSDLTWPPAIKLGFYAYLGVLLVLGLLLNSLALWVFCCRMQQWTETRIYMTNLAVADLCLLCTLPFVLHSLRDTSDTPLCQLSQGIYLTNRYMSISLVTAIAVDRYVAVRHPLRARGLRSPRQAAAVCAVLWVLVIGSLVARWLLGIQEGGFCFRSTRHNFNSMAFPLLGFYLPLAVVVFCSLKVVTALAQRPPTDVGQAEATRKAARMVWANLLVFVVCFLPLHVGLTVRLAVGWNACALLETIRRALYITSKLSDANCCLDAICYYYMAKEFQEASALAVAPSAKAHKSQDSLCVTLA

SEQ ID NO: 74765 - DNA, 2249 bp, Artificial Sequence
  derived and/or modified sequence
ctttagtcacttccagctccaggcacagcagttggtgactccttggtgggagccgtgtcccacccggtcctgatactgccgtcttctctttcacagtcctccaggcttgggccagccttgggggcagcagagcttctgggctgacatgggctcattgctccttctccaagccctctgaggacatcaaaagcgtggacgcatcactttccaccatcttgctgcccactgtccctccatcctgaggcctcctaagcacatgtgtggggtggcaggcacactgctgatagctgtggatgcggccgtgacatccttcacccctgcccccatggcatgcatgatccattagggaggaccgtctgcacaaaggtctcttgccctgtgcagcttcctgcagactggacttgcaaagtccagcctgtatggctggagttcccatgcctgccaatctcctgtcgactgcgagtcagctccgatacttcaccagattcagccacctgggggagctggaagtgaatctcctcgtagctgagccttctgatgagactgcagccccggctgacacctggattgcagactcatgaaagacctgaaactctaccaacagccacctgggggagctggaagtgaatctcctcgtagctgagccttctgatgagactgcagccccggctgacacctggattgcagactcatgaaagaccctgagcagaggacccagtttggcagagcccgaattcctgacccacaggaactgggagataaaactctgtggttttaatcttctcattttagagtgctcagtgtcctgtggtgtgaacacgcttcattcaacctgggcccttgggagagatgctgagtggttcccgggctgtccccactccacaccgtggcagtgaagagctgctgaagtacatgcttcatagtccttgcgtctctctgaccatgaatggcacctacaacacctgtggctccagcgacctcacctggcccccagcgatcaagctgggcttctacgcctacttgggcgtcctgctggtgctaggcctgctgctcaacagcctggcgctctgggtgttctgctgccgcatgcagcagtggacggagacccgcatctacatgaccaacctggcggtggccgacctctgcctgctgtgcaccttgcccttcgtgctgcactccctgcgagacacctcagacacgccgctgtgccagctctcccagggcatctacctgaccaacaggtacatgagcatcagcctggtcacggccatcgccgtggaccgctatgtggccgtgcggcacccgctgcgtgcccgcgggctgcggtcccccaggcaggctgcggccgtgtgcgcggtcctctgggtgctggtcatcggctccctggtggctcgctggctcctggggattcaggagggcggcttctgcttcaggagcacccggcacaatttcaactccatggcgttcccgctgctgggattctacctgcccctggccgtggtggtcttctgctccctgaaggtggtgactgccctggcccagaggccacccaccgacgtggggcaggcagaggccacccgcaaggctgcccgcatggtctgggccaacctcctggtgttcgtggtctgcttcctgcccctgcacgtggggctgacagtgcgcctcgcagtgggctggaacgcctgtgccctcctggagacgatccgtcgcgccctgtacataaccagcaagctctcagatgccaactgctgcctggacgccatctgctactactacatggccaaggagttccaggaggcgtctgcactggccgtggctcccagtgctaaggcccacaaaagccaggactctctgtgcgtgaccctcgcctaagaggcgtgctgtgggcgctgtgggccaggtctcgggggctccgggaggtgctgcctgccaggggaagctggaaccagtagcaaggagcccgagatcagccctgaactcactgtgtattctcttggagccttgggtgggcagggacggcccaggtacctgctctcttgggaagagagagggacagggacaagggcaagaggactgaggccagagcaaggccaatgtcagagacccccgggatggggcctcacacttgccacccccagaaccagctcacctggccagagtgggttcctgctggccagggtgcagccttgatgacacctgccgctgcccctcggggctggaataaaactccccacccagagtcagtccta

SEQ ID NO: 74766 - DNA, 2032 bp, Artificial Sequence
  derived and/or modified sequence
agctccaggcacagcagttggtgactccttggtgggagccgtgtcccacccggtcctgatactgccgtcttctctttcacagtcctccaggcttgggccagccttgggggcagcagagcttctgggctgacatgggctcattgctccttctccaagccctctgaggacatcaaaagcgtggacgcatcactttccaccatcttgctgcccactgtccctccatcctgaggcctcctaagcacatgtgtggggtggcaggcacactgctgatagctgtggatgcggccgtgacatccttcacccctgcccccatggcatgcatgatccattagggaggaccgtctgcacaaaggtctcttgccctgtgcagcttcctgcagactggacttgcaaagtccagcctgtatggctggagttcccatgcctgccaatctcctgtcgactgcgagtcagctccgatacttcaccagattcagccacctgggggagctggaagtgaatctcctcgtagctgagccttctgatgagactgcagccccggctgacacctggattgcagactcatgaaagaccctgagcagaggacccagtttggcagagcccgaattcctgacccacaggaactgggagataaaactctgtggttttaatcttctcattttagagtgctcagtgtcctgtggtgtgaacacgcttcattcaacctgggcccttgggagagatgctgagtggttcccgggctgtccccactccacaccgtggcagtgaagagctgctgaagtacatgcttcatagtccttgcgtctctctgaccatgaatggcacctacaacacctgtggctccagcgacctcacctggcccccagcgatcaagctgggcttctacgcctacttgggcgtcctgctggtgctaggcctgctgctcaacagcctggcgctctgggtgttctgctgccgcatgcagcagtggacggagacccgcatctacatgaccaacctggcggtggccgacctctgcctgctgtgcaccttgcccttcgtgctgcactccctgcgagacacctcagacacgccgctgtgccagctctcccagggcatctacctgaccaacaggtacatgagcatcagcctggtcacggccatcgccgtggaccgctatgtggccgtgcggcacccgctgcgtgcccgcgggctgcggtcccccaggcaggctgcggccgtgtgcgcggtcctctgggtgctggtcatcggctccctggtggctcgctggctcctggggattcaggagggcggcttctgcttcaggagcacccggcacaatttcaactccatggcgttcccgctgctgggattctacctgcccctggccgtggtggtcttctgctccctgaaggtggtgactgccctggcccagaggccacccaccgacgtggggcaggcagaggccacccgcaaggctgcccgcatggtctgggccaacctcctggtgttcgtggtctgcttcctgcccctgcacgtggggctgacagtgcgcctcgcagtgggctggaacgcctgtgccctcctggagacgatccgtcgcgccctgtacataaccagcaagctctcagatgccaactgctgcctggacgccatctgctactactacatggccaaggagttccaggaggcgtctgcactggccgtggctcccagtgctaaggcccacaaaagccaggactctctgtgcgtgaccctcgcctaagaggcgtgctgtgggcgctgtgggccaggtctcgggggctccgggaggtgctgcctgccaggggaagctggaaccagtagcaaggagcccgagatcagccctgaactcactgtgtattctcttggagccttgggtgggcagggacggcccaggtacctgctctcttgggaagagagagggacagggacaagggcaagaggactgaggccagagcaaggccaatgtcagagacccccgggatggggcctcacacttgccacccccagaaccagctcacctggccagagt

SEQ ID NO: 74767 - DNA, 1258 bp, Artificial Sequence
  derived and/or modified sequence
agaacaaatgtgtgccctcagcaaggatgctggctcttcagaggtgtcagcacaggcagccggcaccccacttccctcccagaaatcccccacgccctctagctggggctggtgcaggagcagtggggaactcctgttacccctgacctgctgccgtcagtcagccgcccgcccccccaccttaaggaggggcagagtcagggaccagccctgaggggtggctcaccccagcttcacttcccccagcccttctcagacagccactgtgcaggctttggcagcgggggtcacacactccacccgggaggccaaagctgcctgcaggaccatgaatggcacctacaacacctgtggctccagcgacctcacctggcccccagcgatcaagctgggcttctacgcctacttgggcgtcctgctggtgctaggcctgctgctcaacagcctggcgctctgggtgttctgctgccgcatgcagcagtggacggagacccgcatctacatgaccaacctggcggtggccgacctctgcctgctgtgcaccttgcccttcgtgctgcactccctgcgagacacctcagacacgccgctgtgccagctctcccagggcatctacctgaccaacaggtacatgagcatcagcctggtcacggccatcgccgtggaccgctatgtggccgtgcggcacccgctgcgtgcccgcgggctgcggtcccccaggcaggctgcggccgtgtgcgcggtcctctgggtgctggtcatcggctccctggtggctcgctggctcctggggattcaggagggcggcttctgcttcaggagcacccggcacaatttcaactccatggcgttcccgctgctgggattctacctgcccctggccgtggtggtcttctgctccctgaaggtggtgactgccctggcccagaggccacccaccgacgtggggcaggcagaggccacccgcaaggctgcccgcatggtctgggccaacctcctggtgttcgtggtctgcttcctgcccctgcacgtggggctgacagtgcgcctcgcagtgggctggaacgcctgtgccctcctggagacgatccgtcgcgccctgtacataaccagcaagctctcagatgccaactgctgcctggacgccatctgctactactacatggccaaggagttccaggaggcgtctgcactggccgtggctcccagtgctaaggcccacaaaagccaggactctctgtgcgtgaccctcgcctaa

SEQ ID NO: 74768 - DNA, 1875 bp, Artificial Sequence
  derived and/or modified sequence
caggccagagtcccagctgtcctggactctgctgtggggaagggctgatgcaggtgtggagtcaaatgtgggtgcctcctgcagccgggtgccaggaggggtggaggggccaccctgggctttgtccgggagcctggtcttcccgtccttgggctgacaggtgctgctgcctctgagccctccctgctaagagctgtgtgctgggtaaggctggtggccctttgggctccctgtccaggatttgcgctctggagggtagggcttgctgggctggggactggaggggaacgtggagctccttctgcctcctttcctgccccatgacagcaggcagatcccaggagagaagagctcaggagatgggaagaggatctgtccaggggttagacctcaagggtgacttggagttctttacggcacccatgctttctttgaggagttttgtgtttgtgggtgtggggtcggggctcacctcctcccacatccctgcccagaggtgggcagagtgggggcagtgccttgctccccctgctcactctctgctgacctccggctccctgtgctgccccaggaccatgaatggcacctacaacacctgtggctccagcgacctcacctggcccccagcgatcaagctgggcttctacgcctacttgggcgtcctgctggtgctaggcctgctgctcaacagcctggcgctctgggtgttctgctgccgcatgcagcagtggacggagacccgcatctacatgaccaacctggcggtggccgacctctgcctgctgtgcaccttgcccttcgtgctgcactccctgcgagacacctcagacacgccgctgtgccagctctcccagggcatctacctgaccaacaggtacatgagcatcagcctggtcacggccatcgccgtggaccgctatgtggccgtgcggcacccgctgcgtgcccgcgggctgcggtcccccaggcaggctgcggccgtgtgcgcggtcctctgggtgctggtcatcggctccctggtggctcgctggctcctggggattcaggagggcggcttctgcttcaggagcacccggcacaatttcaactccatggcgttcccgctgctgggattctacctgcccctggccgtggtggtcttctgctccctgaaggtggtgactgccctggcccagaggccacccaccgacgtggggcaggcagaggccacccgcaaggctgcccgcatggtctgggccaacctcctggtgttcgtggtctgcttcctgcccctgcacgtggggctgacagtgcgcctcgcagtgggctggaacgcctgtgccctcctggagacgatccgtcgcgccctgtacataaccagcaagctctcagatgccaactgctgcctggacgccatctgctactactacatggccaaggagttccaggaggcgtctgcactggccgtggctcccagtgctaaggcccacaaaagccaggactctctgtgcgtgaccctcgcctaagaggcgtgctgtgggcgctgtgggccaggtctcgggggctccgggaggtgctgcctgccaggggaagctggaaccagtagcaaggagcccgagatcagccctgaactcactgtgtattctcttggagccttgggtgggcagggacggcccaggtacctgctctcttgggaagagagagggacagggacaagggcaagaggactgaggccagagcaaggccaatgtcagagacccccgggatggggcctcacacttgccacccccagaaccagctcacctggccagagtgggttcctgctggccagggtgcagccttgatgacacctgccgctgcccctcggggctggaataaaactccccacccagagtc

SEQ ID NO: 74769 - DNA, 1023 bp, Artificial Sequence
  derived and/or modified sequence
atgctttcaggctcacgagccgtgcctacaccccatcgagggtccgaagagttgcttaaatacatgttacattctccatgcgtgagtttgaccatgaatggaacttacaacacttgcggatcctcagacctcacctggccccctgccatcaagcttgggttttacgcttatctgggagttttgctagtacttggattgcttctgaactcactcgctttatgggtgttctgttgtaggatgcagcaatggaccgagacgcgtatttacatgactaacttagccgtggctgacctatgcctgctttgtacattgccatttgtgctgcacagcctgagagatacctcagatacccctctttgccagctgtctcagggtatatatctcaccaacagatacatgagtatatccctggttactgccatcgcagtggacagatacgtggctgtaagacatccactccgcgccagaggcctgagatcaccgcgacaggcagctgctgtgtgcgctgtcctttgggttctggttatcggatctctcgtggcgcgctggctgctgggcatccaagagggcggtttctgtttccgatcaactagacacaactttaactccatggcattccccctgttaggtttttacctacccctggcagtggtggtattttgtagccttaaagtggtaaccgcactggcacaacggcctccgaccgacgtgggccaagccgaagccacccgaaaggccgcccggatggtatgggccaacttgctcgtcttcgtggtctgcttcctccctctgcatgtgggcctgacagttcggctggccgtgggatggaatgcctgtgccctgttggagaccatacgtcgggctttatacatcacgtccaagctgtctgatgccaactgctgcctcgacgcgatttgctactactacatggctaaagagttccaagaggccagcgcattagctgtggccccttccgctaaggcacataagtctcaggattcactgtgtgtgactcttgcctag

SEQ ID NO: 74770 - DNA, 1023 bp, Artificial Sequence
  derived and/or modified sequence
atgctgagcggcagcagagctgtgcccaccccccaccggggcagcgaggagctgctgaagtacatgctgcacagcccctgtgtgtccctgaccatgaatggcacctacaacacctgtggcagcagtgacctgacctggcccccagccatcaagctgggcttctacgcctacctgggcgtgctgctggtgctgggcctgctgctgaacagcctggccctgtgggtgttctgctgcaggatgcagcagtggacagagacccgcatctacatgaccaacctggccgtggccgacctgtgcctgctgtgcaccctgccctttgtgctgcacagcctgcgggacaccagtgacacccccctgtgccagctgagccagggcatctacctgaccaaccgctacatgagcatcagcctggtgacagccatcgctgtggaccgctacgtggccgtgcgccaccccctgcgggcccggggcctgcggagcccccggcaggccgctgctgtgtgtgctgtgctgtgggtgctggtgattggcagcctggtggcccgctggctgctgggcatccaggagggcggcttctgcttccgcagcaccaggcacaacttcaacagcatggccttccccctgctgggcttctacctgcccctggccgtggtggtgttctgcagcctgaaggtggtgacagccctggcccagaggcctcccacagatgtgggccaggccgaggccaccaggaaggccgccaggatggtgtgggccaacctgctggtgtttgtggtgtgcttcctgcccctgcacgtgggcctgactgtgcggctggccgtgggctggaatgcctgtgccctgctggagaccatccggcgggccctgtacatcaccagcaagctgagtgatgccaactgctgcctggatgccatctgctactactacatggccaaggagttccaggaggccagcgccctggccgtggcccccagcgccaaggcccacaagagccaggacagcctgtgtgtgaccctggcctag

SEQ ID NO: 74771 - DNA, 1023 bp, Artificial Sequence
  derived and/or modified sequence
atgctgagcggcagccgggccgtgcccaccccccaccggggcagcgaggagctgttgaaatacatgcttcattccccctgcgtttccctgaccatgaacggaacatacaacacttgcggaagctctgacctgacctggcctccggctatcaagttgggattctatgcctacctcggggtcctgctggtgctgggcctgctcctgaattctctggccctttgggtgttttgttgtcggatgcagcaatggaccgagacacgcatctacatgacaaacctagccgtggctgacctgtgcctcctctgtacgctgcccttcgtgttacattcgctgcgggatacgtccgatactcccctgtgtcaattatctcagggtatatatctgaccaaccgctacatgtctatatcactggtgacggccatcgctgtggaccggtatgtggcagtgcgccaccccctgcgcgcacgcggcctgcgtagtcctaggcaggcggcagctgtgtgtgccgtcctgtgggtgctagtcatcggtagcctggtggcccgctggctactcggcattcaggagggcggattctgtttcagatctacaagacacaattttaactccatggcatttcctctgttgggcttttatcttcctttggccgttgttgtattctgttctcttaaagttgtaactgccctggcacaacgaccacctaccgacgtaggtcaagcagaggcgacgcgtaaagcagcacgcatggtgtgggcaaacctgctcgtcttcgtggtgtgcttcctgccactgcatgttggcctaaccgtccgcctcgccgttggctggaatgcctgtgctctgttagaaacaatccgtagagctctctacataacgtccaagctgtctgacgcgaactgctgcctggacgcgatctgctactattacatggcgaaggagtttcaggaggcctctgcgttggctgtggctcccagcgcaaaggctcataaaagtcaggactccctctgcgttacactggcttag

SEQ ID NO: 74772 - DNA, 1023 bp, Artificial Sequence
  derived and/or modified sequence
atgctgtctgggtcccgtgcggtccctacaccacaccggggttccgaggaactgcttaagtatatgcttcattcaccttgtgtctctctaactatgaacggcacctataatacatgtggcagctcggacctgacgtggccccctgctattaagctgggcttctacgcttacctgggtgtgctactggttctagggttacttctgaactccctcgccctttgggttttttgttgtcggatgcagcagtggacagaaacccggatctatatgacaaacctcgcagtggctgatctctgtctgttatgtactctccccttcgtgctgcatagcttgcgggacacatccgacactcctctgtgccaactatcacaggggatctatctgacgaaccggtacatgtcaatctcccttgtcaccgccatcgcagtcgacaggtatgtagcagtgcgacacccactgagggctagggggctgcggtcccccagacaggcagcagctgtgtgcgcagtgttatgggtgctggtgattggtagtctcgtggccagatggctgctgggcatacaggaaggcggattctgtttccgcagcacccgccacaacttcaatagcatggctttccctctgctgggtttctacttgcccttggccgtggtagtgttctgctcactaaaggtggtcaccgccctggcccaaagacccccaacagacgtgggccaggcagaggctacaagaaaagctgcacgtatggtttgggccaacctcctcgtcttcgtcgtgtgtttcctgcccctccacgtgggactgaccgtgcggctggcggtcggatggaatgcctgcgcgctgcttgagaccatacgcagggccctgtatatcaccagtaagctctcagatgctaactgttgtcttgatgccatctgctactactacatggccaaagagttccaagaggccagtgctttagcggtagcaccctctgccaaggctcataaaagccaggactccctgtgcgttactctggcttag

SEQ ID NO: 74773 - DNA, 1023 bp, Artificial Sequence
  derived and/or modified sequence
atgctgagcggcagcagagccgtgcccaccccccacagaggcagcgaggagctgctgaagtacatgctgcacagcccctgcgtgagcctgaccatgaacggcacctacaacacctgcggcagcagcgacctgacctggccccccgccatcaagctgggcttctacgcctacctgggcgtgctgctggtgctgggcctgctgctgaacagcctggccctgtgggtgttctgctgcagaatgcagcagtggaccgagaccagaatctacatgaccaacctggccgtggccgacctgtgcctgctgtgcaccctgcccttcgtgctgcacagcctgagagacaccagcgacacccccctgtgccagctgagccagggcatctacctgaccaacagatacatgagcatcagcctggtgaccgccatcgccgtggacagatacgtggccgtgagacaccccctgagagccagaggcctgagaagccccagacaggccgccgccgtgtgcgccgtgctgtgggtgctggtgatcggcagcctggtggccagatggctgctgggcatccaggagggcggcttctgcttcagaagcaccagacacaacttcaacagcatggccttccccctgctgggcttctacctgcccctggccgtggtggtgttctgcagcctgaaggtggtgaccgccctggcccagagaccccccaccgacgtgggccaggccgaggccaccagaaaggccgccagaatggtgtgggccaacctgctggtgttcgtggtgtgcttcctgcccctgcacgtgggcctgaccgtgagactggccgtgggctggaacgcctgcgccctgctggagaccatcagaagagccctgtacatcaccagcaagctgagcgacgccaactgctgcctggacgccatctgctactactacatggccaaggagttccaggaggccagcgccctggccgtggcccccagcgccaaggcccacaagagccaggacagcctgtgcgtgaccctggcctag

SEQ ID NO: 74774 - protein, 200 aa, Artificial Sequence
  derived and/or modified sequence
MGNGLSDQTSILSNLPSFQSFHIVILGLDCAGKTTVLYRLQFNEFVNTVPTKGFNTEKIKVTLGNSKTVTFHFWDVGGQEKLRPLWKSYTRCTDGIVFVVDSVDVERMEEAKTELHKITRISENQGVPVLIVANKQDLRNSLSLSEIEKLLAMGELSSSTPWHLQPTCAIIGDGLKEGLEKLHDMIIKRRKMLRQQKKKR

SEQ ID NO: 74775 - protein, 51 aa, Artificial Sequence
  derived and/or modified sequence
MGNGLSDQTSILSNLPSFQSFHIVILGLDCAGKTTVLYRLQFNEFVNTVPT

SEQ ID NO: 74776 - DNA, 603 bp, Artificial Sequence
  derived and/or modified sequence
atgggcaacggcctgagcgaccagaccagcatcctgagcaacctgcccagcttccagagcttccacatcgtgatcctgggcctggactgcgccggcaagaccaccgtgctgtacagactgcagttcaacgagttcgtgaacaccgtgcccaccaagggcttcaacaccgagaagatcaaggtgaccctgggcaacagcaagaccgtgaccttccacttctgggacgtgggcggccaggagaagctgagacccctgtggaagagctacaccagatgcaccgacggcatcgtgttcgtggtggacagcgtggacgtggagagaatggaggaggccaagaccgagctgcacaagatcaccagaatcagcgagaaccagggcgtgcccgtgctgatcgtggccaacaagcaggacctgagaaacagcctgagcctgagcgagatcgagaagctgctggccatgggcgagctgagcagcagcaccccctggcacctgcagcccacctgcgccatcatcggcgacggcctgaaggagggcctggagaagctgcacgacatgatcatcaagagaagaaagatgctgagacagcagaagaagaagagatag

SEQ ID NO: 74777 - DNA, 156 bp, Artificial Sequence
  derived and/or modified sequence
atgggcaacggcctgagcgaccagaccagcatcctgagcaacctgcccagcttccagagcttccacatcgtgatcctgggcctggactgcgccggcaagaccaccgtgctgtacagactgcagttcaacgagttcgtgaacaccgtgcccacctag

SEQ ID NO: 74778 - DNA, 603 bp, Artificial Sequence
  derived and/or modified sequence
atggggaacggtttatccgaccagacctccatcctctctaacctgccaagctttcaatccttccacattgttatcctcggcttggattgcgcgggaaaaactacagtactgtaccgactccaattcaacgaatttgtaaataccgttcccactaaggggttcaatactgagaaaattaaagtcaccctgggtaactcaaagaccgtgactttccacttttgggacgtgggtggacaggagaagcttagaccattgtggaaatcgtacacgagatgtactgatggcattgtgttcgtcgttgactccgtagatgtggaacggatggaggaagcaaagacggaattgcacaaaattacacgcatatctgaaaatcaaggcgtgccggttctaatcgtggctaacaagcaggacttacggaacagcttgagccttagcgaaatagagaaactgctggccatgggagagctgtcctcaagcaccccttggcatctgcagcccacctgtgccattatcggcgacgggctaaaagaaggactcgagaaactgcacgatatgatcataaaacgccggaagatgctgcggcagcagaaaaagaaaaggtag

SEQ ID NO: 74779 - DNA, 603 bp, Artificial Sequence
  derived and/or modified sequence
atggggaacggcttgagtgatcaaacaagtatcctgtccaacctgccatccttccagtcctttcacatagtgatactcggcctggattgtgctggcaagactactgtattatacaggctgcagttcaatgaattcgtgaataccgtccctacaaagggtttcaatactgagaaaattaaagtcaccctagggaatagtaagactgtgaccttccacttttgggacgtgggcggtcaagagaaactgaggcccctctggaagtcctacacaagatgtaccgacggaattgtgtttgtggtcgacagcgtggacgtcgagaggatggaagaggccaaaactgagctgcacaagatcacgcgtatatcagagaatcagggggtgcctgtgctcatcgtggcgaacaagcaggatctacgcaatagtttgtccctgtcagagatcgaaaagctgctggcaatgggggagctgtcatcttccaccccatggcatctacagccaacctgtgcaattataggcgacgggctgaaggaaggactggaaaaactgcatgacatgatcattaagagaaggaaaatgcttcggcaacagaagaagaagagatag

SEQ ID NO: 74780 - DNA, 603 bp, Artificial Sequence
  derived and/or modified sequence
atgggcaatggattgtccgatcagacgtctattctgagtaacctgcccagtttccaaagttttcatattgtaatcttgggcctggactgcgccggtaagaccacagtgctgtaccgtctccagttcaacgaattcgtgaataccgtccccacaaaaggcttcaatactgagaagatcaaggtgacgcttggcaatagcaagacagttacatttcacttttgggatgttggagggcaggagaagcttcgccccctatggaaatcctacaccagatgcacagacggaattgtgttcgtggtggacagtgttgacgtggaaaggatggaggaagccaaaaccgagctgcacaagatcacacggatcagcgagaaccaaggagtaccggttctgatcgtcgccaacaagcaggatctgcgcaactcgctcagcttgagcgaaatcgagaagcttttggctatgggagagttatcatcatcaacgccctggcacttgcagccgacatgtgcaataatcggagacgggttaaaggagggactggagaaactgcacgacatgataattaaacgtcgtaaaatgttgaggcagcagaagaagaagcgatag

SEQ ID NO: 74781 - DNA, 603 bp, Artificial Sequence
  derived and/or modified sequence
atgggtaacggcctgtccgaccagactagcatcctgtctaacctgcctagtttccagagctttcatattgtcatcctcgggctagactgtgctggcaaaacgacggtactttacaggttgcagtttaacgaatttgttaacaccgtccccaccaagggcttcaacacagaaaagatcaaagtgacactgggcaattcgaagacagtcacttttcacttttgggacgtgggggggcaggagaaactacgccccttgtggaagtcgtacacgagatgtaccgatggcatagtgtttgtggttgacagtgtcgatgtggagcggatggaagaagccaagacagagctgcacaaaattactagaattagtgaaaaccagggcgtccctgtccttattgtcgctaataagcaggacttaaggaacagcctgagcctgtccgaaattgaaaagctactcgccatgggcgagcttagttcttccacgccttggcatctgcagccgacgtgcgcgattatcggggacggactcaaagaggggctcgaaaagctgcatgacatgataattaagagaagaaaaatgttgcggcagcagaaaaagaagaggtag

SEQ ID NO: 74782 - DNA, 603 bp, Artificial Sequence
  derived and/or modified sequence
atgggtaatggcctgtcagaccaaacctcgattctcagtaacctgccgtcttttcagagttttcatatcgtaattctcggcctggattgcgctggcaagactacagtcctctataggctccagtttaacgaatttgttaataccgtgccaaccaaaggatttaatactgaaaagatcaaagtaaccttaggcaatagtaaaaccgtcacgtttcatttttgggatgtaggtgggcaggagaaactgcggccgctctggaaaagttacacacgatgcaccgatgggattgtgttcgtggtggactccgtggacgtcgagaggatggaagaggctaagactgaactgcacaagatcacacgcattagcgaaaatcagggcgtgccagttctgatcgtcgcgaacaaacaagatctgagaaattcactatccctaagcgagattgaaaagcttctggcaatgggggaactgtcttcctccacaccatggcacctccagcccacctgcgcaatcatcggagacggattaaaggaggggttagagaagctgcatgatatgatcattaaacggcggaaaatgcttaggcagcagaagaaaaagaggtag

SEQ ID NO: 74783 - DNA, 156 bp, Artificial Sequence
  derived and/or modified sequence
atgggtaacgggctcagcgatcaaaccagcatcctctccaacttaccatcattccagagttttcacatcgtgatccttgggcttgactgtgcggggaaaactaccgttttatacaggctccagtttaatgagtttgtgaataccgtccctacgtag

SEQ ID NO: 74784 - DNA, 1147 bp, Artificial Sequence
  derived and/or modified sequence
ggcgcgcggcgcccgccaggcgcccagtcctctgccatcgcccacgcctccctggtgccagggaacaggtatcagcgcgcctccccagcggctgggagagacgctgaatgaagaagagggaaggacggttagtcagcagtcttatagctggatcagctaccaagagaagttgtaaaccaagaagagaaaagcatttcaatttgggacatttatttgcacctggaaatggggaatgggctgtcagaccagacttctatcctgtccaacctgccttcatttcagtctttccacattgttattctgggtttggactgtgctggaaagacaactgtcttatacaggctgcagttcaatgaatttgtaaataccgtacctaccaaaggatttaacactgagaaaattaaggtaaccttgggaaattctaaaacagtcacttttcacttctgggatgtaggtggtcaggagaaattaaggccactgtggaagtcatataccagatgcacagatggcattgtatttgttgtggactctgttgatgtcgaaaggatggaagaagccaaaactgaacttcacaaaataactaggatatcagaaaatcagggagtccctgtacttatagttgctaacaaacaagatttgaggaactcattgtcactttcagaaattgagaaattgttagcaatgggtgaactgagctcatcaactccttggcatttgcagcctacctgtgcaatcataggagatggcctaaaggaaggacttgagaaactacatgatatgatcattaaaagaagaaaaatgttgcggcaacagaaaaagaaaagatgaatatcaatacctattatatctgtgtggagtaggttttctctggtctgattttgacaaatagaagagtgtctacagcgtggtttgcctgtctgccctcctggatgctattaaagctttgttttgttgaacaatcagatgcccaactctgttgccttgtggaagatgagtaaatgcagtgcttcttaaagtggtctcttctccctaccccacaaatcttttggtactaccatttggggaagccaagcaaggatagtaaattgaccagaacacagttgtgggaatttggtctgaagttagtgaaataaaactttaaagagtg

SEQ ID NO: 74785 - DNA, 1296 bp, Artificial Sequence
  derived and/or modified sequence
ggggcggggactgtcgcgtggagctgccgggcgagcaccgttagggcagcctggcgcgcggcgcccgccaggcgcccagtcctctgccatcgcccacgcctccctggtgccagggaacaggtatcagcgcgcctccccagcggctgggagagacgctgaatgaagaagagggaaggacggttagtcagagctgcttggagagctaagctggaagggtgcttatccctgcgtagaaacgcctgccaatgctttctcatttggacccagactccagatcgggagcagtcttatagctggatcagctaccaagagaagttgtaaaccaagaagagaaaagcatttcaatttgggacatttatttgcacctggaaatggggaatgggctgtcagaccagacttctatcctgtccaacctgccttcatttcagtctttccacattgttattctgggtttggactgtgctggaaagacaactgtcttatacaggctgcagttcaatgaatttgtaaataccgtacctaccaaaggatttaacactgagaaaattaaggtaaccttgggaaattctaaaacagtcacttttcacttctgggatgtaggtggtcaggagaaattaaggccactgtggaagtcatataccagatgcacagatggcattgtatttgttgtggactctgttgatgtcgaaaggatggaagaagccaaaactgaacttcacaaaataactaggatatcagaaaatcagggagtccctgtacttatagttgctaacaaacaagatttgaggaactcattgtcactttcagaaattgagaaattgttagcaatgggtgaactgagctcatcaactccttggcatttgcagcctacctgtgcaatcataggagatggcctaaaggaaggacttgagaaactacatgatatgatcattaaaagaagaaaaatgttgcggcaacagaaaaagaaaagatgaatatcaatacctattatatctgtgtggagtaggttttctctggtctgattttgacaaatagaagagtgtctacagcgtggtttgcctgtctgccctcctggatgctattaaagctttgttttgttgaacaatcagatgcccaactctgttgccttgtggaagatgagtaaatgcagtgcttcttaaagtggtctcttctccctaccccacaaatcttttggtactaccatttggggaagccaagcaaggatagtaaattgaccagaacacagttgtgggaatttggtctgaagttagtgaaataaaactttaaagagtgtct

SEQ ID NO: 74786 - DNA, 603 bp, Artificial Sequence
  derived and/or modified sequence
atgggaaatggcctgagtgaccagaccagcatcctgagcaacctgcccagcttccagagcttccacatcgtcatcctgggcctggactgtgccggcaagaccaccgtgctgtaccgcctgcagttcaatgaatttgtgaacacagtgcccaccaagggcttcaacacagagaagatcaaggtgaccctgggcaacagcaagacagtgaccttccacttctgggatgtgggcggccaggagaagctgcggcccctgtggaagagctacacccgctgcacagatggcatcgtgtttgtggtggacagcgtggatgtggagaggatggaggaggccaagacagagctgcacaagatcacccgcatcagcgagaaccagggcgtgcctgtgctgattgtggccaacaagcaggacctgaggaacagcctgagcctgtctgaaattgagaagctgctggccatgggagagctgagcagcagcaccccctggcacctgcagcccacctgtgccatcattggagatggcctgaaggagggcctggagaagctgcatgacatgatcatcaagaggaggaagatgctgcggcagcagaagaagaagaggtag

SEQ ID NO: 74787 - DNA, 156 bp, Artificial Sequence
  derived and/or modified sequence
atgggaaatggcctgagtgaccagaccagcatcctgagcaacctgcccagcttccagagcttccacatcgtcatcctgggcctggactgtgccggcaagaccaccgtgctgtaccgcctgcagttcaatgaatttgtgaacacagtgcccacctag

SEQ ID NO: 74788 - DNA, 3162 bp, Artificial Sequence
  derived and/or modified sequence
gcagcctggcggcgacctgaccgcccgaggctccccttcacctgcagcggctgctcggctccctctgggaacgccgccttttctaacttaagggcaacaggtggtgccggtggaccgagagagagctcagctccgccgcgctgggagcggcagttaccctcaccaattagggagcgggggcgggagttgcatggcttccctgatgcgggtgaccaatgggatttgggatcatgagtggaccgggaggagtgggcgtggtcggagtctgagtccaaggtttctcgtgcggcaactgccagagctgcttggagagctaagctggaagggtgcttatccctgcgtagaaacgcctgccaatgctttctcatttggacccagactccagatcgggagcagtcttatagctggatcagctaccaagagaagttgtaaaccaagaagagaaaagcatttcaatttgggacatttatttgcacctggaaatggggaatgggctgtcagaccagacttctatcctgtccaacctgccttcatttcagtctttccacattgttattctgggtttggactgtgctggaaagacaactgtcttatacaggctgcagttcaatgaatttgtaaataccgtacctaccaaaggatttaacactgagaaaattaaggtaaccttgggaaattctaaaacagtcacttttcacttctgggatgtaggtggtcaggagaaattaaggccactgtggaagtcatataccagatgcacagatggcattgtatttgttgtggactctgttgatgtcgaaaggatggaagaagccaaaactgaacttcacaaaataactaggatatcagaaaatcagggagtccctgtacttatagttgctaacaaacaagatttgaggaactcattgtcactttcagaaattgagaaattgttagcaatgggtgaactgagctcatcaactccttggcatttgcagcctacctgtgcaatcataggagatggcctaaaggaaggacttgagaaactacatgatatgatcattaaaagaagaaaaatgttgcggcaacagaaaaagaaaagatgaatatcaatacctattatatctgtgtggagtaggttttctctggtctgattttgacaaatagaagagtgtctacagcgtggtttgcctgtctgccctcctggatgctattaaagctttgttttgttgaacaatcagatgcccaactctgttgccttgtggaagatgagtaaatgcagtgcttcttaaagtggtctcttctccctaccccacaaatcttttggtactaccatttggggaagccaagcaaggatagtaaattgaccagaacacagttgtgggaatttggtctgaagttagtgaaataaaactttaaagagtgtctgcctagtgttttgtgcttacatctttcggggggaagcctttgcaagaaaattgcatacaaggctttgtaacgatcaagtgctaatcgatggaaatgttaaggtagattaacatatatgcagttatattgatcacattggtccaaccagtccttttttgaagtaagggacaaggagtaagtattttcttttttaagtttctgccaaatgatttttgacgctttctggaatcaagtaatttaatagtatagcttaattctagacaatgtttaagttggtctacctttattaaaaataagatatttggggtatattcaagtgcatggattagttttcctgacaaagcatgttttggtgtgtagtcttactttttagaaatagctatgcatcgttctacacaggtttaaaacaacttttttggggatttagggctattataggaatagtttgttgtcagaagcactttcacttgaagaacctaaaatgattgactcattcatagtaaatatgggcatgtaaactaataaatatgcactggatacatatatggatttatgaagaaggcgatttagtcaagaggatgtaattaaaatatgtggtctctaaaatattccagttacaagatatttgttttattaatatttgctggctaaaaacaaatgtggtttttatatatttttgtagtgtgttgagaagagcaaaagctttataaatatacctgatgcgctgtagaatgaaaatgtaaaagataacctgtatgtgttccgagctttaattttttgtttacaaattgaacagtgttacatgggctgtccagtcctgattatagagaggaagaaatggtaacagtatggcagataagaattacaattatagaaaatgaggggaaaataacaaacctgttttatgaaaattcactggtgctgtttacattggaataaaaagctctataaggaggaaaggcctttatctaattcttatctacagacacttacttccagtgaccatattttactaaatcagcttattttttatgtctaaagcaacagctgttctgaaaaatcaccaaaagaaatgcactttgctagcaggatttgttttggctttgggttttgtttttttgttttttttttttttcagtggcataacagtttttggaaccttgattcttgtgtcacacaaaatgaatgaagtagcttgatgtggagccttcatatgttaaatattcctgcactagtgatggtcacttagaatgtttatagaaatgtggataataactaccaataaactacttgaggcactaggagaacagtatttgactttgaattttaatgtatttccacttttgctgaagcttttaatcagatgtgtaaaaacaattgaccagctaggctatttagtcccatagtagttcagatctgcttagatgtgacaggcattgaaggctgtttttttttttttctcccttcactgatactgaaatcatggtatctgctgcaaacatgagtagatccatgatggattaataaagcttgctgaaaaaaaaaatctgtgtatcaattagatttaccagtttgcctgtactttctgtctacctactatgtaaaatagtgctgtttttaagtatttcaaaagcttgtgtgttgaccctttgtagcctaagtacgtaaacaaattaatgttatctaagtttttcatatttcatggacaacaaaagagaaaatggtatgaacactgtacaaactttgatttataaa

SEQ ID NO: 74789 - DNA, 1144 bp, Artificial Sequence
  derived and/or modified sequence
ggcgcgcggcgcccgccaggcgcccagtcctctgccatcgcccacgcctccctggtgccagggaacaggtatcagcgcgcctccccagcggctgggagagacgctgaatgaagaagagggaaggacggttagtcagtcttatagctggatcagctaccaagagaagttgtaaaccaagaagagaaaagcatttcaatttgggacatttatttgcacctggaaatggggaatgggctgtcagaccagacttctatcctgtccaacctgccttcatttcagtctttccacattgttattctgggtttggactgtgctggaaagacaactgtcttatacaggctgcagttcaatgaatttgtaaataccgtacctaccaaaggatttaacactgagaaaattaaggtaaccttgggaaattctaaaacagtcacttttcacttctgggatgtaggtggtcaggagaaattaaggccactgtggaagtcatataccagatgcacagatggcattgtatttgttgtggactctgttgatgtcgaaaggatggaagaagccaaaactgaacttcacaaaataactaggatatcagaaaatcagggagtccctgtacttatagttgctaacaaacaagatttgaggaactcattgtcactttcagaaattgagaaattgttagcaatgggtgaactgagctcatcaactccttggcatttgcagcctacctgtgcaatcataggagatggcctaaaggaaggacttgagaaactacatgatatgatcattaaaagaagaaaaatgttgcggcaacagaaaaagaaaagatgaatatcaatacctattatatctgtgtggagtaggttttctctggtctgattttgacaaatagaagagtgtctacagcgtggtttgcctgtctgccctcctggatgctattaaagctttgttttgttgaacaatcagatgcccaactctgttgccttgtggaagatgagtaaatgcagtgcttcttaaagtggtctcttctccctaccccacaaatcttttggtactaccatttggggaagccaagcaaggatagtaaattgaccagaacacagttgtgggaatttggtctgaagttagtgaaataaaactttaaagagtg

SEQ ID NO: 74790 - DNA, 840 bp, Artificial Sequence
  derived and/or modified sequence
agctgcttggagagctaagctggaagggtgcttatccctgcgtagaaacgcctgccaatgctttctcatttggacccagactccagatcgggagtcttatagctggatcagctaccaagagaagttgtaaaccaagaagagaaaagcatttcaatttgggacatttatttgcacctggaaatggggaatgggctgtcagaccagacttctatcctgtccaacctgccttcatttcagtctttccacattgttattctgggtttggactgtgctggaaagacaactgtcttatacaggctgcagttcaatgaatttgtaaataccgtacctaccaaaggatttaacactgagaaaattaaggtaaccttgggaaattctaaaacagtcacttttcacttctgggatgtaggtggtcaggagaaattaaggccactgtggaagtcatataccagatgcacagatggcattgtatttgttgtggactctgttgatgtcgaaaggatggaagaagccaaaactgaacttcacaaaataactaggatatcagaaaatcagggagtccctgtacttatagttgctaacaaacaagatttgaggaactcattgtcactttcagaaattgagaaattgttagcaatgggtgaactgagctcatcaactccttggcatttgcagcctacctgtgcaatcataggagatggcctaaaggaaggacttgagaaactacatgatatgatcattaaaagaagaaaaatgttgcggcaacagaaaaagaaaagatgaatatcaatacctattatatctgtgtggagtaggttttctctggtctgattttgacaa

SEQ ID NO: 74791 - DNA, 845 bp, Artificial Sequence
  derived and/or modified sequence
gaagggatcccacttcggggaggatgggcttatcccggcgggcgcgccaggtgggatctctagcgcctcaggggcccgcgcggcaacagccggcaccctcgggcccgcggacaaagggttaacgcgttggcagtgactgcgggccccggatgtgagagccttggcttgacgccctggctgcgctgcaggtgcgccgggccgaacggagccggcagcctggcggcgacctgaccgcccgaggctccccttcacctgcagcggctgctcggctccctctgggaacgccgccttttctaacttaagggcaacaggtggtgccggtggaccgagagagagctcagctccgccgcgctgggagcggcagttaccctcaccaattagggagcgggggcgggagttgcatggcttccctgatgcgggtgaccaatgggatttgggatcatgagtggaccgggaggagtgggcgtggtcggagtctgagtccaaggtttctcgtgcggcaactgccagagctgcttggagagctaagctggaagggtgcttatccctgcgtagaaacgcctgccaatgctttctcatttggacccagactccagatcgggagcagtcttatagctggatcagctaccaagagaagttgtaaaccaagaagagaaaagcatttcaatttgggacatttatttgcacctggaaatggggaatgggctgtcagaccagacttctatcctgtccaacctgccttcatttcagtctttccacattgttattctgggtttggactgtgctggaaagacaactgtcttatacaggctgcagttcaatgaatttgtaaataccgtacctac

SEQ ID NO: 74792 - DNA, 603 bp, Artificial Sequence
  derived and/or modified sequence
atgggcaacggcctgagcgaccagaccagcatcctgagcaacctgccaagtttccagtccttccacatagtgattctggggctcgattgcgccgggaagacaactgtgctctatcgattacagttcaacgagttcgtgaatactgtacccacaaagggctttaacactgaaaaaatcaaagttactctcggtaattccaaaaccgtcacatttcacttctgggacgttggaggtcaggagaaacttagacctctctggaagtcttatacgcggtgtacagatgggattgtttttgttgtagattcagttgatgtggagcgcatggaggaggcaaaaaccgagttgcacaagataacccggatctccgagaaccaaggcgtgcctgtgttgattgtggcaaacaaacaggatttacggaactcactgtccctaagcgagattgagaaattactagcgatgggcgaactgtcttcgtctacaccttggcacctgcagcctacttgcgcaataataggtgacgggctgaaagagggccttgaaaagttgcatgatatgatcatcaagcgccgaaaaatgcttagacagcaaaaaaagaagcggtag

SEQ ID NO: 74793 - DNA, 603 bp, Artificial Sequence
  derived and/or modified sequence
atgggcaacggcctgagcgaccagaccagcatcctgagcaacctgccctcctttcagtcattccatatcgtgatattaggcctcgactgtgctgggaagaccacagtgttgtatcggctccagttcaacgagttcgtgaacaccgtgcccaccaagggcttcaatactgagaagattaaggtcaccttgggcaatagtaagactgtgactttccatttctgggacgtgggcggccaagagaagctgcgtcccctgtggaagtcctatacaagatgcactgatggaattgtcttcgtggttgactccgttgacgtcgagaggatggaagaggccaagacagagctgcataagatcacccgtatcagtgaaaaccagggggtgccggtcctcatagttgctaataaacaggatttacgtaatagcctatctctaagtgagattgagaaacttctggcaatgggcgaactgtcaagcagcaccccatggcacctccaacccacgtgtgccattattggcgatggtctcaaggaaggcttggagaagctacacgatatgatcattaagaggagaaaaatgctgcggcagcagaaaaagaagcggtag

SEQ ID NO: 74794 - DNA, 603 bp, Artificial Sequence
  derived and/or modified sequence
atgggcaacggcctgagcgaccagaccagcatcctgagcaacctgccatcatttcagagctttcatattgtgattttaggtctcgattgcgccgggaaaacgacagtactctaccgcctgcagttcaatgagttcgtaaatactgtacctacaaagggctttaacacggaaaaaattaaggtgaccctcgggaactcgaagactgtcacttttcatttttgggacgttggaggacaagagaaactaaggcccctttggaagtcttatacgcgctgcacagacggcattgtatttgtggtggactctgtcgatgtggagcgaatggaggaggccaagacagaactgcacaaaattacaaggatctctgaaaatcagggagtacctgtactcattgtagctaacaaacaggacctaaggaattctctgagtctaagtgaaatcgagaagcttctggcaatgggtgaactctcctcttccactccatggcatctgcagcccacatgcgctataattggcgatggactcaaggaagggctggagaagctgcatgacatgatcataaaacgcaggaagatgttgcgtcaacagaaaaagaagagatag

SEQ ID NO: 74795 - DNA, 603 bp, Artificial Sequence
  derived and/or modified sequence
atgggcaacggcctgagcgaccagaccagcatcctgagcaacctgccatcttttcagtcattccacatagtgattttgggcctagactgtgcagggaagacaacagtgctataccgcttgcaattcaacgaattcgtgaacaccgttccgactaaaggcttcaatacagagaaaatcaaagtcacgttagggaattctaagacagtcacttttcacttttgggatgtaggggggcaagagaagctgcggcctctctggaagagttatacccgctgcaccgacggcatcgttttcgtcgtggatagcgtggacgtagaaagaatggaagaggccaagacagagctccataagataaccaggatcagcgagaaccaaggggtgccagtgctgatagtagctaataaacaggacttaaggaattccctctctctctctgaaattgagaagctcctggcaatgggcgagctgagctctagcactccatggcacctccagcccacttgtgctatcataggcgatggcctgaaagaaggcttggagaagctgcatgacatgatcatcaaaagaaggaagatgctcagacagcaaaagaagaagcgctag

SEQ ID NO: 74796 - DNA, 603 bp, Artificial Sequence
  derived and/or modified sequence
atgggcaacggcctgagcgaccagaccagcatcctgagcaacctgccttcctttcagtcatttcatatcgtcatcttgggactggactgcgcgggcaagactacagtgctgtatagactacagtttaatgagttcgtcaatacggtgcccacaaaaggttttaacaccgaaaagatcaaggtgacactagggaacagcaagactgtcaccttccatttttgggatgtcggaggacaagaaaagctgcggccgctctggaagtcatatacccggtgcacagatgggattgtgttcgtagtggattctgtggatgtcgagaggatggaagaagctaaaaccgaactacacaagattactcgtatatccgagaatcaaggcgttcccgtgcttatcgttgcaaataagcaagatctgcgaaacagcctgtcattaagcgagatcgagaaattgctagcaatgggcgagctatcaagctccactccttggcatctccagcccacatgtgccattatcggtgatgggttaaaagaagggctggaaaaattgcatgacatgattattaagaggagaaagatgctccggcagcagaaaaaaaaaagatag

SEQ ID NO: 74797 - DNA, 156 bp, Artificial Sequence
  derived and/or modified sequence
atgggcaacggcctgagcgaccagaccagcatcctgagcaacctgcctagcttccagtcatttcacatagtaatccttgggctcgactgcgccggtaaaacaacagtactctatagactccagttcaacgaattcgtgaacacggttcccacttag

SEQ ID NO: 74798 - DNA, 603 bp, Artificial Sequence
  derived and/or modified sequence
atgggcaatgggctctctgatcagacctccattctctccaatctaccctccttccaatctttccatatcgtgatcttgggtctggactgcgccggaaagactactgtattatatcgactacagtttaacgaattcgttaataccgtacccacgaagggcttcaatacagagaaaattaaggtgacactgggcaatagcaaaactgtaaccttccatttctgggacgtgggtggacaggagaagctccggccactatggaaatcttatacccgatgcaccgatggcatagtgttcgttgtggatagcgtagacgtggaaagaatggaagaagctaagacggagctgcacaagattactcggatttctgagaatcagggggtgcccgtcctgatcgtggccaacaagcaggacctgcgaaatagtctttcccttagtgagatcgaaaagctgctggcaatgggcgagttatcctcctcaacaccctggcacttgcagcctacctgtgcaatcataggagatgggttgaaggaggggcttgaaaaactccacgacatgatcatcaaacgccgaaaaatgctgcgacagcagaaaaagaagaggtag

SEQ ID NO: 74799 - DNA, 603 bp, Artificial Sequence
  derived and/or modified sequence
atgggtaatggcctgagcgaccagacaagtatcctctcgaacctgccaagcttccagtccttccacatcgtaattctgggacttgactgtgccggtaagaccaccgttctctaccggttgcaattcaacgagttcgtcaatactgtacctacaaagggcttcaataccgaaaagattaaggtaaccttgggaaacagcaagacagtgactttccacttttgggacgtgggaggccaggaaaaattgagacctctttggaaaagctacacgaggtgcaccgacggtatcgtttttgtcgtggacagtgttgacgtcgagcgaatggaggaggctaaaactgagctgcacaaaatcacccgtatctcagaaaaccagggcgtcccggtgctgatagtcgccaataagcaggatttgcgcaacagtctgtcgctcagtgagatcgaaaagctcctcgcgatgggtgagctgagttcttctactccatggcacctccaaccgacatgtgccatcattggtgacgggttaaaagagggactcgaaaagttgcatgatatgatcatcaaacgcaggaaaatgctgcgacagcagaagaagaagaggtag

SEQ ID NO: 74800 - DNA, 603 bp, Artificial Sequence
  derived and/or modified sequence
atgggcaacgggctttctgaccaaacatcaattctttccaaccttccttcgttccagagttttcatatcgtgattttgggactagactgcgctggcaagaccacggtactatatagactccagttcaacgaatttgttaataccgtgcctacgaagggatttaatacggagaagataaaggtcacattgggcaactctaaaaccgttactttccacttttgggacgtcggaggtcaggagaagctgaggcctctgtggaagagttacaccaggtgtacagatggcatcgtctttgttgttgatagtgtggacgttgagcgcatggaggaggcgaaaacagaacttcacaagattacacgtattagcgagaatcagggggtcccagtccttatcgtcgcaaacaagcaagatttaaggaattcattaagtctatctgagatagagaaattgttggctatgggagaactttcttcgtccaccccgtggcacctacaaccaacctgtgctattatcggcgacggattgaaagaggggctcgaaaagctccacgacatgatcatcaagagacggaagatgttgaggcagcagaaaaaaaagcgatag

SEQ ID NO: 74801 - DNA, 603 bp, Artificial Sequence
  derived and/or modified sequence
atgggaaatgggctcagtgatcagacaagcattcttagcaacctcccttcttttcagagttttcacatcgtgattcttggactcgattgcgccggaaagactaccgtcctctacagattgcagttcaatgagttcgtcaacaccgttcccaccaaaggctttaacaccgaaaagataaaggttaccctcgggaattctaaaaccgtaacctttcacttctgggacgtgggtggtcaggaaaaacttcgacccttgtggaagagttacacgagatgcaccgatggaatagtcttcgtcgttgactccgtcgatgtggagcggatggaagaggccaagacagagttgcataaaattactcgtatctctgaaaatcaaggcgtccccgtcctcattgtcgctaacaaacaggatctgcggaattccctgtcgctctctgaaattgaaaaattgctggctatgggcgagctcagcagtagcacaccctggcacctccagccaacatgtgcgataattggcgatggcctgaaagagggactcgaaaaacttcacgacatgattatcaaaaggcgtaagatgctgagacagcagaagaagaagcggtag

SEQ ID NO: 74802 - DNA, 603 bp, Artificial Sequence
  derived and/or modified sequence
atgggtaacggcctctctgaccagacctccatcctttcaaatttgccatctttccagagtttccatattgtcatcctgggtcttgactgcgccggtaaaaccacagttctgtaccgactgcagtttaacgaattcgtgaacacggttcccactaaagggtttaacacagagaaaatcaaagttactctgggaaactctaaaactgttacctttcacttctgggacgttggcggtcaggagaagctgaggcccctctggaaatcttacacaagatgcaccgatgggattgtatttgttgtagactcagtcgatgtggaacgtatggaggaggcaaaaaccgaactgcacaaaattaccagaatcagtgagaaccagggagtccccgtccttattgtcgcaaataaacaggatttgaggaactctctgtcactttccgaaatcgagaagctgctcgccatgggcgagctgtccagttctaccccctggcatttacagccaacatgcgcaatcatcggcgacgggcttaaggaaggcttggagaagttacatgacatgataataaaacggaggaagatgctaaggcagcagaaaaagaagaggtag

SEQ ID NO: 74803 - DNA, 156 bp, Artificial Sequence
  derived and/or modified sequence
atgggtaacggactgagtgatcaaaccagcatcctttctaatctgccatctttccaatcttttcacattgttatactgggcttagattgtgccggaaaaaccaccgtgctatacaggctacaatttaacgagtttgtgaacaccgtgccaacctag

SEQ ID NO: 74804 - DNA, 1266 bp, Artificial Sequence
  derived and/or modified sequence
ttatcattaatcaagttcaacggaacccccggcagccagttatcgactcctcgtagtggcaagagtcccagcccctctcctacatctccgggttccctgaggaaacagcggagtagccaacatggaggcagcagcactagcttagcgagtacaaaggtgtgttcaagtatggatgaaaacgacggccctggggaagaggtatctgaggaaggcttccaaatccctgcaactatcacggagcgctacaaagtgggacgtactattggtgatggtaacttcgccgtggtgaaggagtgcgtggagcgctccaccgccagggagtacgccctcaaaatcatcaagaagtctaagtgtagaggcaaagaacacatgatccagaatgaagtctctattctgagaagggtgaagcaccccaacatcgtcctgctaatcgaagagatggacgtcccaaccgaactatacttggtgatggagctcgtcaaggggggtgatctgtttgacgctattacctccaccaacaaatacacagagagagacgcctcaggaatgctgtataacctagcctccgccatcaaatatctgcatagcttaaacattgttcaccgggacataaagccagagaatcttctggtgtacgagcaccaggacggatccaagtccctcaagttaggagactttggacttgcaacaatcgtggacgggccactgtacacagtctgcgggacaccaacctacgtcgcccctgaaatcattgctgaaactggctatggcttgaaagtggacatctgggccgctggcgtcatcacatacatcctgctatgtggattcccaccttttcgaggctccggggacgatcaagaggtgctgttcgaccagattttgatgggccaggtggactttccctcaccctattgggataatgtctcagattctgccaaggagcttattactatgatgctgctggttgatgtagatcagcgctttagcgccgtacaggtgcttgagcacccatgggttaatgacgacggccttccggagaatgaacaccagctttcagtggctggaaaaatcaagaaacactttaatactgggcccaaaccgaattcaactgcagcgggggtgtcggtcatcgctctggatcacggatttactatcaagcgtagcggatccctggactactatcagcagcctggtatgtactggattcggcccccgctgttaatacgtcgaggtcgcttttcggacgaggatgcaaccagaatgtag

SEQ ID NO: 74805 - DNA, 1266 bp, Artificial Sequence
  derived and/or modified sequence
ctgagcctcatcaagttcaacggcaccccaggcagccagctgagcacccccaggtctgggaagagccccagccccagccccaccagccctggcagcctgaggaagcagaggagcagccagcacggcggcagcagcaccagcctggccagcaccaaggtgtgcagctccatggatgaaaatgatggccctggagaggaggtgtctgaggagggcttccagatcccagccaccatcacagagcgctacaaggtgggccgcaccatcggagatggcaactttgctgtggtgaaggaatgtgtggagaggagcacagcccgggagtatgccctgaagatcatcaagaagagcaaatgtcggggcaaggagcacatgatccagaatgaggtgtccatcctgcggcgggtgaagcaccccaacatcgtgctgctgattgaggagatggatgtgcccacagagctgtacctggtgatggagctggtgaagggcggggacctgtttgatgccatcaccagcaccaacaagtacacagaaagagatgccagcggcatgctgtacaacctggccagcgccatcaagtacctgcacagcctgaacatcgtgcaccgggacatcaagccagagaacctgctggtgtatgagcaccaggacggcagcaagagcctgaagctgggggactttggcctggccaccatcgtggatggccccctgtacacagtgtgtggcacccccacctacgtggcccctgagatcatcgccgagaccggctacggcctgaaggtggacatctgggccgccggggtcatcacctacatcctgctgtgtggcttcccccccttccggggcagcggagatgaccaggaggtgctgtttgaccagatcctgatgggccaggtggacttccccagcccctactgggacaacgtgtctgattctgccaaggagctgatcaccatgatgctgctggtggatgtggaccagcgcttctctgctgtgcaggtgctggagcacccctgggtgaatgatgatggcctgcctgaaaatgagcaccagctgtctgtggccggcaagatcaagaagcacttcaacacaggccccaagcccaacagcacagctgctggggtgtctgtgattgccctggaccacggcttcaccatcaagaggagcggcagcctggactactaccagcagcccggcatgtactggatccggccccccctgctgatcagaagaggccgcttcagtgatgaagatgccaccaggatgtag

SEQ ID NO: 74806 - DNA, 1266 bp, Artificial Sequence
  derived and/or modified sequence
ctgagcctgatcaagttcaacggcacccccggcagccagctgagcacgcctcggagtggcaagtctccttctccaagccccactagccccggtagcctcagaaagcagcgctcttctcaacatggcggcagttcaacaagcctggcatctaccaaggtttgcagttctatggacgaaaacgatggccctggggaagaggtgtccgaagagggcttccaaatccccgctacaatcaccgagaggtacaaggttgggaggactatcggcgacggcaactttgccgtggtgaaggagtgcgttgagcgctcgaccgcccgggagtacgctctcaagattataaaaaaatcaaagtgcaggggcaaagagcacatgatccaaaatgaagtttccatcctacgacgggtgaaacatcccaatatagtgcttcttatcgaggagatggacgtgccgaccgagctctacctggtgatggaactggtgaaaggtggtgacctctttgacgcaatcaccagcaccaacaaatataccgagagagatgcatctgggatgctgtataacctggcgagcgcgataaagtacctccattcacttaatatcgtgcaccgcgacatcaaacctgagaacctacttgtctatgaacatcaagacgggagcaagtcgctcaaactgggtgacttcggcctcgcgactatagtggacggaccactgtatacagtatgtggtacccccacttacgtcgctcctgagataatcgcagaaacaggctatgggctcaaggtcgatatttgggccgctggtgttataacctatatactcctgtgcgggttccctcccttccggggctctggagacgatcaggaggtgctgtttgatcagattctgatggggcaggtagattttccttccccgtactgggataacgtgagcgactcagctaaagagctgattactatgatgcttctagttgatgttgatcagcggttcagcgcagtacaggttctggagcacccttgggttaatgatgatggactccccgagaacgagcaccagctctccgtggccggaaagatcaaaaaacattttaatacaggtcccaagcctaactccacggccgcgggagtatccgtcatcgccttggatcacgggttcactatcaagaggagcgggagtctggactattaccaacagccagggatgtattggatccgccctccgctgctgattcgaaggggacgattttcggatgaagacgcaactagaatgtag

SEQ ID NO: 74807 - DNA, 1266 bp, Artificial Sequence
  derived and/or modified sequence
ctgagccttataaaattcaatggtacacccggaagtcagcttagtacacccagaagcggcaagagcccttctccgagtccaacgtctcccggttcgcttcgtaagcagcgttcctctcaacacggcggatcctcaacttctctggcatccacaaaggtatgctcatcaatggatgagaacgacggacctggggaagaggtttccgaggagggattccaaatacctgcgaccatcacagagagatataaggtgggcaggaccattggggatggtaacttcgctgtggtgaaggaatgcgtcgaacggtcaactgctcgcgaatatgccctgaagataatcaagaaaagcaagtgtcgaggcaaggaacacatgatccagaatgaagtgtctattttgcgaagagtgaagcatcctaacatcgtgctcctcattgaagaaatggacgtgcccacggaactttatctagtcatggaattggtgaagggcggtgatttgtttgatgcaataacaagtactaacaagtacaccgagagagatgcaagcggtatgttgtacaatttagcttcggcaattaaatacctgcacagcctgaatatcgtgcacagagatattaaaccagagaaccttctggtgtacgagcatcaggatggctccaaatcactcaagctcggggacttcggccttgccactattgtggatgggcctctatataccgtgtgtggtacccccacttatgtggcgcctgaaatcattgctgagactggctacgggctcaaagtagacatttgggccgctggtgtcatcacctacatactgttgtgtggttttccgcctttcagaggctcaggggatgatcaggaagtcctgtttgatcagattttgatgggtcaagtggactttcccagtccttactgggataatgtttccgattccgctaaggagctgattacaatgatgctgctggttgacgtagatcagcgcttttcagccgtgcaggtccttgaacatccatgggtcaacgacgatggcctgccagagaacgaacaccagctgagcgtcgccggtaagatcaagaagcattttaacactggcccaaagcctaactctacagccgcaggcgtgtccgttatcgcactggaccatgggtttacaatcaagagatccgggtctttggactattaccagcagcctgggatgtactggattcgccctccattactcattcgcagaggcagattttctgatgaagacgcaacccggatgtag

SEQ ID NO: 74808 - DNA, 1266 bp, Artificial Sequence
  derived and/or modified sequence
ctgagcctgatcaagttcaacggcacccccggcagccagctgagcacccccagaagcggcaagagccccagccccagccccaccagccccggcagcctgagaaagcagagaagcagccagcacggcggcagcagcaccagcctggccagcaccaaggtgtgcagcagcatggacgagaacgacggccccggcgaggaggtgagcgaggagggcttccagatccccgccaccatcaccgagagatacaaggtgggcagaaccatcggcgacggcaacttcgccgtggtgaaggagtgcgtggagagaagcaccgccagagagtacgccctgaagatcatcaagaagagcaagtgcagaggcaaggagcacatgatccagaacgaggtgagcatcctgagaagagtgaagcaccccaacatcgtgctgctgatcgaggagatggacgtgcccaccgagctgtacctggtgatggagctggtgaagggcggcgacctgttcgacgccatcaccagcaccaacaagtacaccgagagagacgccagcggcatgctgtacaacctggccagcgccatcaagtacctgcacagcctgaacatcgtgcacagagacatcaagcccgagaacctgctggtgtacgagcaccaggacggcagcaagagcctgaagctgggcgacttcggcctggccaccatcgtggacggccccctgtacaccgtgtgcggcacccccacctacgtggcccccgagatcatcgccgagaccggctacggcctgaaggtggacatctgggccgccggcgtgatcacctacatcctgctgtgcggcttcccccccttcagaggcagcggcgacgaccaggaggtgctgttcgaccagatcctgatgggccaggtggacttccccagcccctactgggacaacgtgagcgacagcgccaaggagctgatcaccatgatgctgctggtggacgtggaccagagattcagcgccgtgcaggtgctggagcacccctgggtgaacgacgacggcctgcccgagaacgagcaccagctgagcgtggccggcaagatcaagaagcacttcaacaccggccccaagcccaacagcaccgccgccggcgtgagcgtgatcgccctggaccacggcttcaccatcaagagaagcggcagcctggactactaccagcagcccggcatgtactggatcagaccccccctgctgatcagaagaggcagattcagcgacgaggacgccaccagaatgtag

SEQ ID NO: 74809 - DNA, 6923 bp, Artificial Sequence
  derived and/or modified sequence
ctttctctgattaaatttaatggaacccctggtagtcagctctctactccgcgctcaggcaagtcgccaagcccatcacccaccagcccaggaagcctgcggaagcagaggagctctcagcatggcggctcctctacgtcacttgcgtccaccaaagtctgcagctcgatggatgagaacgatggccctggagaagaagtgtcggaggaaggcttccagattccagctacaataacagaacgatataaagtcggaagaacaataggagatggaaattttgctgttgtcaaggaatgtgtagaaagatcgactgctagagagtatgctctgaaaattatcaagaaaagcaaatgtcgaggcaaagagcacatgatccagaatgaagtgtctattttaagaagagtgaagcatcccaatatcgttcttctgattgaggagatggatgtgccaactgaactgtatcttgtcatggaattagtaaaggggggagacctttttgatgccattacttccactaacaaatacaccgagagagacgccagtgggatgctgtacaacctagccagcgccatcaaatacctgcatagcctgaacatcgtccaccgtgatatcaagccagagaacctgctggtgtatgagcaccaagatggcagcaaatcactgaagctgggtgactttggactggccaccattgtagacggccccctgtacacagtctgtggcaccccaacatacgtggctccagaaatcattgcagagactggatacggcctcaaggtggacatctgggcagcaggtgtaatcacttatatcctgctgtgtggtttccctccattccgtggaagtggtgatgaccaggaggtgctttttgatcagattttgatggggcaggtggactttccttctccatactgggataatgtttccgattctgcaaaggagctcattaccatgatgctgttggtcgatgtagatcagcgattttctgctgttcaagtacttgagcatccctgggttaatgatgatggcctcccagaaaatgaacatcagctgtcagtagctggaaagataaagaagcatttcaacacaggccccaagccgaatagcacagcagctggagtttctgtcatagcactggaccacgggtttaccatcaagagatcagggtctttggactactaccagcaaccaggaatgtattggataagaccaccgctcttgataaggagaggcaggttttccgacgaagacgcaaccaggatgtgaggagccggtacaaggcgcagccagctcctcccgaactcaactcggaatcggaagactactccccaagctcctccgagactgttcgctcccctaactcgcccttttaataagacccttttactcaaagtcctagcttaaccctttgagactctgagatttttttcccccaaatttgtgtaaaacagtttcatctgatctatctagcgctcaatgcttgaatggcagaactgaaagtgttttcaggtatctttgtagcggtttccctttactgaataagatgacacgtggtgattgtgaagatggtaatttgctgctaatagagtcctcaaagggttaaggccaatttgcaatttttttttaaacttagaagcaatgaatgttttcatcagtcaagctaggatctgcagtatgtaatatagcacttgttaaccctctgagtgcatagaattttattgagaattcttgtttgggaatttttcaggcctttggatgtatacacacatgtttcttgattttactgcagatcaaggggtgttgttagatgctgaaatgtccagaaaagaaggacatttagaatgatatcttgtttgtccttttctgtgggtttagaacgtggcaggtttataacttcgacacacgcacggttctttcttcttcacaatcctattcagaaacagattttttttttcattagagatatgactgtcagttgcagtgagttctgcatcccaagtggagggaattgggtttgtggcaaagagcttgacccaggaaatagatggtgccccccaaattgtctccacatgaagatgtactgatgacgccccagaaatgctgcttccatatcagctgctgctagcgccagcgcagactctcagggagtcaccacagcttgtcttgtgcttggtgagtgagggtctctctactcagtgtcagacatctacaggaaagaaacaactggtggaaaagagcaataaattgcccggtgctctgcagggctggaatttcaaacagaaagagggaataagatcctgtgatttttctcacctgcttttccacgcactgtggtcatcactgtgcaatctacatctagtatgaaatccacacataggagagctggggcacaaggggactggaggcagttgctttgcaagatggctgaggagaaagcacactgggaacacaatccagaatgttctaacaataagttttcagtgaataaaccactggcaagacaattccatgtgcacctttaggttacctatatagtctcctaggaagatcaggatgaaagacctagatgatacccctgaggataaaacctccatcccctaaaatgattttttttaaataccactgtctttagctgtccaggaggtcagagtgttttttctgtctttgggccaagtcctgtctgagacctgtattttcactcttgttaccaaatctatctccctagtgcagtgtctccaggcctgagtttcttctggaacagattccattttagaatggggattcacaggttctgtgcatcaccacagtgctcagagaggattctcctggggtgtcttagaggcaggtgcccaactcaaatgtattcccaaggtttgctgggctctgggatccacgagacaaccagagagggatatctcatgaaatttgcatctggtggctgaacagtacctatgttctctgttttgaatatactttaatacctgagagtcttaaaatttgtgaacaacgtttctatagtcctttattttcaaatgcacattgatcttcacttgctgcatttttactcttcaaccctgaaactatggtctacattaatatggatttttaaatcacatgtcattacttttgcaacaccatcaccaaaattttttgctcttttacatttaggttcatctctgtggtctgtgttgtcctgacatgtaaaaagcatatcgtttattgaggtttttttcccccccttttagagcatccggaagtgataacacgcaaaatcacaaagtagcataaatcagtaaattagttgagttgtttttgggggggaggtgggggtagggggcacagaacaccagaaagagtgttggtgtgtaggtagattccatattaatgaggaacactgaactagttggaaattactgctttctctagaaatataaagcaaagcactattccaaggctatggagtagctctacagcctggcctcaactctaaaagtgtgaagaatgcaatgggcagagacctacctgcagtggactgtcattttcctttctttctctgaattactgctttttctgtgggcattaactatattgctacagcatctagtgtactgagcctgcggtgcatggctcaggccttttcccatcgacgtctagggggactctggaccgtgtgaagctagggggtgtttctcagcacactgcagaagggcagctcagaagaatgcagggcccattcagcatggggatcccagcacatcactgtagaatttgagtgatctatgctgaataaacagtggaatgtgaccagtcaagtagaaatcttgagtaatcagatggaatgcaatctttctaacattaagctaccaagatcctgaatgtcagagatgtactcagagggttaacagacaagcacaaggcatgctgactacattggtgtatccagattgctttgcttttagccagtgctttctaatttttttctcgacattcttgggatagttcaagtttgaaataattaagtggtggtgttctttaaggaatttctataaccaaattgatcttatttttgatttcacttatcatagaacaaatatgtatcattatggcagtgtatctatgtaattatcaatttaatcatcaccaccggtgtttccatattttttcccaagtatttaatatagctctcttatggtggtggcctggtgatggggaccgtctttcttttactgacacatgaccaatcatatggtattttcaagggaattttaagattcatcttttcagtttgatagtagactagttaaggaagaactctttcattacttgcatcgtgtaaatcatctctgtagacatgtgttcatattaatgaacacattttttctcaacattgtagcagaaatcattttattcgtcatgatcaatgaatatgtgatttgctccagatcgttagaaggaaaagtaagatttcagtcatcaaaaatgtttttaccgtagccctcatctaacttacacgtggtgcatattaaaataagcagagaaaaaaaaatgtgaataaactactgaaaacacttggtgttttgtgttcaatgagaccttcctgcaacctgctccccatgggtggcagttaacaggcccatcagatattgttgaaagaaagcaatatatccatgaatgaaggctaaaattgcaatcctttaccctttgaggcatatttcagttgaaaacaaaaagaaaagaaaatttggcttagagggtcacagagctcccatatgaccaagtctcaagcacattaaatcatggttgtttactggccaagggcgtccactagacaactctatcccttgcgctgaagctcaatcgtgctgagggagagctttcttaatattactgtgttgctcttagcccttctctgggttaggatctgtcagcatttctatgataaactcctattctcaaaggtttttaatttgaccataaaaatgtgccccaggctgaagtttgctatacagggctgtaccaaagagtgaaggtttacttccttctctttccaacttcttccccattctccaaggaaaagaacaacaaaaaaatctggtatggtccctccttaatagtgatttcagaattttggaaagcaccaagatccaagatggtagttttaatgtagttactcattcgcacacattttttaaatttaatgggtcacctggcatatattgtagataacatatcttttctataatttgtaagtcaataatttttttaactgctacatgatatttttttttgcccaaagattttaaaagacttgaagttggtcagttcaaaactcagatttttctacacattgtctgccatgtccattaggagtttggggaaaatactctcacacagacccttactttgcatgcagtttagagggtaagatacgtgcttcttttggggataaagatttccttacttaattgtcaaatttcatggagccattctagtctgttggggaaaatagtgattaaaagcacttccaaaattaacattttttgacaattcagatatgaaaagaagcaggggaaaataatacactttactcttttcttgcttaaaggcaaacaaatcaatgaaacttgaggacacactaaacatttgataactgcaaatgtgctttaaaaattggttcaatggtgcttacacatgaaacggtaacaaatggggttcctaggacgtcagaaggaatctttagtttgtatgtaattacacactagaggaggaggtgcttttaagccagtcttttatttttaatcatctcaaatatgcaaccatacatgcagtaacattaagggtcgtaaactggtgggaaacaggaacttcagtggagaggcttaaatgcctctggttagagtgggggtttttgtttgtttgtttattgttgggtttcaacactgagcatcatttctgtgatcaagtttctaactggcatgtgttttgatcatgaggtttaccatatcttgcccatacagacaaatgagagatctagtttcattttgttccctaaagaaagaacactctctaaaattaaatcatacctgtaaatttcttcagcatttgtttctgttcaatgaaattgagacccttaatgttgctttaatgtaaaattgaatattttgtctgtgatatactttaataatttaaagtaagtaatagttctaaagtcttcactgttgctactaagagaaaatagaattttaaaggtgatgataaagatgctataatgtcagttcactccagtccaatcaaatgtagtaagaaaaagtccttgaatagttctctagggacaatttctcacttgccattgacattaatctttggtgtattctcagaaaaaataaaaagaaattgaaactggtccaaggttatagtcatatcctcgataacttttgaaaaaaaattttattaggaaattaatactagcctttttcattctggctgaaagaaaattattaaaggattagttgagtgtgaaattcaacagtattttgctcatacatactaaaaaggtgcgtagggacttggcgcatttaaacaagtttctgaaaggtttcaatttgactcaagaaaaaaattcaatatttcttttgaaaatactgaatttatcacttgctgcatggatcagatggcataggttaatctttgattttcagaatcctaatgaaataactttcaaacaatttgtgtccttaattaaaggtggaatgagatccaatttttccccctaatccttcagtttaagctgatacatgtaggttaatgtggaatgaaatcatctgtgatatattatgttcatttatcaactgagcttttttgatgttgcctgtttttatgtaaaacatgttcttaaagttaataaaataatagtacttggtgta

SEQ ID NO: 74810 - protein, 433 aa, Artificial Sequence
  derived and/or modified sequence
MLELIEVNGTPGSQLSTPRSGKSPSPSPTSPGSLRKQRSSQHGGSSTSLASTKVCSSMDENDGPGEEVSEEGFQIPATITERYKVGRTIGDGNFAVVKECVERSTAREYALKIIKKSKCRGKEHMIQNEVSILRRVKHPNIVLLIEEMDVPTELYLVMELVKGGDLFDAITSTNKYTERDASGMLYNLASAIKYLHSLNIVHRDIKPENLLVYEHQDGSKSLKLGDFGLATIVDGPLYTVCGTPTYVAPEIIAETGYGLKVDIWAAGVITYILLCGFPPFRGSGDDQEVLFDQILMGQVDFPSPYWDNVSDSAKELITMMLLVDVDQRFSAVQVLEHPWVNDDGLPENEHQLSVAGKIKKHFNTGPKPNSTAAGVSVIATTALDKERQVFRRRRNQDVRSRYKAQPAPPELNSESEDYSPSSSETVRSPNSPF

SEQ ID NO: 74811 - DNA, 1302 bp, Artificial Sequence
  derived and/or modified sequence
atgctcgaactcatcgaagttaatggcacaccagggtcccagcttagtacacctcgctcggggaaatccccttcaccctcaccaacaagccctggcagccttcggaagcagcgctcctcacagcatggcggctcaagcacatccctggcttcgacaaaggtctgctcttccatggatgagaatgacggtccgggcgaagaggttagtgaggaaggtttccagatccccgcaacaattacagagcgctacaaagtagggaggactattggcgatggcaattttgctgtggtcaaagaatgcgtggaaaggagcacagctcgggaatacgcattgaaaataataaagaagtcgaagtgtcgtggaaaagagcacatgattcaaaatgaggtgagcattctgaggcgtgtaaagcatccaaatatcgtactgctcatagaggaaatggatgtgcccacggagctgtacctggtcatggagctagttaagggaggtgatttgtttgacgccatcacttctacaaacaaatataccgagcgcgacgccagcggcatgctgtataacctggcaagcgccattaaatatctacacagcttgaacatcgttcatagggacatcaagccagagaaccttcttgtgtatgagcaccaagatgggtccaagtctttgaagttgggtgattttggcttagctacaatcgttgatgggcccctgtataccgtatgcggcacccccacatatgtggcaccagagattatcgccgagaccggatacggattgaaggtggacatttgggccgccggagttatcacgtatatcctgctttgcggattcccaccatttagaggatccggagatgatcaagaagtgctcttcgaccagatcttgatggggcaagtggactttccttcaccttactgggacaatgtctcggactctgcaaaggagctgattaccatgatgctgctggtggacgtggatcagaggttcagtgcggtgcaggtcttggagcacccttgggtcaatgatgacggtttgcctgaaaacgaacaccagctgtcggtagccggcaaaatcaagaaacattttaacactggacctaaacctaatagcactgctgcaggggtgtccgtgattgccactaccgccctggacaaggagcgccaagtattccgaaggcgacggaaccaggacgtgagatctaggtacaaagcacagcccgcccccccagagctgaacagtgagtcagaggattattccccctcgtcctcagagaccgtccggagtcctaactcaccattctag

SEQ ID NO: 74812 - DNA, 1302 bp, Artificial Sequence
  derived and/or modified sequence
atgctggagctgattgaggtgaatggcaccccaggcagccagctgagcacccccaggtctgggaagagccccagccccagccccaccagccctggcagcctgaggaagcagaggagcagccagcacggcggcagcagcaccagcctggccagcaccaaggtgtgcagctccatggatgaaaatgatggccctggagaggaggtgtctgaggagggcttccagatcccagccaccatcacagagcgctacaaggtgggccgcaccatcggagatggcaactttgctgtggtgaaggaatgtgtggagaggagcacagcccgggagtatgccctgaagatcatcaagaagagcaagtgccggggcaaggagcacatgatccagaatgaggtgtccatcctgcggcgggtgaagcaccccaacatcgtgctgctgattgaggagatggatgtgcccacagagctgtacctggtgatggagctggtgaagggcggggacctgtttgatgccatcaccagcaccaacaagtacacagaaagagatgccagcggcatgctgtacaacctggccagcgccatcaagtacctgcacagcctgaacatcgtgcaccgggacatcaagccagagaacctgctggtgtatgagcaccaggacggcagcaagagcctgaagctgggggactttggcctggccaccatcgtggatggccccctgtacacagtgtgtggcacccccacctacgtggcccctgagatcatcgccgagaccggctacggcctgaaggtggacatctgggccgccggggtcatcacctacatcctgctgtgtggcttcccccccttccggggcagcggagatgaccaggaggtgctgtttgaccagatcctgatgggccaggtggacttccccagcccctactgggacaacgtgtctgacagcgccaaggagctgatcaccatgatgctgctggtggatgtggaccagcgcttctctgctgtgcaggtgctggagcacccctgggtgaatgatgatggcctgcctgaaaatgagcaccagctgtctgtggccggcaagatcaagaagcacttcaacacaggccccaagcccaacagcacagctgctggggtgtctgtcatcgccaccacagccctggacaaggagcggcaggtgttcagaagaagaagaaaccaggatgtgcgcagccgctacaaggcccagcctgcccctcctgagctgaacagcgagagcgaggactacagccccagcagcagcgagaccgtgcgcagccccaacagccccttctag

SEQ ID NO: 74813 - DNA, 1302 bp, Artificial Sequence
  derived and/or modified sequence
atgctggagctgatcgaggtgaacggcacccccggcagccagctgagtactcctagatctgggaagtcgccaagtccctcccctacctctcccggttccctgcggaaacagcggagctctcagcatggcggttcttccacatctctggcctccactaaggtctgttctagtatggacgaaaacgatgggcccggagaagaggtgtccgaagaaggttttcaaataccggccacaattacagagcgttacaaggtggggaggacaattggtgatggaaattttgccgttgtcaaggagtgtgtggaacgatccacagcccgggagtacgccctcaaaatcattaaaaaaagcaagtgtcgggggaaagagcatatgatacaaaacgaggtttcaattttgaggcgggttaagcaccccaacattgtcctgctcattgaggaaatggatgttccaacagaactttatctggtgatggagcttgtgaagggcggggatttgttcgacgccatcacgagcaccaataaatacactgagcgggatgctagcggtatgctgtataacttggcatccgccattaaatacctgcacagccttaatatagtccatcgtgacattaagcccgaaaaccttctcgtgtacgaacaccaagacgggagtaaatcattgaaactgggcgactttggcctggccactatcgtggatggcccactgtacactgtctgcggaactcccacctacgtcgcccctgagataatcgccgagaccggctatggcctgaaagtcgatatttgggcagccggtgtaattacatatatcctgctttgcggcttcccaccgtttagaggatctggagacgatcaagaggtgctgttcgaccagatattgatgggccaggtggacttccccagcccctattgggacaacgtgagtgactcagcaaaggaacttatcactatgatgctacttgtcgacgtggatcagcggttttccgcagttcaggttctcgagcatccatgggttaacgatgacggactccccgaaaatgagcatcaacttagtgtcgctggcaagattaaaaaacactttaatactggtcccaagcctaattctacggcagcgggtgtgagtgttatcgccaccactgccctggataaagagagacaagtttttaggagaaggcgaaatcaggatgtgcgaagcagatacaaggcacagccagcacccccagagttgaattccgaaagtgaggattattcaccatcttcctctgagactgtgcgctcacctaattcacccttctag

SEQ ID NO: 74814 - DNA, 1302 bp, Artificial Sequence
  derived and/or modified sequence
atgcttgagctgatcgaggtgaacggtaccccaggatctcaactttctacaccccgatccggcaagtcacctagcccctcgcctactagccccggatccttgagaaagcagaggagcagccagcacggtgggtctagcacgtcactcgcatccaccaaagtgtgctctagcatggatgaaaatgatggccctggtgaggaagtgtctgaggaggggttccagatccccgcaaccattaccgagcggtacaaagtcgggcgaaccattggcgatggtaacttcgccgttgtcaaagagtgcgtagagcggagtactgccagagaatatgcccttaagatcatcaagaagtctaagtgtcggggtaaggagcatatgatacagaacgaggtgagcattctcagaagagtgaagcaccctaatatcgttctgctcattgaggagatggacgttccgactgaactgtacttagtgatggagttagtcaaggggggtgatctgttcgatgcaattaccagcaccaacaagtatactgagcgtgatgcaagcggcatgctgtacaacctggccagcgccattaagtacctgcatagcctcaacatagtccatcgggacatcaagccagagaacctgctggtatacgagcatcaggacgggtctaaaagccttaagctcggtgacttcggccttgccactatagtggatggacctctgtacaccgtgtgtggaacgccaacctatgtggcccctgagatcattgctgaaaccggatacgggttaaaagtggatatatgggccgcaggcgtaataacttatatcttgctgtgtggcttcccgcctttccgcggttctggcgacgatcaggaagtgctcttcgatcagattcttatgggccaggtcgacttcccaagcccgtactgggataacgtcagcgactcggccaaagagctgataaccatgatgctgctggtggatgtggaccaaaggttttctgcagtccaggttttggaacatccctgggtgaatgacgacgggttgcccgagaatgagcaccagctgtcagttgctggcaaaataaaaaagcacttcaacacaggtcctaaacctaattctactgcagctggggtgtctgtgatcgcaacaaccgcattagataaggagcgccaagtcttccgccgtagaagaaatcaagatgtgcgatcccggtacaaggcgcagcccgcaccacccgagcttaactctgagtccgaggactactctccttccagcagcgaaaccgtgcgtagccccaattccccgttttag

SEQ ID NO: 74815 - DNA, 1302 bp, Artificial Sequence
  derived and/or modified sequence
atgctggagctgatcgaggtgaacggcacccccggcagccagctgagcacccccagaagcggcaagagccccagccccagccccaccagccccggcagcctgagaaagcagagaagcagccagcacggcggcagcagcaccagcctggccagcaccaaggtgtgcagcagcatggacgagaacgacggccccggcgaggaggtgagcgaggagggcttccagatccccgccaccatcaccgagagatacaaggtgggcagaaccatcggcgacggcaacttcgccgtggtgaaggagtgcgtggagagaagcaccgccagagagtacgccctgaagatcatcaagaagagcaagtgcagaggcaaggagcacatgatccagaacgaggtgagcatcctgagaagagtgaagcaccccaacatcgtgctgctgatcgaggagatggacgtgcccaccgagctgtacctggtgatggagctggtgaagggcggcgacctgttcgacgccatcaccagcaccaacaagtacaccgagagagacgccagcggcatgctgtacaacctggccagcgccatcaagtacctgcacagcctgaacatcgtgcacagagacatcaagcccgagaacctgctggtgtacgagcaccaggacggcagcaagagcctgaagctgggcgacttcggcctggccaccatcgtggacggccccctgtacaccgtgtgcggcacccccacctacgtggcccccgagatcatcgccgagaccggctacggcctgaaggtggacatctgggccgccggcgtgatcacctacatcctgctgtgcggcttcccccccttcagaggcagcggcgacgaccaggaggtgctgttcgaccagatcctgatgggccaggtggacttccccagcccctactgggacaacgtgagcgacagcgccaaggagctgatcaccatgatgctgctggtggacgtggaccagagattcagcgccgtgcaggtgctggagcacccctgggtgaacgacgacggcctgcccgagaacgagcaccagctgagcgtggccggcaagatcaagaagcacttcaacaccggccccaagcccaacagcaccgccgccggcgtgagcgtgatcgccaccaccgccctggacaaggagagacaggtgttcagaagaagaagaaaccaggacgtgagaagcagatacaaggcccagcccgccccccccgagctgaacagcgagagcgaggactacagccccagcagcagcgagaccgtgagaagccccaacagccccttctag

SEQ ID NO: 74816 - DNA, 4610 bp, Artificial Sequence
  derived and/or modified sequence
agccttagccatccttaaactcatccaaccgattcccatttccgcgggtgcttggcttagtgctgagacgggattccgccgttggtattcaggtccaacactaagactgtgtccatgttagaactcatagaagttaatggaacccctggtagtcagctctctactccgcgctcaggcaagtcgccaagcccatcacccaccagcccaggaagcctgcggaagcagaggagctctcagcatggcggctcctctacgtcacttgcgtccaccaaagtctgcagctcgatggatgagaacgatggccctggagaagaagtgtcggaggaaggcttccagattccagctacaataacagaacgatataaagtcggaagaacaataggagatggaaattttgctgttgtcaaggaatgtgtagaaagatcgactgctagagagtatgctctgaaaattatcaagaaaagcaaatgtcgaggcaaagagcacatgatccagaatgaagtgtctattttaagaagagtgaagcatcccaatatcgttcttctgattgaggagatggatgtgccaactgaactgtatcttgtcatggaattagtaaaggggggagacctttttgatgccattacttccactaacaaatacaccgagagagacgccagtgggatgctgtacaacctagccagcgccatcaaatacctgcatagcctgaacatcgtccaccgtgatatcaagccagagaacctgctggtgtatgagcaccaagatggcagcaaatcactgaagctgggtgactttggactggccaccattgtagacggccccctgtacacagtctgtggcaccccaacatacgtggctccagaaatcattgcagagactggatacggcctcaaggtggacatctgggcagcaggtgtaatcacttatatcctgctgtgtggtttccctccattccgtggaagtggtgatgaccaggaggtgctttttgatcagattttgatggggcaggtggactttccttctccatactgggataatgtttccgattctgcaaaggagctcattaccatgatgctgttggtcgatgtagatcagcgattttctgctgttcaagtacttgagcatccctgggttaatgatgatggcctcccagaaaatgaacatcagctgtcagtagctggaaagataaagaagcatttcaacacaggccccaagccgaatagcacagcagctggagtttctgtcatagcaaccaccgctcttgataaggagaggcaggttttccgacgaagacgcaaccaggatgtgaggagccggtacaaggcgcagccagctcctcccgaactcaactcggaatcggaagactactccccaagctcctccgagactgttcgctcccctaactcgcccttttaataagacccttttactcaaagtcctagcttaaccctttgagactctgagatttttttcccccaaatttgtgtaaaacagtttcatctgatctatctagcgctcaatgcttgaatggcagaactgaaagtgttttcaggtatctttgtagcggtttccctttactgaataagatgacacgtggtgattgtgaagatggtaatttgctgctaatagagtcctcaaagggttaaggccaatttgcaatttttttttaaacttagaagcaatgaatgttttcatcagtcaagctaggatctgcagtatgtaatatagcacttgttaaccctctgagtgcatagaattttattgagaattcttgtttgggaatttttcaggcctttggatgtatacacacatgtttcttgattttactgcagatcaaggggtgttgttagatgctgaaatgtccagaaaagaaggacatttagaatgatatcttgtttgtccttttctgtgggtttagaacgtggcaggtttataacttcgacacacgcacggttctttcttcttcacaatcctattcagaaacagattttttttttcattagagatatgactgtcagttgcagtgagttctgcatcccaagtggagggaattgggtttgtggcaaagagcttgacccaggaaatagatggtgccccccaaattgtctccacatgaagatgtactgatgacgccccagaaatgctgcttccatatcagctgctgctagcgccagcgcagactctcagggagtcaccacagcttgtcttgtgcttggtgagtgagggtctctctactcagtgtcagacatctacaggaaagaaacaactggtggaaaagagcaataaattgcccggtgctctgcagggctggaatttcaaacagaaagagggaataagatcctgtgatttttctcacctgcttttccacgcactgtggtcatcactgtgcaatctacatctagtatgaaatccacacataggagagctggggcacaaggggactggaggcagttgctttgcaagatggctgaggagaaagcacactgggaacacaatccagaatgttctaacaataagttttcagtgaataaaccactggcaagacaattccatgtgcacctttaggttacctatatagtctcctaggaagatcaggatgaaagacctagatgatacccctgaggataaaacctccatcccctaaaatgattttttttaaataccactgtctttagctgtccaggaggtcagagtgttttttctgtctttgggccaagtcctgtctgagacctgtattttcactcttgttaccaaatctatctccctagtgcagtgtctccaggcctgagtttcttctggaacagattccattttagaatggggattcacaggttctgtgcatcaccacagtgctcagagaggattctcctggggtgtcttagaggcaggtgcccaactcaaatgtattcccaaggtttgctgggctctgggatccacgagacaaccagagagggatatctcatgaaatttgcatctggtggctgaacagtacctatgttctctgttttgaatatactttaatacctgagagtcttaaaatttgtgaacaacgtttctatagtcctttattttcaaatgcacattgatcttcacttgctgcatttttactcttcaaccctgaaactatggtctacattaatatggatttttaaatcacatgtcattacttttgcaacaccatcaccaaaattttttgctcttttacatttaggttcatctctgtggtctgtgttgtcctgacatgtaaaaagcatatcgtttattgaggtttttttcccccccttttagagcatccggaagtgataacacgcaaaatcacaaagtagcataaatcagtaaattagttgagttgtttttgggggggaggtgggggtagggggcacagaacaccagaaagagtgttggtgtgtaggtagattccatattaatgaggaacactgaactagttggaaattactgctttctctagaaatataaagcaaagcactattccaaggctatggagtagctctacagcctggcctcaactctaaaagtgtgaagaatgcaatgggcagagacctacctgcagtggactgtcattttcctttctttctctgaattactgctttttctgtgggcattaactatattgctacagcatctagtgtactgagcctgcggtgcatggctcaggccttttcccatcgacgtctagggggactctggaccgtgtgaagctagggggtgtttctcagcacactgcagaagggcagctcagaagaatgcagggcccattcagcatggggatcccagcacatcactgtagaatttgagtgatctatgctgaataaacagtggaatgtgaccagtcaagtagaaatcttgagtaatcagatggaatgcaatctttctaacattaagctaccaagatcctgaatgtcagagatgtactcagagggttaacagacaagcacaaggcatgctgactacattggtgtatccagattgctttgcttttagccagtgctttctaatttttttctcgacattcttgggatagttcaagtttgaaataattaagtggtggtgttctttaaggaatttctataaccaaattgatcttatttttgatttcacttatcatagaacaaatatgtatcattatggcagtgtatctatgtaattatcaatttaatcatcaccaccggtgtttccatattttttcccaagtatttaatatagctctcttatggtggtggcctggtgatggggaccgtctttcttttactgacacatgaccaatcatatggtattttcaagggaattttaagattcatcttttcagtttgatagtagactagttaaggaagaactctttcattacttgcatcgtgtaaatcatctctgtagacatgtgttcatattaatgaacacattttttctcaacattgtagcagaaatcattttattcgtcatgatcaatgaatatgtgatttgctccagatcgttagaaggaaaagtaagatttcagtcatcaaaaatgtttttaccgtagccctcatctaacttacacgtggtgcatattaaaataagcagagaaaaaaaaatgtgaataaactactgaaaac

SEQ ID NO: 74817 - protein, 514 aa, Artificial Sequence
  derived and/or modified sequence
MVHSPTCPHPCFLLVPASEPQFPHLQTPDPGDAVWNVRWALCTRRSSGAPAPGSGATIFALSSGQGRCGIAVIRTSGPASGHALRILTAPRDLPLARHASLRLLSDPRSGEPLDRALVLWFPGPQSFTGEDCVEFHVHGGPAVVSGVLQALGSVPGLRPAEAGEFTRRAFANGKLNLTEVEGLADLIHAETEAQRRQALRQLDGELGHLCRGWAETLTKALAHVEAYIDFGEDDNLEEGVLEQADIEVRALQVALGAHLRDARRGQRLRSGVHVVVTGPPNAGKSSLVNLLSRKPVSIVSPEPGTTRDVLETPVDLAGFPVLLSDTAGLREGVGPVEQEGVRRARERLEQADLILAMLDASDLASPSSCNFLATVVASVGAQSPSDSSQRLLLVLNKSDLLSPEGPGPGPDLPPHLLLSCLTGEGLDGLLEALRKELAAVCGDPSTDPPLLTRARHQHHLQGCLDALGHYKQSKDLALAAEALRVARGHLTRLTGGGGTEEILDIIFQDFCVGK

SEQ ID NO: 74818 - DNA, 1545 bp, Artificial Sequence
  derived and/or modified sequence
atggtgcacagccccacctgcccccacccctgcttcctgctggtgcccgccagcgagccccagttcccccacctgcagacccccgaccccggcgacgccgtgtggaacgtgagatgggccctgtgcaccagaagaagcagcggcgcccccgcccccggcagcggcgccaccatcttcgccctgagcagcggccagggcagatgcggcatcgccgtgatcagaaccagcggccccgccagcggccacgccctgagaatcctgaccgcccccagagacctgcccctggccagacacgccagcctgagactgctgagcgaccccagaagcggcgagcccctggacagagccctggtgctgtggttccccggcccccagagcttcaccggcgaggactgcgtggagttccacgtgcacggcggccccgccgtggtgagcggcgtgctgcaggccctgggcagcgtgcccggcctgagacccgccgaggccggcgagttcaccagaagagccttcgccaacggcaagctgaacctgaccgaggtggagggcctggccgacctgatccacgccgagaccgaggcccagagaagacaggccctgagacagctggacggcgagctgggccacctgtgcagaggctgggccgagaccctgaccaaggccctggcccacgtggaggcctacatcgacttcggcgaggacgacaacctggaggagggcgtgctggagcaggccgacatcgaggtgagagccctgcaggtggccctgggcgcccacctgagagacgccagaagaggccagagactgagaagcggcgtgcacgtggtggtgaccggcccccccaacgccggcaagagcagcctggtgaacctgctgagcagaaagcccgtgagcatcgtgagccccgagcccggcaccaccagagacgtgctggagacccccgtggacctggccggcttccccgtgctgctgagcgacaccgccggcctgagagagggcgtgggccccgtggagcaggagggcgtgagaagagccagagagagactggagcaggccgacctgatcctggccatgctggacgccagcgacctggccagccccagcagctgcaacttcctggccaccgtggtggccagcgtgggcgcccagagccccagcgacagcagccagagactgctgctggtgctgaacaagagcgacctgctgagccccgagggccccggccccggccccgacctgcccccccacctgctgctgagctgcctgaccggcgagggcctggacggcctgctggaggccctgagaaaggagctggccgccgtgtgcggcgaccccagcaccgacccccccctgctgaccagagccagacaccagcaccacctgcagggctgcctggacgccctgggccactacaagcagagcaaggacctggccctggccgccgaggccctgagagtggccagaggccacctgaccagactgaccggcggcggcggcaccgaggagatcctggacatcatcttccaggacttctgcgtgggcaagtag

SEQ ID NO: 74819 - DNA, 1545 bp, Artificial Sequence
  derived and/or modified sequence
atggtccactcacctacctgtccccacccatgcttcctccttgttcccgctagcgagccacaatttccccatctgcagactcctgatcccggtgacgcagtgtggaatgtacgctgggccctgtgcacccggaggagctcaggggctcccgctcctggatccggtgctaccatatttgcactgagctccggtcagggcagatgtggcatcgctgtgatacggacttccggtccagccagcggacatgcccttagaatccttactgccccccgggatctcccgctggcaagacacgcctcactccgcctgctttcagaccccaggtctggggaacctctggacagggcacttgtgctctggtttcccggtcctcagagtttcaccggagaggattgcgtggagtttcacgtgcatggaggccccgctgtggtctcaggcgttctgcaagcccttggttccgtacccggactgcgccccgccgaggcaggcgaattcaccagacgagcctttgctaacgggaagcttaatctcacagaagtagaaggacttgcggatttaattcacgccgagacagaggctcaaaggaggcaagcccttaggcaacttgacggagagctggggcacctatgtcgcggctgggcagaaacactgaccaaggcattggcgcatgtggaggcctatatcgatttcggcgaagacgacaatctcgaagagggggtgctcgagcaagctgacatcgaggtaagagccctccaggtggcactgggggctcatctgagagatgccagacgcggtcagcgactccggtcaggtgttcacgtagtcgtaactggtcccccaaatgctggtaaaagttctctcgtgaatctcctgagccgaaagcctgtctctattgtgagtccagaacctggcacaactcgggatgttcttgagacccccgtggatctcgcagggttccccgtgcttttaagcgacaccgcgggactgagggagggtgtgggtcccgtcgaacaagagggagtccgcagagctcgggaaagacttgaacaagctgatctgatattagccatgcttgatgcttcagacctggcatctccctcgagttgcaacttcttggctactgtcgtggcctcggtgggagcccagtctcctagcgactcctcccaacgcttgctgctggtgttgaataaatcagacctgctttcacccgaagggcccggccctgggcccgatctgcccccccaccttcttcttagttgcctgacaggggaaggcctcgacgggctgctggaggccttgcgcaaagagttggccgccgtctgcggagacccaagcacagaccccccactcctcacccgggctcggcatcaacaccatctccagggttgccttgacgctctgggacattataagcagagtaaggacctcgcccttgcagctgaggccctgcgcgtggcccgaggtcatctgactcgcctgacaggaggtgggggcaccgaggaaatattagacatcatctttcaggacttctgcgtaggaaaatag

SEQ ID NO: 74820 - DNA, 1814 bp, Artificial Sequence
  derived and/or modified sequence
actgatggtgcattctccaacttgtccccacccatgctttcttctggtccccgcctcggagcctcagtttccccatctgcaaactccggaccctggagacgctgtttggaatgtgagatgggcattgtgcacgcgccggagcagcggcgcaccagcccccggctccggcgccaccatcttcgcgctaagctctggccaaggccgctgcggcatcgcagtgatccggaccagcggccccgccagcggccacgccctccgaattctcacagcaccccgagacctgccccttgctcgccacgccagcctgcgcctgctcagcgatccccgctccggggagcctctggaccgcgcactggtgctctggttcccaggtccccagagtttcaccggtgaggactgcgtggagttccacgtgcatggaggcccggcagtggtgagcggcgtcctgcaggccttgggcagcgtgccagggcttcgaccggcggaggcaggcgagttcaccagacgggcgttcgccaatgggaagctgaacctgaccgaagtggaggggctggcggaccttatccacgcggaaacagaggcgcagcggcggcaggccctcaggcagctggacggagagctgggccacctctgccgtggctgggccgagaccctcaccaaagctctggcccacgtggaggcctatatcgatttcggcgaggatgacaacctggaggagggggtcctggagcaagccgacatcgaagtacgggcactgcaggtggccctgggtgcacatctacgagatgccaggcgcgggcagaggctccgctcaggggtgcacgtagtggtcactggaccccccaatgcgggcaagagcagcctagtgaacctgctcagtcggaagcctgtgtccatcgtgtccccggagccagggaccacccgtgacgtgctggagaccccagtcgacctggccggatttcctgtgctgctgagcgacacggctgggttgcgggagggcgtggggcccgtggagcaggagggcgtgcggcgcgcccgggagaggctagagcaggctgacctcattctggccatgctggatgcttctgacctggcctctccctccagttgcaacttcctggccaccgtcgtagcctctgtgggagcccagagccccagtgacagcagccagcgcctcctcctggtgctgaacaagtcggacctgctgtccccggagggcccaggtcccggtcctgacctgcccccgcacctgctgctgtcctgtctgacgggagaggggctggacggcctcctggaggcgctgaggaaggagctagctgcagtgtgtggggacccgtccacagatcccccgctgctgacccgagcaaggcaccagcaccacctccagggttgcctggatgccctcggccactacaagcagtcaaaagacctggccctggcggcagaggcgctgcgggtggcccggggtcacctgacccggctcacaggtggagggggtaccgaggagatcctggacatcatcttccaggacttctgtgtgggcaagtgacgggatccagggaagtcgcacccaagctgcgtggagacccaggagcctcgggggatctggaaacagtttaggccaattgggattctcattcgcctgggaaagaacttgattctcaaatagtgaagcaacacagctgagaggtagtgagatccctgcagggactccctggagattcaggccctggaatggggctgaatggaggtcccgttcgacccttgatgctggggcatccgggttgggatggagataggaggatctcagtata

SEQ ID NO: 74821 - DNA, 1545 bp, Artificial Sequence
  derived and/or modified sequence
atggtgcacagccccacctgcccccacccctgcttcctgctggtgcctgccagcgagccccagttcccccacctgcagaccccagaccctggagatgctgtgtggaatgtgcgctgggccctgtgcacccggcgcagcagcggggccccagcccctggcagcggggccaccatctttgccctgagcagcggccagggccgctgtggcattgctgtgatccgcaccagcggccctgccagcggccacgccctgcgcatcctgacagccccccgggacctgcccctggcccggcatgccagcctgcggctgctgagtgaccccaggtctggagagcccctggaccgggccctggtgctgtggttccctggcccccagagcttcaccggggaggactgtgtggagttccacgtgcacggcggccctgctgtggtgtctggagtgctgcaggccctgggctctgtgcccggcctgcggcctgctgaggccggggagttcacccggcgggcctttgccaacgggaagctgaacctgacagaggtggagggcctggccgacctgattcatgctgagacagaggcccagaggcggcaggccctgcggcagctggatggagagctgggccacctgtgccggggctgggccgagaccctgaccaaggccctggcccacgtggaggcctacatcgactttggagaagatgacaacctggaggagggcgtgctggagcaggccgacatcgaggtgcgggccctgcaggtggccctgggcgcccacctgagagatgcccggcggggccagaggctgcggtctggagtgcacgtggtggtgactggacctccaaatgctgggaagagcagcctggtgaacctgctgagcaggaagcctgtgtccatcgtgtccccagagcccggcaccaccagagatgtgctggagacccctgtggacctggccggcttccctgtgctgctgagtgacacagctggcctgcgggagggcgtgggccctgtggagcaggagggcgtgcggcgggcccgggagcggctggagcaggccgacctgatcctggccatgctggatgccagtgacctggccagccccagcagctgcaacttcctggccaccgtggtggcctctgtgggcgcccagagccccagcgacagcagccagaggctgctgctggtgctgaacaagagtgacctgctgagccctgagggccctggccctggccctgacctgcccccccacctgctgctgagctgcctgaccggggagggcctggatggcctgctggaggccctgaggaaggagctggccgctgtgtgtggggaccccagcacagacccccccctgctgacccgggcccggcaccagcaccacctgcagggctgcctggatgccctgggccactacaagcagagcaaggacctggccctggccgctgaggccctgcgggtggcccggggccacctgacccggctgaccggcggcggcggcacagaggagatcctggacatcatcttccaggacttctgtgtgggcaagtag

SEQ ID NO: 74822 - DNA, 1545 bp, Artificial Sequence
  derived and/or modified sequence
atggtgcacagccccacctgcccccacccctgcttcctgctggtgcccgcaagcgagccgcagttcccccacctccagaccccagaccccggcgatgccgtctggaatgtccggtgggctctttgcacccggagatctagtggggccccggccccaggttccggggcaaccattttcgcactgtcttctggccaggggagatgcgggattgccgttatcaggacgtccgggcctgcatctggccatgcccttagaatcttgaccgcaccgcgggacctccctctggccagacacgctagcttgcggctactgtcagaccctagatccggcgaaccccttgatcgcgctctcgtattgtggttcccgggaccacagtctttcactggcgaagactgcgtggagtttcacgtgcacggaggccccgccgttgtctctggcgttcttcaggccctgggatcggtcccaggactccgcccagctgaagccggagagtttacaagacgggccttcgccaatggaaagttgaatctgaccgaggttgagggtctggccgacctcatccacgcggaaacagaggctcagcgccgtcaggcattaaggcagctggatggggagctaggccacctgtgtagaggctgggcggaaacattgacaaaagctctggctcatgtggaggcttatatcgactttggagaggatgataacctagaggaaggtgtcctcgagcaagccgacatcgaagttagggcactgcaggtggctctaggtgcacaccttcgcgatgcaagacgaggccaacgcctgcggagcggtgtccatgttgtcgtgaccgggccacccaacgcgggaaagtcttcactcgtcaatctactctccaggaaacccgtcagtatcgtgagcccggagccaggcaccacaagggatgtgctggaaactcccgttgatttggcaggcttccctgtgctgctcagtgatacagccggtctgcgggagggggtgggccctgtggagcaggaaggagttagacgcgctcgagagcgtctggagcaggccgaccttattctcgccatgttagatgcttcagatcttgcatctccaagcagctgcaatttcctcgctaccgtggtcgccagcgtaggcgctcagtctcctagtgattcctcacagcggctgctgctggtgctgaacaaaagtgatcttctatctccagaaggacccgggcctggcccagacctccctccacatctgctgttaagttgcctcacgggggaaggtttggacggactgctcgaagcgctaagaaaggaattggccgctgtctgtggcgacccctcaaccgatcccccactcttaacacgggcccgacaccagcatcatctgcaaggctgcctcgatgcgttgggtcattataaacagagcaaagacctcgctttggccgccgaagctctgcgtgttgctagagggcatttaacgcggttgacgggaggaggcggcactgaggagatcttagacatcatcttccaagacttttgcgtgggcaaatag

SEQ ID NO: 74823 - DNA, 1545 bp, Artificial Sequence
  derived and/or modified sequence
atggtacattctcccacatgtcctcatccgtgttttctgctggtgccagcgagcgagccacagtttcctcacctccaaacccccgacccaggagacgcagtttggaacgtgaggtgggccctgtgcacaaggagaagctccggtgctcccgcacccggaagcggagctactattttcgccctgagcagcggtcagggcagatgtgggatcgcagtcatcaggacatcagggccagcaagtggacatgccctacggatcctcaccgccccacgcgacctacccttagctcgccacgccagcttgcggctcctatctgacccgaggagcggggaacccttggaccgcgcactagtgctctggtttcccggacctcagtcttttaccggggaagattgtgtcgagttccacgtgcacggcggacctgccgtggtcagtggagtactgcaggcccttggctctgtacccggattaagacctgctgaagcgggtgagttcacgcggagagcctttgctaatggcaaactcaatttgaccgaggtggaggggctcgccgatctcatccatgctgaaactgaggcccaacgacgccaggcccttagacagctagatggggagcttggccacttgtgcaggggttgggcggaaaccctgacgaaggcccttgcacacgttgaagcctatatagattttggcgaagatgacaacctagaagagggtgtgctggaacaggctgacattgaggtacgcgctttgcaggttgctctgggtgcacacctgcgggacgcaagaagaggccagaggcttaggtcaggcgtgcacgttgttgtgacagggcctccaaacgccggtaaatcatccctggttaatctccttagccggaaacctgtgtctatcgtgagccctgaaccaggtactacaagagatgttcttgaaaccccagtggacctcgcagggtttcccgtcctcctgtcagataccgccggacttagggaaggggttgggcctgtggaacaggagggggtaaggagagcacgcgaacgtcttgagcaggctgacttgattctcgctatgcttgatgcctctgacctggcatctccttcttcctgtaattttctggctacagtggtcgctagtgtgggtgcccagtctccttcagatagtagtcagcggctgctgctcgtgctgaataagagcgacttgctgagtccggaaggtccagggccaggcccagaccttcctcctcatctgttgttgtcatgtctgactggggagggactagacggactgctggaggctctccgcaaggagctggccgctgtttgtggagatccttccaccgatcctcctcttcttactagagcaagacatcaacaccacctgcagggctgtctagacgccctaggacactacaagcagagtaaagatctcgccttggcagcggaagctctgcgagtagccagagggcacctgactaggctgactggcggtggtggcaccgaggagatcttagacatcatatttcaagatttctgtgtgggcaagtag

SEQ ID NO: 74824 - protein, 209 aa, Artificial Sequence
  derived and/or modified sequence
MTSLKVDNLTYRTSPDTLRRVFEKYGRVGDVYIPRDRYTKESRGFAFVRFHDKRDAEDAMDAMDGAVLDGRELRVQMARYGRPPDSHHSRRGPPPRRYGGGGYGRRSRSPRRRRRSRSRSRSRSRSRSRSRYSRSKSRSRTRSRSRSTSKSRSARRSKSKSSSVSRSRSRSRSRSRSRSPPPVSKRESKSRSRSKSPPKSPEEEGAVSS

SEQ ID NO: 74825 - protein, 201 aa, Artificial Sequence
  derived and/or modified sequence
MSYGRPPPDVEGMTSLKVDNLTYRTSPDTLRRVFEKYGRVGDVYIPRDRYTKESRGFAFVRFHDKRDAEDAMDAMDGAVLDGRELRVQMARCGGYGRRSRSPRRRRRSRSRSRSRSRSRSRSRYSRSKSRSRTRSRSRSTSKSRSARRSKSKSSSVSRSRSRSRSRSRSRSPPPVSKRESKSRSRSKSPPKSPEEEGAVSS

SEQ ID NO: 74826 - protein, 221 aa, Artificial Sequence
  derived and/or modified sequence
MSYGRPPPDVEGMTSLKVDNLTYRTSPDTLRRVFEKYGRVGDVYIPRDRYTKESRGFAFVRFHDKRDAEDAMDAMDGAVLDGRELRVQMARYGRPPDSHHSRRGPPPRRYGGGGYGRRSRSPRRRRRSRSRSRSRSRSRSRSRYSRSKSRSRTRSRSRSTSKSRSARRSKSKSSSVSRSRSRSRSRSRSRSPPPVSKRESKSRSRSKSPPKSPEEEGAVSS

SEQ ID NO: 74827 - protein, 179 aa, Artificial Sequence
  derived and/or modified sequence
MSYGRPPPDVEGMTSLKVDNLTYRTSPDTLRRVFEKYGRVGDVYIPRDRYTKESRGFAFVRFHDKRDAEDAMDAMDGADPGVGVVPGLAADLATAARSLGPALVLDLGRPPSPDPHEGPSPSPRRSPDLVRGPGPGLGPGVLPQCPRGNPNPGRDRRVPPSLLKRKERCPLKKMLRSPV

SEQ ID NO: 74828 - protein, 222 aa, Artificial Sequence
  derived and/or modified sequence
PERRGVAPPRAEEAGASSRGSGPPLRAMSYGRPPPDVEGMTSLKVDNLTYRTSPDTLRRVFEKYGRVGDVYIPRDRYTKESRGFAFVRFHDKRDAEDAMDAMDGAVLDGRELRVQMARYGRPPDSHHSRRGPPPRRYGGGGYGRRSRSPRRRRRSRSRSRSRSRSRSRSRYSRSKSRSRTRSRSRSTSKSRSARRSKSKSSSVSRSRSRSRSRSRSRSPPPV

SEQ ID NO: 74829 - DNA, 630 bp, Artificial Sequence
  derived and/or modified sequence
atgacaagtcttaaagtcgacaacctcacatatagaacctcccccgataccctgcgacgtgtgtttgaaaagtacggcagggtgggcgatgtatatattcctagagataggtacacaaaggaatcacgtggattcgctttcgtgaggtttcatgacaagcgtgacgccgaagatgctatggatgctatggatggtgccgtcctggacggcagggaacttagggtgcaaatggccagatatggaagacctcctgatagccaccacagtagaagggggccaccacctagacgttacgggggcgggggctacgggaggcggtccaggagccccaggagacgtcgccggtcaagatccaggtctcggtcaaggagccgttcccgctcacgctcccggtacagcagatccaagagtcgatctcggacaagatcccggagtcggtctactagcaagtcacggtccgccaggaggtccaagagtaagtcttcatctgtgagccggtctcgctcaaggtctcgctccagatctagatcacgaagcccccctcctgtgtccaagagagagagcaaaagtcgctctcgttccaaatccccaccaaagtcccctgaggaggaaggagctgtgtctagttag

SEQ ID NO: 74830 - DNA, 606 bp, Artificial Sequence
  derived and/or modified sequence
atgagctatgggcggccgccaccagatgtggaaggcatgacatctctgaaggttgacaatctaacatataggacttcgcccgatacccttagaagagtattcgagaaatacggtagagtgggggatgtctacattcccagagatcggtacacgaaggagagtaggggcttcgctttcgtgcgatttcacgacaagagagacgccgaagatgctatggatgccatggatggcgccgtgttagacggaagggagctccgggtgcagatggcgaggtgtggcggctacgggcgtcgctccagatctccgagacgaagaagacgctcccgctcacgttcaagaagccgcagcagaagcagatcacggtctaggtatagcaggtctaaatccagatccagaacaagaagcaggtctagatccacgtccaagtctcggagcgcaaggaggtcaaaatccaaaagctccagcgtttctcggagcaggtcccggtctcgctcccggtcacggagtcgcagcccccccccagtgtcaaaaagagagagcaagagtcgcagccgctcaaagagcccacccaaatccccagaggaagagggggctgtgtccagctag

SEQ ID NO: 74831 - DNA, 666 bp, Artificial Sequence
  derived and/or modified sequence
atgagctatggcaggccaccccccgatgtggaaggcatgaccagcctgaaggtggataacttaacctaccgcaccagtcctgatacacttcgacgggttttcgagaaatatgggcgcgtgggtgacgtctacatcccaagagatagatatacaaaagagagcagaggattcgccttcgtgcgcttccatgataaaagggatgctgaggacgcgatggatgccatggatggcgctgtgttggacggccgcgagttgcgcgtccagatggcaagatacgggcggccgccagacagccatcactccagacgcggacctccaccccgcagatatggtggaggaggttatggaaggaggagtcggagcccgcgcaggcgccggagatcccgcagcagatctagatctagatctcgctctagaagcagatctcgttactctcgttctaagtcccggtcaaggacaaggagcagatctcgttctacttccaagagcagaagtgccagacgctccaagagcaaaagtagttcggtgtctagatcaaggagccggagtcggtcacgcagccgctccagatcaccgcccccagtatcgaaaagggaatcaaagtcaaggtctcgttccaagtcccctccaaagtctccggaggaggaaggagccgtcagctcttag

SEQ ID NO: 74832 - DNA, 540 bp, Artificial Sequence
  derived and/or modified sequence
atgtcgtatggccgcccccctccggatgtggaggggatgacttccctaaaggtggacaatctaacctaccgtacatccccagatacattaaggagggtgtttgaaaagtacggacgtgttggtgatgtatacataccccgggaccggtataccaaagaatcccggggctttgcttttgtgcggtttcacgataagagggatgccgaagatgccatggacgccatggatggggcagacccaggagtgggcgtcgtcccaggtctagccgccgacctggcaacggctgctaggtccttaggacccgccctggtgctggacctcggacgacccccatctcccgaccctcacgagggtccctctcccagccctaggagatcgccagatctggtccggggcccaggccccggactgggtccaggtgtactgccacagtgccccagagggaatcccaatccggggagggataggcgtgtgcctcctagtttattgaaaagaaaggagcgctgtccgctcaaaaagatgctgcggtctcctgtttag

SEQ ID NO: 74833 - DNA, 669 bp, Artificial Sequence
  derived and/or modified sequence
cccgaacggcgaggagtggcaccccctagggcagaagaagcaggtgccagcagcaggggatctggaccaccgctgcgcgctatgagctatggtcggccaccaccagacgttgagggtatgacgagtctgaaagtggataacttgacctataggacatcacccgataccttaagaagggttttcgaaaagtacggacgggtgggcgatgtatacattccacgggaccgctatactaaggagagtcgcggatttgctttcgtgcggttccacgacaagcgtgacgcagaagatgccatggacgccatggatggagctgtgctcgatgggagggagttacgcgtacaaatggccagatacggccgacccccggactcacatcactctcggcggggaccaccgccccggcgctacggaggcgggggctatggacgccggtcgcgctcccctcggcggcggcgaagaagcagatcccggtctcgctcccgatcacgttcacggtctagatctcggtactcaaggagtaaaagcaggtcccgcaccaggagtcgctctagatctactagcaagagccgcagcgctcgccgcagcaaatctaagagctcctccgtcagtcgatctagatcaaggtctaggagtaggtctaggagccgttctcctccacctgtctag

SEQ ID NO: 74834 - DNA, 630 bp, Artificial Sequence
  derived and/or modified sequence
atgaccagcctgaaggtggacaacctgacctaccgcaccagcccagacaccctgcggcgggtgtttgagaagtatggccgggtgggagatgtgtacatcccccgggaccgctacaccaaggagagccggggctttgcctttgtgcgcttccatgacaagagagatgctgaagatgccatggatgccatggatggagctgtgctggatggccgggagctgcgggtgcagatggcccgctatggccggcccccagacagccaccacagccggcggggccccccaccccggcgctatggaggcggcggctatggaagaagaagccgcagccccaggagaagaagaagaagccgcagccgcagccgcagccgcagccgcagccgcagccgcagccgctacagccgcagcaagagccgcagcaggaccaggagccgcagccgcagcaccagcaagagccgcagcgcccggcgcagcaagagcaagagcagctctgtgagccgcagccgcagccgcagccgcagccgcagccgcagccgcagccccccacctgtgtccaagcgggagagcaagagccgcagccgcagcaagagcccccccaagagccctgaggaggagggcgctgtgagcagctag

SEQ ID NO: 74835 - DNA, 606 bp, Artificial Sequence
  derived and/or modified sequence
atgtcctatggccggcccccaccagatgtggagggcatgaccagcctgaaggtggacaacctgacctaccgcaccagcccagacaccctgcggcgggtgtttgagaagtatggccgggtgggagatgtgtacatcccccgggaccgctacaccaaggagagccggggctttgcctttgtgcgcttccatgacaagagagatgctgaagatgccatggatgccatggatggagctgtgctggatggccgggagctgcgggtgcagatggcccgctgtggcggctatggaagaagaagccgcagccccaggagaagaagaagaagccgcagccgcagccgcagccgcagccgcagccgcagccgcagccgctacagccgcagcaagagccgcagcaggaccaggagccgcagccgcagcaccagcaagagccgcagcgcccggcgcagcaagagcaagagcagctctgtgagccgcagccgcagccgcagccgcagccgcagccgcagccgcagccccccacctgtgtccaagcgggagagcaagagccgcagccgcagcaagagcccccccaagagccctgaggaggagggcgctgtgagcagctag

SEQ ID NO: 74836 - DNA, 666 bp, Artificial Sequence
  derived and/or modified sequence
atgtcctatggccggcccccaccagatgtggagggcatgaccagcctgaaggtggacaacctgacctaccgcaccagcccagacaccctgcggcgggtgtttgagaagtatggccgggtgggagatgtgtacatcccccgggaccgctacaccaaggagagccggggctttgcctttgtgcgcttccatgacaagagagatgctgaagatgccatggatgccatggatggagctgtgctggatggccgggagctgcgggtgcagatggcccgctatggccggcccccagacagccaccacagccggcggggccccccaccccggcgctatggaggcggcggctatggaagaagaagccgcagccccaggagaagaagaagaagccgcagccgcagccgcagccgcagccgcagccgcagccgcagccgctacagccgcagcaagagccgcagcaggaccaggagccgcagccgcagcaccagcaagagccgcagcgcccggcgcagcaagagcaagagcagctctgtgagccgcagccgcagccgcagccgcagccgcagccgcagccgcagccccccacctgtgtccaagcgggagagcaagagccgcagccgcagcaagagcccccccaagagccctgaggaggagggcgctgtgagcagctag

SEQ ID NO: 74837 - DNA, 540 bp, Artificial Sequence
  derived and/or modified sequence
atgtcctatggccggcccccaccagatgtggagggcatgaccagcctgaaggtggacaacctgacctaccgcaccagcccagacaccctgcggcgggtgtttgagaagtatggccgggtgggagatgtgtacatcccccgggaccgctacaccaaggagagccggggctttgcctttgtgcgcttccatgacaagagagatgctgaagatgccatggatgccatggatggagctgaccccggggtgggcgtggtgcccggcctggccgctgacctggccacagctgcccggagcctgggccctgccctggtgctggacctgggccggccccccagcccagacccccatgagggccccagccccagcccccggcgcagcccagacctggtgcggggccctggccctggcctgggccctggggtgctgccccagtgcccccggggcaaccccaaccctggccgggaccggcgggtgccccccagcctgctgaagaggaaggagcgctgccccctgaagaagatgctgcggagccctgtgtag

SEQ ID NO: 74838 - DNA, 669 bp, Artificial Sequence
  derived and/or modified sequence
cctgagaggagaggagtggccccacccagggctgaggaggccggggccagcagccggggcagcggcccccccctgcgggccatgtcctatggccggcccccaccagatgtggagggcatgaccagcctgaaggtggacaacctgacctaccgcaccagcccagacaccctgcggcgggtgtttgagaagtatggccgggtgggagatgtgtacatcccccgggaccgctacaccaaggagagccggggctttgcctttgtgcgcttccatgacaagagagatgctgaagatgccatggatgccatggatggagctgtgctggatggccgggagctgcgggtgcagatggcccgctatggccggcccccagacagccaccacagcagaagaggccccccaccaagaagatatggaggcggcggctacggccgccgcagccgcagccccaggagaagaagaagaagccgcagccgcagccgcagccgcagccgcagccgcagccgcagccgctacagccgcagcaagagccgcagcaggaccaggagccgcagccgcagcaccagcaagagccgcagcgcccggcgcagcaagagcaagagcagctctgtgagccgcagccgcagccgcagccgcagccgcagccgcagccgcagccccccacctgtgtag

SEQ ID NO: 74839 - DNA, 630 bp, Artificial Sequence
  derived and/or modified sequence
atgaccagcctgaaggtggacaacctgacctaccggaccagccccgacaccttgcgcagggtgtttgaaaaatacgggcgagttggcgatgtgtacatcccgcgcgaccggtacactaaagaatctcgggggtttgccttcgtgaggttccacgacaagcgcgatgctgaggacgccatggacgccatggatggggctgtgctagatggaagggaacttcgtgtgcagatggctcggtacgggcgcccgcccgatagccaccactcccgaagaggcccaccaccacgccgatacggaggaggcggctatgggcggcggagcagaagcccgcgccggcggcggcgatcaaggagccggagccgtagccgtagtaggagcaggtcaagaagtaggtactccaggtcgaaaagccggtcaaggacaaggtcacgttctagatcaacaagcaagagcaggtccgctagaaggagcaagtccaaatcctcgtccgtgagtcgctcccgcagccgttctagatctcgatctaggtctaggagcccacctccggtgtcaaaaagagagtccaagtcccgctctagaagcaaaagccctccgaagtctcccgaagaagaaggggccgtgtcatcctag

SEQ ID NO: 74840 - DNA, 606 bp, Artificial Sequence
  derived and/or modified sequence
atgagctacggccggcccccccccgacgtggagggcatgaccagcctgaaagtcgataacctgacctacaggacttcacctgacacattaaggcgggtcttcgagaagtacggcagagtcggcgacgtttatattcctagagatcgatacaccaaagagagcagaggatttgcttttgtgaggtttcatgataagcgggacgccgaggatgctatggatgcaatggatggtgccgtgctcgacggcagagagctaagggttcagatggcccgctgcgggggctacggccgccgcagccgaagcccgcgacggcgcaggcgttccagaagcagatcgcgaagtcggagccggagtcgttcccggagccggtattcccgttctaaatcccgttctcgcacgaggtccagaagcaggtcaacatcaaaatcgaggagcgccaggcggagcaagtccaagagcagctctgtttcgcgctcccgctcacggtcccgtagtagaagccgcagccgttctcccccccccgtttctaaacgcgagagcaagagtaggtcaaggtcgaaaagcccaccaaagtccccagaggaggagggggccgtatcttcctag

SEQ ID NO: 74841 - DNA, 666 bp, Artificial Sequence
  derived and/or modified sequence
atgagctacggccggcccccccccgacgtggagggcatgaccagcctgaaggtggacaacttaacttaccggacgagtcctgatacccttcgaagagtttttgagaagtacggccgcgtaggagatgtgtacatccctcgcgacaggtacaccaaagaatccaggggctttgccttcgttcgatttcacgacaagcgcgacgccgaggatgccatggacgctatggatggcgctgtgctggatgggcgcgaactgagggtgcagatggcgaggtatgggcgccctcctgacagccaccacagtcgtagggggccccccccccggagatacgggggcggaggctacgggaggcggtccagaagcccaaggaggaggcggagatcaagaagcagaagccgatctaggtcgagatctagatcacggagccgctattctcggagtaagtcgagatcacgaacgcgatctcggtcacggtccacatcaaaaagccgcagcgcgcgccggagcaagtcgaagagctcctcagtatctagaagtcggtctcgttctcgttctcgaagcaggagcaggagccccccgcccgtctctaagagagagagcaagtcccggagcagatccaagtctcctccgaagagccctgaagaggaaggtgcggtgagctcctag

SEQ ID NO: 74842 - DNA, 540 bp, Artificial Sequence
  derived and/or modified sequence
atgagctacggccggcccccccccgacgtggagggcatgaccagcctcaaagtggataacctcacctacaggaccagcccagacaccctgaggagagtgtttgagaagtacggcagggtcggcgatgtctatatacctcgcgaccggtacactaaggaatctagggggttcgccttcgtgcggttccatgataagagggatgcagaagatgcaatggacgcaatggacggggccgacccaggggttggggtggttcctggactggcagccgatctggccaccgccgccagatcccttggtcctgctctggtgttagatctggggcgacccccctcacccgacccacatgagggaccaagtccctcaccccggcggtcaccagatctggtccgcggtcccgggcccgggctgggcccaggggtgctccctcagtgcccgcgcgggaatcccaatcctggccgagatagacgggtcccaccttccctcctgaaaagaaaagaacggtgccccctcaagaaaatgcttaggagcccagtgtag

SEQ ID NO: 74843 - DNA, 669 bp, Artificial Sequence
  derived and/or modified sequence
cccgagcggcggggcgtggcccccccccgggccgaggaggccggcgcgtctagcaggggcagcggcccccccctccgagccatgagctacgggcggcctccacctgacgtcgagggaatgacatcactcaaggtcgataatctcacctatcggacatcacctgataccctgaggcgtgtcttcgaaaaatacggcagggtgggcgacgtatacatacctagagatagatacaccaaggaatcacgcggattcgcctttgtgcgattccatgataaaagagacgcagaagacgcaatggacgccatggatggtgcggtgctcgacggcagggaactgcgagtccagatggctaggtatggtcgccccccagactcccaccactccagaaggggcccaccccctcggcgctacggaggtggcggatatggaaggcgcagccggtctccacgtcgtcgccgccggagtaggagtcgatcaagaagcaggtcgcgttcccgctccagaagtagatacagccgcagtaaatctcgcagtaggacacggagtcgcagcaggtccacctcaaagagtaggagcgctcgtaggagcaaatctaagtcctcaagtgtcagcagatctagaagtaggagccgcagccgctccagaagtcggtctcccccgccagtatag

SEQ ID NO: 74844 - DNA, 630 bp, Artificial Sequence
  derived and/or modified sequence
atgacatctttgaaggtggataacctgacctacaggacatcacctgacaccctgagacgagtcttcgagaaatacggtcgagtcggcgatgtgtacataccacgggatcgatacactaaagaaagccgcggattcgcattcgttagatttcacgataagcgggacgccgaagacgcgatggatgccatggatggggctgttttggatggtcgagaactgagagtgcagatggcacgctacggcaggccacctgatagccatcactcccggcgaggaccccctccccgtcggtatggtggaggaggttatggtcgcagaagccgatcccctcgtaggagaagaaggtctcggtctcgttccagatcaagatcccggtctagatccaggtcacgatactcccgctcgaagtcccgcagtcgaacaagaagccgttcccgctccacctctaagagcagaagtgccagaaggagcaaatcgaagagttcctcggtgtcacgttctagaagtcggtctcgctcgcgaagcagaagtaggtcaccgccaccagtctcaaaacgagagagtaagtcaaggtcacggagcaagtcacccccaaagtcgcccgaggaggagggcgctgtttctagctag

SEQ ID NO: 74845 - DNA, 606 bp, Artificial Sequence
  derived and/or modified sequence
atgtcctatgggcgacccccaccagacgtggagggtatgacatctctgaaggtagacaatcttacttaccgcacgtcaccagacactttgcgaagggtgtttgagaaatacggcagagtgggagacgtgtacattccacgtgaccggtatactaaagagtcacggggatttgctttcgtcagatttcatgacaagagagatgccgaagatgcaatggatgccatggatggagctgtattggacgggagagaacttcgagtacagatggcccgttgtggaggctacgggagaagaagtcgttctccccgacgcagacgcagaagtaggagccggtcacgcagtcgctctcggtcacgtagcagaagcagatacagcagatcaaagtctaggtcccgtactcgcagcagatcccgatcaacttcgaagtcacgatcagcacggcgtagcaagtcaaaatcctctagtgtaagccgaagcagaagcagatcccggagccgcagccgctctcgatcaccccctcccgtgagtaagagagagtccaaaagtcggtcacgctccaaatctcctcccaaaagcccagaggaggagggcgctgtctcctcatag

SEQ ID NO: 74846 - DNA, 666 bp, Artificial Sequence
  derived and/or modified sequence
atgagttacggtcggccacctcccgatgttgaagggatgaccagcctaaaggtcgacaacctcacataccgcacctcccccgataccctcaggcgcgtgttcgagaagtacggaagggttggggacgtgtatatcccaagagaccggtacacaaaggagagcagagggttcgccttcgtacgcttccatgataagagggatgcagaggacgccatggacgccatggatggcgctgttttggatgggcgtgagctgagggtccagatggcgagatacggacgcccaccagattctcatcacagtagacggggaccccctccccgtcggtatggcggtgggggttacgggcgacgcagccgatccccacggagaaggagaagatcccggtcccgatcgaggtctcgcagccgctctcgaagtcgttcacgctacagtcggtccaagtcaaggagccgtactagaagtagatcacgctccacctcgaaatcgagaagcgcccgacgctcaaagtcaaagagctccagcgtatcacgatcccgcagtaggagtaggagccgttccagatcaagatcaccgccacccgtatctaagcgggagtcaaaatccaggagcagatcaaagtctccccctaagtcacccgaggaggagggggctgtctcctcctag

SEQ ID NO: 74847 - DNA, 540 bp, Artificial Sequence
  derived and/or modified sequence
atgtcatatgggaggccccctcctgatgtggaaggtatgacctccttaaaggtagacaacctgacctatcgaacatctcccgacacccttagaagggtgttcgaaaaatacgggcgagtgggagatgtttatatcccccgagaccgctacacaaaagagtctagggggttcgcattcgtcaggtttcacgataaacgcgatgcagaggatgcaatggacgcaatggacggcgcagacccaggcgtcggagttgtcccagggctcgccgcagacttggcaacagctgctcgatctttaggccctgctctcgttctggacctcggcagaccgccatctcccgatccacatgaagggccttccccttctcctcggaggagtcccgatcttgttcgcggtcccggaccagggctcggcccaggtgtcctgccacagtgtccgagaggcaaccctaatcccggaagagaccgccgagtgcccccaagtctcttgaaacgcaaagagagatgccccctaaagaagatgctgagaagtccagtgtag

SEQ ID NO: 74848 - DNA, 669 bp, Artificial Sequence
  derived and/or modified sequence
ccggagagaagaggagtcgcccctcccagagctgaggaggctggtgcctcatctagaggcagtggtcctccactgcgggctatgtcctatggcagaccccctccagatgtggaaggcatgacctctctcaaggtcgacaacctcacctacagaactagccccgatactctgagaagagtcttcgaaaaatacggccgtgtgggtgacgtgtatatcccccgtgatcggtatacaaaggagagccggggttttgcttttgtgcggtttcacgataagagagacgccgaggacgccatggacgcgatggacggggcagtgctggatggccgtgagctacgcgtccagatggctcggtacggcaggccacccgattctcaccattctaggcgtggcccacctcccaggagatacggcggaggaggttatgggaggcgatctcggagccctcgcaggcggcgtcgttcgcgctcaagaagcaggagcaggagcaggagcaggtctcgctcacggtattctcggagcaaaagtcgttcccggacgcggtcaagaagcagaagcacaagcaaaagccgctctgccaggagaagcaagtcaaaatcatccagtgtcagcaggtctcgctccaggtctcgctctcggtcaaggtcccgctcccctccaccggtgtag

SEQ ID NO: 74849 - DNA, 2845 bp, Artificial Sequence
  derived and/or modified sequence
agttgttactcaggtgcgctagcctgcggagcccgtccgtgctgttctgcggcaaggcctttcccagtgtccccacgcggaaggcaactgcctgaggaagccggcgccagttcgcggggctccgggccgccactcagagctatgagctacggccgcccccctcccgatgtggagggtatgacctccctcaaggtggacaacctgacctaccgcacctcgcccgacacgctgaggcgcgtcttcgagaagtacgggcgcgtcggcgacgtgtacatcccgcgggaccgctacaccaaggagtcccgcggcttcgccttcgttcgctttcacgacaagcgcgacgctgaggacgctatggatgccatggacggggccgtgctggacggccgcgagctgcgggtgcaaatggcgcgctacggccgccccccggactcacaccacagccgccggggaccgccaccccgcaggtacgggggcggtggctacggacgccggagccgcagccctaggcggcgtcgccgcagccgatcccggagtcggagtcgttccaggtctcgcagccgatctcgctacagccgctcgaagtctcggtcccgcactcgttctcgatctcggtcgacctccaagtccagatccgcacgaaggtccaagtccaagtcctcgtcggtctccagatctcgttcgcggtccaggtcccggtctcggtccaggagtcctcccccagtgtccaagagggaatccaaatccaggtcgcgatcgaagagtccccccaagtctcctgaagaggaaggagcggtgtcctcttaagaaaatggtaatgtctgggaatccgagacacataaccctaattcataaatgggatttggggtaggtctttttgagtcgtgttaatgtaagaatgactcctatcattaggagtgctgctcggaggttactcacctttgggagtaatactgaagagaggggtctgcagaaaggatgtgtatgaagcttagataataatggctgtttcgtaaactgtttgagacctattaatgaaaatgactatttcttgctgtttttatccaacgtctgcattttccccctttaaagctgcggtctcctgtttgataaaagaatattggccagtattgcagattttaactgatttggctgatcctccagggaccagtttctgtgggcgtgtattggagcaggtttgtctttaaatgttaaagatgcactatcctcttagagaaacaatcagttcaactattgttgtactgactgggacttcatattctaatggatgtggcaaaagaattgcaataagaagcagtgaacatttggaaccccaaaagaaagttacaggtattgcactgggtggggaaaggatagtgtgtctttaactcttaaattgtttggtcctattttttaaaaaggaaagggccctaagtagctcagatattaaagtagtattctcaattaccaaatgtttcatttgaaacaatttatcttaatgaaatatagaccaattctctgatctcgagttgtttttgtttggatacagcccttttttttttctttttttttcttccccttacctttcttcaccttggttatttggccaggaatacgtaaattcaaacttgtacatgctgatggtagcctttgtgaaattttcctaattgggccttttaaaaacatggctgggtggaacatttctgtaccctactggtttgaccagagccttagtaagtacgtgcctgaaactgaaaccatgtgcactttaatggaaggtaagctgaacttctttcttttcaaacctagatgtatcggcaagcagtgtaaacggaggacttggggaaaaaggaccacatagtccatcgaagaagagtccttggaacaagcaactggctattgaaaaggttattttgtaacatttgtctaactttttacttgtttaagctttgcctcagttggcaaacttcattttatgtgccattttgttgctgttattcaaatttcttgtaatttagtgaggtgaacgacttcagatttcattattggatttggatatttgaggtaaaatttcattttgttatatagtgctgactttttttgtttgaaattaaacagattggtaacctaatttgtggcctcctgacttttaaggaaaacgtgtgcagccattacacacagcctaaagctgtcaagagattgactcagcattgccttcattccttaaaattaaaaacctacaaaagttggtgtaaatttgtatatgttatttaccttcagatctaaatggtaatctgaacccaaatttgtataaagacttttcaggtgaaaagacttgattttttgaaaggattgtttatcaaacacaattctaatctcttctcttatgtatttttgtgcactaggcgcagttgtgtagcagttgagtaatgctggttagctgttaaggtggcgtgttgcagtgcagagtgcttggctgtttcctgttttctcccgattgctcctgtgtaaagatgccttgtcgtgcagaaacaaatggctgtccagtttattaaaatgcctgacaactgcacttccagtcacccgggccttgcatataaataacggagcatacagtgagcacatctagctgatgataaatacacctttttttccctcttccccctaaaaatggtaaatctgatcatatctacatgtatgaacttaacatggaaaatgttaaggaagcaaatggttgtaactttgtaagtacttataacatggtgtatctttttgcttatgaatattctgtattataaccattgtttctgtagtttaattaaaacattttcttggtgttagcttt

SEQ ID NO: 74850 - DNA, 1814 bp, Artificial Sequence
  derived and/or modified sequence
agttgttactcaggtgcgctagcctgcggagcccgtccgtgctgttctgcggcaaggcctttcccagtgtccccacgcggaaggcaactgcctgagaggcgcggcgtcgcaccgcccagagctgaggaagccggcgccagttcgcggggctccgggccgccactcagagctatgagctacggccgcccccctcccgatgtggagggtatgacctccctcaaggtggacaacctgacctaccgcacctcgcccgacacgctgaggcgcgtcttcgagaagtacgggcgcgtcggcgacgtgtacatcccgcgggaccgctacaccaaggagtcccgcggcttcgccttcgttcgctttcacgacaagcgcgacgctgaggacgctatggatgccatggacggggccgtgctggacggccgcgagctgcgggtgcaaatggcgcgctgcggtggctacggacgccggagccgcagccctaggcggcgtcgccgcagccgatcccggagtcggagtcgttccaggtctcgcagccgatctcgctacagccgctcgaagtctcggtcccgcactcgttctcgatctcggtcgacctccaagtccagatccgcacgaaggtccaagtccaagtcctcgtcggtctccagatctcgttcgcggtccaggtcccggtctcggtccaggagtcctcccccagtgtccaagagggaatccaaatccaggtcgcgatcgaagagtccccccaagtctcctgaagaggaaggagcggtgtcctcttaagaaaatgatgtatcggcaagcagtgtaaacggaggacttggggaaaaaggaccacatagtccatcgaagaagagtccttggaacaagcaactggctattgaaaaggttattttgtaacatttgtctaactttttacttgtttaagctttgcctcagttggcaaacttcattttatgtgccattttgttgctgttattcaaatttcttgtaatttagtgaggtgaacgacttcagatttcattattggatttggatatttgaggtaaaatttcattttgttatatagtgctgactttttttgtttgaaattaaacagattggtaacctaatttgtggcctcctgacttttaaggaaaacgtgtgcagccattacacacagcctaaagctgtcaagagattgactcagcattgccttcattccttaaaattaaaaacctacaaaagttggtgtaaatttgtatatgttatttaccttcagatctaaatggtaatctgaacccaaatttgtataaagacttttcaggtgaaaagacttgattttttgaaaggattgtttatcaaacacaattctaatctcttctcttatgtatttttgtgcactaggcgcagttgtgtagcagttgagtaatgctggttagctgttaaggtggcgtgttgcagtgcagagtgcttggctgtttcctgttttctcccgattgctcctgtgtaaagatgccttgtcgtgcagaaacaaatggctgtccagtttattaaaatgcctgacaactgcacttccagtcacccgggccttgcatataaataacggagcatacagtgagcacatctagctgatgataaatacacctttttttccctcttccccctaaaaatggtaaatctgatcatatctacatgtatgaacttaacatggaaaatgttaaggaagcaaatggttgtaactttgtaagtacttataacatggtgtatctttttgcttatgaatattctgtattataaccattgtttctgtagtttaattaaaacattttcttggtgtt

SEQ ID NO: 74851 - DNA, 2878 bp, Artificial Sequence
  derived and/or modified sequence
gttgttactcaggtgcgctagcctgcggagcccgtccgtgctgttctgcggcaaggcctttcccagtgtccccacgcggaaggcaactgcctgagaggcgcggcgtcgcaccgcccagagctgaggaagccggcgccagttcgcggggctccgggccgccactcagagctatgagctacggccgcccccctcccgatgtggagggtatgacctccctcaaggtggacaacctgacctaccgcacctcgcccgacacgctgaggcgcgtcttcgagaagtacgggcgcgtcggcgacgtgtacatcccgcgggaccgctacaccaaggagtcccgcggcttcgccttcgttcgctttcacgacaagcgcgacgctgaggacgctatggatgccatggacggggccgtgctggacggccgcgagctgcgggtgcaaatggcgcgctacggccgccccccggactcacaccacagccgccggggaccgccaccccgcaggtacgggggcggtggctacggacgccggagccgcagccctaggcggcgtcgccgcagccgatcccggagtcggagtcgttccaggtctcgcagccgatctcgctacagccgctcgaagtctcggtcccgcactcgttctcgatctcggtcgacctccaagtccagatccgcacgaaggtccaagtccaagtcctcgtcggtctccagatctcgttcgcggtccaggtcccggtctcggtccaggagtcctcccccagtgtccaagagggaatccaaatccaggtcgcgatcgaagagtccccccaagtctcctgaagaggaaggagcggtgtcctcttaagaaaatggtaatgtctgggaatccgagacacataaccctaattcataaatgggatttggggtaggtctttttgagtcgtgttaatgtaagaatgactcctatcattaggagtgctgctcggaggttactcacctttgggagtaatactgaagagaggggtctgcagaaaggatgtgtatgaagcttagataataatggctgtttcgtaaactgtttgagacctattaatgaaaatgactatttcttgctgtttttatccaacgtctgcattttccccctttaaagctgcggtctcctgtttgataaaagaatattggccagtattgcagattttaactgatttggctgatcctccagggaccagtttctgtgggcgtgtattggagcaggtttgtctttaaatgttaaagatgcactatcctcttagagaaacaatcagttcaactattgttgtactgactgggacttcatattctaatggatgtggcaaaagaattgcaataagaagcagtgaacatttggaaccccaaaagaaagttacaggtattgcactgggtggggaaaggatagtgtgtctttaactcttaaattgtttggtcctattttttaaaaaggaaagggccctaagtagctcagatattaaagtagtattctcaattaccaaatgtttcatttgaaacaatttatcttaatgaaatatagaccaattctctgatctcgagttgtttttgtttggatacagcccttttttttttctttttttttcttccccttacctttcttcaccttggttatttggccaggaatacgtaaattcaaacttgtacatgctgatggtagcctttgtgaaattttcctaattgggccttttaaaaacatggctgggtggaacatttctgtaccctactggtttgaccagagccttagtaagtacgtgcctgaaactgaaaccatgtgcactttaatggaaggtaagctgaacttctttcttttcaaacctagatgtatcggcaagcagtgtaaacggaggacttggggaaaaaggaccacatagtccatcgaagaagagtccttggaacaagcaactggctattgaaaaggttattttgtaacatttgtctaactttttacttgtttaagctttgcctcagttggcaaacttcattttatgtgccattttgttgctgttattcaaatttcttgtaatttagtgaggtgaacgacttcagatttcattattggatttggatatttgaggtaaaatttcattttgttatatagtgctgactttttttgtttgaaattaaacagattggtaacctaatttgtggcctcctgacttttaaggaaaacgtgtgcagccattacacacagcctaaagctgtcaagagattgactcagcattgccttcattccttaaaattaaaaacctacaaaagttggtgtaaatttgtatatgttatttaccttcagatctaaatggtaatctgaacccaaatttgtataaagacttttcaggtgaaaagacttgattttttgaaaggattgtttatcaaacacaattctaatctcttctcttatgtatttttgtgcactaggcgcagttgtgtagcagttgagtaatgctggttagctgttaaggtggcgtgttgcagtgcagagtgcttggctgtttcctgttttctcccgattgctcctgtgtaaagatgccttgtcgtgcagaaacaaatggctgtccagtttattaaaatgcctgacaactgcacttccagtcacccgggccttgcatataaataacggagcatacagtgagcacatctagctgatgataaatacacctttttttccctcttccccctaaaaatggtaaatctgatcatatctacatgtatgaacttaacatggaaaatgttaaggaagcaaatggttgtaactttgtaagtacttataacatggtgtatctttttgcttatgaatattctgtattataaccattgtttctgtagtttaattaaaacattttcttggtgttagcttttctc

SEQ ID NO: 74852 - DNA, 1341 bp, Artificial Sequence
  derived and/or modified sequence
ccagttgttactcaggtgcgctagcctgcggagcccgtccgtgctgttctgcggcaaggcctttcccagtgtccccacgcggaaggcaactgcctgagaggcgcggcgtcgcaccgcccagagctgaggaagccggcgccagttcgcggggctccgggccgccactcagagctatgagctacggccgcccccctcccgatgtggagggtatgacctccctcaaggtggacaacctgacctaccgcacctcgcccgacacgctgaggcgcgtcttcgagaagtacgggcgcgtcggcgacgtgtacatcccgcgggaccgctacaccaaggagtcccgcggcttcgccttcgttcgctttcacgacaagcgcgacgctgaggacgctatggatgccatggacggagccgatcccggagtcggagtcgttccaggtctcgcagccgatctcgctacagccgctcgaagtctcggtcccgcactcgttctcgatctcggtcgacctccaagtccagatccgcacgaaggtccaagtccaagtcctcgtcggtctccagatctcgttcgcggtccaggtcccggtctcggtccaggagtcctcccccagtgtccaagagggaatccaaatccaggtcgcgatcgaagagtccccccaagtctcctgaagaggaaggagcggtgtcctcttaagaaaatgctgcggtctcctgtttgataaaagaatattggccagtattgcagattttaactgatttggctgatcctccagggaccagtttctgtgggcgtgtattggagcagatgtatcggcaagcagtgtaaacggaggacttggggaaaaaggaccacatagtccatcgaagaagagtccttggaacaagcaactggctattgaaaaggcgcagttgtgtagcagttgagtaatgctggttagctgttaaggtggcgtgttgcagtgcagagtgcttggctgtttcctgttttctcccgattgctcctgtgtaaagatgccttgtcgtgcagaaacaaatggctgtccagtttattaaaatgcctgacaactgcacttccagtcacccgggccttgcatataaataacggagcatacagtgagcacatctagctgatgataaatacacctttttttccctcttccccctaaaaatggtaaatctgatcatatctacatgtatgaacttaacatggaaaatgttaaggaagcaaatggttgtaactttgtaagtacttataacatggtgtatctttttgcttatgaatattctgtattataaccattgtttctgtagtttaattaaaacattttcttggtgttagcttttctc

SEQ ID NO: 74853 - DNA, 2959 bp, Artificial Sequence
  derived and/or modified sequence
agaaggtttcatttccgggtggcgcgggcgccattttgtgaggagcgatataaacgggcgcagaggccggctgcccgcccagttgttactcaggtgcgctagcctgcggagcccgtccgtgctgttctgcggcaaggcctttcccagtgtccccacgcggaaggcaactgcctgagaggcgcggcgtcgcaccgcccagagctgaggaagccggcgccagttcgcggggctccgggccgccactcagagctatgagctacggccgcccccctcccgatgtggagggtatgacctccctcaaggtggacaacctgacctaccgcacctcgcccgacacgctgaggcgcgtcttcgagaagtacgggcgcgtcggcgacgtgtacatcccgcgggaccgctacaccaaggagtcccgcggcttcgccttcgttcgctttcacgacaagcgcgacgctgaggacgctatggatgccatggacggggccgtgctggacggccgcgagctgcgggtgcaaatggcgcgctacggccgccccccggactcacaccacagccgccggggaccgccaccccgcaggtacgggggcggtggctacggacgccggagccgcagccctaggcggcgtcgccgcagccgatcccggagtcggagtcgttccaggtctcgcagccgatctcgctacagccgctcgaagtctcggtcccgcactcgttctcgatctcggtcgacctccaagtccagatccgcacgaaggtccaagtccaagtcctcgtcggtctccagatctcgttcgcggtccaggtcccggtctcggtccaggagtcctcccccagtgtccaagagggaatccaaatccaggtcgcgatcgaagagtccccccaagtctcctgaagaggaaggagcggtgtcctcttaagaaaatggtaatgtctgggaatccgagacacataaccctaattcataaatgggatttggggtaggtctttttgagtcgtgttaatgtaagaatgactcctatcattaggagtgctgctcggaggttactcacctttgggagtaatactgaagagaggggtctgcagaaaggatgtgtatgaagcttagataataatggctgtttcgtaaactgtttgagacctattaatgaaaatgactatttcttgctgtttttatccaacgtctgcattttccccctttaaagctgcggtctcctgtttgataaaagaatattggccagtattgcagattttaactgatttggctgatcctccagggaccagtttctgtgggcgtgtattggagcaggtttgtctttaaatgttaaagatgcactatcctcttagagaaacaatcagttcaactattgttgtactgactgggacttcatattctaatggatgtggcaaaagaattgcaataagaagcagtgaacatttggaaccccaaaagaaagttacaggtattgcactgggtggggaaaggatagtgtgtctttaactcttaaattgtttggtcctattttttaaaaaggaaagggccctaagtagctcagatattaaagtagtattctcaattaccaaatgtttcatttgaaacaatttatcttaatgaaatatagaccaattctctgatctcgagttgtttttgtttggatacagcccttttttttttctttttttttcttccccttacctttcttcaccttggttatttggccaggaatacgtaaattcaaacttgtacatgctgatggtagcctttgtgaaattttcctaattgggccttttaaaaacatggctgggtggaacatttctgtaccctactggtttgaccagagccttagtaagtacgtgcctgaaactgaaaccatgtgcactttaatggaaggtaagctgaacttctttcttttcaaacctagatgtatcggcaagcagtgtaaacggaggacttggggaaaaaggaccacatagtccatcgaagaagagtccttggaacaagcaactggctattgaaaaggttattttgtaacatttgtctaactttttacttgtttaagctttgcctcagttggcaaacttcattttatgtgccattttgttgctgttattcaaatttcttgtaatttagtgaggtgaacgacttcagatttcattattggatttggatatttgaggtaaaatttcattttgttatatagtgctgactttttttgtttgaaattaaacagattggtaacctaatttgtggcctcctgacttttaaggaaaacgtgtgcagccattacacacagcctaaagctgtcaagagattgactcagcattgccttcattccttaaaattaaaaacctacaaaagttggtgtaaatttgtatatgttatttaccttcagatctaaatggtaatctgaacccaaatttgtataaagacttttcaggtgaaaagacttgattttttgaaaggattgtttatcaaacacaattctaatctcttctcttatgtatttttgtgcactaggcgcagttgtgtagcagttgagtaatgctggttagctgttaaggtggcgtgttgcagtgcagagtgcttggctgtttcctgttttctcccgattgctcctgtgtaaagatgccttgtcgtgcagaaacaaatggctgtccagtttattaaaatgcctgacaactgcacttccagtcacccgggccttgcatataaataacggagcatacagtgagcacatctagctgatgataaatacacctttttttccctcttccccctaaaaatggtaaatctgatcatatctacatgtatgaacttaacatggaaaatgttaaggaagcaaatggttgtaactttgtaagtacttataacatggtgtatctttttgcttatgaatattctgtattataaccattgtttctgtagtttaattaaaacattttcttggtgttagcttttctc

SEQ ID NO: 74854 - DNA, 630 bp, Artificial Sequence
  derived and/or modified sequence
atgaccagcctgaaggtggacaacctgacctacagaaccagccccgacaccctgagaagagtgttcgagaagtacggcagagtgggcgacgtgtacatccccagagacagatacaccaaggagagcagaggcttcgccttcgtgagattccacgacaagagagacgccgaggacgccatggacgccatggacggcgccgtgctggacggcagagagctgagagtgcagatggccagatacggcagaccccccgacagccaccacagcagaagaggccccccccccagaagatacggcggcggcggctacggcagaagaagcagaagccccagaagaagaagaagaagcagaagcagaagcagaagcagaagcagaagcagaagcagaagcagatacagcagaagcaagagcagaagcagaaccagaagcagaagcagaagcaccagcaagagcagaagcgccagaagaagcaagagcaagagcagcagcgtgagcagaagcagaagcagaagcagaagcagaagcagaagcagaagccccccccccgtgagcaagagagagagcaagagcagaagcagaagcaagagcccccccaagagccccgaggaggagggcgccgtgagcagctag

SEQ ID NO: 74855 - DNA, 606 bp, Artificial Sequence
  derived and/or modified sequence
atgagctacggcagacccccccccgacgtggagggcatgaccagcctgaaggtggacaacctgacctacagaaccagccccgacaccctgagaagagtgttcgagaagtacggcagagtgggcgacgtgtacatccccagagacagatacaccaaggagagcagaggcttcgccttcgtgagattccacgacaagagagacgccgaggacgccatggacgccatggacggcgccgtgctggacggcagagagctgagagtgcagatggccagatgcggcggctacggcagaagaagcagaagccccagaagaagaagaagaagcagaagcagaagcagaagcagaagcagaagcagaagcagaagcagatacagcagaagcaagagcagaagcagaaccagaagcagaagcagaagcaccagcaagagcagaagcgccagaagaagcaagagcaagagcagcagcgtgagcagaagcagaagcagaagcagaagcagaagcagaagcagaagccccccccccgtgagcaagagagagagcaagagcagaagcagaagcaagagcccccccaagagccccgaggaggagggcgccgtgagcagctag

SEQ ID NO: 74856 - DNA, 666 bp, Artificial Sequence
  derived and/or modified sequence
atgagctacggcagacccccccccgacgtggagggcatgaccagcctgaaggtggacaacctgacctacagaaccagccccgacaccctgagaagagtgttcgagaagtacggcagagtgggcgacgtgtacatccccagagacagatacaccaaggagagcagaggcttcgccttcgtgagattccacgacaagagagacgccgaggacgccatggacgccatggacggcgccgtgctggacggcagagagctgagagtgcagatggccagatacggcagaccccccgacagccaccacagcagaagaggccccccccccagaagatacggcggcggcggctacggcagaagaagcagaagccccagaagaagaagaagaagcagaagcagaagcagaagcagaagcagaagcagaagcagaagcagatacagcagaagcaagagcagaagcagaaccagaagcagaagcagaagcaccagcaagagcagaagcgccagaagaagcaagagcaagagcagcagcgtgagcagaagcagaagcagaagcagaagcagaagcagaagcagaagccccccccccgtgagcaagagagagagcaagagcagaagcagaagcaagagcccccccaagagccccgaggaggagggcgccgtgagcagctag

SEQ ID NO: 74857 - DNA, 540 bp, Artificial Sequence
  derived and/or modified sequence
atgagctacggcagacccccccccgacgtggagggcatgaccagcctgaaggtggacaacctgacctacagaaccagccccgacaccctgagaagagtgttcgagaagtacggcagagtgggcgacgtgtacatccccagagacagatacaccaaggagagcagaggcttcgccttcgtgagattccacgacaagagagacgccgaggacgccatggacgccatggacggcgccgaccccggcgtgggcgtggtgcccggcctggccgccgacctggccaccgccgccagaagcctgggccccgccctggtgctggacctgggcagaccccccagccccgacccccacgagggccccagccccagccccagaagaagccccgacctggtgagaggccccggccccggcctgggccccggcgtgctgccccagtgccccagaggcaaccccaaccccggcagagacagaagagtgccccccagcctgctgaagagaaaggagagatgccccctgaagaagatgctgagaagccccgtgtag

SEQ ID NO: 74858 - DNA, 669 bp, Artificial Sequence
  derived and/or modified sequence
cccgagagaagaggcgtggccccccccagagccgaggaggccggcgccagcagcagaggcagcggcccccccctgagagccatgagctacggcagacccccccccgacgtggagggcatgaccagcctgaaggtggacaacctgacctacagaaccagccccgacaccctgagaagagtgttcgagaagtacggcagagtgggcgacgtgtacatccccagagacagatacaccaaggagagcagaggcttcgccttcgtgagattccacgacaagagagacgccgaggacgccatggacgccatggacggcgccgtgctggacggcagagagctgagagtgcagatggccagatacggcagaccccccgacagccaccacagcagaagaggccccccccccagaagatacggcggcggcggctacggcagaagaagcagaagccccagaagaagaagaagaagcagaagcagaagcagaagcagaagcagaagcagaagcagaagcagatacagcagaagcaagagcagaagcagaaccagaagcagaagcagaagcaccagcaagagcagaagcgccagaagaagcaagagcaagagcagcagcgtgagcagaagcagaagcagaagcagaagcagaagcagaagcagaagccccccccccgtgtag

SEQ ID NO: 74859 - protein, 299 aa, Artificial Sequence
  derived and/or modified sequence
MLKEVLQREGKSYKSETLMYIKKARASENKLSESILAHRENMRQMIRSFSEPFGRDLLSISDGRGRAHNRRGHNDGEDSLTATSCSLVPFGDFGGMHTDVSSFQTMDQMVSNMRNYMQKLERNFGQLSVDPNGHSFCSSSVMTYSKIGDEPPKVFQASTQTRRAPGGIKETRKAMRDSDSGLEKMAIGHHIHDRAHVIKKSKNKKTGDEEVNQEFINMNESDAHAFDEEWQSEVLKYKPGRHNLGNTRMRSVGHENPGSRELKRREKPQQSPAIEHGRRSNVLGDKLHIKGSSVKSNKK

SEQ ID NO: 74860 - protein, 258 aa, Artificial Sequence
  derived and/or modified sequence
MRQMIRSFSEPFGRDLLSISDGRGRAHNRRGHNDGEDSLTATSCSLVPFGDFGGMHTDVSSFQTMDQMVSNMRNYMQKLERNFGQLSVDPNGHSFCSSSVMTYSKIGDEPPKVFQASTQTRRAPGGIKETRKAMRDSDSGLEKMAIGHHIHDRAHVIKKSKNKKTGDEEVNQEFINMNESDAHAFDEEWQSEVLKYKPGRHNLGNTRMRSVGHENPGSRELKRREKPQQSPAIEHGRRSNVLGDKLHIKGSSVKSNKK

SEQ ID NO: 74861 - DNA, 900 bp, Artificial Sequence
  derived and/or modified sequence
atgttaaaggaagtgctgcagcgcgaggggaagagttacaagtcagagaccctgatgtacatcaaaaaggccagagccagcgaaaataagttgagcgagagcattttagcgcaccgcgaaaacatgcgacagatgatccggtcattcagcgagccattcggtcgggatttactcagtatcagtgatggacgcggaagggctcataacaggaggggacacaacgacggcgaggacagccttacagctaccagttgttctctagttccctttggtgacttcggcggcatgcatacagacgtgagctcgtttcagaccatggaccagatggtcagtaacatgcgcaactacatgcaaaagctcgagcggaacttcgggcagctgtctgtagatccaaatggacattctttctgcagcagctctgtgatgacctacagcaagataggtgatgaaccccccaaggtgtttcaggcctctacacagacacgaagggcaccaggcggcataaaagagactaggaaggccatgcgagactctgattcaggactggagaagatggccatcggacatcatatccacgaccgagcacatgtgataaagaagtcaaagaacaagaagacaggcgacgaggaggtcaatcaggagtttatcaatatgaatgagtccgatgcccacgcctttgacgaagagtggcagtcagaggttcttaaatacaaaccgggccgtcacaatcttggcaatacccgaatgagatctgtcggccatgagaacccgggctcgcgggagctgaaaagaagagaaaaacctcaacaaagccccgccatcgaacatgggcggagatcgaacgtgctgggtgacaagttgcatattaaaggttcctctgttaagtccaacaagaagtag

SEQ ID NO: 74862 - DNA, 900 bp, Artificial Sequence
  derived and/or modified sequence
atgctgaaggaggtgctgcagcgggagggcaagagctacaagtctgagaccctgatgtacatcaagaaggcccgggccagcgagaacaagctgtctgagagcatcctggcccaccgggagaacatgaggcagatgatccgctccttcagcgagcccttcggccgggacctgctgagcatcagtgatggccggggccgggcccacaacagaagaggccacaatgatggagaggacagcctgacagccaccagctgcagcctggtgccctttggagactttggaggcatgcacacagatgtgagcagcttccagaccatggaccagatggtgagcaacatgaggaactacatgcagaagctggagaggaactttggccagctgtctgtggaccccaacggccacagcttctgcagcagctctgtgatgacctacagcaagattggagatgagccccccaaggtgttccaggccagcacccagacccggcgggcccctgggggcatcaaggagaccaggaaggccatgagggacagcgacagcggcctggagaagatggccatcggccaccacatccatgaccgggcccacgtgatcaagaagagcaagaacaagaagacaggagatgaggaggtgaaccaggagttcatcaacatgaatgaaagtgatgcccacgcctttgatgaggagtggcagagcgaggtgctgaagtacaagccaggccgccacaacctgggcaacaccaggatgaggtctgtgggccatgaaaatcctggcagccgggagctgaagaggcgggagaagccccagcagagccctgccatcgagcacggccgccgcagcaatgtgctgggggacaagctgcacatcaagggcagctctgtgaagagcaacaagaagtag

SEQ ID NO: 74863 - DNA, 1366 bp, Artificial Sequence
  derived and/or modified sequence
ccaatctgtccgcggctgccgccacccaagacagagccagaatgttcaggatgctgaacagcagttttgaggatgaccccttcttctcagaccatgcaagcaagaagagaatggcatgaaatatataaagtgttgagaggaaaaaaacccactgacctagaattctgtatcctgcaaaattatcctttaaaagtcaagaagaaatagactgtctcagacaaacaaaaatttggtgaatttgttgacagtagacctgccttgcaagaaatgttaaaagaagttcttcagagagaaggaaaatcatacaagtcagaaactctgatgtacattaaaaaagcaagagcatcagagaataagttaagtgagtccattcttgcacaccgagaaaatatgcgacagatgataagaagtttttctgaaccctttggaagagacttgctcagtatctctgatggtagagggagagctcataatcgtagaggacataatgatggtgaagattctttgactgcaacgagttgttctcttgtgccttttggcgattttggtggtatgcatacagatgtcagctctttccagacaatggaccaaatggtgtcaaatatgagaaactatatgcagaaattagaaagaaacttcggtcaactttcagtggatccaaatggacattcattttgttcttcctcagttatgacttattccaaaataggagatgaaccgccaaaggtttttcaggcctcaactcaaactcgtcgagctccaggaggaataaaggaaaccaggaaagcaatgagagattctgacagtggactagaaaaaatggctattggtcatcatatccatgaccgagctcatgtcattaaaaagtcaaagaacaagaagactggagatgaagaggtcaaccaggagttcatcaatatgaatgaaagtgatgctcatgcttttgatgaggagtggcaaagtgaggttttgaagtacaaaccaggacgacacaatctaggaaacactagaatgagaagtgttggccatgagaatcctggctcccgagaacttaaaagaagggagaaacctcaacaaagtccagccattgaacatggaaggagatcaaatgttttgggggacaaactccacatcaaaggctcatctgtgaaaagcaacaaaaaataaatagccatgcatttgatttgtttagttttgattgttttaacagttagtaatggtgctgggtaataagcataagaccaatctcttgctgttaaatcagttctgtccttggcaactttcttctgatatctgaatgttcatgaaggtcctagctttatattgtccctcttttaggaataaaattttgattttcaacaatgtg

SEQ ID NO: 74864 - DNA, 1372 bp, Artificial Sequence
  derived and/or modified sequence
gtttttccaatctgtccgcggctgccgccacccaagacagagccagaatgttcaggatgctgaacagcagttttgaggatgaccccttcttctcagaccatgcaagcaagaagagaatggcatgaaatatataaagtgttgagaggaaaaaaacccactgacctagaattctgtatcctgcaaaattatcctttaaaagtcaagaagaaatagactgtctcagacaaacaaaaatttggtgaatttgttgacagtagacctgccttgcaagaaatgttaaaagaagttcttcagagagaaggaaaatcatacaagtcagaaactctgatgtacattaaaaaagcaagagcatcagagaataagttaagtgagtccattcttgcacaccgagaaaatatgcgacagatgataagaagtttttctgaaccctttggaagagacttgctcagtatctctgatggtagagggagagctcataatcgtagaggacataatgatggtgaagattctttgactgcaacgagttgttctcttgtgccttttggcgattttggtggtatgcatacagatgtcagctctttccagacaatggaccaaatggtgtcaaatatgagaaactatatgcagaaattagaaagaaacttcggtcaactttcagtggatccaaatggacattcattttgttcttcctcagttatgacttattccaaaataggagatgaaccgccaaaggtttttcaggcctcaactcaaactcgtcgagctccaggaggaataaaggaaaccaggaaagcaatgagagattctgacagtggactagaaaaaatggctattggtcatcatatccatgaccgagctcatgtcattaaaaagtcaaagaacaagaagactggagatgaagaggtcaaccaggagttcatcaatatgaatgaaagtgatgctcatgcttttgatgaggagtggcaaagtgaggttttgaagtacaaaccaggacgacacaatctaggaaacactagaatgagaagtgttggccatgagaatcctggctcccgagaacttaaaagaagggagaaacctcaacaaagtccagccattgaacatggaaggagatcaaatgttttgggggacaaactccacatcaaaggctcatctgtgaaaagcaacaaaaaataaatagccatgcatttgatttgtttagttttgattgttttaacagttagtaatggtgctgggtaataagcataagaccaatctcttgctgttaaatcagttctgtccttggcaactttcttctgatatctgaatgttcatgaaggtcctagctttatattgtccctcttttaggaataaaattttgattttcaacaatgtg

SEQ ID NO: 74865 - DNA, 900 bp, Artificial Sequence
  derived and/or modified sequence
atgctgaaggaggtgctgcagcgggagggcaagagctacaagagcgagaccctcatgtatatcaagaaagctcgagctagcgaaaataaactatcagagtccatcctggcacaccgcgagaatatgcgtcaaatgatacggtccttcagcgagccgttcggccgtgacctgctctccatctcagacggtagagggcgggcacacaacaggagaggacacaacgatggggaggatagtctgactgcaactagttgcagcttggtccctttcggagatttcggaggcatgcacacggacgtttcctcctttcaaactatggatcaaatggtgtccaacatgcgcaattacatgcagaaattggaaagaaatttcgggcagctgtctgtcgatcccaatggacattcattctgttcttcatccgtgatgacgtattcaaaaataggagatgaaccacctaaagtttttcaggcgtctacacagactaggagagcaccaggcgggataaaagaaactcgtaaagccatgcgggattctgacagcggcctggaaaaaatggcgataggtcatcacattcatgacagggctcatgtcattaaaaagtcaaagaacaagaagactggggacgaagaagtgaaccaggagtttataaacatgaatgagtctgacgctcacgcatttgatgaagaatggcagagcgaggtgctcaaatacaaacccggcagacataatctgggaaatacgcgtatgcgcagcgttggccatgagaatcccggaagccgtgagctcaagcggcgggaaaaaccccagcaatccccagcaatcgaacatggacgacggtcaaacgtattaggagataaactacacataaagggttcctcggtgaagtctaacaaaaaatag

SEQ ID NO: 74866 - DNA, 900 bp, Artificial Sequence
  derived and/or modified sequence
atgctcaaggaggtgttgcagcgagaaggtaagtcctataagagtgaaacacttatgtacattaaaaaggccagagccagtgaaaataagctctcggagtcgatcttggcacacagggagaatatgcgacagatgatccggagtttctccgagccttttgggcgagatctgttaagtatctctgatggacggggaagggcacacaataggcgcggacataacgatggagaagattcactgactgccacaagttgcagcctggtgccctttggggactttgggggaatgcacaccgacgtttcttccttccagacaatggaccagatggtatctaatatgcgtaactatatgcagaagctggagcggaattttggacagctgtctgtggatcctaatgggcactcattttgcagctctagcgtcatgacatactccaagatcggagacgaaccccctaaggttttccaagcatcaacgcaaactcgcagagcccctgggggtatcaaagagacgaggaaagcaatgcgtgatagcgacagtggactggagaagatggcaatcgggcaccacatacacgatagagctcatgttattaagaagagcaaaaataagaaaacaggagatgaggaagttaatcaagaattcattaacatgaatgagtctgatgcccacgcctttgacgaagaatggcagtctgaggtcctgaaatacaagcctggacggcataaccttgggaatacccgcatgagaagtgtcggccatgagaatccaggctcgcgggagctcaaacgcagggagaaaccccagcagagccccgcaatcgagcacggacgcagatctaacgttctcggggataaactccatataaagggatcttctgtgaagtccaacaaaaaatag

SEQ ID NO: 74867 - DNA, 900 bp, Artificial Sequence
  derived and/or modified sequence
atgctgaaggaggtgctgcagagagagggcaagagctacaagagcgagaccctgatgtacatcaagaaggccagagccagcgagaacaagctgagcgagagcatcctggcccacagagagaacatgagacagatgatcagaagcttcagcgagcccttcggcagagacctgctgagcatcagcgacggcagaggcagagcccacaacagaagaggccacaacgacggcgaggacagcctgaccgccaccagctgcagcctggtgcccttcggcgacttcggcggcatgcacaccgacgtgagcagcttccagaccatggaccagatggtgagcaacatgagaaactacatgcagaagctggagagaaacttcggccagctgagcgtggaccccaacggccacagcttctgcagcagcagcgtgatgacctacagcaagatcggcgacgagccccccaaggtgttccaggccagcacccagaccagaagagcccccggcggcatcaaggagaccagaaaggccatgagagacagcgacagcggcctggagaagatggccatcggccaccacatccacgacagagcccacgtgatcaagaagagcaagaacaagaagaccggcgacgaggaggtgaaccaggagttcatcaacatgaacgagagcgacgcccacgccttcgacgaggagtggcagagcgaggtgctgaagtacaagcccggcagacacaacctgggcaacaccagaatgagaagcgtgggccacgagaaccccggcagcagagagctgaagagaagagagaagccccagcagagccccgccatcgagcacggcagaagaagcaacgtgctgggcgacaagctgcacatcaagggcagcagcgtgaagagcaacaagaagtag

SEQ ID NO: 74868 - protein, 200 aa, Artificial Sequence
  derived and/or modified sequence
MRQMIRSFSEPFGRDLLSISDGRGRAHNRRGHNDGEDSLTHTDVSSFQTMDQMVSNMRNYMQKLERNFIKETRKAMRDSDSGLEKMAIGHHIHDRAHVIKKSKNKKTGDEEVNQEFINMNESDAHAFDEEWQSEVLKYKPGRHNLGNTRMRSVGHENPGSRELKRREKPQQSPAIEHGRRSNVLGDKLHIKGSSVKSNKK

SEQ ID NO: 74869 - DNA, 603 bp, Artificial Sequence
  derived and/or modified sequence
atgcgacagatgatacgctccttcagcgaaccgtttggcagggacctgctgtctatctcagatggcaggggccgggcccacaacaggagaggccacaatgacggggaggattctctcacacacactgatgtcagctcgtttcagactatggaccagatggtgtcaaatatgcgaaattacatgcagaagttagaaagaaactttataaaagaaaccaggaaggccatgagagattccgactcggggcttgaaaaaatggcaataggccaccacattcatgatcgtgctcacgtgattaaaaagagcaagaataaaaagaccggcgacgaggaggttaaccaagaattcataaacatgaatgaaagtgacgcacatgcatttgacgaggagtggcagtctgaggtccttaagtacaagcccggcaggcacaacctgggtaacactaggatgcgctcggtaggacatgagaatcctggcagtagagagttgaagagacgggagaaacctcagcagtcccctgcaattgagcacggcaggaggagcaatgtgttaggagacaagctccatatcaagggatcctcggtgaagagcaataagaagtag

SEQ ID NO: 74870 - DNA, 603 bp, Artificial Sequence
  derived and/or modified sequence
atgaggcagatgatccgctccttcagcgagcccttcggccgggacctgctgagcatcagtgatggccggggccgggcccacaacagaagaggccacaatgatggagaggacagcctgacccacacagatgtgagcagcttccagaccatggaccagatggtgagcaacatgaggaactacatgcagaagctggagaggaacttcatcaaggagaccaggaaggccatgagggacagcgacagcggcctggagaagatggccatcggccaccacatccatgaccgggcccacgtgatcaagaagagcaagaacaagaagacaggagatgaggaggtgaaccaggagttcatcaacatgaatgaaagtgatgcccacgcctttgatgaggagtggcagagcgaggtgctgaagtacaagccaggccgccacaacctgggcaacaccaggatgaggtctgtgggccacgagaaccctggcagccgggagctgaagagaagagagaagccccagcagagccctgccattgaacatggaagaagaagcaatgtgctgggggacaagctgcacatcaagggcagctctgtgaagagcaacaagaagtag

SEQ ID NO: 74871 - DNA, 603 bp, Artificial Sequence
  derived and/or modified sequence
atgcggcagatgatccggagcttcagcgagcccttcggccgggacctgctgtctatatctgatggccgcggccgtgctcataatagaagagggcataatgatggggaggactctctgacccatacagatgtgagcagttttcaaaccatggaccagatggtgtctaatatgaggaactatatgcaaaaattggagcggaatttcattaaggaaacgcgcaaagctatgcgggattcggatagcggactggaaaaaatggctattggccaccatatacatgatcgggctcatgtgataaaaaagtccaaaaacaagaagacgggcgacgaggaggttaatcaggagttcatcaacatgaacgagtctgacgcgcatgcgttcgacgaagagtggcaatccgaggtcctgaagtataaaccgggaaggcacaacctgggaaatacccgcatgcggagcgtgggacacgaaaatcctggatcacgggaactcaaacgccgcgagaagccccaacagtccccggccatcgaacacggcaggaggagcaacgtcttgggggacaaactgcacatcaagggttcttccgtgaagagcaacaagaagtag

SEQ ID NO: 74872 - DNA, 603 bp, Artificial Sequence
  derived and/or modified sequence
atgagacaaatgatccgaagcttttctgagccttttggaagggatctgctgtctatctcagatggacgtggcagagctcacaatcgtagaggccacaatgacggagaagattcattaacccatacggatgtcagctccttccagacaatggaccaaatggtgtcgaacatgcgtaactatatgcaaaagcttgaacgcaatttcatcaaggaaacccgcaaagcaatgcgcgactctgactccgggcttgagaagatggctatcggtcaccatatacatgaccgcgcacatgtcattaaaaagtcaaaaaataagaagactggggatgaagaggtaaaccaggaatttatcaacatgaacgagtccgacgctcatgcctttgatgaggagtggcagagcgaggtgttgaaatacaagccgggacggcataatctgggcaacacaaggatgagatcagtgggccacgagaacccaggaagtcgggaacttaagcgaagagagaaaccccagcaatcccccgctatagagcacgggaggcgatccaacgtgttgggcgataagctgcatatcaaaggcagtagcgtcaagtcgaacaaaaagtag

SEQ ID NO: 74873 - DNA, 603 bp, Artificial Sequence
  derived and/or modified sequence
atgagacagatgatcagaagcttcagcgagcccttcggcagagacctgctgagcatcagcgacggcagaggcagagcccacaacagaagaggccacaacgacggcgaggacagcctgacccacaccgacgtgagcagcttccagaccatggaccagatggtgagcaacatgagaaactacatgcagaagctggagagaaacttcatcaaggagaccagaaaggccatgagagacagcgacagcggcctggagaagatggccatcggccaccacatccacgacagagcccacgtgatcaagaagagcaagaacaagaagaccggcgacgaggaggtgaaccaggagttcatcaacatgaacgagagcgacgcccacgccttcgacgaggagtggcagagcgaggtgctgaagtacaagcccggcagacacaacctgggcaacaccagaatgagaagcgtgggccacgagaaccccggcagcagagagctgaagagaagagagaagccccagcagagccccgccatcgagcacggcagaagaagcaacgtgctgggcgacaagctgcacatcaagggcagcagcgtgaagagcaacaagaagtag

SEQ ID NO: 74874 - protein, 226 aa, Artificial Sequence
  derived and/or modified sequence
MSRYGRYGGETKVYVGNLGTGAGKGELERAFSYYGPLRTVWIARNPPGFAFVEFEDPRDAEDAVRGLDGKVICGSRVRVELSTGMPRRSRFDRPPARRPFDPNDRCYECGEKGHYAYDCHRYSRRRRSRSRSRSHSRSRGRRYSRSRSRSRGRRSRSASPRRSRSISLRRSRSASLRRSRSGSIKGSRYFQSPSRSRSRSRSISRPRSSRSPSGSPRRSASPERMD

SEQ ID NO: 74875 - protein, 130 aa, Artificial Sequence
  derived and/or modified sequence
MDHLNEATQGKEHSEMSNNVSDPKGPPAKIARLEQNGSPLGRGRLGSTGAKMQGVPLKHSGHLMKTNLRKGTMLPVFCVVEHYENAIEYDCKEEHAEFVLVRKDMLFNQLIEMALLSLGYSHSSAAQAKG

SEQ ID NO: 74876 - protein, 795 aa, Artificial Sequence
  derived and/or modified sequence
MDHLNEATQGKEHSEMSNNVSDPKGPPAKIARLEQNGSPLGRGRLGSTGAKMQGVPLKHSGHLMKTNLRKGTMLPVFCVVEHYENAIEYDCKEEHAEFVLVRKDMLFNQLIEMALLSLGYSHSSAAQAKGLIQVGKWNPVPLSYVTDAPDATVADMLQDVYHVVTLKIQLHSCPKLEDLPPEQWSHTTVRNALKDLLKDMNQSSLAKECPLSQSMISSIVNSTYYANVSAAKCQEFGRWYKHFKKTKDMMVEMDSLSELSQQGANHVNFGQQPVPGNTAEQPPSPAQLSHGSQPSVRTPLPNLHPGLVSTPISPQLVNQQLVMAQLLNQQYAVNRLLAQQSLNQQYLNHPPPVSRSMNKPLEQQVSTNTEVSSEIYQWVRDELKRAGISQAVFARVAFNRTQGLLSEILRKEEDPKTASQSLLVNLRAMQNFLQLPEAERDRIYQDERERSLNAASAMGPAPLISTPPSRPPQVKTATIATERNGKPENNTMNINASIYDEIQQEMKRAKVSQALFAKVAATKSQGWLCELLRWKEDPSPENRTLWENLSMIRRFLSLPQPERDAIYEQESNAVHHHGDRPPHIIHVPAEQIQSPSPTTLGKGESRGVFLPGLPTPAPWLGAAPQQQQQQQQQQQQQQQAPPPPQPQQQPQTGPRLPPRQPTVASPAESDEENRQKTRPRTKISVEALGILQSFIQDVGLYPDEEAIQTLSAQLDLPKYTIIKFFQNQRYYLKHHGKLKDNSGLEVDVAEYKEEELLKDLEESVQDKNTNTLFSVKLEEELSVEGNTDINTDLKD

SEQ ID NO: 74877 - DNA, 2388 bp, Artificial Sequence
  derived and/or modified sequence
atggatcatttgaatgaggccactcagggcaaagagcacagcgaaatgtcaaacaacgtttctgaccccaaaggaccccccgcaaaaattgcaagactcgagcagaacggatctcctctcggtcgcggtagactgggaagcactggagctaagatgcagggagttccattaaagcatagtggccatctcatgaagacaaacctgaggaaaggtacaatgctccccgtgttctgcgttgtcgagcactacgagaatgctatagaatacgattgtaaagaggagcacgcagagttcgtccttgtgcggaaggatatgctctttaatcagctgatcgagatggcgctgctctctttggggtacagtcatagctctgcagcccaggctaaaggtctgatccaggtcggaaagtggaatccagtgcccctgagttacgtaaccgatgctccagatgcaaccgtggccgacatgctccaggatgtctatcacgtggtaactctgaagatccaactccatagttgccctaagcttgaggacctccctccagagcaatggagccacacgacagtgcgcaatgccctgaaggacctgttaaaagatatgaatcaatcgagcttagccaaagagtgtcctctctcccagtcaatgatttcttccattgtgaactcaacttactatgccaatgtttcagcagccaagtgtcaggagttcggccgatggtataaacatttcaaaaagacaaaggacatgatggtggagatggactcgctgagtgagctgagtcaacagggcgctaatcatgtgaacttcggtcagcagcctgtgccgggaaacactgcagagcagcctccgtcacctgcacaactcagccacggttcgcagccatccgtacgcaccccacttccaaacctgcaccccggcctggtttctactccaatatcgccgcagctagttaatcagcaactggtcatggctcaactgctgaatcaacagtatgccgtgaacagactcctggcacaacaatccctgaaccagcagtatctgaaccaccctcctcccgtgagtaggagcatgaataagccgctggaacaacaggtcagcacgaacaccgaggtgtcttctgagatttaccaatgggtgcgagacgaactgaaacgggccgggatcagccaggccgtgttcgcacgggtggcatttaataggacgcagggactcctctccgaaattctgagaaaagaggaggatccgaagacggcatcccaaagcctgctcgttaatttacgggcaatgcagaatttcctgcagttgcccgaagctgagcgggataggatataccaggacgaacgcgaaaggtctctcaacgctgcatccgccatgggcccagcgccgctgatctccacccccccctctcggcccccccaggtaaaaacggcgaccatcgccaccgagagaaacggcaagcccgaaaacaacacaatgaatatcaatgcaagcatctatgacgagattcagcaggaaatgaagcgggcaaaggtctcccaggcattattcgcgaaagtcgccgccactaagtcacaggggtggctgtgcgaattgttaagatggaaggaggacccatcccccgagaacagaaccttgtgggagaacctgagtatgatccgacggtttttgtcccttccccagcctgaacgggatgccatttatgaacaggagagtaacgcggtgcaccaccatggagaccgccctccgcacatcatacatgtgcctgccgaacagattcaatctccttctccaacaaccttggggaagggtgagtctaggggggtctttctccccgggctgcctactccggcgccgtggctcggcgctgcgccccagcagcaacagcagcagcagcagcagcagcagcaacagcagcaagcacctccgccaccccagcctcaacagcagccccagactgggccccgtttgcctccaaggcagccaactgtagcttctcctgccgagtctgatgaggaaaacaggcagaagacacgtccacgtacaaaaatcagtgtggaggctctcgggatcctgcaaagctttatccaggacgtaggcctctaccctgatgaggaggctattcagaccctgtctgcccagctcgatctacccaaatatactattatcaagttctttcaaaatcaacggtactaccttaaacaccacggtaagctgaaggacaacagcggcctcgaagtagacgttgccgaatataaggaggaggagctgctgaaggatctcgaggagtctgtgcaggataaaaatactaacaccttgttctccgtgaaattagaagaggagctgagtgtagaggggaacacggatatcaacacagacctcaaagattag

SEQ ID NO: 74878 - DNA, 2388 bp, Artificial Sequence
  derived and/or modified sequence
atggaccacctgaatgaggccacccagggcaaggagcacagcgagatgagcaacaacgtgtctgaccccaagggccccccagccaagatcgcccggctggagcagaatggcagccccctgggccggggccgcctgggcagcactggagccaagatgcagggcgtgcccctgaagcacagcggccacctgatgaagaccaacctgaggaagggcaccatgctgcctgtgttctgtgtggtggagcactatgaaaatgccattgaatatgactgcaaggaggagcacgccgagtttgtgctggtgaggaaggacatgctgttcaaccagctgattgagatggccctgctgagcctgggctacagccacagcagcgctgcccaggccaagggcctcatccaggtgggcaagtggaaccctgtgcccctgtcctatgtgacagatgccccagatgccaccgtggccgacatgctgcaggatgtgtaccacgtggtgaccctgaagatccagctgcacagctgccccaagctggaggacctgcccccagagcagtggagccacaccaccgtgagaaatgccctgaaggacctgctgaaggacatgaaccagagcagcctggccaaggagtgccccctgagccagagcatgatcagcagcatcgtgaacagcacctactatgccaacgtgtctgctgccaagtgccaggagtttggccgctggtacaagcacttcaagaagaccaaggacatgatggtggagatggacagcctgtctgagctgagccagcagggcgccaaccacgtgaactttggccagcagcctgtgcccggcaacacagctgagcagccccccagccctgcccagctgagccacggcagccagcccagcgtgaggacccccctgcccaacctgcaccctggcctggtgtccacccccatcagcccccagctggtgaaccagcagctggtgatggcccagctgctgaaccagcagtatgctgtgaaccggctgctggcccagcagagcctgaaccagcagtacctgaaccaccccccacctgtgagccgctccatgaacaagcccctggagcagcaggtgtccaccaacacagaggtgtcctctgagatctaccagtgggtgagagatgagctgaagagagctggcatcagccaggccgtgtttgcccgggtggccttcaacagaacccagggcctgctgtctgagatcctgaggaaggaggaggaccccaagacagccagccagagcctgctggtgaacctgcgggccatgcagaacttcctgcagctgcctgaggccgagcgggaccgcatctaccaggatgagcgggagaggagcctgaatgctgccagcgccatgggccctgcccccctcatcagcaccccacccagcaggcctccccaggtgaagacagccaccatcgccacagaaagaaatggcaagccagagaacaacaccatgaacatcaatgccagcatctatgatgagatccagcaggagatgaagagggccaaggtgtcccaggccctgtttgccaaggtggccgccaccaagagccagggctggctgtgtgagctgctgcgctggaaggaggaccccagcccagaaaatagaaccctgtgggagaacctgtccatgatccgccgcttcctgagcctgccccagcctgagagagatgccatctatgagcaggagagcaatgctgtgcaccaccacggggacaggcctccccacatcatccacgtgcctgctgagcagatccagagccccagccccaccaccctgggcaagggggagagcagaggagtcttcctgcccggcctgcccaccccagccccctggctgggcgccgccccccagcagcagcagcagcagcagcagcagcagcagcagcagcagcaggcccctcctccaccccagccccagcagcagccccagacaggcccccggctgcccccccggcagcccaccgtggccagccctgctgagagtgatgaggagaaccggcagaagacccggcccaggaccaagatctctgtggaggccctgggcatcctgcagagcttcatccaggatgtgggcctgtacccagatgaggaggccatccagaccctgagcgcccagctggacctgcccaagtacaccatcatcaagttcttccagaaccagcgctactacctgaagcaccacggcaagctgaaggacaacagcggcctggaggtggatgtggccgagtacaaggaggaggagctgctgaaggacctggaggagagcgtgcaggacaagaacaccaacaccctcttctctgtgaagctggaggaggagctgtctgtggagggcaacacagacatcaacacagacctgaaggactag

SEQ ID NO: 74879 - DNA, 2388 bp, Artificial Sequence
  derived and/or modified sequence
atggaccacctgaacgaggccacccagggcaaggagcacagcgagatgtctaataatgtctccgaccctaagggacccccggctaaaatcgcccggctcgagcagaacgggtcaccgctgggcagggggcggctcggttcaaccggggctaagatgcagggcgttcctctgaaacattcggggcacctgatgaaaaccaatttaaggaagggcacgatgctgcccgtcttctgcgtagttgagcactatgaaaacgccattgagtatgactgcaaagaggaacacgccgaatttgttctcgtgcggaaagatatgctttttaaccagcttatcgagatggctctactgagcctgggatactcccattcttccgcggcacaggccaaagggcttatccaggtcggaaagtggaaccctgtgcccctgtcctatgtgactgatgcacctgatgcaactgtagcagacatgctgcaggatgtttatcacgttgtcactctgaagatccaattgcatagttgccctaagcttgaagacctccctcctgaacaatggagccatacaactgtccggaatgccttgaaggatcttctgaaggatatgaatcagtcatccctggccaaagaatgtccattgagtcagtcaatgatatcctctatcgtcaattccacctattacgctaatgtttcggccgcaaagtgccaggaattcgggcgatggtataaacactttaagaagactaaagacatgatggtggagatggattctttgtcagaactttcccagcagggggcgaaccacgtaaattttggccagcagccggtcccaggaaatactgccgagcagccacctagcccagcacaattatcacacgggagccagccgtccgtgcggacgccactgcctaacctccacccagggctggtgtccacacctatctcaccacagctggttaatcagcagctggttatggcccaactactcaaccagcagtatgcggttaatcgccttctggcacagcagagcctcaaccagcagtacttgaatcatccacctccggtgtctcgttcaatgaataagccgttggagcagcaagtgagtacaaacactgaagtaagctctgagatctaccagtgggttcgagacgagttgaagagggcagggatttctcaggctgtcttcgcccgagtggcctttaacagaacacagggcctattgtcagaaatactccgaaaggaggaggatcctaaaacagcttcacagtcccttctggtgaacttgagggccatgcagaactttctgcagttgcctgaagcagaaagagatcgaatctaccaagatgaaagagaacgctcacttaatgcagcctcagccatgggccctgcccccctgatttccacaccccctagccgacccccccaggtgaaaaccgctaccatcgctacagagagaaacggaaaaccggaaaacaataccatgaatatcaatgcctctatctacgatgagatccagcaggagatgaaaagagctaaggtgagtcaagcgctgttcgcgaaagtggctgccacaaagtcccaaggctggctttgtgagctcctgaggtggaaggaggacccttcgccagagaaccgcacgttgtgggaaaatctgtcgatgataagacggttcctgtccctgccccagccagagcgcgacgcgatctacgagcaagaatcaaacgctgtccaccaccatggggaccgccctccccatattatacacgttcccgcagaacagatacagtcaccttctccaactacacttggcaagggtgagtctaggggcgtgttcctccctggattaccgactccagctccctggctcggagccgccccccagcagcagcagcagcagcaacaacagcagcaacagcagcagcaggcaccacctccacctcagccccagcaacaaccgcaaaccggaccacgcttacctcctagacaacctaccgtcgcttcccccgcagagtccgatgaggaaaacaggcagaaaaccaggcccaggacaaagataagcgttgaggctctcggcatcctacagtctttcattcaggacgtagggctgtatccggacgaggaggcaatccagactctctccgctcagcttgatctccccaaatacacaatcatcaaatttttccaaaaccaacggtactatcttaaacaccacggcaagcttaaagacaatagtgggctggaagtcgacgtggccgagtacaaagaggaggaactcctgaaggacctggaagagagtgttcaggataagaacaccaatacactgttcagcgtgaaactcgaagaagagctgtccgtggaggggaatacagacatcaacacagacctcaaagactag

SEQ ID NO: 74880 - DNA, 2388 bp, Artificial Sequence
  derived and/or modified sequence
atggaccacctcaatgaggctacacagggcaaagagcactctgaaatgtcaaataacgtctccgaccctaagggacctccggctaaaattgcccgtcttgagcagaacggttcccccctcgggaggggtagactgggctccactggcgctaagatgcagggcgtcccccttaagcatagtgggcatctgatgaagacgaacttgcggaagggaacaatgttacctgtgttttgcgtggtggaacactacgagaatgcaatagaatatgattgcaaagaggagcacgcagaatttgtgctagtgcgcaaagatatgctctttaaccagctcatcgaaatggctctgttgagccttggatattcccattccagcgccgctcaggccaagggactcatccaggtgggcaagtggaatcctgttcccctgagctacgtgaccgatgcccctgacgcgacagtagcagacatgctccaggacgtataccacgttgtcaccctcaaaatccagctgcactcctgtcccaaattggaggacctgcctcccgagcaatggtctcacaccacggttcgaaacgcgctcaaggacctcctgaaagacatgaatcaatcaagtttggctaaggagtgtcctctgtcccagagcatgatctcttctattgttaacagcacatattacgcaaacgtgtctgccgctaaatgtcaggaattcggtcgctggtacaagcacttcaagaagactaaagacatgatggtagagatggattcactgtcagaactgagccagcagggggcaaaccacgtgaatttcggccagcagccggtgcccggaaatactgccgagcaacctccttctcccgcacagctgtctcatggcagccagccatctgtccggacccctctccccaacttgcatcccggtctggtgtctacccccatttcaccccagttagtgaaccaacaactagttatggcgcagcttttaaatcaacaatatgcagttaaccgtctgttagcacaacaaagcctaaatcagcagtaccttaaccacccaccgcctgtgagtagatctatgaataagcccctggagcagcaggtttccaccaatactgaggtctcttccgagatctaccagtgggtgagggatgagctgaaaagagccggaatctctcaggccgtcttcgcacgggtggctttcaacagaacacaaggattattatccgagatcttgcggaaggaagaggaccccaagactgcaagccagtcgcttcttgttaatctcagggcaatgcaaaactttctgcagctcccagaagctgaacgcgacaggatctatcaggatgagagagaacgcagtctgaatgctgcatctgctatggggccagctccactgattagtacaccaccaagcaggcctcctcaggttaagacagccaccatcgctaccgaacgtaacggcaagccagaaaacaatactatgaatataaatgcctctatctatgatgagatccagcaagaaatgaagagggccaaggtcagtcaggcgttatttgcgaaagtggcagccaccaaatctcagggatggctgtgcgagttgttgcgttggaaagaggacccttctcccgagaatagaacactatgggagaacctttccatgattcggagattcctaagcctccctcagccagaaagagatgctatctatgaacaggagtccaatgccgtccaccaccacggtgatcgacctcctcacataatccatgttcccgctgagcagattcagtcccctagcccgacaaccctggggaagggcgagtctcgcggagtctttctgccaggcttacctactcctgccccatggctgggggctgcgcctcagcaacagcagcaacagcaacagcagcagcagcagcaacagcaggccccacctccgcctcaaccccaacagcagccccagactggccctaggctgccccctaggcagccaacagtggcatcgcctgcggaatcggatgaagagaaccggcaaaagacaagaccccgaaccaagattagtgttgaggcactgggaattttgcaatccttcatccaggatgtgggattgtacccagacgaggaggcaatccagacgctgagtgcccagctggacctgccgaagtatacaatcatcaaattctttcagaatcagcgctattacctgaagcaccacggcaaacttaaggataattccggattggaagtggacgtcgcagagtataaggaggaagaactgctcaaagacctcgaagaatctgtgcaggataaaaacaccaatacattgtttagcgtaaaacttgaagaggaactgtccgtggagggaaatacagacattaatacggacctgaaagattag

SEQ ID NO: 74881 - DNA, 3781 bp, Artificial Sequence
  derived and/or modified sequence
cttctctcctcacttgctgggaccccagacgctcacagccccgcgtcaatgggcagggagagggtccttgcggctgttgtcagcgagggcagaatcaaaagtggcattttagtgcctttccggggcttttctcgcgaccccctgccccccaccctcgctgtcccccgctagatgccctcgttgggggtgcgaggctgtggggaaaagtttaaggtttgttaatattagtcgcgattgttggcgaggggggtgggggtgattggaagggaggcgaggtggccttcccaatgcgcgttattcggggttattgaagaataatattgcaagtgacagccagaagtagactttctgtcctcacaccgaagaacccgagtgagcaggagggagggagagacgcgaagagaccttttttcctttttggagaccttgtccgcagtgatttttttttttttaagagaatcctcagtcaccacgtcgtttccccagcaccatcacagtgtacagctcataacgggttttgctttgtttttacgatttccccccaacgaatcacttgtcagatcaattttatcttcttcctcctccctgcttcccactctcccctcctccccatcgcaaaccctgttctctgaggttagacattttacaaacccctatatgttggttttcgaattgtgattttttttttaaacccctttctcatggctactcttctagacgtttatttctgcccttcccccgcttaggggggcgggggtaggggaaaggaaaataatacaatttcaggggaagtcgccttcaggtctgctgcttttttatttttttttttttaattaaaaaaaaaaaggacatagaaaacatcagtcttgaacttctcttcaagaacccgggctgcaaaggaaatctcctttgtttttgttatttatgtgctgtcaagttttgaagtggtgatctttagacagtgactgagtatggatcatttgaacgaggcaactcaggggaaagaacattcagaaatgtctaacaatgtgagtgatccgaagggtccaccagccaagattgcccgcctggagcagaacgggagcccgctaggaagaggaaggcttgggagtacaggtgcaaaaatgcagggagtgcctttaaaacactcgggccatctgatgaaaaccaaccttaggaaaggaaccatgctgccagttttctgtgtggtggaacattatgaaaacgccattgaatatgattgcaaggaggagcatgcagaatttgtgctggtgagaaaggatatgcttttcaaccagctgatcgaaatggcattgctgtctctaggttattcacatagctctgctgcccaggccaaagggctaatccaggttggaaagtggaatccagttccactgtcttacgtgacagatgcccctgatgctacagtagcagatatgcttcaagatgtgtatcatgtggtcacattgaaaattcagttacacagttgccccaaactagaagacttgcctcccgaacaatggtcgcacaccacagtgaggaatgctctgaaggacttactgaaagatatgaatcagagttcattggccaaggagtgccccctttcacagagtatgatttcttccattgtgaacagtacttactatgcaaatgtctcagcagcaaaatgtcaagaatttggaaggtggtacaaacatttcaagaagacaaaagatatgatggttgaaatggatagtctttctgagctatcccagcaaggcgccaatcatgtcaattttggccagcaaccagttccagggaacacagccgagcagcctccatcccctgcgcagctctcccatggcagccagccctctgtccggacacctcttccaaacctgcaccctgggctcgtatcaacacctatcagtcctcaattggtcaaccagcagctggtgatggctcagctgctgaaccagcagtatgcagtgaatagacttttagcccagcagtccttaaaccaacaatacttgaaccaccctccccctgtcagtagatctatgaataagcctttggagcaacaggtttcgaccaacacagaggtgtcttccgaaatctaccagtgggtacgcgatgaactgaaacgagcaggaatctcccaggcggtatttgcacgtgtggcttttaacagaactcagggcttgctttcagaaatcctccgaaaggaagaggaccccaagactgcatcccagtctttgctggtaaaccttcgggctatgcagaatttcttgcagttaccggaagctgaaagagaccgaatataccaggacgaaagggaaaggagcttgaatgctgcctcggccatgggtcctgcccccctcatcagcacaccacccagccgtcctccccaggtgaaaacagctactattgccactgaaaggaatgggaaaccagagaacaataccatgaacattaatgcttccatttatgatgagattcagcaggaaatgaagcgtgctaaagtgtctcaagcactgtttgcaaaggttgcagcaaccaaaagccagggatggttgtgcgagctgttacgctggaaagaagatccttctccagaaaacagaaccctgtgggagaacctctccatgatccgaaggttcctcagtcttcctcagccagaacgtgatgccatttatgaacaggagagcaacgcggtgcatcaccatggcgacaggccgccccacattatccatgttccagcagagcagattcagagcccctctcccaccacccttgggaaaggagagtctagaggcgttttcttaccaggcctgccgacccctgcaccatggctcggtgctgctcctcagcaacagcagcagcaacagcaacagcagcagcagcagcagcaggcaccgccgcctccacagccacagcagcagccacagacaggccctcggctccccccacggcaacccacggtggcctctccagcagagtcagatgaggaaaaccgacagaagacccggccacgaacaaaaatttcagtggaagccttgggaatcctccagagtttcatacaagacgtgggcctgtaccctgacgaagaggccatccagactctgtctgcccagctcgaccttcccaagtacaccatcatcaagttctttcagaaccagcggtactatctcaagcaccacggcaaactgaaggacaattccggtttagaggtcgatgtggcagaatataaagaagaggagctgctgaaggatttggaagagagtgtccaagataaaaatactaacacccttttttcagtgaaactagaagaagagctgtcagtggaaggaaacacagacattaatactgatttgaaagactgagataaaagtatttgtttcgttcaacagtgccactggtatttactaacaaaatgaaaagtccaccttgtcttctctcagaaaacctttgttgttcattgtttggccaatgaatcttcaaaaacttgcacaaacagaaaagttggaaaaggataatacagactgcactaaatgttttcctctgttttacaaactgcttggcagccccaggtgaagcatcaaggattgtttggtattaaaatttgtgttcacgggatgcaccaaagtgtgtaccccgtaagcatgaaaccagtgttttttgttttttttttagttcttattccggagcctcaaacaagcattataccttctgtgattatgatttcctctcctataattatttctgtagcactccacactgatctttggaaacttgccccttattt

SEQ ID NO: 74882 - DNA, 2388 bp, Artificial Sequence
  derived and/or modified sequence
atggaccacctgaacgaggccacccagggcaaggagcacagcgagatgagcaacaacgtgagcgaccccaagggcccccccgccaagatcgccagactggagcagaacggcagccccctgggcagaggcagactgggcagcaccggcgccaagatgcagggcgtgcccctgaagcacagcggccacctgatgaagaccaacctgagaaagggcaccatgctgcccgtgttctgcgtggtggagcactacgagaacgccatcgagtacgactgcaaggaggagcacgccgagttcgtgctggtgagaaaggacatgctgttcaaccagctgatcgagatggccctgctgagcctgggctacagccacagcagcgccgcccaggccaagggcctgatccaggtgggcaagtggaaccccgtgcccctgagctacgtgaccgacgcccccgacgccaccgtggccgacatgctgcaggacgtgtaccacgtggtgaccctgaagatccagctgcacagctgccccaagctggaggacctgccccccgagcagtggagccacaccaccgtgagaaacgccctgaaggacctgctgaaggacatgaaccagagcagcctggccaaggagtgccccctgagccagagcatgatcagcagcatcgtgaacagcacctactacgccaacgtgagcgccgccaagtgccaggagttcggcagatggtacaagcacttcaagaagaccaaggacatgatggtggagatggacagcctgagcgagctgagccagcagggcgccaaccacgtgaacttcggccagcagcccgtgcccggcaacaccgccgagcagccccccagccccgcccagctgagccacggcagccagcccagcgtgagaacccccctgcccaacctgcaccccggcctggtgagcacccccatcagcccccagctggtgaaccagcagctggtgatggcccagctgctgaaccagcagtacgccgtgaacagactgctggcccagcagagcctgaaccagcagtacctgaaccaccccccccccgtgagcagaagcatgaacaagcccctggagcagcaggtgagcaccaacaccgaggtgagcagcgagatctaccagtgggtgagagacgagctgaagagagccggcatcagccaggccgtgttcgccagagtggccttcaacagaacccagggcctgctgagcgagatcctgagaaaggaggaggaccccaagaccgccagccagagcctgctggtgaacctgagagccatgcagaacttcctgcagctgcccgaggccgagagagacagaatctaccaggacgagagagagagaagcctgaacgccgccagcgccatgggccccgcccccctgatcagcaccccccccagcagacccccccaggtgaagaccgccaccatcgccaccgagagaaacggcaagcccgagaacaacaccatgaacatcaacgccagcatctacgacgagatccagcaggagatgaagagagccaaggtgagccaggccctgttcgccaaggtggccgccaccaagagccagggctggctgtgcgagctgctgagatggaaggaggaccccagccccgagaacagaaccctgtgggagaacctgagcatgatcagaagattcctgagcctgccccagcccgagagagacgccatctacgagcaggagagcaacgccgtgcaccaccacggcgacagacccccccacatcatccacgtgcccgccgagcagatccagagccccagccccaccaccctgggcaagggcgagagcagaggcgtgttcctgcccggcctgcccacccccgccccctggctgggcgccgccccccagcagcagcagcagcagcagcagcagcagcagcagcagcagcaggcccccccccccccccagccccagcagcagccccagaccggccccagactgccccccagacagcccaccgtggccagccccgccgagagcgacgaggagaacagacagaagaccagacccagaaccaagatcagcgtggaggccctgggcatcctgcagagcttcatccaggacgtgggcctgtaccccgacgaggaggccatccagaccctgagcgcccagctggacctgcccaagtacaccatcatcaagttcttccagaaccagagatactacctgaagcaccacggcaagctgaaggacaacagcggcctggaggtggacgtggccgagtacaaggaggaggagctgctgaaggacctggaggagagcgtgcaggacaagaacaccaacaccctgttcagcgtgaagctggaggaggagctgagcgtggagggcaacaccgacatcaacaccgacctgaaggactag

SEQ ID NO: 74883 - protein, 714 aa, Artificial Sequence
  derived and/or modified sequence
MTQMSQVQELFHEAAQQDALAQPQPWWKTQLFMWEPVLFGTWDGVFTSCMINIFGVVLFLRTGWLVGNTGVLLGMFLVSFVILVALVTVLSGIGVGERSSIGSGGVYSMISSVLGGQTGGTIGLLYVFGQCVAGAMYITGFAESISDLLGLGNIWAVRGISVAVLLALLGINLAGVKWIIRLQLLLLFLLAVSTLDFVVGSFTHLDPEHGFIGYSPELLQNNTLPDYSPGESFFTVFGVFFPAATGVMAGFNMGGDLREPAASIPPGSLAAVGISWFLYIIFVFLLGAICTREALRYDFLIAEKVSLMGFLFLLGLYISSLASCMGGLYGAPRILQCIAQEKVIPALACLGQGKGPNKTPVAAICLTSLVTMAFVFVGQVNVLAPIVTINFMLTYVAVDYSYFSLSMCSCSLTPVPEPVLREGAEGLHCSEHLLLEKAPSYGSEGPAQRVLEGTLLEFTKDMDQLLQLTRKLESSQPRQGEGNRTPESQKRKSKKATKQTLQDSFLLDLKSPPSFPVEISDRLPAASWEGQESCWNKQTSKSEGTQPEGTYGEQLVPELCNQSESSGEDFFLKSRLQEQDVWRRSTSFYTHMCNPWVSLLGAVGSLLIMFVIQWVYTLVNMGVAAIVYFYIGRASPGLHLGSASNFSFFRWMRSLLLPSCRSLRSPQEQIILAPSLAKVDMEMTQLTQENADFATRDRYHHSSLVNREQLMPHY

SEQ ID NO: 74884 - protein, 375 aa, Artificial Sequence
  derived and/or modified sequence
MAGFNMGGDLREPAASIPPGSLAAVGISWFLYIIFVFLLGAICTREALRYDFLIAEKVSLMGFLFLLGLYISSLASCMGGLYGAPRILQCIAQEKVIPALACLGQGKGPNKTPVAAICLTSLVTMAFVFVGQVNVLAPIVTINFMLTYVAVDYSYFSLSMCSCSLTPVPEPVLREGAEGLHCSEHLLLEKAPSYGSEGPAQRVLEGTLLEFTKDMDQLLQLTRKLESSQPRQGEGNRTPESQKRKSKKATKQTLQDSFLLDLKSPPSFPVEISDRLPAASWEGQESCWNKQTSKSEGTQPEGTYGEQLVPELCNQSESSGEGDLRSPQEQIILAPSLAKVDMEMTQLTQENADFATRDRYHHSSLVNREQLMPHY

SEQ ID NO: 74885 - protein, 743 aa, Artificial Sequence
  derived and/or modified sequence
MLPLERTITYRDMSSFIQVKNHFNVVNVTCVSYRSTCFRDMRRFILDALAQPQPWWKTQLFMWEPVLFGTWDGVFTSCMINIFGVVLFLRTGWLVGNTGVLLGMFLVSFVILVALVTVLSGIGVGERSSIGSGGVYSMISSVLGGQTGGTIGLLYVFGQCVAGAMYITGFAESISDLLGLGNIWAVRGISVAVLLALLGINLAGVKWIIRLQLLLLFLLAVSTLDFVVGSFTHLDPEHGFIGYSPELLQNNTLPDYSPGESFFTVFGVFFPAATGVMAGFNMGGDLREPAASIPPGSLAAVGISWFLYIIFVFLLGAICTREALRYDFLIAEKVSLMGFLFLLGLYISSLASCMGGLYGAPRILQCIAQEKVIPALACLGQGKGPNKTPVAAICLTSLVTMAFVFVGQVNVLAPIVTINFMLTYVAVDYSYFSLSMCSCSLTPVPEPVLREGAEGLHCSEHLLLEKAPSYGSEGPAQRVLEGTLLEFTKDMDQLLQLTRKLESSQPRQGEGNRTPESQKRKSKKATKQTLQDSFLLDLKSPPSFPVEISDRLPAASWEGQESCWNKQTSKSEGTQPEGTYGEQLVPELCNQSESSGEDFFLKSRLQEQDVWRRSTSFYTHMCNPWVSLLGAVGSLLIMFVIQWVYTLVNMGVAAIVYFYIGRASPGLHLGSASNFSFFRWMRSLLLPSCRSLRSPQEQIILAPSLAKVDMEMTQLTQENADFATRDRYHHSSLVNREQLMPHY

SEQ ID NO: 74886 - protein, 515 aa, Artificial Sequence
  derived and/or modified sequence
MRRAAAGGLAVGQLPGEGPAGEEGAALGKAMRGGGCSPHSPSGCLSGVMAGFNMGGDLREPAASIPPGSLAAVGISWFLYIIFVFLLGAICTREALRYDFLIAEKVSLMGFLFLLGLYISSLASCMGGLYGAPRILQCIAQEKVIPALACLGQGKGPNKTPVAAICLTSLVTMAFVFVGQVNVLAPIVTINFMLTYVAVDYSYFSLSMCSCSLTPVPEPVLREGAEGLHCSEHLLLEKAPSYGSEGPAQRVLEGTLLEFTKDMDQLLQLTRKLESSQPRQGEGNRTPESQKRKSKKATKQTLQDSFLLDLKSPPSFPVEISDRLPAASWEGQESCWNKQTSKSEGTQPEGTYGEQLVPELCNQSESSGEDFFLKSRLQEQDVWRRSTSFYTHMCNPWVSLLGAVGSLLIMFVIQWVYTLVNMGVAAIVYFYIGRASPGLHLGSASNFSFFRWMRSLLLPSCRSLRSPQEQIILAPSLAKVDMEMTQLTQENADFATRDRYHHSSLVNREQLMPHY

SEQ ID NO: 74887 - DNA, 2145 bp, Artificial Sequence
  derived and/or modified sequence
atgacccagatgagccaggtgcaggagctgttccacgaggccgcccagcaggacgccctggcccagccccagccctggtggaagacccagctgttcatgtgggagcccgtgctgttcggcacctgggacggcgtgttcaccagctgcatgatcaacatcttcggcgtggtgctgttcctgagaaccggctggctggtgggcaacaccggcgtgctgctgggcatgttcctggtgagcttcgtgatcctggtggccctggtgaccgtgctgagcggcatcggcgtgggcgagagaagcagcatcggcagcggcggcgtgtacagcatgatcagcagcgtgctgggcggccagaccggcggcaccatcggcctgctgtacgtgttcggccagtgcgtggccggcgccatgtacatcaccggcttcgccgagagcatcagcgacctgctgggcctgggcaacatctgggccgtgagaggcatcagcgtggccgtgctgctggccctgctgggcatcaacctggccggcgtgaagtggatcatcagactgcagctgctgctgctgttcctgctggccgtgagcaccctggacttcgtggtgggcagcttcacccacctggaccccgagcacggcttcatcggctacagccccgagctgctgcagaacaacaccctgcccgactacagccccggcgagagcttcttcaccgtgttcggcgtgttcttccccgccgccaccggcgtgatggccggcttcaacatgggcggcgacctgagagagcccgccgccagcatcccccccggcagcctggccgccgtgggcatcagctggttcctgtacatcatcttcgtgttcctgctgggcgccatctgcaccagagaggccctgagatacgacttcctgatcgccgagaaggtgagcctgatgggcttcctgttcctgctgggcctgtacatcagcagcctggccagctgcatgggcggcctgtacggcgcccccagaatcctgcagtgcatcgcccaggagaaggtgatccccgccctggcctgcctgggccagggcaagggccccaacaagacccccgtggccgccatctgcctgaccagcctggtgaccatggccttcgtgttcgtgggccaggtgaacgtgctggcccccatcgtgaccatcaacttcatgctgacctacgtggccgtggactacagctacttcagcctgagcatgtgcagctgcagcctgacccccgtgcccgagcccgtgctgagagagggcgccgagggcctgcactgcagcgagcacctgctgctggagaaggcccccagctacggcagcgagggccccgcccagagagtgctggagggcaccctgctggagttcaccaaggacatggaccagctgctgcagctgaccagaaagctggagagcagccagcccagacagggcgagggcaacagaacccccgagagccagaagagaaagagcaagaaggccaccaagcagaccctgcaggacagcttcctgctggacctgaagagcccccccagcttccccgtggagatcagcgacagactgcccgccgccagctgggagggccaggagagctgctggaacaagcagaccagcaagagcgagggcacccagcccgagggcacctacggcgagcagctggtgcccgagctgtgcaaccagagcgagagcagcggcgaggacttcttcctgaagagcagactgcaggagcaggacgtgtggagaagaagcaccagcttctacacccacatgtgcaacccctgggtgagcctgctgggcgccgtgggcagcctgctgatcatgttcgtgatccagtgggtgtacaccctggtgaacatgggcgtggccgccatcgtgtacttctacatcggcagagccagccccggcctgcacctgggcagcgccagcaacttcagcttcttcagatggatgagaagcctgctgctgcccagctgcagaagcctgagaagcccccaggagcagatcatcctggcccccagcctggccaaggtggacatggagatgacccagctgacccaggagaacgccgacttcgccaccagagacagataccaccacagcagcctggtgaacagagagcagctgatgccccactactag

SEQ ID NO: 74888 - DNA, 2145 bp, Artificial Sequence
  derived and/or modified sequence
atgacccagatgtcccaggtgcaggagctgtttcatgaggcagctcagcaggatgcgctcgctcaaccccagccttggtggaagacccagctctttatgtgggaacccgtgttgtttggcacatgggacggtgtttttacctcttgtatgatcaacatctttggcgtagttctgtttcttcgcacagggtggcttgtgggcaacaccggagtgctcttgggaatgtttctggtctctttcgtcattctggtcgctctcgtgacagtgctttcgggtatcggggtgggcgagaggagcagcatcgggagtgggggtgtgtattccatgatatccagcgtgctcggcggccagactggcggtaccatcggactgttatacgtgtttgggcagtgtgtggctggcgctatgtacattactggcttcgccgagtccatctctgacttgttaggcctgggaaatatttgggcagtcagggggatttctgtggctgtgctgctcgcgctcctgggtatcaatctggctggagtgaaatggatcatcaggcttcagctactcctattgtttctgctggccgtgagcacccttgacttcgtggtgggcagttttacccatctggacccggagcacggcttcatcgggtactccccagagctgctgcagaataacacgctgcctgactacagccccggagaaagcttcttcacggtgtttggcgtcttcttccctgcagcgacaggggtcatggctggatttaatatgggaggggatctacgcgagcctgcagcatccatcccccccggttcgctggccgcagtgggtatcagttggttcctttacatcatcttcgttttcttgcttggagcaatttgtacccgcgaggcgctcaggtacgattttctgattgcggaaaaagtgtcattgatgggctttctgttcttgctgggcctgtacattagctccttggcaagctgcatgggcggattatatggcgcccccagaattctccagtgcattgcccaggaaaaagtcatccctgcgctggcctgcctgggacaggggaaggggcctaataaaacacccgtcgcagccatctgtctcacctctctggtgaccatggcctttgtgttcgtcggccaggttaatgtactggcacctatcgtgaccattaatttcatgctgacctacgttgccgtggactacagttacttctctctgtccatgtgttcttgttcactgactccggtcccggagccggtgctcagagagggagctgaaggcctgcattgcagcgagcatctccttctggaaaaagcaccctcttacggttcagaaggcccagcgcagagagtgctcgaagggactctcctggaatttaccaaagatatggaccaactgctgcagctcactcgtaagctggaatcgtcccaacctaggcagggcgaggggaaccgcacacctgagtctcaaaagcggaagagcaagaaagctaccaaacagacattgcaggactccttcctactggatctgaaatctccaccaagcttccccgttgagataagtgatagactccctgcagctagctgggagggtcaagagtcatgctggaacaagcagacctctaaaagtgaaggaactcaacctgaaggcacgtatggggagcagctggtgcctgaactgtgtaaccagagcgagtcttcaggggaggacttttttctcaaatcgaggctccaggagcaggatgtgtggcggagaagtacctccttttacacccacatgtgtaatccatgggtctctctgcttggcgctgtgggatctcttctcattatgtttgtgattcagtgggtttacacactggtcaatatgggagtcgctgcaatcgtgtatttttatattggtcgggcgagccccgggctccacttgggctcagcttcaaatttttcattttttcggtggatgcgcagtctattactcccttcttgcagatcattgcggagtccgcaggagcaaatcatccttgctccttcactggccaaggtggacatggagatgacccagcttacccaggagaatgctgactttgctacgcgtgaccgatatcaccacagttcccttgtgaaccgcgagcagctcatgcctcattactag

SEQ ID NO: 74889 - DNA, 2145 bp, Artificial Sequence
  derived and/or modified sequence
atgacccaaatgtcgcaggtgcaggaactgttccacgaggctgcacaacaggatgcattggcccagccacagccatggtggaaaactcaattgtttatgtgggaacccgtcctcttcggcacctgggatggtgtgttcacttcttgcatgattaatatctttggtgtcgtgcttttcctcagaaccggctggttggtggggaataccggcgtgctcttaggtatgttcctggtctcttttgtcattctggtggccttggtaaccgtactgtccgggattggcgtgggagaaagaagttcaatcggttctggtggggtctacagcatgatttcgtcggttctggggggccagaccggaggaacaatcgggttgctgtacgtatttggacagtgtgtcgccggggctatgtacatcactggtttcgccgagtctatctctgatctgctcggattggggaacatatgggctgtaaggggtatctcagttgctgtgcttctcgcacttttaggcatcaatctggccggcgtgaagtggatcataagactccagctgcttctcctattcttgctagcagtgtcaaccttagactttgtcgtgggatcctttacgcacttagaccctgaacatgggttcatcggatattccccggagctgctccagaataacacattgccggattactcgcctggggaatctttttttacagtgtttggcgtgtttttccctgctgctacgggggtgatggcggggttcaacatgggcggggatctgagggaacctgccgcaagtattcctccaggttccctcgccgcagtcggaatatcctggtttctctacatcattttcgtcttccttctgggcgcgatctgcactagagaggctctgcgttatgactttctgatcgccgagaaagtgagtctgatgggatttctgtttttgctcggcctgtatatcagcagcttagccagctgcatgggggggctttacggggcgcccaggatcctccaatgcatcgcccaggagaaagtaattccagcactagcttgtctgggccagggcaaaggtcccaataaaaccccagtagccgccatctgtttaacttctctggtgacgatggcttttgtgttcgtgggacaggttaatgtcttggctcctatcgtaaccattaattttatgctgacttatgtggccgtagattatagctatttttccctgtctatgtgcagctgcagcctcacaccagtgcccgaaccggtgctgcgggagggcgctgagggcctccattgcagcgagcatctgctgctggaaaaggccccttcgtacggttccgagggacccgcacagagggtgcttgagggaacgctcctggaattcactaaagatatggatcagctgctacagttgactaggaaactcgagtcgtcccaacctcgccagggcgagggaaataggaccccggaaagccagaagaggaaatccaagaaggctacgaagcagaccctgcaagacagctttctgttggaccttaagtccccaccatcatttccagtggagatatcggaccgcctgcctgcagcaagctgggagggtcaagaatcatgctggaacaagcaaaccagtaaatccgaggggactcagccagagggcacctacggcgagcaacttgtacccgagttgtgtaatcagagtgagagcagcggcgaagacttcttccttaaaagcaggctgcaggaacaggacgtctggaggagatctacttctttctatacccacatgtgtaacccctgggtctccttgctgggggccgtgggcagcctactgatcatgttcgtgattcagtgggtgtacaccctagtgaatatgggagttgcggcgattgtctacttctatataggccgtgcttcccccgggcttcatctgggatctgccagtaatttttcttttttcaggtggatgcggagcctcctcctgccttcttgtcgctccttgcgcagcccacaggaacaaattattctcgcacctagtctggcaaaagtggatatggagatgacacagttgactcaagagaacgccgatttcgccacgcgggacaggtatcatcactcttctctcgtgaaccgagaacagctgatgccgcattactag

SEQ ID NO: 74890 - DNA, 2145 bp, Artificial Sequence
  derived and/or modified sequence
atgacccagatgagccaggtgcaggagctgttccacgaggccgcccagcaggatgccctggcccagccccagccctggtggaagacccagctgttcatgtgggagcctgtgctgtttggcacctgggatggagtcttcaccagctgcatgatcaacatcttcggcgtggtgctcttcctgaggacaggctggctggtgggcaacacaggagtgctgctgggcatgttcctggtgtcctttgtgatcctggtggccctggtgacagtgctgtctggaattggagtgggggagaggagcagcatcggcagcggaggagtgtacagcatgatcagctctgtgctgggcggccagacaggaggcaccatcggcctgctgtatgtgtttggccagtgtgtggccggggccatgtacatcactggatttgctgagagcatcagtgacctgctgggcctgggcaacatctgggccgtgcggggcatctctgtggccgtgctgctggccctgctgggcatcaacctggccggcgtgaagtggatcatccggctgcagctgctgctgctcttcctgctggccgtgtccaccctggactttgtggtgggcagcttcacccacctggaccctgagcacggcttcatcggctacagccctgagctgctgcagaacaacaccctgcctgactacagccctggagagagcttcttcaccgtgtttggagtcttcttccctgctgccactggagtgatggccggcttcaacatgggcggggacctgcgggagcctgctgccagcatccccccaggcagcctggccgctgtgggcatctcctggttcctgtacatcatctttgtgttcctgctgggcgccatctgcacccgggaggccctgcgctatgacttcctgattgctgagaaggtgtccctgatgggcttcctgttcctgctgggcctgtacatcagcagcctggccagctgcatgggcggcctgtatggagccccccgcatcctgcagtgcatcgcccaggagaaggtgatcccagccctggcctgcctgggccagggcaagggccccaacaagacccctgtggccgccatctgcctgaccagcctggtgaccatggcctttgtgtttgtgggccaggtgaatgtgctggcccccatcgtgaccatcaacttcatgctgacctacgtggccgtggactacagctacttcagcctgtccatgtgcagctgcagcctgacccctgtgcctgagcctgtgctgcgggagggcgctgagggcctgcactgcagcgagcacctgctgctggagaaggcccccagctatggcagcgagggccctgcccagagggtgctggagggcaccctgctggagttcaccaaggacatggaccagctgctgcagctgaccaggaagctggagagcagccagccccggcagggcgagggcaacagaacacctgagagccagaagaggaagagcaagaaggccaccaagcagaccctgcaggacagcttcctgctggacctgaagagcccccccagcttccctgtggagatcagtgaccggctgcctgctgcctcctgggagggccaggagagctgctggaacaagcagaccagcaagtctgagggcacccagcctgagggcacctatggagagcagctggtgcctgagctgtgcaaccagagcgagagcagcggggaggacttcttcctgaagagccggctgcaggagcaggatgtgtggaggaggagcaccagcttctacacccacatgtgcaacccctgggtgtccctgctgggcgctgtgggcagcctgctgatcatgtttgtgatccagtgggtgtacaccctggtgaacatgggcgtggccgccatcgtgtacttctacatcggccgggccagccctggcctgcacctgggcagcgccagcaacttctccttcttccgctggatgaggagcctgctgctgcccagctgccgcagcctgcggagcccccaggagcagatcatcctggcccccagcctggccaaggtggacatggagatgacccagctgacccaggagaatgctgactttgccacccgggaccgctaccaccacagcagcctggtgaaccgggagcagctgatgccccactactag

SEQ ID NO: 74891 - DNA, 2145 bp, Artificial Sequence
  derived and/or modified sequence
atgacccagatgagccaggtgcaggagctgttccacgaggccgcccagcaagacgccctggcccagccacagccttggtggaagactcagttatttatgtgggaacctgtgttatttggtacatgggacggagtttttacaagttgtatgatcaacatctttggggtggtattatttctacggacaggctggctggtaggcaacacgggtgtgctgctaggaatgtttctagtatccttcgtgatccttgtagctctggtaaccgttttatcaggcatcggcgtgggtgagaggagtagtattgggagtggtggcgtatactccatgatctcatctgtgttgggaggtcaaactgggggcactatcggacttctctatgtgttcgggcagtgtgtagccggcgccatgtacatcaccggcttcgcagaatccatctctgaccttttaggccttgggaacatctgggcagtgagaggcatcagcgtcgccgtcctgttggcgctgctcggaatcaacctggcgggcgtgaaatggattatccgcctacagctactgctacttttcttgctcgccgtgagcacacttgactttgttgttggtagcttcactcacctggaccctgaacacggcttcattggatatagccccgaactgcttcagaacaataccctgccagactattctcctggggaaagcttcttcactgtgtttggagttttcttccctgcagctacgggcgtcatggcaggatttaatatgggcggcgatctcagagaaccagccgcgtccattccacccggtagtctcgccgcggtggggatttcctggtttttgtacattatatttgtgtttcttcttggggccatttgcacccgtgaagctctccgatacgactttctgatcgccgagaaggtgtctctgatgggattcctttttctgttggggttatatatctcaagcctggccagttgtatgggaggcctgtacggcgccccccgaatcctccagtgtatcgcccaagagaaagtgattccggcactggcctgcttgggccagggaaaaggcccaaataaaacgcctgtggccgccatatgtctcacgtccctggtgaccatggcattcgttttcgttgggcaggtcaacgtgctcgctcctatagtcactattaacttcatgttgacatatgtggccgtcgattacagctacttcagcttatccatgtgcagctgtagtctcacaccagtgccagagcccgtcctgagggaaggtgcagagggcctgcattgctccgagcatctgctgctggagaaagctccttcctacggatcagagggtccagcccagcgggttctcgagggtaccctgttggagttcacaaaagacatggaccaacttctgcagctgacgcgaaagctggagtccagtcagcctaggcagggggaagggaatcgaactccggaatcgcaaaagcgcaagtccaaaaaagccaccaagcagacgctgcaggactcgtttctgctcgatctgaaatcaccgccatcattcccagttgaaatctcagacagactgcccgcagcttcgtgggaaggccaagaatcatgttggaataagcaaacttccaagagcgagggcactcagccagaaggcacctatggcgagcaattggtgccagaactgtgcaatcaatctgagtcatccggcgaggatttctttcttaagagcaggctacaggaacaagacgtatggcggaggtccaccagtttttacacacatatgtgcaacccctgggtcagcctgctcggcgccgtggggagtctcctcattatgtttgtaatccagtgggtctatacactagttaacatgggggtagccgctatagtttacttctatatcggccgggctagcccaggcctgcacctgggatccgctagcaatttctctttctttcgatggatgcgcagtctcttactcccgagctgccggagcctgcgctcgcctcaggagcaaataattctcgcaccctcacttgccaaggtcgatatggaaatgactcaattgacacaggagaatgccgactttgccacaagggacaggtaccatcacagcagtcttgtgaatagggaacagctgatgccacattactag

SEQ ID NO: 74892 - DNA, 2145 bp, Artificial Sequence
  derived and/or modified sequence
atgacccagatgagccaggtgcaggagctgttccacgaggccgcccaacaggacgctcttgctcagcctcagccatggtggaagacccagctgtttatgtgggagccagtgctgttcgggacttgggatggagtgtttaccagctgtatgattaacattttcggggtcgtgctgttcctgcggactggatggctggttggcaataccggcgttctcctcggcatgtttctggtttcttttgtaatacttgtagccttagtgaccgtgctgtctggcatcggagttggtgaacggtccagtattgggtctggaggggtgtactccatgattagtagcgtgttgggcggacagacaggagggacaatcggattgttgtacgtcttcggccagtgcgttgctggcgccatgtacattaccggctttgctgagagcatctctgatctcctcggtctcggaaacatctgggcagtgagaggaatcagtgtggcagtcctactggcgctgttggggattaatttggcaggagtcaaatggataatcagactccagttgcttcttcttttcttactggcagtgtcaaccctggactttgttgtgggcagttttacccacctggacccagaacacggcttcattgggtacagccccgagttacttcagaataacaccctccctgattactctcctggcgagtcatttttcacggtgtttggcgtgttcttccccgcagctaccggggttatggcagggttcaacatgggcggtgacctgcgtgagccggcggcctcaattcctccagggtccctggcagcagtagggatctcatggtttctttatattatttttgttttcctccttggggctatatgcactcgcgaggcgctgagatatgactttttgatagctgagaaggttagcctaatggggtttctctttctgttggggttatatatatctagcctcgccagttgtatgggcggcctgtatggagcaccacgaattttacagtgcattgcacaggagaaggtcattcccgcactcgcctgcctcggccaagggaaaggcccaaacaagacccccgttgcagccatctgcctcaccagtctcgtcaccatggctttcgtatttgtggggcaagtgaatgtgctggcacccatcgtgacgatcaacttcatgctgacttatgtcgcagttgactacagttatttctcactgagcatgtgttcttgcagccttactccagttcctgagcctgtcctgcgggaaggcgccgagggattgcactgctctgaacacctgctgctcgagaaggccccctcctatggctcggaaggccctgctcaacgcgttctggaaggcacactattggaattcaccaaggacatggaccagctgctgcagttaactcgcaagctggagagtagccaaccaaggcagggcgaaggaaaccggacccccgagtcccagaaaaggaaatccaagaaggccacaaagcaaacgctccaggacagcttcctgctcgacttgaaatcacccccctcattccctgtggagatttctgatcgcctgccagcagcatcttgggagggccaggagagctgttggaataagcaaacttctaagtctgaaggtacacagcctgaaggcacctatggtgaacagctagtccccgaactgtgcaaccagagcgagtcatcaggggaagactttttcttgaagagtcgcctccaggaacaagacgtgtggcgaagatcaacctccttttacacacatatgtgtaatccctgggttagcctcctgggcgctgtggggtccctcttgattatgttcgtcatccaatgggtctatacacttgttaatatgggtgtcgccgctatcgtctatttttatatcgggagagcatcaccaggactccacctggggtctgccagcaatttctccttctttaggtggatgagatctctgctcctccctagctgcaggagtctccgttctccccaggagcagataattctggccccctccttagccaaggtggatatggagatgacacaattaacacaggagaatgcagatttcgccactcgtgacaggtaccaccattcctcccttgtgaaccgagaacagctgatgcctcattattag

SEQ ID NO: 74893 - DNA, 2145 bp, Artificial Sequence
  derived and/or modified sequence
atgacacagatgtcgcaagtgcaggagctctttcacgaagccgctcaacaggatgccctcgcccagcctcagccgtggtggaagactcagctctttatgtgggagcctgtgctcttcggaacttgggatggagtcttcacatcatgtatgatcaatatcttcggagttgtgctctttctaaggacgggatggctggtgggtaacacaggtgttctccttggcatgttcctggtgagcttcgtcattctcgtggcattggtaaccgtactttcgggcatcggagttggcgagaggagcagtatcggctctggcggagtgtactctatgataagctcagtcctcggcggacagactgggggaacgattggtctcctatacgtgttcgggcagtgtgttgctggcgcaatgtacatcactggcttcgctgaaagtatctcggatctgctgggcctgggaaacatctgggccgttcgcggtatctccgtcgccgtgctcttggctttgctgggcattaatctcgctggcgtcaagtggatcatccggttacagttgttgttattgttcttgctcgctgtttccacgctggattttgtagtcggaagtttcacccacctcgatcctgaacacggtttcatcggctattccccagagttattgcagaacaacactctgcctgattactcccctggtgagagtttctttacggtgtttggcgtcttctttcctgctgccacgggggtgatggccggtttcaacatgggaggcgaccttcgcgagcctgccgctagcattccccctggcagtctggccgctgtgggtatttcctggtttctatacataatttttgtctttctcctgggcgcaatctgcactcgcgaagccctccgctatgatttcctaatcgccgaaaaagtgtctctgatgggctttctctttctcttaggcctttatatttccagcctggcctcttgcatggggggactgtatggcgctccccgaatcctgcagtgcattgcccaggagaaggtgattcctgctctggcatgtctaggccagggcaagggccctaacaagacaccggtggctgccatatgcctaactagcctggtgaccatggcattcgtgttcgttgggcaagtcaacgtacttgcaccaatcgtgacgatcaactttatgctgacctacgttgcggtggactattcatacttttctttgtctatgtgctcctgtagtctgacaccagttcctgagccggttttgagggaaggcgcagagggccttcattgtagcgaacatctacttttagagaaggccccttcgtatgggagtgagggtcccgcacagagggttctggaagggacccttctggagttcacaaaagatatggaccaactgttgcagctaacccgcaagcttgagtcctctcaaccgagacagggtgagggaaaccgcacccctgaatctcaaaagaggaagagcaaaaaggcaacaaaacagactcttcaggacagcttcctgttagacctgaagagcccgccttcgttcccagtggaaatatcagacaggctgccagccgcaagttgggagggacaggagtcatgttggaataaacagacctcgaaatccgagggcactcaaccagaggggacctacggggagcagttggtacccgaactttgtaaccaaagcgaatcttccggtgaggactttttcctgaagagtaggctccaggagcaggacgtgtggcgacgaagcactagcttttacactcatatgtgtaacccctgggtttctctcttgggagcggtgggctcgcttctcataatgtttgtgattcaatgggtttacaccctagttaatatgggggttgcagccattgtgtacttttacattgggagagccagcccaggtctccatctgggttccgcttccaacttcagctttttccgatggatgcgatctctacttctgccaagctgtcgaagtctgagatcgcctcaggagcagataatcctggccccttccctggccaaagtcgacatggagatgacccagttgacccaagaaaatgcagattttgccactagggacagatatcatcacagttccctagtcaatcgtgagcagctgatgccccactattag

SEQ ID NO: 74894 - DNA, 2145 bp, Artificial Sequence
  derived and/or modified sequence
atgactcagatgtcccaggtgcaggagctgttccacgaagccgctcagcaagatgccttagcccagccccagccttggtggaaaactcaactgtttatgtgggaacccgtccttttcggcacttgggatggggttttcacatcctgtatgatcaacattttcggcgttgtccttttccttcggaccggatggctggtgggcaataccggcgtcttgctgggaatgttcttagtcagtttcgtaattttggttgctcttgtaaccgtgctgagtggaatcggggtaggagagcggagttccataggcagtggaggcgtgtactctatgattagtagtgtcctgggcggacagacaggcggaaccattggcctgctctacgttttcgggcaatgcgtggccggtgccatgtatatcactggtttcgctgagtccatctcagacctgctcgggcttggcaacatttgggccgtccggggtatttccgttgctgtactgctcgctttactgggcattaacctggcaggcgtgaagtggattattcgcctgcagctcttgctcctgttcttactcgctgtgagcactctggattttgtggtgggaagcttcacacacttggatccagagcacggcttcataggctattccccagaactccttcagaacaacaccctcccagattatagcccaggcgagtccttctttactgtatttggtgtgttttttccagctgctacaggggtcatggccggatttaacatggggggagacttacgagagccagccgcaagtattccaccaggctcgctggcagccgttggaatctcctggttcctgtatattatctttgtattcctgctaggcgctatttgcacgagagaggccctccgctatgattttctcatcgccgagaaggtgagtctgatggggttcctgtttctgctgggtctgtatattagcagtctcgccagttgcatggggggactctatggagctccacgaattctccagtgcattgcccaggaaaaagttatccctgctctagcatgcttgggtcaggggaaggggccaaataagacccccgtggcagccatttgtttaacttcattggtcactatggctttcgttttcgtggggcaagtcaacgtcctcgcgcctattgtcacaataaatttcatgttgacttatgtggccgtggattactcttatttcagcttgtccatgtgttcttgtagcctgacccctgtgccagaacctgtgctgagggagggcgcagagggattacactgttcagagcatttgctactggaaaaggccccttcctatggatctgagggcccagctcaacgggttctggagggaactcttttggagttcacgaaggatatggatcagctgctgcaactcacgcgcaagctcgagagctcgcagccacgccagggcgaggggaacagaacgcccgaatctcagaaaagaaaatccaaaaaggctacaaaacagaccctgcaggacagcttcctcctggatctgaaatctccccctagctttccagtcgagatttctgaccgtctcccagcggctagctgggaagggcaggaatcctgttggaacaaacagactagtaaaagcgagggcacccagccagaggggacctatggcgaacaactggtccccgagctgtgtaatcagtcagagtcctccggcgaagattttttcctcaagtcacggctgcaagaacaagacgtgtggagaagatctaccagtttctacacacatatgtgcaacccatgggtgtcactgctcggagctgtcgggagcttactgattatgtttgtgatccagtgggtctatacacttgtgaatatgggcgtggccgcaatagtgtacttttatatcggaagagcttctcccggtttgcacttgggaagcgcttccaatttcagcttcttccgttggatgaggagcctgctgctccctagttgccgctcactgaggtcacctcaggagcagatcattctcgcaccaagcctagctaaggtggatatggagatgactcagctgacccaggagaatgccgactttgcaaccagggacaggtaccatcactcaagccttgtgaatcgcgagcaactaatgccacattattag

SEQ ID NO: 74895 - DNA, 3447 bp, Artificial Sequence
  derived and/or modified sequence
tccagagcagtctccctgtccagatcaccaggatccctgcttgctggagaatgacccagatgtcccaggtgcaggagctcttccatgaggcagcccagcaggatgccctggcccagccccagccctggtggaagacccagctgttcatgtgggagcctgtgctgtttgggacctgggatggtgtgttcacatcctgcatgatcaacatctttggggttgtgctcttcctgaggactggctggctggtgggaaacacaggagtgctcctgggcatgttcctggtgtccttcgtcatcctggtggccctcgtcacggtgctgtctggcattggcgtcggggagcgcagcagcatcggcagcggtggcgtctactccatgatctcctcggtcctgggtgggcagacgggaggcaccatcgggctgctctatgtgtttggacagtgtgttgcaggtgccatgtatatcaccggctttgctgaatccatctcggatttgctgggcctcgggaatatctgggctgtgcgaggaatttcagttgcggtgcttctggccttgctgggcattaacctcgcaggtgtcaaatggataatccgcctccagctgctgttgctgttcctgctggccgtgtccacactggactttgtggtgggttctttcacccacctggacccagaacatggtttcattggatattcacccgaactgctacagaacaacacgctgcccgattacagcccgggggaatcttttttcactgtctttggggttttcttcccagcggctacaggagtcatggccggcttcaacatggggggcgacctcagggagcctgccgccagcattcccccgggctccctggcagctgttggcatctcgtggtttctgtacatcatcttcgtcttcctcctgggcgccatctgcactcgagaggcccttcgctatgacttcctgatagcggaaaaggtatccctcatgggcttcctgttccttttgggcttatacatctcgtccctggcttcctgcatgggaggactttatggagctccccgcatcctgcagtgcattgcccaggagaaagtgatccctgcacttgcctgtctgggacaagggaaggggccaaacaaaacacccgtggctgccatctgcctgaccagcttggtgaccatggcctttgtttttgtgggtcaagtgaacgttctggcccccatcgtcaccatcaacttcatgctgacatacgttgcagtggactactcttacttctccctgtccatgtgttcctgcagcctgaccccggtgcctgagccggtgctcagggagggcgcagaaggcctccactgctctgagcacctgctcttagagaaagctcccagttacggctctgagggacctgcccaaagagtcttggagggcacgctactggaattcaccaaggacatggatcagctcctccagctaaccaggaagcttgagagtagccagcccaggcaaggagagggtaacaggaccccagaaagtcagaagaggaaaagcaagaaggccaccaagcagaccctacaagatagcttcctcttggacctcaaatcccctccttctttccctgtcgagatctctgacaggttgcccgctgcctcctgggaggggcaggagtcctgctggaacaagcagacttccaagagcgaagggactcagcctgagggaacatatggagagcaacttgttcctgagctgtgcaaccaatcagagtccagtggagaagatttcttcctgaagtccaggctccaagaacaagatgtctggagaagatccacttctttctatacccacatgtgcaacccctgggtctccctgttgggggctgttgggtcccttctcatcatgtttgtgatacagtgggtgtataccctggttaacatgggtgttgctgccatcgtgtatttctacattggccgggccagtccagggcttcaccttggatcagcctccaacttcagctttttccggtggatgaggtctctcttgctcccctcctgcaggagcttgcggtcccctcaggagcagatcatcttggcgccgtccctggctaaggttgacatggagatgactcagctcacccaggagaatgcagacttcgccactcgggatcgctaccaccactcctccctcgtgaaccgggagcagctgatgcctcactactagatgcagtgctgggaccttcctcttttggagctgtcccatgtacagtggacccaagctcaggaccttcgtggagctgcttctccaacctgagaaactcaagacccatcctcccgctgtcactttggacaatggaaatctacattttcttttccctttttttttttttttgagacagagtctcgccctgtcacccaggctggagtccagtggcacaatcttggctcactgcaacctctgcttcccgagttcaagcaattctcctgcctcagcctcctgagtagctgggattataggcatgcaccaccacacccagctattttttgtatttttactggagacagggtttcaccatgttggccaggctggtctcgaactcctgacctcgtgatccacccgtctcagcctcccaaagtactgggattacaggcgtgagccaccatgcctggccagaaatctatgttttcttagaacatgtggaagaaggaaaaagacaaaaaaggaaatctggattctgaggaccacgtctcacccagggtgacatcaggaatggtgctagcctctgcaacacgacacccagtctgaagagctctatacaggtactaagactagcaggggacaccaagactctgcacaaccagattgcttgtgcagagggccacaataagtgtatgttttatattttattgtattatttattcaaaaataaataatacactcacatgtttccacacccaaaagatatatagagtgaaaagtctccctccaatccttattctccacctgctcagttcctgtctaccctggcctagaggtaaccactattctcatccgtacatccagcatttctttatggatatacaagcaaatgggaatgtagagtctcacattctctctttatacacaaaagttagcacgttatacacatgttctgcaccttgcttttttcccttaacaatctatcttggagacatttcatatcaattcatatgccatttgttcatttttttcattgtataaatgtgttataatttatttcgccagttccacaatgatgagcatttggattctttccaatcttttgcaatgacaatcagctctgcagtgaataatcttgtacaaatgtgcaagcataaagtgtatctctaggataaattcccaaaagtggaattgcaggatcaaaaggtacatgcatttgtaaactattattgtttagtgagggtctttttaattaaagaattaacatgaattgcct

SEQ ID NO: 74896 - DNA, 2989 bp, Artificial Sequence
  derived and/or modified sequence
agccacgtggcggcggggcggggaccgggcgggccgggcgctgggagctggctgtcccaggagcagagcagtctccctgtccagatcaccaggatccctgcttgctggagaatgacccagatgtcccaggtgcaggagctcttccatgaggcagcccagcaggatgccctggcccagccccagccctggtggaagacccagctgttcatgtgggagcctgtgctgtttgggacctgggatggtgtgttcacatcctgcatgatcaacatctttggggttgtgctcttcctgaggactggctggctggtgggaaacacaggagtgctcctgggcatgttcctggtgtccttcgtcatcctggtggccctcgtcacggtgctgtctggcattggcgtcggggagcgcagcagcatcggcagcggtggcgtctactccatgatctcctcggtcctgggtgggcagacgggaggcaccatcgggctgctctatgtgtttggacagtgtgttgcaggtgccatgtatatcaccggctttgctgaatccatctcggatttgctgggcctcgggaatatctgggctgtgcgaggaatttcagttgcggtgcttctggccttgctgggcattaacctcgcaggtgtcaaatggataatccgcctccagctgctgttgctgttcctgctggccgtgtccacactggactttgtggtgggttctttcacccacctggacccagaacatggtttcattggatattcacccgaactgctacagaacaacacgctgcccgattacagcccgggggaatcttttttcactgtctttggggttttcttcccagcggctacaggagtcatggccggcttcaacatggggggcgacctcagggagcctgccgccagcattcccccgggctccctggcagctgttggcatctcgtggtttctgtacatcatcttcgtcttcctcctgggcgccatctgcactcgagaggcccttcgctatgacttcctgatagcggaaaaggtatccctcatgggcttcctgttccttttgggcttatacatctcgtccctggcttcctgcatgggaggactttatggagctccccgcatcctgcagtgcattgcccaggagaaagtgatccctgcacttgcctgtctgggacaagggaaggggccaaacaaaacacccgtggctgccatctgcctgaccagcttggtgaccatggcctttgtttttgtgggtcaagtgaacgttctggcccccatcgtcaccatcaacttcatgctgacatacgttgcagtggactactcttacttctccctgtccatgtgttcctgcagcctgaccccggtgcctgagccggtgctcagggagggcgcagaaggcctccactgctctgagcacctgctcttagagaaagctcccagttacggctctgagggacctgcccaaagagtcttggagggcacgctactggaattcaccaaggacatggatcagctcctccagctaaccaggaagcttgagagtagccagcccaggcaaggagagggtaacaggaccccagaaagtcagaagaggaaaagcaagaaggccaccaagcagaccctacaagatagcttcctcttggacctcaaatcccctccttctttccctgtcgagatctctgacaggttgcccgctgcctcctgggaggggcaggagtcctgctggaacaagcagacttccaagagcgaagggactcagcctgagggaacatatggagagcaacttgttcctgagctgtgcaaccaatcagagtccagtggagaagatttcttcctgaagtccaggctccaagaacaagatgtctggagaagatccacttctttctatacccacatgtgcaacccctgggtctccctgttgggggctgttgggtcccttctcatcatgtttgtgatacagtgggtgtataccctggttaacatgggtgttgctgccatcgtgtatttctacattggccgggccagtccagggcttcaccttggatcagcctccaacttcagctttttccggtggatgaggtctctcttgctcccctcctgcaggagcttgcggtcccctcaggagcagatcatcttggcgccgtccctggctaaggttgacatggagatgactcagctcacccaggagaatgcagacttcgccactcgggatcgctaccaccactcctccctcgtgaaccgggagcagctgatgcctcactactagatgcagtgctgggaccttcctcttttggagctgtcccatgtacagtggacccaagctcaggaccttcgtggagctgcttctccaacctgagaaactcaagacccatcctcccgctgtcactttggacaatggaaatctacattttcttttccctttttttttttttttgagacagagtctcgccctgtcacccaggctggagtccagtggcacaatcttggctcactgcaacctctgcttcccgagttcaagcaattctcctgcctcagcctcctgagtagctgggattataggcatgcaccaccacacccagctattttttgtatttttactggagacagggtttcaccatgttggccaggctggtctcgaactcctgacctcgtgatccacccgtctcagcctcccaaagtactgggattacaggcgtgagccaccatgcctggccagaaatctatgttttcttagaacatgtggaagaaggaaaaagacaaaaaaggaaatctggattctgaggaccacgtctcacccagggtgacatcaggaatggtgctagcctctgcaacacgacacccagtctgaagagctctatacaggtactaagactagcaggggacaccaagactctgcacaaccagattgcttgtgcagagggccacaataagtgtatgttttatattttattgtattatttattcaaaaataaataatacactcacatgtttccacaccc

SEQ ID NO: 74897 - DNA, 1128 bp, Artificial Sequence
  derived and/or modified sequence
atggccggcttcaacatgggcggcgacctgagagagcccgccgccagcatcccccccggcagcctggccgccgtgggcatcagctggttcctgtacatcatcttcgtgttcctgctgggcgccatctgcaccagagaggccctgagatacgacttcctgatcgccgagaaggtgagcctgatgggcttcctgttcctgctgggcctgtacatcagcagcctggccagctgcatgggcggcctgtacggcgcccccagaatcctgcagtgcatcgcccaggagaaggtgatccccgccctggcctgcctgggccagggcaagggccccaacaagacccccgtggccgccatctgcctgaccagcctggtgaccatggccttcgtgttcgtgggccaggtgaacgtgctggcccccatcgtgaccatcaacttcatgctgacctacgtggccgtggactacagctacttcagcctgagcatgtgcagctgcagcctgacccccgtgcccgagcccgtgctgagagagggcgccgagggcctgcactgcagcgagcacctgctgctggagaaggcccccagctacggcagcgagggccccgcccagagagtgctggagggcaccctgctggagttcaccaaggacatggaccagctgctgcagctgaccagaaagctggagagcagccagcccagacagggcgagggcaacagaacccccgagagccagaagagaaagagcaagaaggccaccaagcagaccctgcaggacagcttcctgctggacctgaagagcccccccagcttccccgtggagatcagcgacagactgcccgccgccagctgggagggccaggagagctgctggaacaagcagaccagcaagagcgagggcacccagcccgagggcacctacggcgagcagctggtgcccgagctgtgcaaccagagcgagagcagcggcgagggcgacctgagaagcccccaggagcagatcatcctggcccccagcctggccaaggtggacatggagatgacccagctgacccaggagaacgccgacttcgccaccagagacagataccaccacagcagcctggtgaacagagagcagctgatgccccactactag

SEQ ID NO: 74898 - DNA, 2232 bp, Artificial Sequence
  derived and/or modified sequence
atgctgcccctggagagaaccatcacctacagagacatgagcagcttcatccaggtgaagaaccacttcaacgtggtgaacgtgacctgcgtgagctacagaagcacctgcttcagagacatgagaagattcatcctggacgccctggcccagccccagccctggtggaagacccagctgttcatgtgggagcccgtgctgttcggcacctgggacggcgtgttcaccagctgcatgatcaacatcttcggcgtggtgctgttcctgagaaccggctggctggtgggcaacaccggcgtgctgctgggcatgttcctggtgagcttcgtgatcctggtggccctggtgaccgtgctgagcggcatcggcgtgggcgagagaagcagcatcggcagcggcggcgtgtacagcatgatcagcagcgtgctgggcggccagaccggcggcaccatcggcctgctgtacgtgttcggccagtgcgtggccggcgccatgtacatcaccggcttcgccgagagcatcagcgacctgctgggcctgggcaacatctgggccgtgagaggcatcagcgtggccgtgctgctggccctgctgggcatcaacctggccggcgtgaagtggatcatcagactgcagctgctgctgctgttcctgctggccgtgagcaccctggacttcgtggtgggcagcttcacccacctggaccccgagcacggcttcatcggctacagccccgagctgctgcagaacaacaccctgcccgactacagccccggcgagagcttcttcaccgtgttcggcgtgttcttccccgccgccaccggcgtgatggccggcttcaacatgggcggcgacctgagagagcccgccgccagcatcccccccggcagcctggccgccgtgggcatcagctggttcctgtacatcatcttcgtgttcctgctgggcgccatctgcaccagagaggccctgagatacgacttcctgatcgccgagaaggtgagcctgatgggcttcctgttcctgctgggcctgtacatcagcagcctggccagctgcatgggcggcctgtacggcgcccccagaatcctgcagtgcatcgcccaggagaaggtgatccccgccctggcctgcctgggccagggcaagggccccaacaagacccccgtggccgccatctgcctgaccagcctggtgaccatggccttcgtgttcgtgggccaggtgaacgtgctggcccccatcgtgaccatcaacttcatgctgacctacgtggccgtggactacagctacttcagcctgagcatgtgcagctgcagcctgacccccgtgcccgagcccgtgctgagagagggcgccgagggcctgcactgcagcgagcacctgctgctggagaaggcccccagctacggcagcgagggccccgcccagagagtgctggagggcaccctgctggagttcaccaaggacatggaccagctgctgcagctgaccagaaagctggagagcagccagcccagacagggcgagggcaacagaacccccgagagccagaagagaaagagcaagaaggccaccaagcagaccctgcaggacagcttcctgctggacctgaagagcccccccagcttccccgtggagatcagcgacagactgcccgccgccagctgggagggccaggagagctgctggaacaagcagaccagcaagagcgagggcacccagcccgagggcacctacggcgagcagctggtgcccgagctgtgcaaccagagcgagagcagcggcgaggacttcttcctgaagagcagactgcaggagcaggacgtgtggagaagaagcaccagcttctacacccacatgtgcaacccctgggtgagcctgctgggcgccgtgggcagcctgctgatcatgttcgtgatccagtgggtgtacaccctggtgaacatgggcgtggccgccatcgtgtacttctacatcggcagagccagccccggcctgcacctgggcagcgccagcaacttcagcttcttcagatggatgagaagcctgctgctgcccagctgcagaagcctgagaagcccccaggagcagatcatcctggcccccagcctggccaaggtggacatggagatgacccagctgacccaggagaacgccgacttcgccaccagagacagataccaccacagcagcctggtgaacagagagcagctgatgccccactactag

SEQ ID NO: 74899 - DNA, 1548 bp, Artificial Sequence
  derived and/or modified sequence
atgagaagagccgccgccggcggcctggccgtgggccagctgcccggcgagggccccgccggcgaggagggcgccgccctgggcaaggccatgagaggcggcggctgcagcccccacagccccagcggctgcctgagcggcgtgatggccggcttcaacatgggcggcgacctgagagagcccgccgccagcatcccccccggcagcctggccgccgtgggcatcagctggttcctgtacatcatcttcgtgttcctgctgggcgccatctgcaccagagaggccctgagatacgacttcctgatcgccgagaaggtgagcctgatgggcttcctgttcctgctgggcctgtacatcagcagcctggccagctgcatgggcggcctgtacggcgcccccagaatcctgcagtgcatcgcccaggagaaggtgatccccgccctggcctgcctgggccagggcaagggccccaacaagacccccgtggccgccatctgcctgaccagcctggtgaccatggccttcgtgttcgtgggccaggtgaacgtgctggcccccatcgtgaccatcaacttcatgctgacctacgtggccgtggactacagctacttcagcctgagcatgtgcagctgcagcctgacccccgtgcccgagcccgtgctgagagagggcgccgagggcctgcactgcagcgagcacctgctgctggagaaggcccccagctacggcagcgagggccccgcccagagagtgctggagggcaccctgctggagttcaccaaggacatggaccagctgctgcagctgaccagaaagctggagagcagccagcccagacagggcgagggcaacagaacccccgagagccagaagagaaagagcaagaaggccaccaagcagaccctgcaggacagcttcctgctggacctgaagagcccccccagcttccccgtggagatcagcgacagactgcccgccgccagctgggagggccaggagagctgctggaacaagcagaccagcaagagcgagggcacccagcccgagggcacctacggcgagcagctggtgcccgagctgtgcaaccagagcgagagcagcggcgaggacttcttcctgaagagcagactgcaggagcaggacgtgtggagaagaagcaccagcttctacacccacatgtgcaacccctgggtgagcctgctgggcgccgtgggcagcctgctgatcatgttcgtgatccagtgggtgtacaccctggtgaacatgggcgtggccgccatcgtgtacttctacatcggcagagccagccccggcctgcacctgggcagcgccagcaacttcagcttcttcagatggatgagaagcctgctgctgcccagctgcagaagcctgagaagcccccaggagcagatcatcctggcccccagcctggccaaggtggacatggagatgacccagctgacccaggagaacgccgacttcgccaccagagacagataccaccacagcagcctggtgaacagagagcagctgatgccccactactag

SEQ ID NO: 74900 - DNA, 1128 bp, Artificial Sequence
  derived and/or modified sequence
atggcagggttcaacatggggggagatctgagggagcccgcggcgtccattccacctggatccctggccgctgtgggcatatcttggttcttgtacataatcttcgtgttcctgttgggcgctatctgtacacgggaagccctccgctatgattttttgatcgcggagaaggtctcccttatgggtttcttgttcctcttaggattatatatctcttcactggctagctgtatgggcggcttgtatggagcaccccgaattctgcagtgcattgcacaggaaaaggtcattccagccctcgcgtgtcttggccaggggaaggggcctaacaaaaccccagtcgccgccatctgcctcacatcgctcgttaccatggcatttgtgttcgttggtcaggtcaacgtattggcccccatagtgacaatcaactttatgctgacgtatgtagctgtggactactcctatttctctctgtcaatgtgctcatgctccctgactcccgttccggaaccagtgttaagagaaggggctgaagggcttcactgttccgaacacctgcttctggagaaagccccaagctacgggagtgaggggcctgctcagagggtgctcgagggaaccctgctggagttcaccaaggatatggaccagcttctacaactcactcgcaagctggaatcaagccagccacggcaaggtgaggggaatcggaccccagagtcccaaaagagaaaaagtaagaaagccacaaaacagacccttcaggactcttttctgctggatctgaaaagccctccctcttttcctgtggagatctctgatagactgccagcagccagttgggagggccaggagagctgttggaataagcagacctctaaaagtgaaggaacgcagcctgagggcacatatggtgaacagcttgtgccagagctatgtaatcagtcggaatcctcaggtgagggggatcttcgcagtcctcaagagcagattatccttgccccgagcctcgctaaagtggacatggagatgacccagctgacacaggaaaacgccgactttgcaacacgagacaggtatcaccacagttccctagtgaatcgggaacaactaatgccacactattag

SEQ ID NO: 74901 - DNA, 2232 bp, Artificial Sequence
  derived and/or modified sequence
atgctgcctttagagagaactatcacgtaccgcgacatgtcgtcatttatccaggtgaaaaaccacttcaatgtggtgaacgtgacgtgcgtaagctataggtctacttgctttcgggatatgcgtcgctttatactggatgcactggcccagccccaaccttggtggaagactcaactttttatgtgggagccggtactgttcggaacctgggatggcgtttttaccagctgtatgattaacattttcggcgtggtcttgtttctgaggaccggatggctcgtcggtaacacgggcgtgctcctgggaatgttcctggtctcctttgtcattttggttgctctggtcaccgtgctcagtggcattggtgtaggagaacgctcatctatcggatccggcggagtatattcaatgatctcctctgtcctggggggccagacagggggtaccattggtcttctatacgtgttcgggcagtgtgtggcgggggccatgtatattacagggtttgccgaaagtatttctgacctcctcggactcggcaacatttgggcagtgagaggtatcagtgtggccgtgcttcttgctctgctcgggataaatctcgccggcgtgaagtggatcatcagattgcagcttctcctgctgttcttgctggccgttagcaccctcgatttcgtggtgggatcgttcacgcatctggatcctgaacacggctttattgggtattcccccgaacttcttcagaacaacacccttcctgattatagcccaggcgagtcctttttcactgtgttcggtgtgttctttcccgctgcgaccggtgtgatggctggtttcaatatggggggcgacctgcgggagccagccgcgtctattccacccgggtcacttgctgcagttggaatctcctggtttctgtatatcatcttcgtgttcctgttgggggcgatatgtacaagagaggccctccggtacgatttcctgatagcggaaaaggtgagtctgatgggctttctgttcttgctgggactgtatatcagttccttggcatcctgtatgggaggactttatggtgctccacgaatattacaatgtattgcccaagagaaggttatacccgcactcgcctgccttggccaaggcaaaggcccaaacaagactccagttgccgccatctgtctgacgtccctggtaaccatggcctttgtgtttgtgggacaggttaacgtattagctccgattgtgacaatcaacttcatgcttacctatgtggccgtagactactcttacttttctctgtctatgtgcagctgttccctgacaccggttcctgaaccggttctgcgggaaggtgccgagggactacactgctctgagcacctgctgcttgagaaagcgccttcctacggcagcgagggacccgcgcaacgcgtcctggagggcaccctcctcgagtttacaaaagatatggatcaacttttgcagctgacacgcaaactggagtcctcacagccaaggcaaggcgaaggcaacagaacacccgagagccagaaaagaaagagtaagaaagctacgaagcagacccttcaggactcctttcttctcgatctgaaaagtccgccctcattccctgtcgaaatttccgaccgcttacccgcagcctcatgggaagggcaggagtcatgttggaacaaacagacctccaagtccgagggtacccagcctgaaggaacctacggggagcagctcgtcccggaactctgtaaccagtcagaatcctccggggaggacttctttttgaagtctagactgcaagagcaagatgtgtggcgcagatctacgagcttctatactcatatgtgcaatccttgggtttccttactcggggccgtggggtccctgttgatcatgtttgtcattcagtgggtctacaccctggtcaacatgggagtggcagcgatcgtgtacttctatattggcagagcatcgcccggtcttcacttgggctcagcctccaacttttccttctttcgatggatgagaagcctgttgctccctagctgtagaagcctccgttcccctcaggagcaaattatactcgccccttctctagcaaaagtcgacatggagatgacacaattaacccaggaaaacgcggactttgccacacgcgatcgctaccatcactcctctctggtcaaccgtgaacagctcatgccgcactactag

SEQ ID NO: 74902 - DNA, 1548 bp, Artificial Sequence
  derived and/or modified sequence
atgagaagggccgccgctgggggcctggcggtgggtcagttacccggtgaaggaccagcaggcgaagagggggctgccctaggcaaggctatgcggggaggaggatgctctccgcatagccccagtggctgcctgtccggcgtgatggctggcttcaacatgggcggagacctaagggagcctgccgcctcgatcccacccgggtctttggccgctgtcggcatttcatggttcttgtatatcatctttgtctttcttctcggagccatctgtacccgtgaagcgctccgatatgatttccttatcgctgagaaggtatcccttatggggttcttgttcctgctcggcctctacatcagcagtctggcctcctgtatggggggactgtatggcgctcctcgcattctccagtgcattgcccaggagaaagtaatccccgcactggcctgcctgggtcaggggaaaggccccaacaaaacccctgtggctgctatttgtctgacgtcactggtcaccatggctttcgtctttgtagggcaggtaaacgtactggcccctattgtaacaattaacttcatgctgacatatgtagcggtggactactcttatttttcactgagcatgtgctcctgttccctgacccctgtgcctgagccagtgctgagggaaggagctgagggactgcactgttccgaacacctgttgctcgagaaggccccctcttacgggagcgagggccctgctcagagggttctcgaaggtactctgctggagtttacgaaagatatggatcaattattgcaactgactcgaaagcttgagtcttcacagccccgtcagggtgaaggtaatcgtacacctgaatcacagaagcgcaagagcaaaaaagctaccaaacagaccctccaggatagctttcttcttgacctcaaatcccctccctcttttccagtcgagatcagcgatagactccccgcagcttcttgggaaggccaagaaagttgttggaataaacagacatctaaatctgagggaacccagcctgagggtacctatggagaacaactcgtgccagaactctgtaatcagtctgagagttccggtgaggacttttttctgaagagtcgcctccaggaacaggatgtctggagacgctctaccagcttctatactcacatgtgtaacccatgggtatccttactcggcgctgtggggagtctgctaatcatgtttgtaatacagtgggtgtataccctcgtcaatatgggtgtcgccgcgattgtgtacttctacattggccgagcatcccccgggctacacctcggcagcgcttcaaacttttcattttttcgctggatgaggagtctactcctcccttcatgcagaagtctcaggtctccccaggagcagattattctggctccatccctcgcaaaggtggatatggaaatgacccaactgacccaggaaaacgcggatttcgcgacacgtgacaggtaccaccactcttccctggtgaatagagagcagctcatgcctcactactag

SEQ ID NO: 74903 - DNA, 1128 bp, Artificial Sequence
  derived and/or modified sequence
atggccggcttcaacatgggcggggacctgcgggagcctgctgccagcatccccccaggcagcctggccgctgtgggcatctcctggttcctgtacatcatctttgtgttcctgctgggcgccatctgcacccgggaggccctgcgctatgacttcctgattgctgagaaggtgtccctgatgggcttcctgttcctgctgggcctgtacatcagcagcctggccagctgcatgggcggcctgtatggagccccccgcatcctgcagtgcatcgcccaggagaaggtgatcccagccctggcctgcctgggccagggcaagggccccaacaagacccctgtggccgccatctgcctgaccagcctggtgaccatggcctttgtgtttgtgggccaggtgaatgtgctggcccccatcgtgaccatcaacttcatgctgacctacgtggccgtggactacagctacttcagcctgtccatgtgcagctgcagcctgacccctgtgcctgagcctgtgctgcgggagggcgctgagggcctgcactgcagcgagcacctgctgctggagaaggcccccagctatggcagcgagggccctgcccagagggtgctggagggcaccctgctggagttcaccaaggacatggaccagctgctgcagctgaccaggaagctggagagcagccagccccggcagggcgagggcaacagaacacctgagagccagaagaggaagagcaagaaggccaccaagcagaccctgcaggacagcttcctgctggacctgaagagccccccatccttccctgtggagatcagtgaccggctgcctgctgcctcctgggagggccaggagagctgctggaacaagcagaccagcaagtctgagggcacccagcctgagggcacctacggggagcagctggtgcctgagctgtgcaaccagagcgagagcagtggagagggggacctgcggagcccccaggagcagatcatcctggcccccagcctggccaaggtggacatggagatgacccagctgacccaggagaatgctgactttgccacccgggaccgctaccaccacagcagcctggtgaaccgggagcagctgatgccccactactag

SEQ ID NO: 74904 - DNA, 2232 bp, Artificial Sequence
  derived and/or modified sequence
atgctgcccctggagaggaccatcacctacagagacatgagcagcttcatccaggtgaagaaccacttcaacgtggtgaatgtgacctgtgtgtcctaccgcagcacctgcttccgggacatgaggcgcttcatcctggatgccctggcccagccccagccctggtggaagacccagctgttcatgtgggagcctgtgctgtttggcacctgggatggagtcttcaccagctgcatgatcaacatctttggagtggtgctcttcctgaggacaggctggctggtgggcaacacaggagtgctgctgggcatgttcctggtgtcctttgtgatcctggtggccctggtgacagtgctgagcggcatcggcgtgggggagaggagcagcatcggcagcggcggcgtgtacagcatgatcagctctgtgctgggcggccagacaggaggcaccatcggcctgctgtatgtgtttggccagtgtgtggccggggccatgtacatcaccggctttgctgagagcatcagtgacctgctgggcctgggcaacatctgggccgtgcggggcatctctgtggccgtgctgctggccctgctgggcatcaacctggccggcgtgaagtggatcatccggctgcagctgctgctgctcttcctgctggccgtgtccaccctggactttgtggtgggcagcttcacccacctggaccctgagcacggcttcatcggctacagccctgagctgctgcagaacaacaccctgcctgactacagccctggagagagcttcttcaccgtgtttggagtcttcttccctgctgccaccggggtgatggccggcttcaacatgggcggggacctgcgggagcctgctgccagcatccccccaggcagcctggccgctgtgggcatctcctggttcctgtacatcatctttgtgttcctgctgggcgccatctgcacccgggaggccctgcgctatgacttcctgattgctgagaaggtgtccctgatgggcttcctgttcctgctgggcctgtacatcagcagcctggccagctgcatgggcggcctgtatggagccccccgcatcctgcagtgcatcgcccaggagaaggtgatcccagccctggcctgcctgggccagggcaagggccccaacaagacccctgtggccgccatctgcctgaccagcctggtgaccatggcctttgtgtttgtgggccaggtgaatgtgctggcccccatcgtgaccatcaacttcatgctgacctacgtggccgtggactacagctacttcagcctgtccatgtgcagctgcagcctgacccctgtgcctgagcctgtgctgcgggagggcgctgagggcctgcactgcagcgagcacctgctgctggagaaggcccccagctatggcagcgagggccctgcccagagggtgctggagggcaccctgctggagttcaccaaggacatggaccagctgctgcagctgaccaggaagctggagagcagccagccccggcagggcgagggcaacagaacacctgagagccagaagaggaagagcaagaaggccaccaagcagaccctgcaggacagcttcctgctggacctgaagagccccccatccttccctgtggagatcagtgaccggctgcctgctgcctcctgggagggccaggagagctgctggaacaagcagaccagcaagtctgagggcacccagcctgagggcacctacggggagcagctggtgcctgagctgtgcaaccagagcgagagcagtggagaggacttcttcctgaagagccggctgcaggagcaggatgtgtggaggaggagcaccagcttctacacccacatgtgcaacccctgggtgtccctgctgggcgctgtgggcagcctgctgatcatgtttgtgatccagtgggtgtacaccctggtgaacatgggcgtggccgccatcgtgtacttctacatcggccgggccagccctggcctgcacctgggcagcgccagcaacttctccttcttccgctggatgaggagcctgctgctgcccagctgccgcagcctgcggagcccccaggagcagatcatcctggcccccagcctggccaaggtggacatggagatgacccagctgacccaggagaatgctgactttgccacccgggaccgctaccaccacagcagcctggtgaaccgggagcagctgatgccccactactag

SEQ ID NO: 74905 - DNA, 1548 bp, Artificial Sequence
  derived and/or modified sequence
atgagaagagctgctgctgggggcctggccgtgggccagctgcctggagagggccctgctggggaggagggcgccgccctgggcaaggccatgagaggaggcggctgcagcccccacagccccagcggctgcctgagcggcgtgatggccggcttcaacatgggcggggacctgcgggagcctgctgccagcatccccccaggcagcctggccgctgtgggcatctcctggttcctgtacatcatctttgtgttcctgctgggcgccatctgcacccgggaggccctgcgctatgacttcctgattgctgagaaggtgtccctgatgggcttcctgttcctgctgggcctgtacatcagcagcctggccagctgcatgggcggcctgtatggagccccccgcatcctgcagtgcatcgcccaggagaaggtgatcccagccctggcctgcctgggccagggcaagggccccaacaagacccctgtggccgccatctgcctgaccagcctggtgaccatggcctttgtgtttgtgggccaggtgaatgtgctggcccccatcgtgaccatcaacttcatgctgacctacgtggccgtggactacagctacttcagcctgtccatgtgcagctgcagcctgacccctgtgcctgagcctgtgctgcgggagggcgctgagggcctgcactgcagcgagcacctgctgctggagaaggcccccagctatggcagcgagggccctgcccagagggtgctggagggcaccctgctggagttcaccaaggacatggaccagctgctgcagctgaccaggaagctggagagcagccagccccggcagggcgagggcaacagaacacctgagagccagaagaggaagagcaagaaggccaccaagcagaccctgcaggacagcttcctgctggacctgaagagccccccatccttccctgtggagatcagtgaccggctgcctgctgcctcctgggagggccaggagagctgctggaacaagcagaccagcaagtctgagggcacccagcctgagggcacctacggggagcagctggtgcctgagctgtgcaaccagagcgagagcagtggagaggacttcttcctgaagagccggctgcaggagcaggatgtgtggaggaggagcaccagcttctacacccacatgtgcaacccctgggtgtccctgctgggcgctgtgggcagcctgctgatcatgtttgtgatccagtgggtgtacaccctggtgaacatgggcgtggccgccatcgtgtacttctacatcggccgggccagccctggcctgcacctgggcagcgccagcaacttctccttcttccgctggatgaggagcctgctgctgcccagctgccgcagcctgcggagcccccaggagcagatcatcctggcccccagcctggccaaggtggacatggagatgacccagctgacccaggagaatgctgactttgccacccgggaccgctaccaccacagcagcctggtgaaccgggagcagctgatgccccactactag

SEQ ID NO: 74906 - DNA, 1128 bp, Artificial Sequence
  derived and/or modified sequence
atggccggcttcaacatgggcggcgacctgcgggagcccgccgcctcaattccgcccggcagtctggctgccgtgggcatcagctggtttctgtatattatatttgtcttcctgttaggcgcaatctgtacacgggaggccctacgctacgatttcctgatagcagaaaaggtctccctcatgggatttctgtttctgttgggcttatatatcagcagtttggccagctgcatgggaggtctatacggtgcgcctcgaattctacaatgcattgctcaagaaaaagtaatccctgctctcgcttgtctggggcagggcaaggggccgaataagactcctgtagcagctatctgcctcaccagccttgtgactatggctttcgtctttgttggccaggtgaacgtgctggctccaatcgtgactattaatttcatgctgacctacgtggcagtagactacagttactttagcttgtccatgtgcagctgtagcctgaccccagttccagagccagtgctcagggaaggcgcagaggggctgcattgctctgagcacctgttgcttgagaaagcccccagctacggatcagaaggtcccgcgcagagggtgctcgaggggaccctgctggagtttacgaaagatatggaccagctgctccagctcacacggaagctcgagtcttctcaaccaaggcagggtgagggtaatagaactcctgagtcgcagaagcgcaaatccaagaaagcaaccaaacaaacattacaggactccttcctgttggatctgaagagtcctcccagcttcccggtcgagatcagtgatcgattgcctgctgcttcttgggaaggccaggagtcgtgttggaacaagcaaacatcgaaaagcgaaggaacccaaccagagggcacctacggtgaacagctcgttcccgaactttgtaatcaaagcgaatcttcaggggagggggatctgagatccccccaggagcagattattcttgcgccttccctggcgaaggtggacatggagatgactcagctaactcaggaaaacgccgacttcgcaacacgtgataggtatcaccactcatccctggtgaaccgggagcagctgatgccgcattactag

SEQ ID NO: 74907 - DNA, 2232 bp, Artificial Sequence
  derived and/or modified sequence
atgctgcccctggagcggaccatcacctaccgggacatgagcagctttatccaagttaagaaccattttaacgtggttaacgtgacatgcgtgtcctataggtctacgtgttttcgagatatgagacgctttatactcgatgctcttgctcagccgcagccatggtggaaaactcagctgtttatgtgggaacccgtcctctttggaacctgggatggagtgtttacttcctgtatgattaatatctttggggtcgttttattcctccgaactggctggctcgtaggcaatacgggtgtgctcttgggtatgttcctggtgtccttcgtgatccttgtcgccctagtgacggtgctaagtggcatcggagtaggtgaaaggtctagtattgggagcgggggcgtctatagtatgatttcctcggtgttgggcggtcagaccggagggacgattgggctcttatacgtgtttggccagtgtgtagccggcgctatgtacatcaccggctttgccgagtcaatcagtgatctgttggggctcggcaatatttgggcagttcggggtatttccgtagccgtcctgctcgcgctactcggcatcaacctcgccggtgtcaaatggatcattagactgcagctccttctgttattcttattagcagtgtccaccctggacttcgtggtgggcagttttacacatcttgatccagaacatggctttatcggctattccccagagttattacagaataataccctgcctgactactcacccggcgaatccttctttacggtgttcggcgtgttctttcccgccgcaacaggagttatggccggctttaacatgggcggcgaccttagggaacccgccgcaagtatcccaccaggctcactcgcagctgtcggcatctcttggtttctgtatataattttcgtgtttctgctaggagccatttgcacaagggaggccctccggtatgactttcttatcgccgagaaggtgtcattgatgggattcctgttcttgttgggattatacatctcctcactggcttcctgcatgggaggcctgtacggcgcgccccggatactacagtgtatagcgcaggagaaggtgatccccgccctggcctgcttggggcagggcaaggggccaaacaagacccctgtggctgctatttgcctcacaagcctcgttacaatggccttcgttttcgtgggtcaagtaaacgtgctggcaccaatcgtgaccataaactttatgctgacctacgttgccgtagactactcttacttttcacttagcatgtgtagctgtagtttgacccccgtcccagaaccagttctccgggagggggctgaggggctccactgtagtgagcatctcttgttggagaaggcaccgtcttatgggagtgaggggcctgcccaacgagtgttggagggcaccttgctggagttcacgaaagatatggatcagttacttcaactcacacgcaaactggagtcctctcagccacgacagggcgagggaaaccgaacccctgaaagccaaaagaggaaaagtaaaaaagccaccaaacagactctccaagattctttcctgctggatctcaaaagccccccatcattccccgttgaaatctccgaccgactaccagccgctagctgggaaggccaagagtcctgctggaataagcagacgtctaagagcgaaggcacgcaacctgaggggacctatggcgagcagttggtccctgagctgtgcaaccagtccgaatcttcaggggaggactttttcctgaaaagccggctgcaggaacaggatgtgtggagaagaagtacctccttctacactcatatgtgcaacccatgggtctctcttctgggggctgtggggagcctactcattatgttcgttatccaatgggtctacacgttggtgaacatgggtgtggccgctatcgtgtacttttacatcggcagagcctcaccaggactacaccttggttcagcctccaatttctcatttttccggtggatgcggagcctcctgctcccctcctgtcgctctctaagatcaccgcaggaacagataattcttgcaccaagtctggctaaagtggatatggaaatgacacagctgactcaggagaacgcagattttgcaactcgagacagataccatcactctagtttagttaaccgtgaacagctgatgccgcactactag

SEQ ID NO: 74908 - DNA, 1548 bp, Artificial Sequence
  derived and/or modified sequence
atgcggcgggccgccgccggcggcctggccgtgggccagctgcccggggagggcccagcaggcgaggagggggccgctctggggaaggcaatgcgcggtggaggttgttcccctcattcaccttcaggatgcctgtccggcgtgatggccggctttaatatgggcggggacctgcgggaacccgcggcatccattccccccgggagtcttgcagcagtcggtatctcctggttcctgtacatcatctttgtgttcctgttaggagctatctgcacacgggaagcccttcgatatgatttcctgatcgctgaaaaggtgagcctgatgggatttctgttcctgcttggactctacattagctccctggcatcatgcatgggcggcctgtacggagcccctcgcattctgcagtgcatcgcacaggagaaagtcatacctgccctcgcctgtctgggccagggcaagggcccaaacaagacccctgtcgctgcaatctgtttgacgtccctggtgaccatggcgtttgtgtttgtaggacaagtgaacgttctcgccccgattgtgacaattaacttcatgctgacatatgttgcagtggactatagctacttctcgctctctatgtgctcttgcagcttaactcctgtccctgaacccgtgctcagggaaggcgccgagggactccactgttcagagcacctgctcctggagaaggctccctcctacggaagtgaaggacctgctcagcgcgtacttgagggaactctcctggagttcaccaaagatatggatcaactgcttcagttgaccagaaagctggaaagcagccaaccgagacagggggagggtaatagaacacctgagtcccagaaacgcaagagtaagaaagccacaaagcagacgttacaggattctttcctcttagacctcaagtctccccccagttttcctgtggagatctctgaccggctccctgccgctagctgggaaggccaggaatcttgttggaataaacagactagcaagtcagagggtacacagcccgaggggacatacggagaacaacttgtgcctgaactttgcaatcagtctgaaagtagtggggaggatttttttctcaaaagccgcctccaagagcaggatgtctggcgaaggtcgacaagtttctacacacatatgtgcaacccctgggtctctctgctgggcgctgttggatccttgctgataatgttcgtgattcagtgggtgtacaccctcgttaatatgggcgtggctgctatcgtatacttctacattgggcgtgcctcacctggcctacacttgggctcagcttccaacttttccttttttcgatggatgcgttctctgcttctgccaagctgtcgaagtcttaggtcacctcaagaacagataatcctcgcccctagcctggccaaggtagacatggagatgacccagttgacgcaggagaatgcagactttgctacaagagaccggtatcaccacagttctctcgtcaatagagagcagctaatgccccattactag

SEQ ID NO: 74909 - DNA, 1128 bp, Artificial Sequence
  derived and/or modified sequence
atggcaggtttcaatatgggcggagatctccgggagcccgctgcttcaatcccacccggatctctggccgctgtgggaattagttggttcctgtacattatcttcgtgtttttgttaggcgcaatatgcacgcgggaggctctccggtacgacttcctgattgcagagaaggtctctctgatggggtttttgtttctgcttggtctgtatatcagcagcctcgcttcatgcatgggcggactctacggtgcccctcgcattctccagtgcatcgcccaagaaaaagtgatccccgctctggcctgcctgggccagggtaagggaccgaacaagacccccgtagctgcaatctgcctcaccagtctggtaactatggctttcgtgtttgtcggccaggtaaacgtcctggctcccattgtgaccattaacttcatgctgacgtatgtcgcagtggactactcatacttcagtctgtccatgtgcagttgtagcctgacacccgtcccagaacctgtattgagggaaggggcagaggggctgcattgcagtgaacacttgctcctggagaaggcccctagttatggatctgaaggccctgcccagcgagttcttgagggcactcttctggagttcactaaggacatggaccagctgctccagctgacacgaaagttagaatcatcacagcctcgtcagggggagggcaaccgaactcccgaatctcagaagcggaagtccaaaaaggccaccaaacagaccctacaagactccttcctgctcgatttaaaaagtcccccaagtttcccagtcgaaataagcgataggttgcctgcggcttcctgggagggacaggaaagctgctggaacaaacagacttccaagtctgaagggacacaacctgagggtacgtatggggagcagctagtgccagaactgtgtaatcagagcgagagctccggggagggcgatttgaggagcccccaagaacagattatactggcaccaagtctggcaaaagtggacatggaaatgacacagctgactcaggaaaatgccgatttcgccacccgagataggtaccatcactcaagcttagtgaatcgtgagcagttgatgccacactactag

SEQ ID NO: 74910 - DNA, 2232 bp, Artificial Sequence
  derived and/or modified sequence
atgctgccgctcgaacggactattacgtacagagacatgagctcatttattcaggtgaagaaccactttaacgttgtgaacgtcacctgcgttagctatagatctacatgctttcgtgatatgaggcgcttcatccttgacgccctcgcccagccacaaccgtggtggaaaactcaacttttcatgtgggagccagtcttgtttgggacctgggacggggtgttcaccagctgcatgatcaacatattcggagtagtgttgttcctcaggaccggctggctagtgggaaacacgggagttcttctgggaatgttcctcgtctctttcgttattctggtggcgctggtgacagtgctcagtggcattggggtcggtgaaagaagttccatcggctccggaggagtgtatagcatgatttcctctgtgctgggtggacagacaggcggaaccatcggcctgctctacgtgtttggccagtgcgtggccggtgccatgtatattacaggatttgccgaaagcatttccgacctgcttggcttaggaaacatctgggctgttcgaggaatttctgttgccgttcttctcgccctcttaggaattaacctagccggagtgaagtggattatcaggctgcaattgctgctcctgtttctcctggctgtgtccacactcgattttgtggtcgggagctttacccacctagatcccgaacatggctttatcgggtattcgcccgagttattacagaacaacactttaccagattatagccctggggagagcttctttacggttttcggggtattctttccggctgcgacaggtgttatggcaggcttcaacatgggtggagatttgcgagagccggctgcgtctattcctcctgggagcttggcagcagtgggtatctcttggtttctttacatcatatttgtttttttgctgggggcaatctgcactagagaggctctcaggtacgactttttaatcgccgagaaagtgagcctgatggggttcctctttcttctagggctgtatattagcagtctcgcctcatgtatgggagggctgtacggcgctcctagaatccttcagtgcatcgcacaggagaaggtcatcccggcattggcctgcttgggccagggtaaaggaccaaacaaaactcccgtagcagccatctgcctgacatcactggtgacaatggcgtttgtgtttgttgggcaagtaaacgtgctcgctccaatagtgactatcaattttatgctcacctacgtcgctgtggattactcatatttttctcttagcatgtgtagctgctcacttaccccagtgccagagcccgtccttagagaaggcgctgaagggctgcactgctctgaacacctgctgctggagaaggctccctcttacggctcagaagggcctgcgcagcgggtgctcgagggtaccctgctggagttcacgaaggacatggatcagcttctgcagctgaccaggaagttggaaagcagccaacccaggcagggtgagggcaatcgtacccctgagagtcagaaaagaaagagcaaaaaggccactaagcaaaccctgcaggactcgttcctgcttgacctgaaatcccccccatcatttcctgtggaaatttccgacagactgcccgcagcttcctgggaaggccaggagagctgttggaacaagcagacctccaagagcgaagggacacagcccgagggtacttacggcgagcagttagtgcccgaactgtgcaaccaatctgaatcctctggcgaggacttctttctgaaatcacgcctgcaggagcaggatgtttggcgacggtctacatcattctacactcatatgtgtaatccctgggtctcattgctgggcgctgtgggttctctgctgattatgtttgtgatccagtgggtgtatacactggtgaacatgggcgtggcagccattgtgtatttttacattggcagggccagtccgggtcttcacctgggctctgcgtccaacttctctttcttcaggtggatgagatcccttctgcttccatcgtgtaggagcctcaggagccctcaggagcagattatcctggcccctagtttggccaaagtagatatggaaatgactcagttaacacaggaaaatgcagacttcgcaacacgtgataggtatcaccattctagtctggtgaaccgggagcagttgatgccgcactactag

SEQ ID NO: 74911 - DNA, 1548 bp, Artificial Sequence
  derived and/or modified sequence
atgcggagggctgccgcagggggactcgctgtaggacagctccccggtgagggaccggcaggagaagagggtgctgcattaggcaaggcgatgagggggggaggatgtagtcctcacagcccgagtggctgtttatctggtgttatggccggattcaatatgggaggcgatctgcgtgagcccgcagcctccattccgccaggtagccttgccgctgtagggatctcctggttcctctacatcatttttgtgttcctcctcggcgctatatgcactcgcgaggcactaaggtacgactttcttatagccgagaaggtaagcctcatgggatttctgtttcttctcgggctgtatatttccagtttggcaagttgcatgggcggtctctacggagcccctcggatcttgcagtgtatagcccaagaaaaagttattccagctctagcctgcctggggcagggaaaagggccaaacaaaaccccagtagccgctatctgcctgacctccctcgtcacaatggcctttgtattcgtgggtcaggtcaacgtgttagccccaatcgtgaccatcaattttatgctgacatacgtggccgtggattatagttacttcagcctttccatgtgctcatgttcgctgactcccgtgccagaacccgtgctccgagagggggcagagggattacattgttccgaacacctgctgttagagaaagccccatcttacggaagcgaaggacccgctcagcgcgtgcttgagggcacactgttagagtttaccaaagacatggatcagctcctgcaactaactaggaaattggagagcagtcagccccgtcaaggcgagggaaatcgaactcctgagagtcagaagcggaagtcgaagaaggctaccaaacagacgctgcaggattcatttctcctggacctcaagagccccccatcttttccggttgaaattagcgaccgcttacccgcagcctcatgggaaggccaagaaagctgctggaataaacagacatccaaatcagaaggcacccaacctgaaggtacatacggagagcagcttgtgcccgagctttgtaaccagtctgagtcgtccggggaagatttcttcctaaaatcgcgcttgcaagagcaggatgtctggcgcaggtcgacgagcttctacacacatatgtgcaacccatgggtttccctgttaggcgctgtcggtagcctcctgattatgttcgtgattcagtgggtgtacacccttgttaatatgggcgtggcagctatagtatatttttacattgggcgtgccagtcctggactccacctggggtcagccagtaatttctctttttttaggtggatgaggtcactcctgctgccttcttgtaggtcactcaggtccccccaggagcagattatccttgctccctcactggccaaagtggatatggagatgactcaacttacccaagagaacgcggactttgctacaagagatcgctatcaccattcgtcattggttaatcgagagcaactgatgccacactattag

SEQ ID NO: 74912 - DNA, 1919 bp, Artificial Sequence
  derived and/or modified sequence
tccagagcagtctccctgtccagatcaccaggatccctgcttgctggagaatgacccagatgtcccaggtgcaggagctcttccatgaggcagcccagcaggatgccctggcccagccccagccctggtggaagacccagctgttcatgtgggagcctgtgctgtttgggacctgggatggtgtgttcacatcctgcatgatcaacatctttggggttgtgctcttcctgaggactggctggctggtgggaaacacaggagtgctcctgggcatgttcctggtgtccttcgtcatcctggtggccctcgtcacggtgctgtctggcattggcgtcggggagcgcagcagcatcggcagcggtggcgtctactccatgatctcctcggtcctgggtgggcagacgggaggcaccatcgggctgctctatgtgtttggacagtgtgttgcaggtgccatgtatatcaccggctttgctgaatccatctcggatttgctgggcctcgggaatatctgggctgtgcgaggaatttcagttgcggtgcttctggccttgctgggcattaacctcgcaggtgtcaaatggataatccgcctccagctgctgttgctgttcctgctggccgtgtccacactggactttgtggtgggttctttcacccacctggacccagaacatggtttcattggatattcacccgaactgctacagaacaacacgctgcccgattacagcccgggggaatcttttttcactgtctttggggttttcttcccagcggctacaggagtcatggccggcttcaacatggggggcgacctcagggagcctgccgccagcattcccccgggctccctggcagctgttggcatctcgtggtttctgtacatcatcttcgtcttcctcctgggcgccatctgcactcgagaggcccttcgctatgacttcctgatagcggaaaaggtatccctcatgggcttcctgttccttttgggcttatacatctcgtccctggcttcctgcatgggaggactttatggagctccccgcatcctgcagtgcattgcccaggagaaagtgatccctgcacttgcctgtctgggacaagggaaggggccaaacaaaacacccgtggctgccatctgcctgaccagcttggtgaccatggcctttgtttttgtgggtcaagtgaacgttctggcccccatcgtcaccatcaacttcatgctgacatacgttgcagtggactactcttacttctccctgtccatgtgttcctgcagcctgaccccggtgcctgagccggtgctcagggagggcgcagaaggcctccactgctctgagcacctgctcttagagaaagctcccagttacggctctgagggacctgcccaaagagtcttggagggcacgctactggaattcaccaaggacatggatcagctcctccagctaaccaggaagcttgagagtagccagcccaggcaaggagagggtaacaggaccccagaaagtcagaagaggaaaagcaagaaggccaccaagcagaccctacaagatagcttcctcttggacctcaaatcccctccttctttccctgtcgagatctctgacaggttgcccgctgcctcctgggaggggcaggagtcctgctggaacaagcagacttccaagagcgaagggactcagcctgagggaacatatggagagcaacttgttcctgagctgtgcaaccaatcagagtccagtggagaaggtgacttgcggtcccctcaggagcagatcatcttggcgccgtccctggctaaggttgacatggagatgactcagctcacccaggagaatgcagacttcgccactcgggatcgctaccaccactcctccctcgtgaaccgggagcagctgatgcctcactactag

SEQ ID NO: 74913 - DNA, 3484 bp, Artificial Sequence
  derived and/or modified sequence
atgctgcctttagaacgaactatcacttacagagacatgtcttcattcatacaggtgaaaaaccatttcaatgtagtcaatgtgacatgcgtttcatacagaagtacctgcttcagagacatgagaagattcatactggatgccctggcccagccccagccctggtggaagacccagctgttcatgtgggagcctgtgctgtttgggacctgggatggtgtgttcacatcctgcatgatcaacatctttggggttgtgctcttcctgaggactggctggctggtgggaaacacaggagtgctcctgggcatgttcctggtgtccttcgtcatcctggtggccctcgtcacggtgctgtctggcattggcgtcggggagcgcagcagcatcggcagcggtggcgtctactccatgatctcctcggtcctgggtgggcagacgggaggcaccatcgggctgctctatgtgtttggacagtgtgttgcaggtgccatgtatatcaccggctttgctgaatccatctcggatttgctgggcctcgggaatatctgggctgtgcgaggaatttcagttgcggtgcttctggccttgctgggcattaacctcgcaggtgtcaaatggataatccgcctccagctgctgttgctgttcctgctggccgtgtccacactggactttgtggtgggttctttcacccacctggacccagaacatggtttcattggatattcacccgaactgctacagaacaacacgctgcccgattacagcccgggggaatcttttttcactgtctttggggttttcttcccagcggctacaggagtcatggccggcttcaacatggggggcgacctcagggagcctgccgccagcattcccccgggctccctggcagctgttggcatctcgtggtttctgtacatcatcttcgtcttcctcctgggcgccatctgcactcgagaggcccttcgctatgacttcctgatagcggaaaaggtatccctcatgggcttcctgttccttttgggcttatacatctcgtccctggcttcctgcatgggaggactttatggagctccccgcatcctgcagtgcattgcccaggagaaagtgatccctgcacttgcctgtctgggacaagggaaggggccaaacaaaacacccgtggctgccatctgcctgaccagcttggtgaccatggcctttgtttttgtgggtcaagtgaacgttctggcccccatcgtcaccatcaacttcatgctgacatacgttgcagtggactactcttacttctccctgtccatgtgttcctgcagcctgaccccggtgcctgagccggtgctcagggagggcgcagaaggcctccactgctctgagcacctgctcttagagaaagctcccagttacggctctgagggacctgcccaaagagtcttggagggcacgctactggaattcaccaaggacatggatcagctcctccagctaaccaggaagcttgagagtagccagcccaggcaaggagagggtaacaggaccccagaaagtcagaagaggaaaagcaagaaggccaccaagcagaccctacaagatagcttcctcttggacctcaaatcccctccttctttccctgtcgagatctctgacaggttgcccgctgcctcctgggaggggcaggagtcctgctggaacaagcagacttccaagagcgaagggactcagcctgagggaacatatggagagcaacttgttcctgagctgtgcaaccaatcagagtccagtggagaagatttcttcctgaagtccaggctccaagaacaagatgtctggagaagatccacttctttctatacccacatgtgcaacccctgggtctccctgttgggggctgttgggtcccttctcatcatgtttgtgatacagtgggtgtataccctggttaacatgggtgttgctgccatcgtgtatttctacattggccgggccagtccagggcttcaccttggatcagcctccaacttcagctttttccggtggatgaggtctctcttgctcccctcctgcaggagcttgcggtcccctcaggagcagatcatcttggcgccgtccctggctaaggttgacatggagatgactcagctcacccaggagaatgcagacttcgccactcgggatcgctaccaccactcctccctcgtgaaccgggagcagctgatgcctcactactagatgcagtgctgggaccttcctcttttggagctgtcccatgtacagtggacccaagctcaggaccttcgtggagctgcttctccaacctgagaaactcaagacccatcctcccgctgtcactttggacaatggaaatctacattttcttttccctttttttttttttttgagacagagtctcgccctgtcacccaggctggagtccagtggcacaatcttggctcactgcaacctctgcttcccgagttcaagcaattctcctgcctcagcctcctgagtagctgggattataggcatgcaccaccacacccagctattttttgtatttttactggagacagggtttcaccatgttggccaggctggtctcgaactcctgacctcgtgatccacccgtctcagcctcccaaagtactgggattacaggcgtgagccaccatgcctggccagaaatctatgttttcttagaacatgtggaagaaggaaaaagacaaaaaaggaaatctggattctgaggaccacgtctcacccagggtgacatcaggaatggtgctagcctctgcaacacgacacccagtctgaagagctctatacaggtactaagactagcaggggacaccaagactctgcacaaccagattgcttgtgcagagggccacaataagtgtatgttttatattttattgtattatttattcaaaaataaataatacactcacatgtttccacacccaaaagatatatagagtgaaaagtctccctccaatccttattctccacctgctcagttcctgtctaccctggcctagaggtaaccactattctcatccgtacatccagcatttctttatggatatacaagcaaatgggaatgtagagtctcacattctctctttatacacaaaagttagcacgttatacacatgttctgcaccttgcttttttcccttaacaatctatcttggagacatttcatatcaattcatatgccatttgttcatttttttcattgtataaatgtgttataatttatttcgccagttccacaatgatgagcatttggattctttccaatcttttgcaatgacaatcagctctgcagtgaataatcttgtacaaatgtgcaagcataaagtgtatctctaggataaattcccaaaagtggaattgcaggatcaaaaggtacatgcatttgtaaactattattgtttagtgagggtctttttaattaaagaattaacatgaattgcct

SEQ ID NO: 74914 - DNA, 2831 bp, Artificial Sequence
  derived and/or modified sequence
agttgccaggggagattgaaaagcagcctatgcgcagagctgcagctggagggcttgcggtgggacagcttccaggagagggtcccgcaggagaggaaggggcagccctggggaaggcgatgcgtggaggaggctgctcaccccattccccatctgggtgtctttcaggagtcatggccggcttcaacatggggggcgacctcagggagcctgccgccagcattcccccgggctccctggcagctgttggcatctcgtggtttctgtacatcatcttcgtcttcctcctgggcgccatctgcactcgagaggcccttcgctatgacttcctgatagcggaaaaggtatccctcatgggcttcctgttccttttgggcttatacatctcgtccctggcttcctgcatgggaggactttatggagctccccgcatcctgcagtgcattgcccaggagaaagtgatccctgcacttgcctgtctgggacaagggaaggggccaaacaaaacacccgtggctgccatctgcctgaccagcttggtgaccatggcctttgtttttgtgggtcaagtgaacgttctggcccccatcgtcaccatcaacttcatgctgacatacgttgcagtggactactcttacttctccctgtccatgtgttcctgcagcctgaccccggtgcctgagccggtgctcagggagggcgcagaaggcctccactgctctgagcacctgctcttagagaaagctcccagttacggctctgagggacctgcccaaagagtcttggagggcacgctactggaattcaccaaggacatggatcagctcctccagctaaccaggaagcttgagagtagccagcccaggcaaggagagggtaacaggaccccagaaagtcagaagaggaaaagcaagaaggccaccaagcagaccctacaagatagcttcctcttggacctcaaatcccctccttctttccctgtcgagatctctgacaggttgcccgctgcctcctgggaggggcaggagtcctgctggaacaagcagacttccaagagcgaagggactcagcctgagggaacatatggagagcaacttgttcctgagctgtgcaaccaatcagagtccagtggagaagatttcttcctgaagtccaggctccaagaacaagatgtctggagaagatccacttctttctatacccacatgtgcaacccctgggtctccctgttgggggctgttgggtcccttctcatcatgtttgtgatacagtgggtgtataccctggttaacatgggtgttgctgccatcgtgtatttctacattggccgggccagtccagggcttcaccttggatcagcctccaacttcagctttttccggtggatgaggtctctcttgctcccctcctgcaggagcttgcggtcccctcaggagcagatcatcttggcgccgtccctggctaaggttgacatggagatgactcagctcacccaggagaatgcagacttcgccactcgggatcgctaccaccactcctccctcgtgaaccgggagcagctgatgcctcactactagatgcagtgctgggaccttcctcttttggagctgtcccatgtacagtggacccaagctcaggaccttcgtggagctgcttctccaacctgagaaactcaagacccatcctcccgctgtcactttggacaatggaaatctacattttcttttccctttttttttttttttgagacagagtctcgccctgtcacccaggctggagtccagtggcacaatcttggctcactgcaacctctgcttcccgagttcaagcaattctcctgcctcagcctcctgagtagctgggattataggcatgcaccaccacacccagctattttttgtatttttactggagacagggtttcaccatgttggccaggctggtctcgaactcctgacctcgtgatccacccgtctcagcctcccaaagtactgggattacaggcgtgagccaccatgcctggccagaaatctatgttttcttagaacatgtggaagaaggaaaaagacaaaaaaggaaatctggattctgaggaccacgtctcacccagggtgacatcaggaatggtgctagcctctgcaacacgacacccagtctgaagagctctatacaggtactaagactagcaggggacaccaagactctgcacaaccagattgcttgtgcagagggccacaataagtgtatgttttatattttattgtattatttattcaaaaataaataatacactcacatgtttccacacccaaaagatatatagagtgaaaagtctccctccaatccttattctccacctgctcagttcctgtctaccctggcctagaggtaaccactattctcatccgtacatccagcatttctttatggatatacaagcaaatgggaatgtagagtctcacattctctctttatacacaaaagttagcacgttatacacatgttctgcaccttgcttttttcccttaacaatctatcttggagacatttcatatcaattcatatgccatttgttcatttttttcattgtataaatgtgttataatttatttcgccagttccacaatgatgagcatttggattctttccaatcttttgcaatgacaatcagctctgcagtgaataatcttgtacaaatgtgcaagcataaagtgtatctctaggataaattcccaaaagtggaattgcaggatcaaaaggtacatgcatttgtaaactattattgtttagtgagggtctttttaattaaagaattaacatgaattgcctaa

SEQ ID NO: 74915 - DNA, 774 bp, Artificial Sequence
  derived and/or modified sequence
atggagcacctgggcccccaccacctgcaccccggccacgccgagcccatcagcttcggcatcgaccagatcctgaacagccccgaccagggcggctgcatgggccccgccagcagactgcaggacggcgagtacggcctgggctgcctggtgggcggcgcctacacctacggcggcggcggcagcgccgccgccaccggcgccggcggcgccggcgcctacggcaccggcggccccggcggccccggcggccccgccggcggcggcggcgcctgcagcatgggccccctgaccggcagctacaacgtgaacatggccctggccggcggccccggccccggcggcggcggcggcagcagcggcggcgccggcgccctgagcgccgccggcgtgatcagagtgcccgcccacagacccctggccggcgccgtggcccacccccagcccctggccaccggcctgcccaccgtgcccagcgtgcccgccatgcccggcgtgaacaacctgaccggcctgaccttcccctggatggagagcaacagaagatacaccaaggacagattcaccggccacccctaccagaacagaaccccccccaagaagaagaagcccagaaccagcttcaccagactgcagatctgcgagctggagaagagattccacagacagaagtacctggccagcgccgagagagccgccctggccaaggccctgaagatgaccgacgcccaggtgaagacctggttccagaacagaagaaccaagtggagatag

SEQ ID NO: 74916 - DNA, 774 bp, Artificial Sequence
  derived and/or modified sequence
atggagcacctgggcccccaccacctccacccaggacatgcagaacccatttcttttggcatcgatcagatcttgaattctcctgaccagggcggctgcatgggtccagctagtcgtctccaagacggcgagtacggactggggtgcctcgtcgggggagcatacacatacggaggaggcggctccgccgccgcaaccggtgcaggaggtgcgggggcttacggtacaggggggccagggggcccaggagggccagcgggcggtggcggggcctgctctatgggtcctctgaccggcagttacaacgttaacatggcgctagctggcgggccgggccctggcgggggcggaggaagcagtggaggagcgggcgccctctctgccgccggcgtcattcgggttccagcccaccggcccttggcaggggccgtggctcatccacagcctctcgcaaccggactgccgactgtgccttccgtgcctgcgatgccaggggtaaataatttgacgggcttgacttttccttggatggagtctaacagaaggtatacgaaggacaggtttaccggccatccataccaaaacagaaccccccccaaaaagaagaagcccagaacaagttttactcggctccagatctgtgaactggagaaacggttccacagacagaagtacctggcttctgccgaaagagccgctctggccaaggcgctgaagatgaccgatgctcaggtgaaaacctggttccaaaaccggcggacaaagtggaggtag

SEQ ID NO: 74917 - DNA, 774 bp, Artificial Sequence
  derived and/or modified sequence
atggagcacctgggcccccaccacctgcaccctggccacgccgagcccatcagctttggaattgaccagatcctgaacagcccagaccagggcggctgcatgggccctgccagccggctgcaggatggagaatatggcctgggctgcctggtgggcggggcctacacctatggaggcggcggcagcgctgctgccaccggggccggcggggccggggcctacggcaccggcggccctgggggccctgggggccctgctgggggcggcggggcctgcagcatgggccccctgaccggcagctacaacgtgaacatggccctggccggcggccctggccctgggggcggcggcggcagcagcggcggggccggggccctgtctgctgctggggtcatccgggtgcctgcccaccggcccctggccggggctgtggcccacccccagcccctggccaccggcctgcccaccgtgcccagcgtgcctgccatgcctggggtgaacaacctgaccggcctgaccttcccctggatggagagcaacagacgctacaccaaggaccgcttcaccggccacccctaccagaacagaacaccacccaagaagaagaagcccaggaccagcttcacccggctgcagatctgtgagctggagaagcgcttccaccggcagaagtacctggccagcgctgagcgggccgccctggccaaggccctgaagatgacagatgcccaggtgaagacctggttccagaacagaaggaccaagtggaggtag

SEQ ID NO: 74918 - DNA, 774 bp, Artificial Sequence
  derived and/or modified sequence
atggagcacctgggcccccaccacctgcaccccggccacgccgagccaatctctttcggcatagaccaaattcttaactcacctgaccagggaggttgtatgggcccagcttctcgcctgcaggacggcgaatacggtcttggttgcttggtgggcggggcatatacctatggaggcggaggatctgctgctgcgaccggagcagggggggctggagcctacggtaccggcggacccgggggccccggaggaccggccgggggcggtggggcatgcagcatgggtccgctaacaggcagctataacgtcaatatggccctggccggaggtcccgggcccggaggcggaggaggcagctcgggaggtgctggcgccctctccgccgcgggagtcatccgtgtacctgcacatcgccctttggccggcgccgttgctcacccccagcccttggccacaggacttccaactgttccctctgtcccggctatgccaggcgtcaacaatctcaccggactcacttttccttggatggaaagcaacagacgctacaccaaggaccgctttacagggcacccataccagaatcggactccacccaaaaaaaagaaacccagaacaagtttcacacggctgcagatatgtgaattagagaaaaggtttcaccgccaaaaatacctcgcaagtgcagaacgggcggctctggcaaaagctctgaagatgaccgacgcccaggttaaaacttggttccaaaacagacggacaaaatggcggtag

SEQ ID NO: 74919 - DNA, 774 bp, Artificial Sequence
  derived and/or modified sequence
atggaacatctggggcctcatcatctccatcctggccatgccgagccaatcagcttcgggattgaccagattcttaattccccggaccagggagggtgcatgggtcctgctagtaggctccaggatggagaatatgggttgggatgtctggtgggcggtgcttatacatatggcggaggcggatccgccgcagccactggtgcgggaggggctggggcatatggaaccggagggcctggaggcccagggggacccgctggtgggggtggcgcttgttctatgggaccacttaccggttcctacaatgtgaatatggcactcgccggagggccagggcctggcggtggcggtggaagtagcggcggtgctggcgctctctccgccgctggggtcatccgcgtcccggctcatcggccactcgctggtgctgtagctcaccctcagcccctcgccactggtttgccaaccgtgccttccgttcctgccatgcccggagttaacaacttgacagggttaacattcccttggatggagtccaatcgaaggtacaccaaagataggttcaccggccacccctaccagaatagaactccaccgaaaaagaaaaagcctagaactagctttacacggctacagatctgtgaacttgagaagcggttccaccggcagaagtacctggcctctgctgagagagccgcactggcaaaagctctcaagatgactgatgctcaggtaaagacctggttccagaatcggcgaactaagtggaggtag

SEQ ID NO: 74920 - protein, 476 aa, Artificial Sequence
  derived and/or modified sequence
MFRLNSLSALAELAVGSRWYHGGSQPIQIRRRLMMVAFLGASAVTASTGLLWKRAHAESPPCVDNLKSDIGDKGKNKDEGDVCNHEKKTADLAPHPEEKKKKRSGFRDRKVMEYENRIRAYSTPDKIFRYFATLKVISEPGEAEVFMTPEDFVRSITPNEKQPEHLGLDQYIIKRFDGKKISQEREKFADEGSIFYTLGECGLISFSDYIFLTTVLSTPQRNFEIAFKMFDLNGDGEVDMEEFEQVQSIIRSQTSMGMRHRDRPTTGNTLKSGLCSALTTYFFGADLKGKLTIKNFLEFQRKLQHDVLKLEFERHDPVDGRITERQFGGMLLAYSGVQSKKLTAMQRQLKKHFKEGKGLTFQEVENFFTFLKNINDVDTALSFYHMAGASLDKVTMQQVARTVAKVELSDHVCDVVFALFDCDGNGELSNKEFVSIMKQRLMRGLEKPKDMGFTRLMQAMWKCAQETAWDFALPKQ

SEQ ID NO: 74921 - protein, 476 aa, Artificial Sequence
  derived and/or modified sequence
MFRLNSLSALAELAVGSRWYHGGSQPIQIRRRLMMVAFLGASAVTASTGLLWKRAHAESPPCVDNLKSDIGDKGKNKDEGDVCNHEKKTADLAPHPEEKKKKRSGFRDRKVMEYENRIRAYSTPDKIFRYFATLKVISEPGEAEVFMTPEDFVRSITPNEKQPEHLGLDQYIIKRFDGKKISQEREKFADEGSIFYTLGECGLISFSDYIFLTTVLSTPQRNFEIAFKMFDLNGDGEVDMEEFEQAISIIRSQTSMGMRHRDRPTTGNTLKSGLCSALTTYFFGADLKGKLTIKNFLEFQRKLQHDVLKLEFERHDPVDGRITERQFGGMLLAYSGVQSKKLTAMQRQLKKHFKEGKGLTFQEVENFFTFLKNINDVDTALSFYHMAGASLDKVTMQQVARTVAKVELSDHVCDVVFALFDCDGNGELSNKEFVSIMKQRLMRGLEKPKDMGFTRLMQAMWKCAQETAWDFALPKQ

SEQ ID NO: 74922 - DNA, 1431 bp, Artificial Sequence
  derived and/or modified sequence
atgttcagactgaacagcctgagcgccctggccgagctggccgtgggcagcagatggtaccacggcggcagccagcccatccagatcagaagaagactgatgatggtggccttcctgggcgccagcgccgtgaccgccagcaccggcctgctgtggaagagagcccacgccgagagccccccctgcgtggacaacctgaagagcgacatcggcgacaagggcaagaacaaggacgagggcgacgtgtgcaaccacgagaagaagaccgccgacctggccccccaccccgaggagaagaagaagaagagaagcggcttcagagacagaaaggtgatggagtacgagaacagaatcagagcctacagcacccccgacaagatcttcagatacttcgccaccctgaaggtgatcagcgagcccggcgaggccgaggtgttcatgacccccgaggacttcgtgagaagcatcacccccaacgagaagcagcccgagcacctgggcctggaccagtacatcatcaagagattcgacggcaagaagatcagccaggagagagagaagttcgccgacgagggcagcatcttctacaccctgggcgagtgcggcctgatcagcttcagcgactacatcttcctgaccaccgtgctgagcaccccccagagaaacttcgagatcgccttcaagatgttcgacctgaacggcgacggcgaggtggacatggaggagttcgagcaggtgcagagcatcatcagaagccagaccagcatgggcatgagacacagagacagacccaccaccggcaacaccctgaagagcggcctgtgcagcgccctgaccacctacttcttcggcgccgacctgaagggcaagctgaccatcaagaacttcctggagttccagagaaagctgcagcacgacgtgctgaagctggagttcgagagacacgaccccgtggacggcagaatcaccgagagacagttcggcggcatgctgctggcctacagcggcgtgcagagcaagaagctgaccgccatgcagagacagctgaagaagcacttcaaggagggcaagggcctgaccttccaggaggtggagaacttcttcaccttcctgaagaacatcaacgacgtggacaccgccctgagcttctaccacatggccggcgccagcctggacaaggtgaccatgcagcaggtggccagaaccgtggccaaggtggagctgagcgaccacgtgtgcgacgtggtgttcgccctgttcgactgcgacggcaacggcgagctgagcaacaaggagttcgtgagcatcatgaagcagagactgatgagaggcctggagaagcccaaggacatgggcttcaccagactgatgcaggccatgtggaagtgcgcccaggagaccgcctgggacttcgccctgcccaagcagtag

SEQ ID NO: 74923 - DNA, 1431 bp, Artificial Sequence
  derived and/or modified sequence
atgttcagactgaacagcctgagcgccctggccgagctggccgtgggcagcagatggtaccacggcggcagccagcccatccagatcagaagaagactgatgatggtggccttcctgggcgccagcgccgtgaccgccagcaccggcctgctgtggaagagagcccacgccgagagccccccctgcgtggacaacctgaagagcgacatcggcgacaagggcaagaacaaggacgagggcgacgtgtgcaaccacgagaagaagaccgccgacctggccccccaccccgaggagaagaagaagaagagaagcggcttcagagacagaaaggtgatggagtacgagaacagaatcagagcctacagcacccccgacaagatcttcagatacttcgccaccctgaaggtgatcagcgagcccggcgaggccgaggtgttcatgacccccgaggacttcgtgagaagcatcacccccaacgagaagcagcccgagcacctgggcctggaccagtacatcatcaagagattcgacggcaagaagatcagccaggagagagagaagttcgccgacgagggcagcatcttctacaccctgggcgagtgcggcctgatcagcttcagcgactacatcttcctgaccaccgtgctgagcaccccccagagaaacttcgagatcgccttcaagatgttcgacctgaacggcgacggcgaggtggacatggaggagttcgagcaggccatcagcatcatcagaagccagaccagcatgggcatgagacacagagacagacccaccaccggcaacaccctgaagagcggcctgtgcagcgccctgaccacctacttcttcggcgccgacctgaagggcaagctgaccatcaagaacttcctggagttccagagaaagctgcagcacgacgtgctgaagctggagttcgagagacacgaccccgtggacggcagaatcaccgagagacagttcggcggcatgctgctggcctacagcggcgtgcagagcaagaagctgaccgccatgcagagacagctgaagaagcacttcaaggagggcaagggcctgaccttccaggaggtggagaacttcttcaccttcctgaagaacatcaacgacgtggacaccgccctgagcttctaccacatggccggcgccagcctggacaaggtgaccatgcagcaggtggccagaaccgtggccaaggtggagctgagcgaccacgtgtgcgacgtggtgttcgccctgttcgactgcgacggcaacggcgagctgagcaacaaggagttcgtgagcatcatgaagcagagactgatgagaggcctggagaagcccaaggacatgggcttcaccagactgatgcaggccatgtggaagtgcgcccaggagaccgcctgggacttcgccctgcccaagcagtag

SEQ ID NO: 74924 - DNA, 1431 bp, Artificial Sequence
  derived and/or modified sequence
atgttccgtctgaacagcctgtctgccctggccgagctggcagtgggctctcggtggtatcatggaggaagccagcctatacaaatccggagacggttaatgatggtcgcttttctcggggcctcagccgtgactgcttcgacgggactgctgtggaaacgagcccacgctgagagccccccatgtgtagataatctaaaatctgacatcggcgataaaggcaaaaacaaagatgagggcgacgtttgcaaccatgaaaagaaaaccgccgatcttgcccctcaccccgaggagaagaaaaaaaaacggagtgggtttcgagatagaaaagtaatggagtatgaaaaccgcattagagcttattccactccagacaaaatttttaggtatttcgccaccctaaaggtcatcagcgagccaggtgaggctgaagtttttatgaccccagaagactttgttcgcagtatcactcccaacgagaagcagcctgagcatttgggactcgaccagtacatcataaagaggttcgacgggaagaagatcagccaggaacgggagaaatttgcagacgaaggaagcatcttctacactttgggggagtgcggactcatcagtttcagcgactatatttttcttacaactgtgctatccacaccccagcggaattttgaaatcgctttcaaaatgttcgatttaaacggagacggcgaagtagacatggaggagtttgagcaggtgcagagtatcatccggtcgcagacatccatgggaatgaggcaccgggaccggcctacaacaggcaacaccctgaagtcgggattgtgtagtgccctcactacctatttcttcggcgctgacctgaagggaaaactgactattaagaacttcttggaatttcagcgaaaactgcagcatgacgtgctgaagttagagttcgagcgccacgatcccgtcgacgggcggattaccgaacgccagtttggtggaatgctgctggcttactcaggagtgcagtccaaaaaattgactgccatgcaacgtcagctgaaaaagcacttcaaagaagggaagggtctgaccttccaggaagtagagaacttcttcacattcctcaagaacattaatgacgtcgacacagcccttagcttttatcacatggccggtgccagcctcgataaggtgaccatgcagcaggtggccaggactgtcgccaaagtggagcttagcgaccacgtctgtgatgtggtgttcgcactctttgattgtgatggaaacggcgagcttagcaacaaagagtttgtctctattatgaagcagagactgatgcgggggttagaaaagcccaaagacatgggtttcacacgactcatgcaggctatgtggaagtgcgcccaagagactgcatgggacttcgccctgcccaaacaatag

SEQ ID NO: 74925 - DNA, 1431 bp, Artificial Sequence
  derived and/or modified sequence
atgttccgtctaaatagtttgagcgcactagctgagctggcggttggaagccggtggtaccatggtggctctcagccaatccagattagaagaaggcttatgatggtggcatttttgggtgcatcagccgttaccgccagtacgggtcttctatggaaacgcgcccacgccgagtcccccccatgtgtcgataatctgaagagtgatattggagataagggaaagaacaaggacgaaggggatgtgtgtaatcatgaaaaaaaaacagccgatctcgccccgcatccagaggagaaaaagaaaaagaggagcggcttccgcgaccgcaaggtgatggaatatgagaatcgcattagggcctatagtacaccagataaaattttccgttactttgcaacactgaaggtgataagcgagcccggtgaggccgaggtgtttatgacccctgaggactttgtgcggtccattactcctaacgagaaacagccggagcacctcggacttgaccagtacattatcaagcgcttcgacggcaagaaaatctctcaggaacgtgagaaatttgccgatgagggctccatcttttataccctgggagagtgcggcttgatctccttttccgattacatctttctcacgactgttctaagcactccgcagcgaaacttcgagattgcctttaaaatgtttgatctgaatggtgatggcgaagtggatatggaggaatttgaacaagccatatctataatcagatcgcagacctctatgggcatgaggcaccgtgaccggccaacaaccggcaataccctcaagtcaggcctctgttcagcgctgactacctacttttttggagccgacctgaagggaaaactcacgatcaagaacttcctggaattccagagaaagctgcagcacgatgtgctgaagttagagttcgaaaggcatgaccctgtggatggacgcattaccgagcggcagttcggtggtatgctgctggcatattccggagtgcagtcaaagaagctgaccgctatgcagaggcagctcaaaaagcactttaaggaaggaaaagggctgacctttcaggaagtcgagaatttctttaccttcctgaaaaacatcaacgacgtcgataccgccctctcattctatcacatggccggcgccagtctcgacaaggtcaccatgcaacaggtggcccggaccgtggccaaggttgaactgagtgaccacgtatgtgacgtggtgtttgccctctttgactgcgacggaaatggagaactttctaataaggagttcgtgtctattatgaagcagcgactgatgagggggctcgagaagccgaaggacatgggattcacacgcttaatgcaagctatgtggaagtgcgcacaagagactgcctgggacttcgcgttgcctaaacagtag

SEQ ID NO: 74926 - DNA, 1431 bp, Artificial Sequence
  derived and/or modified sequence
atgttccggctgaacagcctgagcgccctggccgagctggccgtgggcagccgctggtaccatggaggcagccagcccatccagatcagaagaaggctgatgatggtggccttcctgggcgccagcgctgtgacagccagcacaggcctgctgtggaagagggcccatgctgagagccccccctgtgtggacaacctgaagagtgacatcggggacaagggcaagaacaaggatgaaggagatgtgtgcaaccacgagaagaagacagctgacctggccccccaccctgaggagaagaagaagaagaggagcggcttccgggacaggaaggtgatggagtatgaaaatcgcatccgggcctacagcaccccagacaagatcttccgctactttgccaccctgaaggtgatcagcgagcccggggaggccgaggtgttcatgaccccagaggactttgtgcgcagcatcaccccaaatgagaagcagcctgagcacctgggcctggaccagtacatcatcaagagatttgatggcaagaagatcagccaggagcgggagaagtttgctgatgagggcagcatcttctacaccctgggggagtgtggcctcatctccttcagtgactacatcttcctgaccaccgtgctgagcaccccccagaggaactttgaaattgccttcaagatgtttgacctgaatggagatggagaggtggacatggaggagtttgagcaggtgcagagcatcatccgcagccagacctccatgggcatgaggcaccgggaccggcccaccaccggcaacaccctgaagagcggcctgtgcagcgccctgaccacctacttctttggagctgacctgaagggcaagctgaccatcaagaacttcctggagttccagaggaagctgcagcatgatgtgctgaagctggagtttgaaagacatgaccctgtggatggccgcatcacagagcggcagtttggaggcatgctgctggcctacagcggcgtgcagagcaagaagctgacagccatgcagaggcagctgaagaagcacttcaaggagggcaagggcctgaccttccaggaggtggagaacttcttcaccttcctgaagaacatcaatgatgtggacacagccctgtccttctaccacatggccggggccagcctggacaaggtgaccatgcagcaggtggccaggacagtggccaaggtggagctgagtgaccacgtgtgtgatgtggtgtttgccctgtttgactgtgatggaaatggagagctgagcaacaaggagtttgtgtccatcatgaagcagaggctgatgaggggcctggagaagcccaaggacatgggcttcacccggctgatgcaggccatgtggaagtgtgcccaggagacagcctgggactttgccctgcccaagcagtag

SEQ ID NO: 74927 - DNA, 1431 bp, Artificial Sequence
  derived and/or modified sequence
atgttccggctgaacagcctgagcgccctggccgagctggccgtgggcagccgctggtaccatggaggcagccagcccatccagatcagaagaaggctgatgatggtggccttcctgggcgccagcgctgtgacagccagcacaggcctgctgtggaagagggcccatgctgagagccccccctgtgtggacaacctgaagagtgacatcggggacaagggcaagaacaaggatgaaggagatgtgtgcaaccacgagaagaagacagctgacctggccccccaccctgaggagaagaagaagaagaggagcggcttccgggacaggaaggtgatggagtatgaaaatcgcatccgggcctacagcaccccagacaagatcttccgctactttgccaccctgaaggtgatcagcgagcccggggaggccgaggtgttcatgaccccagaggactttgtgcgcagcatcaccccaaatgagaagcagcctgagcacctgggcctggaccagtacatcatcaagagatttgatggcaagaagatcagccaggagcgggagaagtttgctgatgagggcagcatcttctacaccctgggggagtgtggcctcatctccttcagtgactacatcttcctgaccaccgtgctgagcaccccccagaggaactttgaaattgccttcaagatgtttgacctgaatggagatggagaggtggacatggaggagtttgagcaggccatcagcatcatccgcagccagacctccatgggcatgaggcaccgggaccggcccaccaccggcaacaccctgaagagcggcctgtgcagcgccctgaccacctacttctttggagctgacctgaagggcaagctgaccatcaagaacttcctggagttccagaggaagctgcagcatgatgtgctgaagctggagtttgaaagacatgaccctgtggatggccgcatcacagagcggcagtttggaggcatgctgctggcctacagcggcgtgcagagcaagaagctgacagccatgcagaggcagctgaagaagcacttcaaggagggcaagggcctgaccttccaggaggtggagaacttcttcaccttcctgaagaacatcaatgatgtggacacagccctgtccttctaccacatggccggggccagcctggacaaggtgaccatgcagcaggtggccaggacagtggccaaggtggagctgagtgaccacgtgtgtgatgtggtgtttgccctgtttgactgtgatggaaatggagagctgagcaacaaggagtttgtgtccatcatgaagcagaggctgatgaggggcctggagaagcccaaggacatgggcttcacccggctgatgcaggccatgtggaagtgtgcccaggagacagcctgggactttgccctgcccaagcagtag

SEQ ID NO: 74928 - DNA, 2383 bp, Artificial Sequence
  derived and/or modified sequence
ggagggggtggaggtttgtctccgctgtttcatctctatggctgtcagaggtgggcggctttgaccgagaggctgctggagctcgtgtttggacgcgatgtttcgtctgaactcactttctgctttggcagaactggctgtgggttctcgatggtaccatggaggatcacagcccatccagatccggcgaagactaatgatggtggctttcctgggagcatctgcagtaactgcaagtactggtcttttgtggaagagggcccatgcagaatctccaccatgtgtagacaacctaaaaagtgacatcggtgataaagggaagaataaagatgaaggggatgtttgtaaccatgagaaaaagactgcagatcttgcccctcacccagaagagaaaaagaagaaacgttctggattcagagacagaaaagtgatggaatatgagaataggattcgagcctactccacgccagacaaaatcttccgatattttgccaccttgaaagtcatcagtgagcctggtgaagcagaagtgtttatgacaccagaagattttgtgcgatccataacacccaatgaaaaacaaccagaacacttgggtctggatcaatatataataaaacgctttgatggaaagaaaatttcccaggaacgagaaaaatttgctgatgaaggcagtatattttacacccttggagaatgtgggctcatatccttttcagactacattttcctcacaactgttctttccactcctcagagaaattttgaaattgccttcaagatgtttgatttgaatggagatggagaagtagatatggaagaatttgaacaggttcagagcatcattcgctcccaaaccagtatgggtatgcgccacagagatcgtccaactactggcaacaccctcaagtctggcttgtgttcagccctcacaacctacttttttggagctgatctgaagggaaagctgacaatcaaaaacttcctcgaatttcagcgtaaactgcagcatgatgttctgaagcttgagtttgaacgccatgaccctgtggatgggagaattactgagaggcagtttggtggcatgctacttgcctacagtggggtgcagtccaagaagctgaccgccatgcagaggcagctcaagaagcacttcaaagaaggaaagggtctgacatttcaggaggtggagaacttctttactttcctaaagaacattaatgatgtggacactgcattgagtttttaccatatggctggagcatctcttgataaagtgaccatgcagcaggtggccaggacagtggctaaagtggagctctcagaccacgtgtgtgatgtggtgtttgcactctttgactgtgatggcaatggcgaactgagcaataaggaatttgtttccatcatgaagcaacggctgatgagaggcctggaaaagcccaaagacatgggtttcactcgcctcatgcaggccatgtggaaatgtgcacaggaaactgcctgggacttcgctttacccaaacagtaaccccacactgcaagaggggacccctccacccccagtaccctggaccccctccgcagagtctcggcagagccctttgtgctgctgcttctggaagtagtcccccttcctcccgggatgacctcaggactctgtcggtttcccctctttacccttccccgtccccgtgttctgctgggctctgattctgcccaatgagtatccccataggttctcaaaaacatgaacaagtctgtaaagctcagacatttgtcagcctcaacagcaccacccattcaagcatcctgtggataaagaattcagggaaccatccacacacctgccaaccctgggaagcatccagttctcaaatcgtttttgctatggatttatactaacaagaacattccttgacttccctcctgctggtgttttaaagccacaagtagggaagatatctggcaggcagaaagaagtctgtgatgataaacaatgatgaggatgacctaggcaccctacgctagtgtgagaagcctgcgccccaggaaggatctgtgttagtccctgggatggctccaaggcctgctctaggaaggcagcatgctcagtgggaacacagcaagattcagaatttaaagtagttgcttcatggctctgtgcactcccttttcttcctcgcagcctccctaagatgactccagtgtgaccctgtgcttagtgagcaatagtgattgagctcatgttccctgcaagtgccatttcctctccaggatgggcctctaaagctgaggcctggctcagagcctgtttgccctctgtcttaaacaattgtaaatatcacttaaattataaccatttgcaataaacatccccaaagtt

SEQ ID NO: 74929 - DNA, 1224 bp, Artificial Sequence
  derived and/or modified sequence
aagactttattattttgcttttctgagctaatcaatgactttaatttggaaaagcaactaaatatttggagaaaaccatgaaaagaatatatacttacagacgggccaaggagatcttcaaggacactcctaaagaaaatttcccaggaacgagaaaaatttgctgatgaaggcagtatattttacacccttggagaatgtgggctcatatccttttcagactacattttcctcacaactgttctttccaataagtaataccatattgaagcaacagaacgttaatattactaagctaagaagatggtgtctctgaaagcaaagctaaatcatttaaggcaaagcatgttgaaacaaaaagctcctcagagaaattttgaaattgccttcaagatgtttgatttgaatggagatggagaagtagatatggaagaatttgaacaggttcagagcatcattcgctcccaaaccagtatgggtatgcgccacagagatcgtccaactactggcaacaccctcaagtctggcttgtgttcagccctcacaacctacttttttggagctgatctgaagggaaagctgacaatcaaaaacttcctcgaatttcagcgtaaactgcagcatgatgttctgaagcttgagtttgaacgccatgaccctgtggatgggagaattactgagaggcagtttggtggcatgctacttgcctacagtggggtgcagtccaagaagctgaccgccatgcagaggcagctcaagaagcacttcaaagaaggaaagggtctgacatttcaggaggtggagaacttctttactttcctaaagaacattaatgatgtggacactgcattgagtttttaccatatggctggagcatctcttgataaagtgaccatgcagcaggtggccaggacagtggctaaagtggagctctcagaccacgtgtgtgatgtggtgtttgcactctttgactgtgatggcaatggcgaactgagcaataaggaatttgtttccatcatgaagcaacggctgatgagaggcctggaaaagcccaaagacatgggtttcactcgcctcatgcaggccatgtggaaatgtgcacaggaaactgcctgggacttcgctttacccaaacagtaaccccacactgcaagaggggacccctccacccccagtaccctggaccccctccgcagagtctcggcagagccctttgtgctgctg

SEQ ID NO: 74930 - DNA, 2357 bp, Artificial Sequence
  derived and/or modified sequence
gtttcatctctatggctgtcagaggtgggcggctttgaccgagaggctgctggagctcgtgtttggacgcgatgtttcgtctgaactcactttctgctttggcagaactggctgtgggttctcgatggtaccatggaggatcacagcccatccagatccggcgaagactaatgatggtggctttcctgggagcatctgcagtaactgcaagtactggtcttttgtggaagagggcccatgcagaatctccaccatgtgtagacaacctaaaaagtgacatcggtgataaagggaagaataaagatgaaggggatgtttgtaaccatgagaaaaagactgcagatcttgcccctcacccagaagagaaaaagaagaaacgttctggattcagagacagaaaagtgatggaatatgagaataggattcgagcctactccacgccagacaaaatcttccgatattttgccaccttgaaagtcatcagtgagcctggtgaagcagaagtgtttatgacaccagaagattttgtgcgatccataacacccaatgaaaaacaaccagaacacttgggtctggatcaatatataataaaacgctttgatggaaagaaaatttcccaggaacgagaaaaatttgctgatgaaggcagtatattttacacccttggagaatgtgggctcatatccttttcagactacattttcctcacaactgttctttccactcctcagagaaattttgaaattgccttcaagatgtttgatttgaatggagatggagaagtagatatggaagaatttgaacaggcaattagcatcattcgctcccaaaccagtatgggtatgcgccacagagatcgtccaactactggcaacaccctcaagtctggcttgtgttcagccctcacaacctacttttttggagctgatctgaagggaaagctgacaatcaaaaacttcctcgaatttcagcgtaaactgcagcatgatgttctgaagcttgagtttgaacgccatgaccctgtggatgggagaattactgagaggcagtttggtggcatgctacttgcctacagtggggtgcagtccaagaagctgaccgccatgcagaggcagctcaagaagcacttcaaagaaggaaagggtctgacatttcaggaggtggagaacttctttactttcctaaagaacattaatgatgtggacactgcattgagtttttaccatatggctggagcatctcttgataaagtgaccatgcagcaggtggccaggacagtggctaaagtggagctctcagaccacgtgtgtgatgtggtgtttgcactctttgactgtgatggcaatggcgaactgagcaataaggaatttgtttccatcatgaagcaacggctgatgagaggcctggaaaagcccaaagacatgggtttcactcgcctcatgcaggccatgtggaaatgtgcacaggaaactgcctgggacttcgctttacccaaacagtaaccccacactgcaagaggggacccctccacccccagtaccctggaccccctccgcagagtctcggcagagccctttgtgctgctgcttctggaagtagtcccccttcctcccgggatgacctcaggactctgtcggtttcccctctttacccttccccgtccccgtgttctgctgggctctgattctgcccaatgagtatccccataggttctcaaaaacatgaacaagtctgtaaagctcagacatttgtcagcctcaacagcaccacccattcaagcatcctgtggataaagaattcagggaaccatccacacacctgccaaccctgggaagcatccagttctcaaatcgtttttgctatggatttatactaacaagaacattccttgacttccctcctgctggtgttttaaagccacaagtagggaagatatctggcaggcagaaagaagtctgtgatgataaacaatgatgaggatgacctaggcaccctacgctagtgtgagaagcctgcgccccaggaaggatctgtgttagtccctgggatggctccaaggcctgctctaggaaggcagcatgctcagtgggaacacagcaagattcagaatttaaagtagttgcttcatggctctgtgcactcccttttcttcctcgcagcctccctaagatgactccagtgtgaccctgtgcttagtgagcaatagtgattgagctcatgttccctgcaagtgccatttcctctccaggatgggcctctaaagctgaggcctggctcagagcctgtttgccctctgtcttaaacaattgtaaatatcacttaaattataaccatttgcaataaacatccccaaagtt

SEQ ID NO: 74931 - DNA, 1431 bp, Artificial Sequence
  derived and/or modified sequence
atgttccggctgaacagcctgagcgccctggccgagctggccgtgggaagccgctggtatcacgggggttcccaacccattcagatacgtcggcgcctgatgatggtggcctttctcggggcctcagcggtcaccgcaagtactggattgctctggaagagggcccacgcagagtccccgccatgtgtggataacttgaagagcgacataggagacaagggaaagaataaagatgagggcgacgtgtgtaatcatgagaagaaaaccgcggacctcgcaccccatcccgaggaaaagaagaaaaagagatccgggtttagggataggaaagtgatggagtacgagaacaggatccgggcctactccactcccgacaaaatttttaggtacttcgctacactcaaggtgatcagtgaaccaggcgaggccgaagtctttatgaccccagaagactttgtcaggagtatcacacctaacgagaagcaacccgagcacctcgggctggaccaatatattatcaagcgctttgatggcaagaaaattagccaggagcgggagaaatttgcagacgagggatccatcttctatacactgggggagtgcggtctcatttccttttccgattacatcttcttaaccacagtgttgtccacgccacaaagaaatttcgagatagcattcaaaatgttcgacctgaacggagacggtgaggtcgatatggaagaattcgaacaggtgcagtcaataatacgcagtcaaacctctatgggcatgagacacagagaccggccgactactggcaataccctcaaatccgggctctgttccgccttaacaacgtacttcttcggcgccgacctgaagggaaagcttactattaaaaacttcctagaatttcagcgaaagttacaacatgacgttctgaaattggagtttgaacgccatgatcctgtggacggtcgaattacggagcgccaattcggcgggatgctgctggcgtactctggagtgcaaagtaagaagctgactgccatgcagcgacagctgaaaaagcacttcaaagagggtaaggggctaacctttcaggaggtggaaaatttttttacgtttctgaagaacatcaatgatgttgacacggccctgagtttttaccacatggctggtgcgtccctggacaaggtgacaatgcagcaggtggccagaacagtggcaaaggtcgaactcagtgatcatgtgtgtgacgtggtctttgccctatttgattgtgatgggaatggagagctctcaaacaaggaatttgtgtccataatgaagcagaggctcatgagagggctggaaaagcctaaggatatgggcttcacccgactgatgcaggccatgtggaagtgcgctcaagagacggcatgggacttcgcccttcctaagcagtag

SEQ ID NO: 74932 - DNA, 1431 bp, Artificial Sequence
  derived and/or modified sequence
atgttccggctgaacagcctgagcgccctggccgagctggccgtgggatctcggtggtatcacggggggagtcagccaatccagattcgcaggcgacttatgatggtcgcattcctgggagccagtgccgtaaccgccagcactggactcctctggaagcgcgctcacgcagagagcccaccttgcgtcgacaatttgaagtcagatattggagacaaaggaaaaaataaggatgagggcgacgtgtgcaatcacgagaaaaaaactgctgatctggcccctcacccggaagagaaaaagaaaaaacgcagcggctttcgggacaggaaggtcatggagtatgagaatcgtattcgcgcctacagcacccctgataagatctttcggtatttcgctactctcaaggtgataagtgagccaggcgaggccgaggtgttcatgaccccagaagacttcgtgaggagtatcactccaaacgagaagcagcccgaacaccttggacttgatcagtacattattaagcgcttcgatgggaaaaaaatttcgcaggagcgcgagaagttcgcagacgaaggctctatcttttatacccttggtgagtgcgggctgatctcctttagcgattatatatttctgaccaccgttctgagcacaccacagcggaattttgaaatcgcattcaagatgttcgatctgaacggagatggcgaagtagacatggaagagttcgaacaggccattagtatcatcagatcacagacctctatgggcatgaggcacagggaccgaccaactactggcaacacactcaaaagtgggctttgctccgcccttacaacttacttctttggcgcagacctgaagggcaagttgacaatcaagaactttcttgagttccaaagaaagctccagcacgatgttctgaaactggagttcgagaggcacgatcctgtggacggacgcatcacggaacggcagttcgggggtatgctgctcgcatactcaggcgtgcaaagtaagaagcttacagccatgcagaggcagctcaagaaacactttaaagagggaaaaggccttacattccaggaagttgagaacttctttactttccttaagaatattaatgacgtagacaccgccctgtcattttaccatatggcaggtgctagtctcgataaagtgactatgcaacaggttgccagaacagtcgccaaggtggaactgtccgaccacgtgtgcgatgtcgtgttcgctctgtttgactgcgacggcaatggagagttatccaataaggaattcgtgtcgattatgaagcagcgcctgatgcgcgggctcgaaaaacccaaggacatgggattcacacgactgatgcaagccatgtggaaatgtgcccaagagaccgcctgggacttcgccctccccaaacagtag

SEQ ID NO: 74933 - DNA, 1431 bp, Artificial Sequence
  derived and/or modified sequence
atgttcagactaaactctctatcagcgctagcagaactagccgtgggcagtagatggtaccacgggggatctcagcctattcagatccggcgtcggctgatgatggtagcgttcctgggcgcatctgcagtgacagctagtacaggccttctctggaaacgagcccacgccgaaagcccgccttgtgtcgataacttaaagtccgacattggcgacaaaggtaaaaataaggatgagggggacgtgtgcaaccacgagaagaagaccgccgacctcgctccacatcctgaggaaaaaaaaaagaaaaggtccggattccgggacaggaaggtgatggagtacgagaatcgtatccgggcatacagcacgcccgacaaaatctttcgatatttcgctacattaaaggtcatctctgaacccggtgaggccgaggtgtttatgacgccggaggacttcgtcagatccattacacccaacgagaaacagcccgagcacctaggccttgaccagtacattattaagcgattcgatggtaagaaaatatctcaggaaagagagaagtttgcagacgaggggtctatattttatactctgggtgagtgtggtctaatcagcttctcagactacatatttcttacaacggtgctcagcacaccgcagcgaaactttgagatagcgttcaagatgttcgatttaaatggggacggggaagttgatatggaggaattcgagcaggttcagagcattatcaggtcccagacgagcatgggtatgcgtcaccgcgataggcctacaaccggcaacaccttaaaatccgggctgtgctcggccctgaccacttatttcttcggagctgaccttaagggcaagttgactataaaaaatttcctggagttccagcgcaagctgcaacacgacgtactgaaattagagtttgaaaggcatgaccccgtagacggacgaatcaccgagcgccagtttggcggtatgctgctagcctactccggggtgcagagcaaaaagctcactgcaatgcagcggcagctaaagaagcattttaaggaaggtaaaggtctaactttccaggaagtggaaaatttcttcacatttctgaaaaatattaacgacgttgacaccgccctcagcttttatcatatggccggtgccagtcttgacaaagtgacaatgcaacaggtagctaggaccgtggcaaaagtagaactctcagaccatgtttgtgacgttgtgttcgcgctgtttgactgtgatggcaatggagagctcagcaacaaggaattcgtttctatcatgaagcagcgtctaatgaggggtttggaaaagcctaaagacatggggtttaccaggttgatgcaggctatgtggaagtgtgcacaggagaccgcctgggactttgccctgccgaagcagtag

SEQ ID NO: 74934 - DNA, 1431 bp, Artificial Sequence
  derived and/or modified sequence
atgttcaggctgaactctctttccgccctggcggaattagccgtcggttccagatggtatcacgggggatctcagccaatccagatccggaggcgcctaatgatggtcgccttccttggagcgtcagccgtgaccgctagcaccgggctgctgtggaagagggcccacgctgagtcgcccccatgcgtggataatttgaaatctgatattggggacaagggcaagaacaaggacgagggtgacgtgtgtaaccacgagaagaagaccgctgacctcgcccctcaccctgaagaaaaaaagaaaaaacgctcaggattccgggaccggaaagtgatggagtacgagaaccgcatcagggcttactccacgcccgataagatttttaggtattttgcaacgcttaaggttattagtgagcctggagaggccgaagtgttcatgacgccggaggacttcgtgagaagtattactccaaatgaaaagcaacctgagcatcttggcctggaccagtatattattaagcgctttgacgggaaaaagatcagccaggaacgcgagaagtttgccgacgagggtagtattttttacacgctgggggagtgcggcctgattagcttctctgattacatttttctcaccacagtgctaagcactccacagagaaactttgagatagcatttaaaatgttcgatctcaatggcgatggtgaagtcgatatggaagaatttgagcaggctatttccatcattcgcagtcagacctctatggggatgaggcatcgggatcgccctacaacaggaaatacattgaaaagcggactttgctcggcgttaactacatactttttcggggcagacctcaaggggaagctcaccatcaagaacttcctcgagttccagaggaaactccagcatgacgtgctgaagcttgaattcgagcggcacgaccctgtcgatggcagaatcactgagcgccagtttggcggaatgttgctggcatattccggagtacaatcgaaaaaactcaccgcaatgcaacggcagttaaagaagcacttcaaagagggtaagggacttacatttcaagaggtggagaatttctttaccttcctgaagaatataaatgatgtagacactgccctgtcattttaccacatggcaggcgcatctttagacaaggttacaatgcagcaagtcgctcgtaccgtcgcaaaggtcgaactttctgatcacgtctgcgacgtagtgtttgctctctttgactgtgatggtaatggagagctcagtaacaaagagtttgtaagtatcatgaagcagcgtctgatgcgcggtctggaaaagcctaaagatatgggcttcactcgactgatgcaggcaatgtggaaatgcgcccaagaaacggcctgggatttcgcactccccaagcagtag

SEQ ID NO: 74935 - protein, 278 aa, Artificial Sequence
  derived and/or modified sequence
MVSLKAKLNHLRQSMLKQKAPQRNFEIAFKMFDLNGDGEVDMEEFEQVQSIIRSQTSMGMRHRDRPTTGNTLKSGLCSALTTYFFGADLKGKLTIKNFLEFQRKLQHDVLKLEFERHDPVDGRITERQFGGMLLAYSGVQSKKLTAMQRQLKKHFKEGKGLTFQEVENFFTFLKNINDVDTALSFYHMAGASLDKVTMQQVARTVAKVELSDHVCDVVFALFDCDGNGELSNKEFVSIMKQRLMRGLEKPKDMGFTRLMQAMWKCAQETAWDFALPKQ

SEQ ID NO: 74936 - protein, 278 aa, Artificial Sequence
  derived and/or modified sequence
MKRIYTYRRAKEIFKDTPKAPQRNFEIAFKMFDLNGDGEVDMEEFEQVQSIIRSQTSMGMRHRDRPTTGNTLKSGLCSALTTYFFGADLKGKLTIKNFLEFQRKLQHDVLKLEFERHDPVDGRITERQFGGMLLAYSGVQSKKLTAMQRQLKKHFKEGKGLTFQEVENFFTFLKNINDVDTALSFYHMAGASLDKVTMQQVARTVAKVELSDHVCDVVFALFDCDGNGELSNKEFVSIMKQRLMRGLEKPKDMGFTRLMQAMWKCAQETAWDFALPKQ

SEQ ID NO: 74937 - DNA, 837 bp, Artificial Sequence
  derived and/or modified sequence
atggtgagcctgaaggccaagctgaaccacctgagacagagcatgctgaagcagaaggccccccagagaaacttcgagatcgccttcaagatgttcgacctgaacggcgacggcgaggtggacatggaggagttcgagcaggtgcagagcatcatcagaagccagaccagcatgggcatgagacacagagacagacccaccaccggcaacaccctgaagagcggcctgtgcagcgccctgaccacctacttcttcggcgccgacctgaagggcaagctgaccatcaagaacttcctggagttccagagaaagctgcagcacgacgtgctgaagctggagttcgagagacacgaccccgtggacggcagaatcaccgagagacagttcggcggcatgctgctggcctacagcggcgtgcagagcaagaagctgaccgccatgcagagacagctgaagaagcacttcaaggagggcaagggcctgaccttccaggaggtggagaacttcttcaccttcctgaagaacatcaacgacgtggacaccgccctgagcttctaccacatggccggcgccagcctggacaaggtgaccatgcagcaggtggccagaaccgtggccaaggtggagctgagcgaccacgtgtgcgacgtggtgttcgccctgttcgactgcgacggcaacggcgagctgagcaacaaggagttcgtgagcatcatgaagcagagactgatgagaggcctggagaagcccaaggacatgggcttcaccagactgatgcaggccatgtggaagtgcgcccaggagaccgcctgggacttcgccctgcccaagcagtag

SEQ ID NO: 74938 - DNA, 837 bp, Artificial Sequence
  derived and/or modified sequence
atgaagagaatctacacctacagaagagccaaggagatcttcaaggacacccccaaggccccccagagaaacttcgagatcgccttcaagatgttcgacctgaacggcgacggcgaggtggacatggaggagttcgagcaggtgcagagcatcatcagaagccagaccagcatgggcatgagacacagagacagacccaccaccggcaacaccctgaagagcggcctgtgcagcgccctgaccacctacttcttcggcgccgacctgaagggcaagctgaccatcaagaacttcctggagttccagagaaagctgcagcacgacgtgctgaagctggagttcgagagacacgaccccgtggacggcagaatcaccgagagacagttcggcggcatgctgctggcctacagcggcgtgcagagcaagaagctgaccgccatgcagagacagctgaagaagcacttcaaggagggcaagggcctgaccttccaggaggtggagaacttcttcaccttcctgaagaacatcaacgacgtggacaccgccctgagcttctaccacatggccggcgccagcctggacaaggtgaccatgcagcaggtggccagaaccgtggccaaggtggagctgagcgaccacgtgtgcgacgtggtgttcgccctgttcgactgcgacggcaacggcgagctgagcaacaaggagttcgtgagcatcatgaagcagagactgatgagaggcctggagaagcccaaggacatgggcttcaccagactgatgcaggccatgtggaagtgcgcccaggagaccgcctgggacttcgccctgcccaagcagtag

SEQ ID NO: 74939 - DNA, 837 bp, Artificial Sequence
  derived and/or modified sequence
atggtctccttgaaggcgaaattaaatcatcttcgccagagcatgctgaagcagaaagccccccagcgtaattttgaaatcgctttcaagatgtttgatttaaacggggatggcgaagtcgatatggaggaatttgaacaggtccagtctattattcggagtcagaccagtatgggtatgaggcacagagacaggccgaccaccgggaataccctgaagagcggattatgctcagcgcttaccacttattttttcggtgccgacctaaaagggaaattaaccataaaaaatttcctggagttccaaaggaagctgcagcacgacgtcctaaagctggagtttgaacggcacgaccccgtcgatggaagaatcactgaaagacagtttggtggcatgcttcttgcttactccggtgtacagtccaaaaagctgaccgcaatgcagaggcagctgaaaaagcacttcaaggaggggaaggggttaacgttccaggaagtggaaaatttcttcacatttctcaagaacataaatgatgtggataccgctctctccttttatcatatggccggagcctctctcgacaaagtaacgatgcagcaagtagcgcggaccgtggccaaggtagaattgtccgaccacgtctgtgatgtggtattcgcattgttcgactgcgacggaaacggcgaactttccaacaaggagttcgtcagcataatgaaacagaggcttatgaggggcctggagaagccaaaagatatgggctttacacgcctcatgcaggccatgtggaaatgcgcacaagagactgcttgggacttcgccttaccaaagcaatag

SEQ ID NO: 74940 - DNA, 837 bp, Artificial Sequence
  derived and/or modified sequence
atgaagcgtatctacacctatcggcgcgccaaagaaatttttaaggacacccccaaagcaccacagaggaacttcgagatcgctttcaagatgtttgatttgaatggggacggggaggtcgatatggaggagttcgagcaagttcagagcatcatccggtctcaaacatctatggggatgaggcatcgcgatagaccaacaacaggaaataccttgaagagcggcctgtgttcggctcttactacttactttttcggagctgacctcaagggcaagcttaccatcaaaaacttcttggagttccagcgcaagctccagcatgacgttcttaagctcgaattcgagagacacgatcctgtggacgggcgtataacggaaaggcagtttgggggaatgcttctggcgtattctggggtccagagtaaaaagctcactgcgatgcagcgacagctaaagaaacatttcaaggaaggcaagggactgaccttccaagaggtggagaactttttcacattcttgaaaaatatcaatgacgtggataccgccttaagcttttaccatatggccggagcgagcttagataaggttacaatgcagcaggttgcacgcaccgtagcgaaagtggaactatcagaccacgtttgcgacgtcgtgttcgctttgttcgactgtgacggaaacggcgaactgtcgaacaaggagtttgttagcatcatgaagcaaagactaatgcggggcctggaaaagcctaaggatatgggcttcacacgcttaatgcaggccatgtggaaatgtgctcaagaaacagcctgggactttgccctgccaaaacagtag

SEQ ID NO: 74941 - DNA, 837 bp, Artificial Sequence
  derived and/or modified sequence
atggtgtccctgaaggccaagctgaaccacctgcggcagagcatgctgaagcagaaggccccccagaggaactttgaaattgccttcaagatgtttgacctgaatggagatggagaggtggacatggaggagtttgagcaggtgcagagcatcatccgcagccagacctccatgggcatgaggcaccgggaccggcccaccaccggcaacaccctgaagagcggcctgtgcagcgccctgaccacctacttctttggagctgacctgaagggcaagctgaccatcaagaacttcctggagttccagaggaagctgcagcatgatgtgctgaagctggagtttgaaagacatgaccctgtggatggccgcatcacagagcggcagtttggaggcatgctgctggcctacagcggcgtgcagagcaagaagctgacagccatgcagaggcagctgaagaagcacttcaaggagggcaagggcctgaccttccaggaggtggagaacttcttcaccttcctgaagaacatcaatgatgtggacacagccctgtccttctaccacatggccggggccagcctggacaaggtgaccatgcagcaggtggccaggacagtggccaaggtggagctgagtgaccacgtgtgtgatgtggtgtttgccctgtttgactgtgatggaaatggagagctgagcaacaaggagtttgtgtccatcatgaagcagaggctgatgaggggcctggagaagcccaaggacatgggcttcacccggctgatgcaggccatgtggaagtgtgcccaggagacagcctgggactttgccctgcccaagcagtag

SEQ ID NO: 74942 - DNA, 837 bp, Artificial Sequence
  derived and/or modified sequence
atgaagaggatctacacctaccgccgggccaaggagatcttcaaggacacccccaaggccccccagaggaactttgaaattgccttcaagatgtttgacctgaatggagatggagaggtggacatggaggagtttgagcaggtgcagagcatcatccgcagccagacctccatgggcatgaggcaccgggaccggcccaccaccggcaacaccctgaagagcggcctgtgcagcgccctgaccacctacttctttggagctgacctgaagggcaagctgaccatcaagaacttcctggagttccagaggaagctgcagcatgatgtgctgaagctggagtttgaaagacatgaccctgtggatggccgcatcacagagcggcagtttggaggcatgctgctggcctacagcggcgtgcagagcaagaagctgacagccatgcagaggcagctgaagaagcacttcaaggagggcaagggcctgaccttccaggaggtggagaacttcttcaccttcctgaagaacatcaatgatgtggacacagccctgtccttctaccacatggccggggccagcctggacaaggtgaccatgcagcaggtggccaggacagtggccaaggtggagctgagtgaccacgtgtgtgatgtggtgtttgccctgtttgactgtgatggaaatggagagctgagcaacaaggagtttgtgtccatcatgaagcagaggctgatgaggggcctggagaagcccaaggacatgggcttcacccggctgatgcaggccatgtggaagtgtgcccaggagacagcctgggactttgccctgcccaagcagtag

SEQ ID NO: 74943 - DNA, 1212 bp, Artificial Sequence
  derived and/or modified sequence
caaatgggacacctagaaagactttattattttgcttttctgagctaatcaatgactttaatttggaaaagcaactaaatatttggagaaaaccatgaaaagaatatatacttacagacgggccaaggagatcttcaaggacactcctaaagctcctcagagaaattttgaaattgccttcaagatgtttgatttgaatggagatggagaagtagatatggaagaatttgaacaggttcagagcatcattcgctcccaaaccagtatgggtatgcgccacagagatcgtccaactactggcaacaccctcaagtctggcttgtgttcagccctcacaacctacttttttggagctgatctgaagggaaagctgacaatcaaaaacttcctcgaatttcagcgtaaactgcagcatgatgttctgaagcttgagtttgaacgccatgaccctgtggatgggagaattactgagaggcagtttggtggcatgctacttgcctacagtggggtgcagtccaagaagctgaccgccatgcagaggcagctcaagaagcacttcaaagaaggaaagggtctgacatttcaggaggtggagaacttctttactttcctaaagaacattaatgatgtggacactgcattgagtttttaccatatggctggagcatctcttgataaagtgaccatgcagcaggtggccaggacagtggctaaagtggagctctcagaccacgtgtgtgatgtggtgtttgcactctttgactgtgatggcaatggcgaactgagcaataaggaatttgtttccatcatgaagcaacggctgatgagaggcctggaaaagcccaaagacatgggtttcactcgcctcatgcaggccatgtggaaatgtgcacaggaaactgcctgggacttcgctttacccaaacagtaaccccacactgcaagaggggacccctccacccccagtaccctggaccccctccgcagagtctcggcagagccctttgtgctgctgcttctggaagtagtcccccttcctcccgggatgacctcaggactctgtcggtttcccctctttacccttccccgtccccgtgttctgctgggctctgattctgcccaatgagtatccccataggttctcaaaaacatgaacaagtctgtaaagctcagacatttgtcagcctcaacagcaccacccattcaagcatc

SEQ ID NO: 74944 - DNA, 837 bp, Artificial Sequence
  derived and/or modified sequence
atggtgagcctgaaggccaagctgaaccacctgcggcagagcatgctgaaacaaaaagctccccagcgtaacttcgagatagctttcaaaatgttcgatcttaacggcgatggggaggtggatatggaagaatttgagcaggtgcagtcaattatacggtcacagacatctatggggatgagacaccgcgaccgccccaccactggaaacacactcaaaagtgggctgtgtagcgccttgactacgtattttttcggagcagatttaaaaggaaaattgacaatcaagaactttctggagtttcagcgaaagctgcagcatgatgttttaaaactggagttcgagcgccacgaccccgtggacggacggattacagaacgccagttcgggggaatgctactagcctactctggggttcagtctaagaagttaacagcaatgcagcggcagctgaaaaaacatttcaaggaagggaaaggtttgacattccaagaagtcgagaacttttttacatttctgaagaatatcaatgatgtggatactgctctttctttctatcatatggccggtgcgtctcttgataaggtcactatgcagcaggtggcaagaacagtcgccaaagtcgagctgtccgaccatgtgtgcgatgtagtctttgctctgttcgattgtgatggcaacggggagctatcaaacaaggagtttgtgagcatcatgaaacagaggctgatgcggggattagagaagcccaaagacatggggttcaccaggttgatgcaagctatgtggaagtgtgcccaggagacggcttgggactttgctcttcctaaacagtag

SEQ ID NO: 74945 - DNA, 837 bp, Artificial Sequence
  derived and/or modified sequence
atgaagcggatctacacctaccggcgggccaaggagatcttcaaggacacccctaaggccccgcagaggaattttgaaatcgcctttaaaatgttcgatctgaatggggacggagaggtagatatggaggagtttgaacaagtacagtccattattaggagccagacatcgatgggcatgagacaccgcgaccgtcccactactgggaatactttgaaatcaggcctttgctcggctttaactacctacttcttcggtgcagacctgaaaggaaagctgactattaaaaactttttggaatttcaaaggaaactacagcacgatgttctcaagctcgaattcgagagacacgaccctgtcgacggaagaataacagagagacagtttggtggtatgctcctggcgtactctggagtacaaagcaagaaactcacagccatgcagcgccagttaaagaagcactttaaagaagggaaggggctcacttttcaagaagtggaaaacttttttacatttctcaagaacattaatgatgttgacacagctttaagtttctatcatatggccggagccagcctcgacaaagtgaccatgcagcaggtggccagaaccgtcgcgaaagtagagctgagcgatcatgtgtgcgatgtggtgttcgccctattcgactgtgatggtaacggagaactctctaacaaggagttcgtttccatcatgaagcagaggttgatgcgtggtctggaaaagccgaaagatatgggatttactaggctcatgcaggccatgtggaagtgcgcacaggaaaccgcctgggatttcgcactgccaaaacagtag

SEQ ID NO: 74946 - DNA, 837 bp, Artificial Sequence
  derived and/or modified sequence
atggtgagcttgaaagcgaaactcaatcatctgagacaatccatgcttaagcagaaggcgcctcaacggaactttgaaattgccttcaaaatgtttgacctcaacggtgacggagaagtagacatggaagagtttgagcaagtccagtccatcatccgctcccagacaagcatgggcatgcgacacagggaccgccctaccaccggcaatactcttaaatcgggcctgtgctcggctctaaccacctacttttttggagccgacctgaaaggaaaactcaccatcaagaactttctagagttccagcgaaagttgcagcatgacgtcttgaagctcgaattcgaacgtcatgacccggtcgatggtagaatcacagagcgccagttcgggggaatgctactggcctattcgggcgtgcaatctaagaagctcactgcaatgcaacgacagctgaagaagcattttaaggagggtaagggcctgactttccaggaagtggagaatttttttaccttcctgaaaaatataaatgatgttgatacagctctctccttctatcacatggccggagctagtctcgacaaagtcaccatgcaacaggtcgcacgcaccgtcgccaaagtggaactaagcgatcacgtctgtgacgttgtctttgccctcttcgattgcgacgggaacggagagctgagtaacaaagagtttgtctccattatgaagcagagactcatgagaggactggagaaaccaaaggacatggggtttaccaggctcatgcaggccatgtggaagtgcgcccaggagaccgcttgggactttgccctgccaaaacagtag

SEQ ID NO: 74947 - DNA, 837 bp, Artificial Sequence
  derived and/or modified sequence
atgaaaaggatatacacctatcgacgtgcaaaggagatctttaaggacacccccaaggcaccacagagaaatttcgagatcgcctttaaaatgttcgatttgaacggagacggtgaggtggatatggaggagttcgaacaggtgcagagtattatccgatcccagacctccatgggcatgaggcacagagaccgccctaccaccggaaacaccctgaagtcagggttatgctccgccttaaccacatatttttttggcgctgacctcaagggcaaactgacgattaaaaacttcctggagttccagagaaaacttcaacacgacgtcctcaagctggaattcgagcgacacgatccggtggacggtcgaattacagaacgtcagttcggcggaatgttgctcgcatacagtggcgtgcagtcgaaaaaactcactgcaatgcagcgccagctgaaaaagcacttcaaggaaggtaaggggctgacttttcaggaagttgaaaatttcttcactttcttgaagaacattaatgacgtggacacagccctgtcattctatcacatggccggtgcgtcactcgataaggtgacgatgcagcaagtcgcacggaccgtcgccaaggttgagctcagtgaccacgtgtgtgacgtggtgtttgccctcttcgattgtgatgggaatggggagctcagtaacaaagaattcgtttcaatcatgaagcagagattgatgcggggactcgaaaaaccaaaggatatggggttcacacgactgatgcaggccatgtggaaatgtgcccaggaaactgcctgggatttcgccctccctaagcagtag

SEQ ID NO: 74948 - protein, 2452 aa, Artificial Sequence
  derived and/or modified sequence
MDPSGVKVLETAEDIQERRQQVLDRYHRFKELSTLRRQKLEDSYRFQFFQRDAEELEKWIQEKLQIASDENYKDPTNLQGKLQKHQAFEAEVQANSGAIVKLDETGNLMISEGHFASETIRTRLMELHRQWELLLEKMREKGIKLLQAQKLVQYLRECEDVMDWINDKEAIVTSEELGQDLEHVEVLQKKFEEFQTDMAAHEERVNEVNQFAAKLIQEQHPEEELIKTKQDEVNAAWQRLKGLALQRQGKLFGAAEVQRFNRDVDETISWIKEKEQLMASDDFGRDLASVQALLRKHEGLERDLAALEDKVKALCAEADRLQQSHPLSATQIQVKREELITNWEQIRTLAAERHARLNDSYRLQRFLADFRDLTSWVTEMKALINADELASDVAGAEALLDRHQEHKGEIDAHEDSFKSADESGQALLAAGHYASDEVREKLTVLSEERAALLELWELRRQQYEQCMDLQLFYRDTEQVDNWMSKQEAFLLNEDLGDSLDSVEALLKKHEDFEKSLSAQEEKITALDEFATKLIQNNHYAMEDVATRRDALLSRRNALHERAMRRRAQLADSFHLQQFFRDSDELKSWVNEKMKTATDEAYKDPSNLQGKVQKHQAFEAELSANQSRIDALEKAGQKLIDVNHYAKDEVAARMNEVISLWKKLLEATELKGIKLREANQQQQFNRNVEDIELWLYEVEGHLASDDYGKDLTNVQNLQKKHALLEADVAAHQDRIDGITIQARQFQDAGHFDAENIKKKQEALVARYEALKEPMVARKQKLADSLRLQQLFRDVEDEETWIREKEPIAASTNRGKDLIGVQNLLKKHQALQAEIAGHEPRIKAVTQKGNAMVEEGHFAAEDVKAKLHELNQKWEALKAKASQRRQDLEDSLQAQQYFADANEAESWMREKEPIVGSTDYGKDEDSAEALLKKHEALMSDLSAYGSSIQALREQAQSCRQQVAPTDDETGKELVLALYDYQEKSPREVTMKKGDILTLLNSTNKDWWKVEVNDRQGFVPAAYVKKLDPAQSASRENLLEEQGSIALRQEQIDNQYHSLLELGEKRKGMLEKSCKKFMLFREANELQQWINEKEAALTSEEVGADLEQVEVLQKKFDDFQKDLKANESRLKDINKVAEDLESEGLMAEEVQAVQQQEVYGMMPRDETDSKTASPWKSARLMVHTVATFNSIKELNERWRSLQQLAEERSQLLGSAHEVQRFHRDADETKEWIEEKNQALNTDNYGHDLASVQALQRKHEGFERDLAALGDKVNSLGETAERLIQSHPESAEDLQEKCTELNQAWSSLGKRADQRKAKLGDSHDLQRFLSDFRDLMSWINGIRGLVSSDELAKDVTGAEALLERHQEHRTEIDARAGTFQAFEQFGQQLLAHGHYASPEIKQKLDILDQERADLEKAWVQRRMMLDQCLELQLFHRDCEQAENWMAAREAFLNTEDKGDSLDSVEALIKKHEDFDKAINVQEEKIAALQAFADQLIAAGHYAKGDISSRRNEVLDRWRRLKAQMIEKRSKLGESQTLQQFSRDVDEIEAWISEKLQTASDESYKDPTNIQSKHQKHQAFEAELHANADRIRGVIDMGNSLIERGACAGSEDAVKARLAALADQWQFLVQKSAEKSQKLKEANKQQNFNTGIKDFDFWLSEVEALLASEDYGKDLASVNNLLKKHQLLEADISAHEDRLKDLNSQADSLMTSSAFDTSQVKDKRDTINGRFQKIKSMAASRRAKLNESHRLHQFFRDMDDEESWIKEKKLLVGSEDYGRDLTGVQNLRKKHKRLEAELAAHEPAIQGVLDTGKKLSDDNTIGKEEIQQRLAQFVEHWKELKQLAAARGQRLEESLEYQQFVANVEEEEAWINEKMTLVASEDYGDTLAAIQGLLKKHEAFETDFTVHKDRVNDVCTNGQDLIKKNNHHEENISSKMKGLNGKVSDLEKAAAQRKAKLDENSAFLQFNWKADVVESWIGEKENSLKTDDYGRDLSSVQTLLTKQETFDAGLQAFQQEGIANITALKDQLLAAKHVQSKAIEARHASLMKRWSQLLANSAARKKKLLEAQSHFRKVEDLFLTFAKKASAFNSWFENAEEDLTDPVRCNSLEEIKALREAHDAFRSSLSSAQADFNQLAELDRQIKSFRVASNPYTWFTMEALEETWRNLQKIIKERELELQKEQRRQEENDKLRQEFAQHANAFHQWIQETRCQPAGASCMVEESGTLESQLEATKRKHQEIRAMRSQLKKIEDLGAAMEEALILDNKYTEHSTVGLAQQWDQLDQLGMRMQHNLEQQIQARNTTGVTEEALKEFSMMFKHFDKDKSGRLNHQEFKSCLRSLGYDLPMVEEGEPDPEFEAILDTVDPNRDGHVSLQEYMAFMISRETENVKSSEEIESAFRALSSEGKPYVTKEELYQNLTREQADYCVSHMKPYVDGKGRELPTAFDYVEFTRSLFVN

SEQ ID NO: 74949 - DNA, 1485 bp, Artificial Sequence
  derived and/or modified sequence
atggccgccagcagaagagccaagctgaacgagagccacagactgcaccagttcttcagagacatggacgacgaggagagctggatcaaggagaagaagctgctggtgggcagcgaggactacggcagagacctgaccggcgtgcagaacctgagaaagaagcacaagagactggaggccgagctggccgcccacgagcccgccatccagggcgtgctggacaccggcaagaagctgagcgacgacaacaccatcggcaaggaggagatccagcagagactggcccagttcgtggagcactggaaggagctgaagcagctggccgccgccagaggccagagactggaggagagcctggagtaccagcagttcgtggccaacgtggaggaggaggaggcctggatcaacgagaagatgaccctggtggccagcgaggactacggcgacaccctggccgccatccagggcctgctgaagaagcacgaggccttcgagaccgacttcaccgtgcacaaggacagagtgaacgacgtgtgcaccaacggccaggacctgatcaagaagaacaaccaccacgaggagaacatcagcagcaagatgaagggcctgaacggcaaggtgagcgacctggagaaggccgccgcccagagaaaggccaagctggacgagaacagcgccttcctgcagttcaactggaaggccgacgtggtggagagctggatcggcgagaaggagaacagcctgaagaccgacgactacggcagagacctgagcagcgtgcagaccctgctgaccaagcaggagaccttcgacgccggcctgcaggccttccagcaggagggcatcgccaacatcaccgccctgaaggaccagctgctggccgccaagcacgtgcagagcaaggccatcgaggccagacacgccagcctgatgaagagatggagccagctgctggccaacagcgccgccagaaagaagaagctgctggaggcccagagccacttcagaaaggtggaggacctgttcctgaccttcgccaagaaggccagcgccttcaacagctggttcgagaacgccgaggaggacctgaccgaccccgtgagatgcaacagcctggaggagatcaaggccctgagagaggcccacgacgccttcagaagcagcctgagcagcgcccaggccgacttcaaccagctggccgagctggacagacagatcaagagcttcagagtggccagcaacccctacacctggttcaccatggaggccctggaggagacctggagaaacctgcagaagatcatcaaggagagagagctggagctgcagaaggagcagagaagacaggaggagaacgacaagctgagacaggagttcgcccagcacgccaacgccttccaccagtggatccaggagaccagatgccagagaaaggacggccagctgcagggcggcagagtgggcgaccccagaatccccgcctag

SEQ ID NO: 74950 - DNA, 1485 bp, Artificial Sequence
  derived and/or modified sequence
atggccgcttcccgtagggccaagcttaacgagtcccatcgcttacatcagttctttcgcgacatggatgatgaggaatcttggattaaggagaagaagctgctcgtcggtagtgaggactatggcagggacctgaccggcgtgcagaatcttcggaagaaacacaagagacttgaggcagagttggctgctcatgagcctgctattcagggcgtactggataccggcaagaaactgtccgacgacaatacaatcggcaaggaagaaatccagcagcggcttgcccaatttgtggagcactggaaggagctgaaacaattagctgccgcccgcgggcagcggctcgaagaatcactcgagtatcagcaatttgtggccaatgtggaagaagaggaagcatggattaatgagaaaatgacactggtagcatccgaggactatggtgatactctcgccgcaattcaaggcctccttaaaaaacacgaagcatttgagacggacttcaccgtccacaaggaccgagtgaatgatgtttgcactaacggacaggacttgattaagaagaacaaccaccatgaggaaaacatctctagcaagatgaaaggcctcaatggcaaagtctcggacttggagaaggcagcagcacaacgcaaggccaagttggatgaaaactcagctttcctgcaatttaactggaaggccgacgtcgtggagagttggataggtgaaaaggaaaactcacttaaaaccgacgattacgggagggacttgtcgtctgtgcagacactgttaacgaagcaggaaacatttgacgcgggccttcaagcatttcagcaagaagggatcgcgaacattacagccctgaaggatcagttactagctgccaagcatgtccaatctaaggccattgaagcacgacacgcatctcttatgaagaggtggagccagctactggccaattctgccgcccgtaagaaaaaactcttggaggctcaatcgcatttccgcaaggtggaagatttattcctgacctttgccaaaaaggcgtccgccttcaatagttggtttgagaacgccgaggaggaccttacagatccagtccgctgcaacagtctggaagagataaaagctctgcgggaggcccatgacgctttccggagctcactgtcctccgcacaagctgacttcaatcaactggccgaactggatcgccagattaaatctttcagggtggcctcaaatccctatacctggtttacaatggaagccctcgaagagacctggcgtaacctacaaaaaatcattaaagagagagagttggagctccaaaaagaacagcgtaggcaggaggagaatgacaaattgcgtcaagagttcgcccagcatgctaacgcctttcaccagtggatccaggaaaccagatgccagaggaaggatggtcagttacagggtggcagggtgggagatccccgaattcccgcgtag

SEQ ID NO: 74951 - DNA, 1485 bp, Artificial Sequence
  derived and/or modified sequence
atggccgccagcagaagagccaagctgaatgaaagccaccggctgcaccagttcttccgggacatggatgatgaggagagctggatcaaggagaagaagctgctggtgggctctgaagattatggccgggacctgactggagtgcagaacctgaggaagaagcacaagaggctggaggccgagctggccgcccacgagcccgccatccagggcgtgctggacaccgggaagaagctgagtgatgacaacaccatcggcaaggaggagatccagcagaggctggcccagtttgtggagcactggaaggagctgaagcagctggccgccgcccggggccagaggctggaggagagcctggagtaccagcagtttgtggccaacgtggaggaggaggaggcctggatcaatgagaagatgaccctggtggcctctgaagattatggagacaccctggccgccatccagggcctgctgaagaagcatgaggcctttgaaacagacttcaccgtgcacaaggacagagtgaatgatgtgtgcaccaacggccaggacctgatcaagaagaacaaccaccacgaggagaacatcagcagcaagatgaagggcctgaatggcaaggtgtctgacctggagaaggccgccgcccagaggaaggccaagctggatgaaaattctgccttcctgcagttcaactggaaggcagatgtggtggagagctggattggagagaaggagaacagcctgaagacagatgattatggccgggacctgagctctgtgcagaccctgctgaccaagcaggagacctttgatgctggcctgcaggccttccagcaggagggcatcgccaacatcacagccctgaaggaccagctgctggccgccaagcacgtgcagagcaaggccatcgaggcccggcatgccagcctgatgaagcgctggagccagctgctggccaacagcgctgccaggaagaagaagctgctggaggcccagagccacttcaggaaggtggaggacctcttcctgacctttgccaagaaggccagcgccttcaacagctggtttgaaaatgctgaggaggacctgacagatcctgtgcgctgcaacagcctggaggagatcaaggccctgcgggaggcccatgatgccttccgcagcagcctgagcagcgcccaggccgacttcaaccagctggccgagctggaccggcagatcaagagcttccgggtggccagcaacccctacacctggttcaccatggaggccctggaggagacctggaggaacctgcagaagatcatcaaggagcgggagctggagctgcagaaggagcagaggcggcaggaggagaatgacaagctgcggcaggagtttgcccagcacgccaatgccttccaccagtggatccaggagacccgctgccagaggaaggatggccagctgcagggcggccgggtgggggacccccgcatcccagcctag

SEQ ID NO: 74952 - DNA, 1485 bp, Artificial Sequence
  derived and/or modified sequence
atggccgccagccggcgggccaagctgaacgagagccaccggctgcaccagttttttcgggatatggatgacgaggagagttggatcaaagagaaaaagctgctggtgggcagcgaggattatggtagggacttgaccggggtgcagaatctacggaaaaaacacaagcggctggaagccgagttagcagcccatgaacctgctatccaaggggttttggataccgggaagaagcttagcgacgataacacgattggcaaggaggagatccagcagcggctagctcagtttgtagagcactggaaggagctgaaacagcttgccgcagctcgcggccagcggctggaggagtctctggaatatcaacagttcgtggctaacgtcgaggaggaggaggcgtggataaacgaaaagatgactttggtggcgtctgaggattatggtgacactttggcggcaattcagggcctgctgaagaagcacgaagcatttgaaacagacttcacagtgcacaaggacagagtgaacgatgtgtgcacaaacggccaggatctcatcaagaaaaacaaccaccacgaagagaatattagctccaagatgaaaggactgaatgggaaggtgagcgaccttgagaaagctgccgcccagcgcaaggctaaactagatgagaattctgcgttcctgcagttcaattggaaggctgacgttgtggagagttggataggggagaaggagaatagtctgaaaaccgatgactacgggagagatttgtcttccgtccagacactgcttactaagcaggaaacatttgacgcaggcctgcaggcgtttcagcaggaaggcatcgccaatataaccgccctgaaggatcaactgctggcagcaaaacatgtccagtcgaaggcaatcgaagcgaggcacgcaagccttatgaaacgctggtcacaactgcttgctaacagtgccgccaggaaaaaaaaactgcttgaagcacagtctcacttccggaaagtggaagatctgttcctgaccttcgctaagaaagctagcgcctttaattcatggttcgaaaacgccgaagaggatctcacggaccctgtccggtgtaacagtctggaagagatcaaagctctgagggaagcccacgatgcctttcgtagcagcttgagttccgcccaagccgactttaaccagctggctgagctggatcggcagattaaatcttttcgagtggccagcaacccgtatacttggtttaccatggaggctttggaagagacgtggaggaacctacagaaaattataaaggaaagggagctggagctgcaaaaggagcagcggcgccaggaagagaatgacaagctgcgccaggagtttgctcagcacgcaaatgcttttcaccagtggattcaggagactcgctgccaacgaaaggatggtcagctgcaaggaggcagagttggagatccccgcattcccgcctag

SEQ ID NO: 74953 - DNA, 1485 bp, Artificial Sequence
  derived and/or modified sequence
atggccgcaagcaggcgagccaagctgaatgaatctcataggctgcaccaattctttcgcgatatggacgatgaagaatcttggattaaagaaaagaagctgctggttgggtctgaggattacggcagagacctcactggcgtgcagaacctgaggaaaaagcacaagagactggaggccgagctggccgctcacgagcctgctattcaaggggtcctcgatacgggaaagaagctctcagatgacaacaccatagggaaagaggaaattcaacagcggctggcacaattcgtggaacactggaaggaactgaagcagcttgccgctgctcggggtcagagactagaggaaagcctagagtaccagcagtttgttgcaaatgtggaagaagaagaggcgtggatcaatgagaagatgaccttggtggcctccgaggattatggagacacactagcagccattcagggacttctgaaaaagcacgaagccttcgaaacagactttaccgtgcataaagatagggtgaatgacgtatgtacaaacgggcaggatttgatcaagaagaataatcaccatgaagagaatatctcaagcaagatgaagggcctgaacgggaaggtctccgacctggaaaaagcagcggcacagcgcaaggccaagctggacgaaaatagcgccttcctgcaatttaattggaaggctgatgtggtggagtcatggattggtgagaaggaaaatagtctgaaaaccgacgactacggacgcgacctgagctctgtacagactctcttgaccaaacaggaaactttcgatgctgggttgcaagccttccagcaggagggcattgccaacatcactgcactgaaagaccagctgttggccgcaaaacatgtccagagtaaggcaatcgaggctagacatgcttccctgatgaaacgctggtcccagctgttagcaaacagcgcagcaaggaagaagaagctgttggaagcacagtcccattttcgcaaagtagaggatctgtttttaacattcgctaagaaagcctccgccttcaattcctggtttgagaatgcggaagaagatctcaccgacccagtgcgctgcaactccctcgaggagattaaagccttacgagaagcccatgatgcctttcgaagcagcctcagcagtgcccaggctgattttaaccagctggccgagttggatagacagatcaaaagcttcagggtagcatccaacccatatacttggttcaccatggaggcactggaggaaacatggagaaacctgcagaagatcataaaagaaagggagctcgaactccagaaggagcaacgtagacaggaagagaacgacaagcttcgtcaggaattcgcacagcacgctaacgcgtttcaccagtggattcaggaaacccgctgtcagcggaaagatggtcagctgcagggcggaagagttggggacccacgtattccagcctag

SEQ ID NO: 74954 - protein, 171 aa, Artificial Sequence
  derived and/or modified sequence
MNRLFGKAKPKAPPPSLTDCIGTVDSRAESIDKKISRLDAELVKYKDQIKKMREGPAKNMVKQKALRVLKQKRMYEQQRDNLAQQSFNMEQANYTIQSLKDTKTTVDAMKLGVKEMKKAYKQVKIDQIEDLQDQLEDMMEDANEIQEALSRSYGTPELDEDDLEAGWSSGG

SEQ ID NO: 74955 - DNA, 516 bp, Artificial Sequence
  derived and/or modified sequence
atgaaccgcctgttcggcaaagcaaaacccaaagcccctcccccatctttaaccgattgtatcggcaccgtcgactctcgagccgaatctatcgataaaaaaatttcacgactcgacgccgaactagtaaaatataaggaccaaattaagaaaatgagagaaggaccagcgaagaatatggtgaagcagaaggcacttcgagtgttaaaacagaaacgaatgtacgagcagcagcgggacaacctcgcacagcagtcattcaacatggaacaggccaattacactatccagtccctgaaagatactaagaccactgtggatgctatgaagctgggtgtaaaggaaatgaaaaaagcctataaacaagtgaaaatcgaccaaatcgaagatcttcaagaccagctggaggacatgatggaagatgccaacgagattcaggaggctctgtcccggtcatacggcactccggaactggacgaagatgacttggaggcggggtggtcttccggaggctag

SEQ ID NO: 74956 - DNA, 516 bp, Artificial Sequence
  derived and/or modified sequence
atgaaccggctgtttgggaaggccaagcccaaggcccccccacccagcctgacagactgcattggaacagtggacagcagagctgagagcattgacaagaagatcagccggctggatgctgagctggtgaagtacaaggaccagatcaagaagatgagggagggccctgccaagaacatggtgaagcagaaggccctgcgggtgctgaagcagaagaggatgtatgagcagcagagggacaacctggcccagcagagcttcaacatggagcaggccaactacaccatccagagcctgaaggacaccaagaccaccgtggatgccatgaagctgggcgtgaaggagatgaagaaggcctacaagcaggtgaagattgaccagatcgaggacctgcaggaccagctggaggacatgatggaggatgccaatgagatccaggaggccctgagccgctcctatggcaccccagagctggatgaagatgacctggaggccggctggagcagcggcggctag

SEQ ID NO: 74957 - DNA, 516 bp, Artificial Sequence
  derived and/or modified sequence
atgaaccggctgttcggcaaggccaagcccaaggccccccccccctctttgacagactgtatcggaactgtggattctcgcgctgaaagcattgataagaaaatctctaggttagacgcagagcttgtcaaatacaaagaccagataaagaagatgagagagggcccagccaaaaatatggttaagcagaaggccctcagggtgctaaagcagaagcggatgtatgaacaacagcgcgataatcttgcgcaacaatccttcaacatggagcaggctaactacaccatccagagcctgaaagatacaaagactaccgtggacgccatgaaactcggtgtaaaagagatgaaaaaggcctataaacaagtgaagatagatcagattgaggatttgcaagatcagttggaagatatgatggaggacgctaacgaaatacaggaagcactctctagatcttacgggacccccgagcttgacgaagacgacctcgaagcaggatggtcctcgggaggctag

SEQ ID NO: 74958 - DNA, 516 bp, Artificial Sequence
  derived and/or modified sequence
atgaatcgactatttggcaaagccaagcccaaagcccctcctcctagtctcacggactgcattggaacagtggattctcgcgcagagagcattgataagaagatcagcaggcttgacgccgaactggtcaaatacaaagatcagatcaaaaaaatgagagagggtcctgctaagaacatggtgaaacagaaggcattacgtgtactgaagcaaaagcggatgtatgagcagcagcgggataatctggcgcagcaaagcttcaacatggagcaagccaactacactattcagtccctgaaggacactaaaacgacagtagatgcaatgaaactgggcgtgaaagagatgaaaaaggcttacaagcaggtgaagatcgatcagattgaggatctgcaggatcagttggaggatatgatggaggatgccaacgagatccaggaagctctgtcccgcagttacggtaccccagaacttgatgaagacgaccttgaagccggttggagctctggaggatag

SEQ ID NO: 74959 - DNA, 1707 bp, Artificial Sequence
  derived and/or modified sequence
gttttgctctagtgtttgggtttcttcgcggctgctcaagatgaaccgactcttcgggaaagcgaaacccaaggctccgccgcccagcctgactgactgcattggcacggtggacagtagagcagaatccattgacaagaagatttctcgattggatgctgagctagtgaagtataaggatcagatcaagaagatgagagagggtcctgcaaagaatatggtcaagcagaaagccttgcgagttttaaagcaaaagaggatgtatgagcagcagcgggacaatcttgcccaacagtcattcaacatggaacaagccaattataccatccagtctttgaaggacaccaagaccacggttgatgctatgaaactgggagtaaaggaaatgaagaaggcatacaagcaagtgaagatcgaccagattgaggatttacaagaccagctagaggatatgatggaagatgcaaatgaaatccaagaagcactgagtcgcagttatggcaccccagaactggatgaagatgatttagaagcaggatggagttctggtggatgaatttggattgccacagatccctgcttcatagatttgcatcattcaagcatatcttgtaaaacaaacacatattatgggactaggaaatatttatctttccaaatttgccataacagatttaggtttctttcctttctttgaaggaaagtttaattacattgctcttttattttttccattaagagactcattgcttgggaaatgctttcttcgtactaaaatttgattcctttttttcttatgaaaaacgaactcagtttaaaagtatttttagctcgtatgacttgttttcattcattaataataatttgaaataaaactaaggaaatggaatcttaaaagtctatgacagtgtaactctacagtctcaaaatgacctgataaattgataagacaaagatgagattattggggctgttcatattatgattcagaatcattttctattgtggtattataggttggttaaagtgatggcctttttgatgggttttgttgtgtcttgtgaacaagtcgttactgtgtccattattggaatggaattatcactactgtatcatgagtgggtattttgattctatggttccctcagtattacatcttgacttgtaatcaattatgaatatttcttgatatttaatgtataggacatttatttatactcaataaatatttttcaaaaggatataattttaataatatcacttcagcttaaaacctctactgcggaaaccaaatttaatagaattttaatgtcatttcagcctataactccactacagaaaccaaattaaccagtagcattgtgaggaaagagcaaggaacaatctgggcttgggccctgggtctaccatttactaactactgagtagtctattcaacctctctaaccttctgtttccttattagtaaaatcatgcttaactcacagagcttttgtgaggaataattgaggtaatggtcataagtaccttgttaactgcaaggggctattcttatatgagggattgttaacaataaaaaagaaactgcttcattcttttcttggaaggtgcctggagtactacagcaagttcaaactcctgcccaatttcagggtctttaatgatcctgtcctcccttcctcattcaacttgttgccaacagcatgg

SEQ ID NO: 74960 - DNA, 516 bp, Artificial Sequence
  derived and/or modified sequence
atgaacagactgttcggcaaggccaagcccaaggcccccccccccagcctgaccgactgcatcggcaccgtggacagcagagccgagagcatcgacaagaagatcagcagactggacgccgagctggtgaagtacaaggaccagatcaagaagatgagagagggccccgccaagaacatggtgaagcagaaggccctgagagtgctgaagcagaagagaatgtacgagcagcagagagacaacctggcccagcagagcttcaacatggagcaggccaactacaccatccagagcctgaaggacaccaagaccaccgtggacgccatgaagctgggcgtgaaggagatgaagaaggcctacaagcaggtgaagatcgaccagatcgaggacctgcaggaccagctggaggacatgatggaggacgccaacgagatccaggaggccctgagcagaagctacggcacccccgagctggacgaggacgacctggaggccggctggagcagcggcggctag

SEQ ID NO: 74961 - protein, 643 aa, Artificial Sequence
  derived and/or modified sequence
MLNMWKVRELVDKATNVVMNYSEIESKVREATNDDPWGPSGQLMGEIAKATFMYEQFPELMNMLWSRMLKDNKKNWRRVYKSLLLLAYLIRNGSERVVTSAREHIYDLRSLENYHFVDEHGKDQGINIRQKVKELVEFAQDDDRLREERKKAKKNKDKYVGVSSDSVGGFRYSERYDPEPKSKWDEEWDKNKSAFPFSDKLGELSDKIGSTIDDTISKFRRKDREDSPERCSDSDEEKKARRGRSPKGEFKDEEETVTTKHIHITQATETTTTRHKRTANPSKTIDLGAAAHYTGDKASPDQNASTHTPQSSVKTSVPSSKSSGDLVDLFDGTSQSTGGSADLFGGFADFGSAAASGSFPSQVTATSGNGDFGDWSAFNQAPSGPVASSGEFFGSASQPAVELVSGSQSALGPPPAASNSSDLFDLMGSSQATMTSSQSMNFSMMSTNTVGLGLPMSRSQPLQNVSTVLQKPNPLYNQNTDMVQKSVSKTLPSTWSDPSVNISLDNLLPGMQPSKPQQPSLNTMIQQQNMQQPMNVMTQSFGAVNLSSPSNMLPVRPQTNALIGGPMPMSMPNVMTGTMGMAPLGNTPMMNQSMMGMNMNIGMSAAGMGLTGTMGMGMPNIAMTSGTVQPKQDAFANFANFSK

SEQ ID NO: 74962 - DNA, 1878 bp, Artificial Sequence
  derived and/or modified sequence
atgaattactcagaaatcgagagtaaagtgcgagaagccactaatgatgatccctggggcccctctggccagctaatgggggaaatcgccaaggccacatttatgtatgaacaattccctgaattgatgaacatgctgtggagccggatgctcaaggataacaaaaagaactggcggagagtgtataagagtctgctcttgctggcatatttgattcgcaacggatctgagcgcgtcgttacctcagcccgtgaacacatatacgacttgcggagcctggagaactatcacttcgtcgacgagcatggcaaagatcaaggcatcaatatcaggcagaaggtgaaagaactggtcgagtttgcacaagatgacgaccgacttagagaagaacgtaaaaaggctaagaagaataaggacaagtatgtcggagtgagctccgattccgtggggggttttcggtatagcgagcgttatgacccggaaccaaaatcaaagtgggatgaggagtgggacaaaaacaaatctgcctttcccttcagtgacaaacttggcgaactgagcgataagattggaagcacaattgatgataccatcagtaaattccgcagaaaggacagggaggacagccctgaaaggtgctccgacagcgacgaggagaaaaaggccagaaggggccgctctcctaagggcgagtttaaagacgaagaagagactgtcacaacaaaacatatccatatcactcaggccactgagactaccacaacaagacataaaaggactgccaacccatcaaaaactatcgacttgggtgctgccgcgcactataccggggataaggccagccccgatcagaatgcctcgacacacaccccacagagctccgtcaaaaccagcgtcccgagctccaaaagcagcggcgacctggtagatttgttcgacggcacatctcaatcaactggcggcagcgccgacctgttcggaggtttcgccgatttcggatcagctgcggcatctgggagcttccctagtcaagtcaccgctacctcaggcaatggggattttggcgactggtctgcattcaaccaggcgccttccggaccagtcgcgtcatccggggagttcttcggatcagccagccagccggctgtggagctcgtcagtggttctcagagcgcactgggcccacctccagcggccagcaacagctcggacctgtttgatcttatggggtcttcccaagctacgatgactagtagtcagtccatgaacttctctatgatgtccacaaacacggtgggcctaggacttccgatgagtcgctctcagcccttacagaatgtttctaccgtgttgcaaaagcctaacccactgtacaaccaaaacactgacatggtccagaagtctgtgagcaaaacactgccctcaacctggtccgacccgagcgtcaacatttccttggacaacctgctgcccggaatgcagccaagtaaaccccagcagccttcactgaatactatgatccagcagcagaatatgcagcagcctatgaacgtgatgactcaaagctttggcgccgtcaacctatcctcccccagtaatatgctaccggtgcgccctcaaactaacgctctgattggcggacccatgcccatgtccatgcccaacgtgatgacgggaacaatgggaatggcccccctgggtaatactccaatgatgaatcagtcaatgatgggaatgaatatgaacattggtatgtcagccgccggaatgggactgacaggtacaatgggcatggggatgcctaatatagctatgacctccggaacagtgcagccaaaacaggatgcatttgccaacttcgccaacttttcaaaatag

SEQ ID NO: 74963 - DNA, 1878 bp, Artificial Sequence
  derived and/or modified sequence
atgaattatagcgagatcgaaagtaaggttagagaggctaccaacgacgacccctgggggccttcgggacagttgatgggcgagattgccaaggcgacctttatgtatgagcagtttccagaactcatgaatatgttgtggagccgcatgctcaaggataacaaaaaaaattggaggagagtatacaaatctttacttttgctggcttatctgataagaaacgggtctgagcgggtggtcacttctgctagagaacacatatatgatctgaggtccttagagaactaccactttgtggatgagcatggtaaggatcagggcataaatatccgacaaaaggtcaaagagttggtcgagttcgcacaagacgatgacaggctccgcgaagagaggaagaaagccaaaaagaacaaggataaatatgtgggagtgtcttcggactctgttggcgggttccgttactccgagcgctatgatccggagcctaagtcgaagtgggatgaagagtgggacaagaataagtctgctttccccttttctgacaaactgggggagctttctgacaaaataggcagtacaattgatgacaccatttccaagttccgcagaaaagaccgcgaagatagccccgaaagatgctcagacagcgacgaggagaaaaaggccagacgtggtagatcaccgaagggggaattcaaggacgaggaggaaaccgtgactacaaagcatattcatatcactcaggccacagaaaccaccacgaccaggcataaaagaacagcaaatccatcaaaaaccatcgacctgggcgccgcggcgcattacacaggtgataaagcttcgcccgatcagaacgccagtacacacaccccacagtcctccgtcaagacctccgtcccgtccagcaagtctagcggggatctggtcgatcttttcgatggtacatcccagtctaccgggggatcagctgatctctttggaggctttgccgattttgggtctgccgctgctagcggatctttcccaagccaggtcacagcaacctccggcaatggagacttcggtgactggtctgcatttaaccaggctccgagtgggcccgttgcttcatcaggagaattttttggcagcgcatctcagcctgcagttgaactggtctcaggttcgcagtctgctctcgggcccccccccgctgcttctaattccagcgatcttttcgacctgatgggctcttcacaggcaacaatgaccagctcccaatccatgaacttcagcatgatgagtaccaacacagtgggccttggtctccctatgtcacgttcccagcccttgcagaacgtcagcacagtactgcaaaagcccaacccgctctataaccaaaatactgacatggtgcagaagagcgtctcaaagacgttaccttccacttggagcgacccttccgtgaacatatccctggacaacctgctcccagggatgcagccatcaaaaccacagcaaccgtcactgaatacaatgatccaacagcagaatatgcagcagccaatgaacgtcatgacgcagagctttggcgcagtaaacctgtcaagtccaagcaatatgctcccagtgcgaccccaaacaaacgccctgataggtggccccatgcccatgtcaatgcccaacgtgatgaccggcacaatgggcatggcccctctcggcaatacacccatgatgaaccaaagcatgatggggatgaacatgaacatcggaatgtcagccgcgggcatggggctcacagggactatgggtatggggatgcccaatatcgcaatgacctctggcacagtgcagccaaagcaggacgcattcgcaaactttgcaaacttcagcaagtag

SEQ ID NO: 74964 - DNA, 1878 bp, Artificial Sequence
  derived and/or modified sequence
atgaactattctgagatcgaaagtaaagtgagagaagccaccaacgatgatccctgggggcccagcggccaactgatgggcgagattgctaaagccacatttatgtacgagcagttcccagagctgatgaacatgttatggtctcggatgctgaaagataacaagaaaaactggcgtagagtgtataagtctttacttttactcgcctatctgatccgtaacgggtccgaaagggtggtgaccagcgctcgagaacacatatatgatctgcgcagcctcgaaaattatcatttcgtagatgagcacggtaaggaccagggcattaacattcggcagaaggtcaaagagcttgtggaatttgcacaggatgatgaccgcctcagggaagaaaggaagaaggcaaagaaaaacaaggataagtatgtgggcgtgtcttcagactcagtggggggcttccgctacagcgagcgatacgatcctgagcctaaatcaaaatgggacgaggagtgggataaaaataagagcgcttttcctttttctgacaaactaggtgagctctccgacaaaatcggatcaactatagacgataccatcagcaagtttaggaggaaagacagagaagattccccagaacgttgcagtgacagtgacgaggaaaagaaggcccgtagaggcagatctccgaagggggaattcaaagacgaagaggagacagtcacaaccaagcacattcacataactcaggcaaccgagacaactacaactcgccataaacgtaccgccaatccttccaaaaccattgacctcggtgccgcggcccactatacaggagacaaggcctctccggaccagaatgccagcacccatacgccccagtcctcagtcaagacgagcgtgccgagttctaaatcctcgggcgatctcgttgacctgtttgacggcacctctcaatctacaggaggctcagctgacctctttggcggatttgccgattttgggtcagcggcagcttccggcagcttcccctcacaagtgactgccacaagtggtaacggcgactttggcgattggtcagctttcaatcaggcccccagcggccccgtagcctcttccggggagtttttcgggagcgctagccagccagcagtagagctggtgtccgggagccagagtgccttaggccccccccctgctgcctccaatagttccgatctcttcgatctgatggggagctctcaagctacaatgacctcgagccagtctatgaatttttctatgatgtccacaaacacagtcggtttgggactccccatgtccaggtcccagcccttgcagaacgtgagcaccgttctgcagaagccgaatcccctttataatcagaataccgatatggtgcaaaaaagcgtgagcaaaactttgccctctacatggtctgacccatcagtgaatatatcattggataacttgctgccagggatgcaacccagtaagccccagcagccttcgctgaatactatgatccagcagcagaatatgcagcagccgatgaacgtgatgacccagagtttcggcgcagttaatctctctagtcctagcaatatgttacccgtgcgaccccaaaccaatgcgctgatcggaggccccatgcccatgtcgatgcccaacgttatgaccggaactatggggatggctcccttgggtaatacacctatgatgaatcagtcaatgatggggatgaacatgaatatcggcatgtcagccgcaggtatgggcctcactggtacgatggggatgggcatgcccaacatcgccatgacatccggcacagtgcaacctaaacaggacgcatttgccaattttgcaaatttttcaaaatag

SEQ ID NO: 74965 - DNA, 1932 bp, Artificial Sequence
  derived and/or modified sequence
atgttgaacatgtggaaggttcgggaactcgtagacaaagccaccaatgtcgtgatgaattacagcgaaattgagtctaaagtgagagaggcaaccaacgatgacccatggggcccttccgggcagctgatgggcgaaatcgcaaaggctacctttatgtacgaacagtttcccgaactgatgaacatgctgtggtctagaatgctcaaagacaataaaaagaactggcgccgagtgtacaagtcgctcctcctgctcgcttacctcattaggaatggaagtgagcgcgtcgtgacaagcgctagggagcatatctacgacctccggtccctagagaactaccattttgtcgacgagcatgggaaagaccaggggatcaatatccgacaaaaggtgaaggaattagtagaatttgctcaggatgatgaccggctgcgtgaggaaaggaaaaaggccaagaagaataaggacaagtacgtcggggtgagttccgattccgtgggcggatttcggtatagtgagagatatgaccctgagccaaagagtaagtgggacgaggaatgggacaaaaataaatccgccttccccttcagtgacaagctcggggagctgtccgataagatcggctccacaatcgacgacacgatctccaagttccggaggaaagaccgggaggatagtccagaacggtgctcagactcggacgaagagaagaaagctagaagagggcgcagcccaaagggggagtttaaagacgaggaagagactgttacgaccaaacacatccacattacgcaggccaccgaaacgaccacgacccggcataaacggactgcgaatccgtccaagaccattgatcttggcgctgctgcccactatacgggggataaagctagtcccgaccaaaatgcctccactcacactccgcagtccagtgttaagacaagtgtcccaagcagtaagtctagcggtgacttagtggacctttttgatggcacttctcaatcaaccggagggtcagcagacttatttggggggttcgcagacttcggctccgccgccgcaagcgggtctttcccgagtcaggttacagcgacctccggtaacggtgactttggcgattggtcagctttcaaccaagcacctagtggtccagtggcatcatcaggcgaattctttggcagcgcctcccagcctgctgtcgaactggtgtccggttctcagagcgctctgggcccccctcccgccgcaagcaatagttctgacctcttcgatttaatggggagttcccaggccacaatgacaagcagccagtcaatgaattttagcatgatgtcaaccaataccgtcggcttgggtctgcccatgagtaggagccagcccctgcagaacgtatccaccgtcctccagaagccaaacccactctacaatcagaacaccgatatggtgcagaagtctgtcagcaaaacactgccctcgacatggagcgaccccagcgtcaatataagcttagataacctgctaccagggatgcagccttccaagccacaacagccatctcttaataccatgatccagcagcagaacatgcagcagcccatgaatgtgatgacccagtccttcggcgccgtgaatctgagctccccctccaatatgcttcctgtgcgaccccagacaaatgcgctgattggcggaccaatgccaatgagtatgcccaacgtgatgactggtaccatgggcatggcccccctggggaataccccaatgatgaaccagagcatgatgggaatgaacatgaacatcggaatgtctgccgcagggatgggactgactggaaccatgggaatggggatgcccaatatagctatgacgtctggaaccgtgcagcctaaacaggatgcatttgcaaatttcgccaacttttcaaagtag

SEQ ID NO: 74966 - DNA, 1878 bp, Artificial Sequence
  derived and/or modified sequence
atgaactacagcgagattgagagcaaggtgcgggaggccaccaatgatgacccctggggccccagcggccagctgatgggagaaattgccaaggccaccttcatgtatgagcagtttcctgagctgatgaacatgctgtggagcaggatgctgaaggacaacaagaagaactggaggagagtgtacaagagcctgctgctgctggcctacctgatcagaaatggcagcgagcgggtggtgaccagcgcccgggagcacatctatgacctgcggagcctggagaactaccactttgtggatgagcacggcaaggaccagggcatcaacatccggcagaaggtgaaggagctggtggagtttgcccaggatgatgaccggctgcgggaggagaggaagaaggccaagaagaacaaggacaagtatgtgggcgtgtccagtgacagcgtgggcggcttccgctacagcgagagatatgaccctgagcccaagagcaagtgggatgaggagtgggacaagaacaagagcgccttccccttcagtgacaagctgggggagctgagtgacaagattggcagcaccattgatgacaccatcagcaagttccggaggaaggaccgggaggacagccctgagcgctgcagcgacagtgatgaggagaagaaggcccggcggggccgcagccccaagggggagttcaaggatgaggaggagaccgtgaccaccaagcacatccacatcacccaggccacagagaccaccaccaccaggcacaagaggacagccaaccccagcaagaccatcgacctgggcgccgccgcccactacaccggggacaaggccagcccagaccagaatgccagcacccacaccccccagagctctgtgaagacctctgtgcccagcagcaagagcagcggggacctggtggacctgtttgatggcaccagccagagcactggaggcagcgctgacctgtttggaggctttgctgactttggcagcgctgctgccagcggcagcttccccagccaggtgacagccaccagcggaaatggagactttggagactggagcgccttcaaccaggcccccagcggccctgtggccagcagtggagagttctttggaagtgccagccagcctgctgtggagctggtgtctggcagccagagcgccctgggccccccacctgctgccagcaacagcagtgacctgtttgacctgatgggcagcagccaggccaccatgaccagcagccagagcatgaacttctccatgatgagcaccaacacagtgggcctgggcctgcccatgagccgcagccagcccctgcagaatgtgtccacagtgctgcagaagcccaaccccctgtacaaccagaacacagacatggtgcagaagtctgtgtccaagaccctgcccagcacctggagcgaccccagcgtgaacatcagcctggacaacctgctgcccggcatgcagcccagcaagccccagcagcccagcctgaacaccatgatccagcagcagaacatgcagcagcccatgaatgtgatgacccagagctttggagctgtgaacctgagcagccccagcaacatgctgcctgtgcggccccagaccaatgccctgattggaggccccatgcccatgtccatgcccaacgtgatgacaggcaccatgggcatggcccccctgggcaacacccccatgatgaaccagagcatgatgggcatgaacatgaacatcggcatgtctgctgctggcatgggcctgaccggcaccatgggcatgggcatgcccaacatcgccatgaccagcggcaccgtgcagcccaagcaggatgcctttgccaactttgccaacttcagcaagtag

SEQ ID NO: 74967 - DNA, 1932 bp, Artificial Sequence
  derived and/or modified sequence
atgctgaacatgtggaaggtgcgggagctggtggacaaggccaccaacgtggtgatgaactacagcgagattgagagcaaggtgcgggaggccaccaatgatgacccctggggccccagcggccagctgatgggagaaattgccaaggccaccttcatgtatgagcagtttcctgagctgatgaacatgctgtggagcaggatgctgaaggacaacaagaagaactggaggagagtgtacaagagcctgctgctgctggcctacctgatcagaaatggcagcgagcgggtggtgaccagcgcccgggagcacatctatgacctgcggagcctggagaactaccactttgtggatgagcacggcaaggaccagggcatcaacatccggcagaaggtgaaggagctggtggagtttgcccaggatgatgaccggctgcgggaggagaggaagaaggccaagaagaacaaggacaagtatgtgggcgtgtccagtgacagcgtgggcggcttccgctacagcgagagatatgaccctgagcccaagagcaagtgggatgaggagtgggacaagaacaagagcgccttccccttcagtgacaagctgggggagctgagtgacaagattggcagcaccattgatgacaccatcagcaagttccggaggaaggaccgggaggacagccctgagcgctgcagcgacagtgatgaggagaagaaggcccggcggggccgcagccccaagggggagttcaaggatgaggaggagaccgtgaccaccaagcacatccacatcacccaggccacagagaccaccaccaccaggcacaagaggacagccaaccccagcaagaccatcgacctgggcgccgccgcccactacaccggggacaaggccagcccagaccagaatgccagcacccacaccccccagagctctgtgaagacctctgtgcccagcagcaagagcagcggggacctggtggacctgtttgatggcaccagccagagcactggaggcagcgctgacctgtttggaggctttgctgactttggcagcgctgctgccagcggcagcttccccagccaggtgacagccaccagcggaaatggagactttggagactggagcgccttcaaccaggcccccagcggccctgtggccagcagtggagagttctttggaagtgccagccagcctgctgtggagctggtgtctggcagccagagcgccctgggccccccacctgctgccagcaacagcagtgacctgtttgacctgatgggcagcagccaggccaccatgaccagcagccagagcatgaacttctccatgatgagcaccaacacagtgggcctgggcctgcccatgagccgcagccagcccctgcagaatgtgtccacagtgctgcagaagcccaaccccctgtacaaccagaacacagacatggtgcagaagtctgtgtccaagaccctgcccagcacctggagcgaccccagcgtgaacatcagcctggacaacctgctgcccggcatgcagcccagcaagccccagcagcccagcctgaacaccatgatccagcagcagaacatgcagcagcccatgaatgtgatgacccagagctttggagctgtgaacctgagcagccccagcaacatgctgcctgtgcggccccagaccaatgccctgattggaggccccatgcccatgtccatgcccaacgtgatgacaggcaccatgggcatggcccccctgggcaacacccccatgatgaaccagagcatgatgggcatgaacatgaacatcggcatgtctgctgctggcatgggcctgaccggcaccatgggcatgggcatgcccaacatcgccatgaccagcggcaccgtgcagcccaagcaggatgcctttgccaactttgccaacttcagcaagtag

SEQ ID NO: 74968 - DNA, 1878 bp, Artificial Sequence
  derived and/or modified sequence
atgaactacagcgagatcgagagcaaggtgcgggaggccaccaacgatgacccttggggtccgtccggccaactgatgggtgagatcgctaaggccacattcatgtatgagcagtttcctgaactaatgaacatgttgtggtccaggatgctcaaggataacaaaaagaattggcgaagggtatataagagcctcctgcttctcgcttatctgatccgtaatggctcggaacgagtcgtgacttcagccagagagcacatctatgatctgcgctccttggagaactatcatttcgtagatgagcacggaaaggaccagggtataaatatcaggcagaaggtcaaggaactggtggagtttgcccaagacgatgacaggttgcgagaagagcggaaaaaagcaaaaaagaacaaggacaagtatgtgggcgtgtctagtgattcagtcggtggattccgttattcagaaaggtacgacccggaacccaagtcgaagtgggacgaagagtgggataagaataagagcgccttccctttcagtgacaaactgggggaactgtccgataaaattggcagtaccattgatgatacgatttctaaattccggagaaaggatcgagaggacagccctgagcggtgctcagattcggacgaggagaaaaaagccaggcgtggccggagccctaagggcgaattcaaagatgaagaggagactgtcacgaccaagcacattcatattacacaggcgaccgagacgactacgacccggcacaaacggacagccaaccctagtaaaacaattgatcttggcgccgcggcccactacaccggcgacaaggctagtccggaccaaaacgccagcactcatactccccaatccagtgtgaaaacttccgtgccgtcttccaaaagctctggagatctggtggatttgttcgacggcaccagccagtctaccggcggcagtgccgatctcttcggtgggttcgctgattttggctctgcagctgctagcggaagcttcccaagccaggtaactgccactagcgggaatggagactttggggactggagtgcttttaaccaggccccttcaggtcctgtggcttcctctggcgagttctttggcagcgcttcccagccggcagttgagctggtatccggatctcagtcggccctgggacccccgcccgctgcatcaaactcctcagacttatttgacctcatgggatctagccaggctaccatgaccagctcacagagcatgaacttctctatgatgtccactaacactgtcgggttgggcttaccgatgagcagaagccagcctttgcaaaacgtctcaactgtgttgcaaaagccaaacccgctgtataaccagaataccgacatggtgcagaagagtgtgtcaaaaactctgccaagcacttggagtgatccgtcggtcaatattagcctcgacaacctgttgcccgggatgcaaccctcaaaaccccagcaaccaagcctcaacacaatgatccagcaacaaaatatgcagcagcctatgaatgtaatgacacagtctttcggcgctgtaaatttgtcctcaccatctaacatgttgcctgtgagaccccagaccaatgcgttaataggcgggccaatgcccatgtctatgcccaatgtcatgacagggactatgggaatggcccccctggggaatacgccaatgatgaatcagagcatgatggggatgaacatgaatatcggaatgagtgccgctgggatggggctaacaggcacaatgggaatgggcatgccaaatattgccatgacaagcgggactgtccaaccgaagcaggacgctttcgctaatttcgccaacttctcgaaatag

SEQ ID NO: 74969 - DNA, 1878 bp, Artificial Sequence
  derived and/or modified sequence
atgaactacagcgagatcgagagcaaggtgcgggaggccaccaacgatgacccatgggggccgtcaggacagctgatgggggagatcgcaaaggccacattcatgtacgagcagttccccgaactcatgaatatgctgtggtcgcgcatgctgaaagacaataagaaaaactggcggagagtatataagagcctactgctgctcgcctacttgattcggaatgggtccgagcgggttgtaacttcggcccgagaacacatctacgatctgaggtccctggaaaactatcatttcgtcgatgaacacggcaaagatcaggggataaatatcaggcaaaaagtcaaagagctcgtggaattcgcccaggacgatgaccggcttagggaggagaggaaaaaggccaaaaaaaacaaggacaaatatgttggcgtgtcttcagactcggttggaggattccgatatagcgagcgttatgaccctgaaccgaagtccaagtgggacgaagaatgggataagaacaagagcgcctttccattttcagataagcttggcgaactgtctgacaaaattggatccacaatcgacgatacgattagcaagtttcggagaaaggacagagaagactcccccgaaaggtgtagcgatagtgatgaagaaaagaaggctcgccgcggtagatcccctaaaggtgagttcaaagacgaagaagaaaccgtcaccaccaagcacatccatatcactcaggcgacagaaacaactacaacgcggcataagcgtaccgcaaatccttctaaaacgatcgatctgggtgccgctgcccactacaccggtgacaaggcctcacccgaccagaacgcaagtacacatacaccacagagcagcgttaaaacatcagtgcctagcagtaagagtagcggggacctggttgatctgttcgatggtacttcccagtctaccgggggcagcgccgatttattcggtgggttcgctgacttcggctccgccgcagcctcagggtcgtttccaagccaggtgaccgctacatcaggtaacggtgacttcggtgactggtctgccttcaatcaggccccaagcgggcccgttgcgagttccggcgagttttttggtagcgcttcgcagcccgctgtcgagctggttagcggctcccagagtgcactggggcccccccccgctgcaagtaatagttccgacctctttgacctcatgggctcctcacaggctacaatgacttcctcccagtcaatgaatttcagcatgatgtctactaatactgtggggctgggacttccaatgtccagaagccagccgttgcaaaacgtgtctactgtgctccagaaaccaaatcccctgtacaatcagaacacggatatggtgcaaaagagcgtatctaagacactgccgtccacatggtctgatccttcggttaatatcagcctcgataatctgctgcccggtatgcagccttctaaacctcagcagcccagcctgaataccatgattcagcaacaaaacatgcaacaaccgatgaatgtcatgacacagtcttttggggcggtgaacctgtcctctccatccaacatgctacccgttcgaccccagaccaacgcactgatagggggccccatgcccatgagcatgcccaatgtgatgacagggacgatgggcatggcccctttgggcaatacaccaatgatgaaccaaagtatgatgggaatgaacatgaacattggcatgagcgctgccggtatgggcctgacaggcacaatggggatgggcatgcccaacattgccatgactagtggaactgtccagcctaaacaggacgctttcgccaactttgctaatttctctaagtag

SEQ ID NO: 74970 - DNA, 1878 bp, Artificial Sequence
  derived and/or modified sequence
atgaactacagcgagatcgagagcaaggtgcgggaggccaccaacgatgacccctgggggccctccggacagctgatgggcgagatcgccaaggccacttttatgtacgagcaatttccagagttgatgaacatgctctggtccaggatgcttaaagacaataaaaagaattggcggagggtctacaaatctctgcttttactggcttatctgatccgcaacggctctgagagagtggtgacctccgcgagggaacacatttacgatctcagatctttggaaaactaccatttcgtcgacgaacatggcaaagaccaagggattaatataagacagaaggtgaaggagctggtggagttcgcccaagatgatgatcgactgcgggaggaacgaaagaaggcaaaaaaaaataaagataagtacgtgggcgtgagctctgactcagttgggggatttcgctattccgagcgctacgatccggagcctaaaagcaaatgggacgaggagtgggataagaacaaaagcgccttcccctttagcgataagctgggcgaattatccgataagatcggctctacaatcgacgacacaatttctaaattccgacgcaaagatagggaggactctcccgaaagatgtagtgattccgatgaggagaaaaaggctcgacgggggcgaagcccgaagggcgagttcaaagacgaggaggagactgtcacgacgaagcacattcatattacgcaggctacagaaaccacaacaaccagacacaaacgcacagccaaccccagcaagacaattgatcttggggctgcggctcattacactggggacaaggcaagcccagaccagaacgcatctacccacactcctcagtcttccgtgaagacaagcgttccgtcttccaagtcatcaggagatctggttgaccttttcgacggaacgtcacagagcacagggggatcagccgacttgttcggcggctttgctgactttggctctgctgccgcatcaggttctttccctagccaggtgacggcgacctctgggaatggcgacttcggcgattggagcgccttcaaccaggccccaagtgggccggtagctagttccggagagttcttcgggtctgcatcccagccggctgtcgagctggtcagcggctcacaatctgctctgggaccccctcctgccgccagcaacagctcagatctgttcgatctgatgggcagctctcaggcaacaatgacctcaagtcagtctatgaatttctcgatgatgtccacgaatacagtcggcctggggctccctatgtctcggtctcagcccctgcaaaacgtttctacagtactccagaagccaaatcccctgtataaccagaacacggacatggtacagaaatccgtgagtaaaacgctgcctagcacctggtctgatccttctgttaacatttccctggacaatctcttaccaggcatgcagcccagtaaacctcagcagcctagtctcaataccatgatccagcagcagaatatgcagcaaccaatgaacgttatgacccaatcatttggggctgtgaacttgagctctccatccaacatgctccccgtgagacctcagaccaacgcgctcatcggtggtcccatgcctatgagcatgccaaacgtgatgactgggactatggggatggcacctctgggcaacacacctatgatgaatcaatcaatgatgggaatgaatatgaacatcgggatgtcagccgctggcatgggtcttactggcacaatgggcatggggatgccgaatattgctatgacatcagggactgtgcagcccaaacaggatgcctttgcaaactttgctaatttctccaagtag

SEQ ID NO: 74971 - DNA, 1932 bp, Artificial Sequence
  derived and/or modified sequence
atgctgaacatgtggaaggtgcgggagctggtggacaaggccaccaatgtggtgatgaattattcagagatcgaatccaaggtccgggaggccaccaatgatgacccctggggcccatccggacaattgatgggagagattgccaaggcaaccttcatgtacgaacagttcccagaactcatgaatatgctttggagcaggatgttgaaagataacaagaagaattggaggagggtgtataagtctctactcctactcgcttatctaatcaggaatggatccgagcgcgtagtgacctcggcacgagagcacatttacgacttaaggagtctggaaaattatcatttcgtggacgaacacggcaaagaccagggaatcaacattcggcagaaggtgaaggagcttgtggagtttgctcaggacgacgacaggttgcgcgaagaacgcaagaaggccaaaaaaaacaaagacaaatatgtaggggtcagttcggactccgtaggaggattcagatactccgagcgctacgatcccgaaccgaagagcaagtgggatgaagaatgggataagaacaaatctgccttccccttctccgacaaactcggcgagctgtcggacaagattgggagcaccatagacgacacaatttctaagtttagaagaaaagatcgcgaggactctcctgagcgttgtagcgactcggacgaagagaagaaggcgcggcggggccgcagccctaaaggggaattcaaggatgaggaggagacagtcaccaccaagcacatccacatcacccaggctactgaaaccaccactaccaggcacaaaaggacggctaacccctccaagaccattgacttgggcgcagccgctcactacacgggcgacaaagcttcacccgaccagaatgcctccacacacacgccccagtctagtgtgaaaacgagtgttcccagtagtaagagcagtggagacctcgtggacctgtttgatggcacttctcaaagtacgggaggatctgctgacctgttcgggggatttgcggacttcgggagcgcagcagcctcaggaagttttccctctcaggtgaccgccactagtggcaatggcgatttcggcgactggagtgcatttaaccaggctccatctggcccagtcgcttcttcaggcgagtttttcggatccgccagccaaccagcggttgaactggtctcagggtctcagagtgctctgggccctcccccagcagcttccaactctagcgatctgttcgacttgatggggtctagccaggcaacaatgactagctcgcagtccatgaacttctcgatgatgtctaccaacacggtaggcctcggacttcccatgtcacgatctcagcctttacaaaacgtgtctaccgtccttcaaaagcctaaccctctttataaccaaaacacggatatggttcaaaaaagcgtgtcaaaaacattgccctccacctggtctgacccttccgtcaacatatccctcgataatttactccccggtatgcagccatctaaaccccagcaaccctcacttaacacaatgattcagcagcagaatatgcagcaaccaatgaatgtcatgacgcagtctttcggagcggtgaatctgtccagccctagtaacatgctgccggtccgtcctcagacgaatgcgctgatagggggccctatgccaatgtccatgcccaacgtgatgacggggacaatggggatggctccactgggcaacacccctatgatgaatcagagtatgatgggaatgaacatgaacatcggtatgtcagctgccggtatgggactgactggaaccatgggcatgggaatgcctaatatcgcaatgacctccggcaccgtccagcccaaacaggacgccttcgcaaattttgcaaatttctcgaaatag

SEQ ID NO: 74972 - DNA, 1878 bp, Artificial Sequence
  derived and/or modified sequence
atgaattactctgaaattgagtcgaaagtgcgcgaagctaccaacgacgatccctggggaccctccggacagcttatgggggaaatcgctaaggcaacctttatgtatgaacaattcccagaactgatgaacatgctatggtcgaggatgctgaaggataacaaaaagaactggaggcgagtgtataaatccctactcctgttggcctacctgatcagaaatggctcagaacgcgtggtcacgtccgcccgtgagcatatttatgaccttcgctctctcgagaattaccacttcgtggacgagcacggaaaagaccagggtatcaacatccggcagaaggtgaaggagctggtggagtttgcacaagatgatgacagactgagagaggagaggaagaaagctaaaaagaataaagataagtacgtgggtgtgtccagtgacagcgtgggcggtttcagatatagcgagcgttatgatcccgaacctaaatccaaatgggatgaggagtgggataaaaacaaaagcgcctttccctttagcgacaaacttggggaactgagcgacaagattggcagcaccattgacgacaccatctccaaattcaggcgaaaggaccgcgaagattcacccgaacgatgcagcgactcagacgaggaaaagaaggctcgtagaggccgatctcctaagggtgaattcaaggacgaagaagagactgtcacaaccaaacatatccatataacccaagcaacggagactaccacgacgcgccataagcgtaccgctaacccgagcaaaactatcgatctgggcgctgctgcccattatactggcgacaaggcttcacctgaccagaacgcgtccacccatacacctcagtcctcagtgaagacatcagtacctagtagcaagtcctccggagacctagtagatctttttgacggtacttcgcagagcactggcggatccgctgatctcttcggtgggttcgccgacttcggatctgccgctgcgagtggctctttcccaagccaggtgacggccacttccggcaacggagacttcggtgactggtctgcttttaaccaagctccctcggggcctgtagcctcttctggcgagttcttcggcagtgcctctcagcccgctgtggagctggtatcgggatcgcagtccgctctcggcccaccaccagccgcatctaacagttcagatctgttcgatctaatgggctccagccaggcgacaatgactagtagccaaagcatgaattttagtatgatgtctactaacaccgtcggactaggcttgcccatgagtcgatctcagcctctgcaaaacgtgtcaactgtgttgcagaaacccaacccattgtacaaccagaataccgatatggttcagaagtcagtctccaaaacgctgccaagtacctggtctgatcccagcgtgaatatttcccttgataacctacttcctggcatgcagccctccaaaccgcaacagccctcattgaacacaatgatacaacagcagaacatgcagcagcctatgaacgttatgactcagtcatttggggcagttaatttatcatccccatccaacatgctgccagttcgaccccagacgaatgctctgatagggggacccatgccaatgtccatgcccaacgtcatgactggaaccatggggatggcacctctcggcaacacacccatgatgaatcagtctatgatgggtatgaatatgaacatcggcatgtctgcagcgggaatgggcctgacaggcactatgggaatgggtatgcccaacatcgctatgacatccggcacagtgcagccaaagcaggacgccttcgcaaacttcgccaatttctcaaaatag

SEQ ID NO: 74973 - DNA, 1878 bp, Artificial Sequence
  derived and/or modified sequence
atgaactactctgagatagagagtaaggttcgagaggcaacaaatgacgatccatgggggccatctggacagctgatgggcgaaatcgctaaagccaccttcatgtacgagcagtttcccgagctcatgaacatgctttggtcgaggatgttgaaggacaacaagaaaaactggagaagggtgtataagagcttgctgcttctggcttacttgatcagaaacggttccgaaagagtggtaaccagtgccagggagcacatatatgaccttcggtccctggagaactatcactttgtcgatgaacatgggaaggatcagggcattaacattcgacagaaagtgaaagagctggtggaatttgctcaggatgacgaccgtctacgagaagagagaaagaaagcgaagaagaacaaggataaatacgtcggtgtctccagtgacagcgtcggagggtttagatatagcgaacgttacgatccagagccgaagtctaagtgggatgaagagtgggacaagaataagagcgccttccctttcagtgataagttgggagaactcagcgacaagatcgggtcaacaatcgacgacaccatctccaagtttaggagaaaagatagggaagatagccccgaaaggtgctcagatagcgatgaggaaaagaaagctcgaaggggacggagccccaagggcgagtttaaggatgaggaagagaccgtcaccactaaacacatccacatcacacaggccaccgagacaaccacgactagacataagaggacagcaaatccttctaagaccatagacttaggcgcagccgcacactacactggtgacaaggcaagtcctgaccagaacgcctctacccacaccccccaatcttccgtgaaaacgtccgttccatcctcaaaaagttctggggatctcgtcgatctgttcgatggcacctcccaaagcaccggtggctccgcggacttgtttgggggttttgccgatttcggcagtgcggcagccagcggaagtttcccctcccaggtaacggcaacatctgggaacggagatttcggagactggtcagctttcaaccaagcgccatctggtcccgtggctagttccggcgagttttttggcagtgcctcccaacctgccgtggaactcgtgagtggctctcagagcgctctgggcccaccccctgcagccagcaattcaagcgacctgttcgatctaatgggatcaagccaggccacaatgacatctagtcagtctatgaatttctctatgatgtcaaccaataccgttgggctggggctcccaatgtcgagaagccagcctcttcagaatgtttctacagtgctgcagaagcctaacccgctgtataatcagaacaccgatatggtgcagaagtctgtgtccaagacactaccttcaacttggtccgacccaagtgtcaatatttcactggacaatctgttacccggaatgcagccaagcaaacctcagcaaccgtctttaaatactatgatacaacagcagaacatgcagcagcctatgaatgtgatgacacagtcctttggcgcagtaaatctgagctctccttccaacatgcttccagttaggcctcaaacaaatgccctgatcgggggtcctatgcctatgtcaatgcccaatgtgatgaccggcacaatgggtatggctccactggggaacactccaatgatgaaccagagcatgatgggcatgaacatgaatatcggcatgtcagctgcaggcatgggattaaccggcaccatgggaatgggcatgcctaatatcgccatgacgagcggaacggtccagcccaagcaggacgcctttgccaattttgccaattttagtaagtag

SEQ ID NO: 74974 - DNA, 1878 bp, Artificial Sequence
  derived and/or modified sequence
atgaactatagtgaaatcgagtccaaagttagagaagcaacaaacgacgacccatgggggccttctggccagctgatgggagagattgccaaggccacctttatgtatgagcaatttccagaactgatgaatatgctgtggagcagaatgttgaaggataataagaagaactggcgacgggtgtacaagtccctgctcctgctcgcttatctcattcgaaacggaagcgagcgggtcgtgacaagtgccagggaacatatatatgatctacggagcctggagaattaccatttcgtggacgaacatggcaaggaccagggtatcaacatcaggcagaaagtcaaggagctcgtggagttcgctcaggatgacgataggctgcgagaggaacggaaaaaggccaaaaagaacaaggacaagtatgtgggtgtctcttccgactctgtcggcggttttaggtattcggaacggtacgaccctgagcccaagtccaaatgggacgaggaatgggacaagaacaagagtgctttcccattctctgacaagttaggcgagttatctgataagatcgggtctactatcgacgacaccatttctaagtttcggagaaaagaccgtgaggactcccccgaaagatgtagcgattccgacgaggagaagaaagccagacgcggacggtctcccaagggggagtttaaggacgaagaggaaactgtgacaactaaacacatacacatcacccaggctacggagaccacaaccacaaggcacaagcgaaccgcgaacccctcaaaaacaattgatcttggcgcagctgcccattacacaggggacaaggctagtccggatcagaatgcctccacccacaccccccaaagttctgtcaaaaccagcgttccatcttcaaagtccagcggagacctggtcgacttgttcgatgggaccagtcaatcaacaggcggaagcgcggacttatttggtggctttgctgactttggtagcgcggcagccagcggcagcttcccatcccaggtcaccgctaccagtggcaacggcgacttcggggactggtccgccttcaatcaggcccctagcggaccagtggccagcagcggcgagttttttggatcagcctcacagcctgcagtcgaactcgtctccggctcccaatcagcgcttggaccccctccagcagccagcaattcgtcagacctcttcgacctaatggggagctctcaggccacgatgacatcttcccagtccatgaatttcagcatgatgagcacaaacactgtcggcttgggcttacccatgagtcgcagtcaaccactccaaaacgttagcactgttctacaaaagcctaacccactttacaatcagaatacagatatggtgcagaagagcgtcagcaagactctcccgtccacatggtccgatcccagcgtgaatatctcgttggacaacctgctgccaggaatgcagccctctaaaccgcagcaaccctcattgaacactatgattcagcaacagaatatgcagcagccaatgaacgtgatgacccagagcttcggggctgttaacctgtcctcccccagtaatatgctccccgtgaggccacaaacgaatgcgcttatcggcggacccatgccaatgtccatgccaaacgtgatgacgggaacgatggggatggccccactgggcaacacaccaatgatgaatcagagcatgatgggtatgaacatgaacatcggaatgtctgccgctggcatgggactgaccggcacaatggggatgggcatgcctaacattgccatgaccagtggaacagtgcaacccaagcaagacgcattcgctaatttcgcaaacttctctaaatag

SEQ ID NO: 74975 - DNA, 1932 bp, Artificial Sequence
  derived and/or modified sequence
atgttaaatatgtggaaagtcagagagctggtggataaggcaactaacgtggtgatgaactacagcgaaatcgaatccaaggtgcgagaagccactaatgacgatccatggggacctagtggacagttgatgggagaaattgccaaggccactttcatgtatgagcaattccctgagctgatgaatatgttgtggagtaggatgctcaaagacaataaaaagaactggcgaagggtgtacaaaagcctcctgcttctagcatatctcattcgcaacgggtcagaacgcgttgttactagcgctagggaacacatctacgatcttcgcagcctcgaaaactaccactttgtggacgaacacggaaaggatcaaggaatcaacataagacagaaggttaaagagctggtggagtttgctcaggacgacgaccgactgcgggaagaacgcaaaaaagccaagaaaaataaagacaagtacgtgggggtcagttcggactctgtgggcggtttccggtatagtgaaaggtatgatcccgagcctaagtcaaaatgggatgaagaatgggataaaaacaagtcagcttttccattctcagataagcttggtgaattaagcgataagatcgggagtactatcgacgacactatttctaaatttagacgcaaggatcgtgaagatagtcctgagcggtgcagcgattccgacgaagagaaaaaggccagaagagggagatctccgaagggggaatttaaggatgaggaagagacagttacaaccaagcacatccacatcacccaggcaaccgagaccactacgaccaggcacaagcgtacagcaaatccatctaagactatcgacttgggggctgccgcacattataccggcgataaggccagccctgaccagaatgcgagcacacacacccctcaaagctcagtgaagaccagcgtgccttctagcaagagtagtggggatctggtggacctcttcgatggtacatctcagtccaccgggggatccgctgacttgttcggaggctttgccgacttcgggagtgctgctgcttccgggtcatttccatcacaggtcacagctactagcgggaacggcgatttcggtgactggtcagcattcaaccaggccccatccgggccagtagccagttcaggcgagttttttgggtcagcctcccagcctgcagtggaacttgtcagtggcagccaatccgcattagggcctcccccagctgccagcaacagcagtgatctgttcgatcttatgggctcctcccaggccaccatgacaagcagtcaatcaatgaattttagcatgatgtcaacgaatacagttggactgggactgcccatgtcccgtagccagccactgcagaatgtgtctacagtcctccaaaagcccaatcccttatataaccaaaacacagacatggtgcagaaaagtgtatcaaagacgctgccttcaacctggagcgatccttcagtaaacattagcctcgacaatcttctccccggaatgcaaccttcaaagccacagcaaccttccctcaataccatgatacagcagcaaaatatgcaacagcccatgaatgtaatgacccaatccttcggggctgtgaacctcagctcaccttcaaacatgttacctgtgcggccacaaacgaacgcattgatcgggggtccgatgccaatgtctatgcccaacgttatgactgggaccatgggaatggccccactgggtaacacccccatgatgaaccagagcatgatgggaatgaatatgaatatcggaatgtccgccgctggcatgggtctgaccgggactatgggaatgggcatgccgaacatcgctatgactagcggtaccgtgcagcccaagcaggacgcctttgctaacttcgcaaacttctccaaatag

SEQ ID NO: 74976 - DNA, 3479 bp, Artificial Sequence
  derived and/or modified sequence
agcgcctgtgctgccgcgtctcgacgtgtcaccggcggcgccgctgctgtggcaaaggaaggagctgactgggggagttcgaggcggcgggcggcggtgaccccggcctggaactgccccggtacggaagtgttccggggtccgtggggagcaggagagggaggcggcggaccgtcccgcgcggggcacgatgttgaacatgtggaaggtgcgcgagctggtggacaaagccaccaatgttgttatgaattattcagagatcgagtctaaggttcgagaggcaacgaacgatgatccttggggaccttctgggcaactcatgggagagattgccaaggctacatttatgtatgaacaatttccagaacttatgaacatgctttggtcacgaatgttaaaagacaacaaaaagaattggagaagagtttataagtcgttgctgctcctagcttacctcataaggaatggatcagagcgtgttgttacaagtgccagagaacacatttatgatttacgatccctggaaaattaccactttgtagatgagcatggtaaggatcaaggtataaatattcgacagaaggtgaaggaattggttgaatttgcccaggatgacgacaggcttcgtgaagagcgaaagaaagcaaagaagaacaaagacaagtatgttggggtttcctcagacagtgttggaggattcagatacagtgaaagatatgatcctgagcccaaatcaaaatgggatgaggagtgggataaaaacaagagtgcttttccattcagtgataaattaggtgagctgagtgataaaattggaagcacaattgatgacaccatcagcaagttccggaggaaagatagagaagactctccagaaagatgcagcgacagcgatgaggaaaagaaagcgagaagaggcagatctcccaaaggtgaattcaaagatgaagaggagactgtgacgacaaagcatattcatatcacacaggccacagagaccaccacaaccagacacaagcgcacagcaaatccttccaaaaccattgatcttggagcagcagcacattacacaggggacaaagcaagtccagatcagaatgcttcaacccacacacctcagtcttcagttaagacttcagtgcctagcagcaagtcatctggtgaccttgttgatctgtttgatggcaccagccagtcaacaggaggatcagctgatttattcggaggatttgctgactttggctcagctgctgcatcaggcagtttcccttcccaagtaacagcaacaagtgggaatggagactttggtgactggagtgccttcaaccaagccccatcaggccctgttgcttccagtggcgagttctttggcagtgcctcacagccagcggtagaacttgttagtggctcacaatcagctctaggcccacctcctgctgcctcaaattcttcagacctgtttgatcttatgggctcgtcccaggcaaccatgacatcttcccagagtatgaatttctctatgatgagcactaacactgtgggacttggtttgcctatgtcaagatcacagcctttgcaaaatgttagcacagtgctgcagaagcctaatcctctctataatcagaatacagatatggtccagaaatcagtcagcaaaaccttgccctctacttggtctgaccccagtgtaaacatcagcctagacaacttactacctggtatgcagccttccaaaccccagcagccatcactgaatacaatgattcagcaacagaatatgcagcagcctatgaatgtgatgactcaaagttttggagctgtgaacctcagttctccatcgaacatgcttcctgtccggccccaaactaatgctttgatagggggacccatgcctatgagcatgcccaatgtgatgactggcaccatgggaatggcccctcttggaaatactccgatgatgaaccagagcatgatgggcatgaacatgaacatagggatgtccgctgctgggatgggcttgacaggcacaatgggaatgggcatgcccaacatagccatgacttctggaactgtgcaacccaagcaagatgcctttgcaaatttcgccaattttagcaaataagagattgtaaaagaagcagattgaatgaagaatttttagctgtgcagataggtgatgttgggatggaaaatgctaatcaactaccctttcttttatcaagtaattaaaataaatctacataaagaaccaaaaaggctgttttataaaagtgaaatatccagtatttcagagggccaggcaagagcacttcagatgaggcagtcaaaatcatttttttccagtgaggatagaccacaagtgggtggtgagaccattgaaagcctttatcaactgaagagtccatttaacagcataatttgtgggaagactggaatagggctgaataaatgtgtttgaatctctaattttatactttcttttcctgaggaacttgatttttctgtccctggatcgccttgtcataattgggtctgttccttttactaccactcttgagtccatatatgaaatcattaaagttggatgatcagttttttataaaaatatatatttttgtccaagaaaaaaaaaagcatacatatgtgattatggctaaatcaaaggtaactggaatgtatatacttttgctaatgttccagcaacactgctattatactatccaaatttttattgtaacaaaacctctttaagcaattggtgattgccatgggacttttcccatgtcttctgctgtaattatcctgtgcagaactaggaagaaatttttttcaggactgctctatggtttcctttaaaagaaaaaaacttctgtttgtttttagcagtcattatttacaatttgcagtgattaacttggcaaggcttccttccgtgtttatccctgtagccatcatttaagtcaggaacagtcagaaaaatatttattttattttttttttgggtgtctgcaaaggtaaaaatccattaaaaccttaagttaaatataaatgttacaactcaatgtttgcttttagattttatacagtatttgttttgttttggttttgagtgtatataatgcagcattagcaatatggttccaatagaggagttaaatatatattgttaaaggagacctgtagcagtcaaagattttattgatttaatgacaaaggaaattaatgaaaatgtttttgtttttctgctgtaattctgcattaagctcacatgaaaatcatgattctagagtttggaatgcaaaattaattgttttaccctcaagctgggaatatttttcaaaataaatactataatatagatatcaaattattacctccccatgttatgttgaaaatttttttattaaattgataaaactttatttccattatattcataatgttctgttatacataacattaaaatgttcattaaaatc

SEQ ID NO: 74977 - DNA, 3987 bp, Artificial Sequence
  derived and/or modified sequence
gcgtctcgacgtgtcaccggcggcgccgctgctgtggcaaaggaaggagctgactgggggagttcgaggcggcgggcggcggtgaccccggcctggaactgccccggtacggaagtgttccggggtccgtggggagcaggagagggaggcggcggaccgtcccgcgcggggcacgatgttgaacatgtggaagcaccaatgttgttatgaattattcagagatcgagtctaaggttcgagaggcaacgaacgatgatccttggggaccttctgggcaactcatgggagagattgccaaggctacatttatgtatgaacaatttccagaacttatgaacatgctttggtcacgaatgttaaaagacaacaaaaagaattggagaagagtttataagtcgttgctgctcctagcttacctcataaggaatggatcagagcgtgttgttacaagtgccagagaacacatttatgatttacgatccctggaaaattaccactttgtagatgagcatggtaaggatcaaggtataaatattcgacagaaggtgaaggaattggttgaatttgcccaggatgacgacaggcttcgtgaagagcgaaagaaagcaaagaagaacaaagacaagtatgttggggtttcctcagacagtgttggaggattcagatacagtgaaagatatgatcctgagcccaaatcaaaatgggatgaggagtgggataaaaacaagagtgcttttccattcagtgataaattaggtgagctgagtgataaaattggaagcacaattgatgacaccatcagcaagttccggaggaaagatagagaagactctccagaaagatgcagcgacagcgatgaggaaaagaaagcgagaagaggcagatctcccaaaggtgaattcaaagatgaagaggagactgtgacgacaaagcatattcatatcacacaggccacagagaccaccacaaccagacacaagcgcacagcaaatccttccaaaaccattgatcttggagcagcagcacattacacaggggacaaagcaagtccagatcagaatgcttcaacccacacacctcagtcttcagttaagacttcagtgcctagcagcaagtcatctggtgaccttgttgatctgtttgatggcaccagccagtcaacaggaggatcagctgatttattcggaggatttgctgactttggctcagctgctgcatcaggcagtttcccttcccaagtaacagcaacaagtgggaatggagactttggtgactggagtgccttcaaccaagccccatcaggccctgttgcttccagtggcgagttctttggcagtgcctcacagccagcggtagaacttgttagtggctcacaatcagctctaggcccacctcctgctgcctcaaattcttcagacctgtttgatcttatgggctcgtcccaggcaaccatgacatcttcccagagtatgaatttctctatgatgagcactaacactgtgggacttggtttgcctatgtcaagatcacagcctttgcaaaatgttagcacagtgctgcagaagcctaatcctctctataatcagaatacagatatggtccagaaatcagtcagcaaaaccttgccctctacttggtctgaccccagtgtaaacatcagcctagacaacttactacctggtatgcagccttccaaaccccagcagccatcactgaatacaatgattcagcaacagaatatgcagcagcctatgaatgtgatgactcaaagttttggagctgtgaacctcagttctccatcgaacatgcttcctgtccggccccaaactaatgctttgatagggggacccatgcctatgagcatgcccaatgtgatgactggcaccatgggaatggcccctcttggaaatactccgatgatgaaccagagcatgatgggcatgaacatgaacatagggatgtccgctgctgggatgggcttgacaggcacaatgggaatgggcatgcccaacatagccatgacttctggaactgtgcaacccaagcaagatgcctttgcaaatttcgccaattttagcaaataagagattgtaaaagaagcagattgaatgaagaatttttagctgtgcagataggtgatgttgggatggaaaatgctaatcaactaccctttcttttatcaagtaattaaaataaatctacataaagaaccaaaaaggctgttttataaaagtgaaatatccagtatttcagagggccaggcaagagcacttcagatgaggcagtcaaaatcatttttttccagtgaggatagaccacaagtgggtggtgagaccattgaaagcctttatcaactgaagagtccatttaacagcataatttgtgggaagactggaatagggctgaataaatgtgtttgaatctctaattttatactttcttttcctgaggaacttgatttttctgtccctggatcgccttgtcataattgggtctgttccttttactaccactcttgagtccatatatgaaatcattaaagttggatgatcagttttttataaaaatatatatttttgtccaagaaaaaaaaaagcatacatatgtgattatggctaaatcaaaggtaactggaatgtatatacttttgctaatgttccagcaacactgctattatactatccaaatttttattgtaacaaaacctctttaagcaattggtgattgccatgggacttttcccatgtcttctgctgtaattatcctgtgcagaactaggaagaaatttttttcaggactgctctatggtttcctttaaaagaaaaaaacttctgtttgtttttagcagtcattatttacaatttgcagtgattaacttggcaaggcttccttccgtgtttatccctgtagccatcatttaagtcaggaacagtcagaaaaatatttattttattttttttttgggtgtctgcaaaggtaaaaatccattaaaaccttaagttaaatataaatgttacaactcaatgtttgcttttagattttatacagtatttgttttgttttggttttgagtgtatataatgcagcattagcaatatggttccaatagaggagttaaatatatattgttaaaggagacctgtagcagtcaaagattttattgatttaatgacaaaggaaattaatgaaaatgtttttgtttttctgctgtaattctgcattaagctcacatgaaaatcatgattctagagtttggaatgcaaaattaattgttttaccctcaagctgggaatatttttcaaaataaatactataatatagatatcaaattattacctccccatgttatgttgaaaatttttttattaaattgataaaactttatttccattatattcataatgttctgttatacataacattaaaatgttcattaaaatcaatgttgaactgctttttctttcgttctgttagacatttgagaccatttggggaaaaaataattatagtttgggcaaagtaatttttataaataatttaaaattatttaatgacttctctattctttcctatcagactctactgttaggaattaaaaatgaagcagcaaagatatcctgacctgctccattcttgctaatgttccatctacaacatttctaattaggcagaaattcatgtacttcagctaagtggtaatgaaaagtgattcatttgctgaataagagatgagagtgagtgtaattagctgactgcggtttttaatctttcaacaattcaatgtgtttaacttagtttcaaagaataggagctttcaagtgttgttacttcagagcaatcaagccagcctctggtggccgcatagtagaatatggtccctgatatttaaaaccgatcatcttaagtaaattttttctttaagaagtatatcttcactttctcaaatatgtatggttcttagacgaagtaaatgtttatctgaacctt

SEQ ID NO: 74978 - DNA, 3344 bp, Artificial Sequence
  derived and/or modified sequence
gtcaccggcggcgccgctgctgtggcaaaggaaggagctgactgggggagttcgaggcggcgggcggcggtgaccccggcctggaactgccccgcaccaatgttgttatgaattattcagagatcgagtctaaggttcgagaggcaacgaacgatgatccttggggaccttctgggcaactcatgggagagattgccaaggctacatttatgtatgaacaatttccagaacttatgaacatgctttggtcacgaatgttaaaagacaacaaaaagaattggagaagagtttataagtcgttgctgctcctagcttacctcataaggaatggatcagagcgtgttgttacaagtgccagagaacacatttatgatttacgatccctggaaaattaccactttgtagatgagcatggtaaggatcaaggtataaatattcgacagaaggtgaaggaattggttgaatttgcccaggatgacgacaggcttcgtgaagagcgaaagaaagcaaagaagaacaaagacaagtatgttggggtttcctcagacagtgttggaggattcagatacagtgaaagatatgatcctgagcccaaatcaaaatgggatgaggagtgggataaaaacaagagtgcttttccattcagtgataaattaggtgagctgagtgataaaattggaagcacaattgatgacaccatcagcaagttccggaggaaagatagagaagactctccagaaagatgcagcgacagcgatgaggaaaagaaagcgagaagaggcagatctcccaaaggtgaattcaaagatgaagaggagactgtgacgacaaagcatattcatatcacacaggccacagagaccaccacaaccagacacaagcgcacagcaaatccttccaaaaccattgatcttggagcagcagcacattacacaggggacaaagcaagtccagatcagaatgcttcaacccacacacctcagtcttcagttaagacttcagtgcctagcagcaagtcatctggtgaccttgttgatctgtttgatggcaccagccagtcaacaggaggatcagctgatttattcggaggatttgctgactttggctcagctgctgcatcaggcagtttcccttcccaagtaacagcaacaagtgggaatggagactttggtgactggagtgccttcaaccaagccccatcaggccctgttgcttccagtggcgagttctttggcagtgcctcacagccagcggtagaacttgttagtggctcacaatcagctctaggcccacctcctgctgcctcaaattcttcagacctgtttgatcttatgggctcgtcccaggcaaccatgacatcttcccagagtatgaatttctctatgatgagcactaacactgtgggacttggtttgcctatgtcaagatcacagcctttgcaaaatgttagcacagtgctgcagaagcctaatcctctctataatcagaatacagatatggtccagaaatcagtcagcaaaaccttgccctctacttggtctgaccccagtgtaaacatcagcctagacaacttactacctggtatgcagccttccaaaccccagcagccatcactgaatacaatgattcagcaacagaatatgcagcagcctatgaatgtgatgactcaaagttttggagctgtgaacctcagttctccatcgaacatgcttcctgtccggccccaaactaatgctttgatagggggacccatgcctatgagcatgcccaatgtgatgactggcaccatgggaatggcccctcttggaaatactccgatgatgaaccagagcatgatgggcatgaacatgaacatagggatgtccgctgctgggatgggcttgacaggcacaatgggaatgggcatgcccaacatagccatgacttctggaactgtgcaacccaagcaagatgcctttgcaaatttcgccaattttagcaaataagagattgtaaaagaagcagattgaatgaagaatttttagctgtgcagataggtgatgttgggatggaaaatgctaatcaactaccctttcttttatcaagtaattaaaataaatctacataaagaaccaaaaaggctgttttataaaagtgaaatatccagtatttcagagggccaggcaagagcacttcagatgaggcagtcaaaatcatttttttccagtgaggatagaccacaagtgggtggtgagaccattgaaagcctttatcaactgaagagtccatttaacagcataatttgtgggaagactggaatagggctgaataaatgtgtttgaatctctaattttatactttcttttcctgaggaacttgatttttctgtccctggatcgccttgtcataattgggtctgttccttttactaccactcttgagtccatatatgaaatcattaaagttggatgatcagttttttataaaaatatatatttttgtccaagaaaaaaaaaagcatacatatgtgattatggctaaatcaaaggtaactggaatgtatatacttttgctaatgttccagcaacactgctattatactatccaaatttttattgtaacaaaacctctttaagcaattggtgattgccatgggacttttcccatgtcttctgctgtaattatcctgtgcagaactaggaagaaatttttttcaggactgctctatggtttcctttaaaagaaaaaaacttctgtttgtttttagcagtcattatttacaatttgcagtgattaacttggcaaggcttccttccgtgtttatccctgtagccatcatttaagtcaggaacagtcagaaaaatatttattttattttttttttgggtgtctgcaaaggtaaaaatccattaaaaccttaagttaaatataaatgttacaactcaatgtttgcttttagattttatacagtatttgttttgttttggttttgagtgtatataatgcagcattagcaatatggttccaatagaggagttaaatatatattgttaaaggagacctgtagcagtcaaagattttattgatttaatgacaaaggaaattaatgaaaatgtttttgtttttctgctgtaattctgcattaagctcacatgaaaatcatgattctagagtttggaatgcaaaattaattgttttaccctcaagctgggaatatttttcaaaataaatactataatatagatatcaaattattacctccccatgttatgttgaaaatttttttattaaattgataaaactttatttccattatattcataatgttctgttatacataacattaaaatgttcattaaaatcaa

SEQ ID NO: 74979 - DNA, 2346 bp, Artificial Sequence
  derived and/or modified sequence
gtctcgacgtgtcaccggcggcgccgctgctgtggcaaaggaaggagctgactgggggagttcgaggcggcgggcggcggtgaccccggcctggaactgccccggtacggaagtgttccggggtccgtggggagcaggagagggaggcggcggaccgtcccgcgcggggcacgatgttgaacatgtggaaggtgcgcgagctggtggacaaagccaccaatgttgttatgaattattcagagatcgagtctaaggttcgagaggcaacgaacgatgatccttggggaccttctgggcaactcatgggagagattgccaaggctacatttatgtatgaacaatttccagaacttatgaacatgctttggtcacgaatgttaaaagacaacaaaaagaattggagaagagtttataagtcgttgctgctcctagcttacctcataaggaatggatcagagcgtgttgttacaagtgccagagaacacatttatgatttacgatccctggaaaattaccactttgtagatgagcatggtaaggatcaaggtataaatattcgacagaaggtgaaggaattggttgaatttgcccaggatgacgacaggcttcgtgaagagcgaaagaaagcaaagaagaacaaagacaagtatgttggggtttcctcagacagtgttggaggattcagatacagtgaaagatatgatcctgagcccaaatcaaaatgggatgaggagtgggataaaaacaagagtgcttttccattcagtgataaattaggtgagctgagtgataaaattggaagcacaattgatgacaccatcagcaagttccggaggaaagatagagaagactctccagaaagatgcagcgacagcgatgaggaaaagaaagcgagaagaggcagatctcccaaaggtgaattcaaagatgaagaggagactgtgacgacaaagcatattcatatcacacaggccacagagaccaccacaaccagacacaagcgcacagcaaatccttccaaaaccattgatcttggagcagcagcacattacacaggggacaaagcaagtccagatcagaatgcttcaacccacacacctcagtcttcagttaagacttcagtgcctagcagcaagtcatctggtgaccttgttgatctgtttgatggcaccagccagtcaacaggaggatcagctgatttattcggaggatttgctgactttggctcagctgctgcatcaggcagtttcccttcccaagtaacagcaacaagtgggaatggagactttggtgactggagtgccttcaaccaagccccatcaggccctgttgcttccagtggcgagttctttggcagtgcctcacagccagcggtagaacttgttagtggctcacaatcagctctaggcccacctcctgctgcctcaaattcttcagacctgtttgatcttatgggctcgtcccaggcaaccatgacatcttcccagagtatgaatttctctatgatgagcactaacactgtgggacttggtttgcctatgtcaagatcacagcctttgcaaaatgttagcacagtgctgcagaagcctaatcctctctataatcagaatacagatatggtccagaaatcagtcagcaaaaccttgccctctacttggtctgaccccagtgtaaacatcagcctagacaacttactacctggtatgcagccttccaaaccccagcagccatcactgaatacaatgattcagcaacagaatatgcagcagcctatgaatgtgatgactcaaagttttggagctgtgaacctcagttctccatcgaacatgcttcctgtccggccccaaactaatgctttgatagggggacccatgcctatgagcatgcccaatgtgatgactggcaccatgggaatggcccctcttggaaatactccgatgatgaaccagagcatgatgggcatgaacatgaacatagggatgtccgctgctgggatgggcttgacaggcacaatgggaatgggcatgcccaacatagccatgacttctggaactgtgcaacccaagcaagatgcctttgcaaatttcgccaattttagcaaataagagattgtaaaagaagcagattgaatgaagaatttttagctgtgcagataggtgatgttgggatggaaaatgctaatcaactaccctttcttttatcaagtaattaaaataaatctacataaagaaccaaaaaggctgttttataaaagtgaaatatccagtatttcagagggccaggcaagagcacttcagatgaggcagtcaaaatcatttttttccagtgaggatagaccacaagtgg

SEQ ID NO: 74980 - DNA, 1878 bp, Artificial Sequence
  derived and/or modified sequence
atgaactacagcgagatcgagagcaaggtgagagaggccaccaacgacgacccctggggccccagcggccagctgatgggcgagatcgccaaggccaccttcatgtacgagcagttccccgagctgatgaacatgctgtggagcagaatgctgaaggacaacaagaagaactggagaagagtgtacaagagcctgctgctgctggcctacctgatcagaaacggcagcgagagagtggtgaccagcgccagagagcacatctacgacctgagaagcctggagaactaccacttcgtggacgagcacggcaaggaccagggcatcaacatcagacagaaggtgaaggagctggtggagttcgcccaggacgacgacagactgagagaggagagaaagaaggccaagaagaacaaggacaagtacgtgggcgtgagcagcgacagcgtgggcggcttcagatacagcgagagatacgaccccgagcccaagagcaagtgggacgaggagtgggacaagaacaagagcgccttccccttcagcgacaagctgggcgagctgagcgacaagatcggcagcaccatcgacgacaccatcagcaagttcagaagaaaggacagagaggacagccccgagagatgcagcgacagcgacgaggagaagaaggccagaagaggcagaagccccaagggcgagttcaaggacgaggaggagaccgtgaccaccaagcacatccacatcacccaggccaccgagaccaccaccaccagacacaagagaaccgccaaccccagcaagaccatcgacctgggcgccgccgcccactacaccggcgacaaggccagccccgaccagaacgccagcacccacaccccccagagcagcgtgaagaccagcgtgcccagcagcaagagcagcggcgacctggtggacctgttcgacggcaccagccagagcaccggcggcagcgccgacctgttcggcggcttcgccgacttcggcagcgccgccgccagcggcagcttccccagccaggtgaccgccaccagcggcaacggcgacttcggcgactggagcgccttcaaccaggcccccagcggccccgtggccagcagcggcgagttcttcggcagcgccagccagcccgccgtggagctggtgagcggcagccagagcgccctgggccccccccccgccgccagcaacagcagcgacctgttcgacctgatgggcagcagccaggccaccatgaccagcagccagagcatgaacttcagcatgatgagcaccaacaccgtgggcctgggcctgcccatgagcagaagccagcccctgcagaacgtgagcaccgtgctgcagaagcccaaccccctgtacaaccagaacaccgacatggtgcagaagagcgtgagcaagaccctgcccagcacctggagcgaccccagcgtgaacatcagcctggacaacctgctgcccggcatgcagcccagcaagccccagcagcccagcctgaacaccatgatccagcagcagaacatgcagcagcccatgaacgtgatgacccagagcttcggcgccgtgaacctgagcagccccagcaacatgctgcccgtgagaccccagaccaacgccctgatcggcggccccatgcccatgagcatgcccaacgtgatgaccggcaccatgggcatggcccccctgggcaacacccccatgatgaaccagagcatgatgggcatgaacatgaacatcggcatgagcgccgccggcatgggcctgaccggcaccatgggcatgggcatgcccaacatcgccatgaccagcggcaccgtgcagcccaagcaggacgccttcgccaacttcgccaacttcagcaagtag

SEQ ID NO: 74981 - DNA, 1932 bp, Artificial Sequence
  derived and/or modified sequence
atgctgaacatgtggaaggtgagagagctggtggacaaggccaccaacgtggtgatgaactacagcgagatcgagagcaaggtgagagaggccaccaacgacgacccctggggccccagcggccagctgatgggcgagatcgccaaggccaccttcatgtacgagcagttccccgagctgatgaacatgctgtggagcagaatgctgaaggacaacaagaagaactggagaagagtgtacaagagcctgctgctgctggcctacctgatcagaaacggcagcgagagagtggtgaccagcgccagagagcacatctacgacctgagaagcctggagaactaccacttcgtggacgagcacggcaaggaccagggcatcaacatcagacagaaggtgaaggagctggtggagttcgcccaggacgacgacagactgagagaggagagaaagaaggccaagaagaacaaggacaagtacgtgggcgtgagcagcgacagcgtgggcggcttcagatacagcgagagatacgaccccgagcccaagagcaagtgggacgaggagtgggacaagaacaagagcgccttccccttcagcgacaagctgggcgagctgagcgacaagatcggcagcaccatcgacgacaccatcagcaagttcagaagaaaggacagagaggacagccccgagagatgcagcgacagcgacgaggagaagaaggccagaagaggcagaagccccaagggcgagttcaaggacgaggaggagaccgtgaccaccaagcacatccacatcacccaggccaccgagaccaccaccaccagacacaagagaaccgccaaccccagcaagaccatcgacctgggcgccgccgcccactacaccggcgacaaggccagccccgaccagaacgccagcacccacaccccccagagcagcgtgaagaccagcgtgcccagcagcaagagcagcggcgacctggtggacctgttcgacggcaccagccagagcaccggcggcagcgccgacctgttcggcggcttcgccgacttcggcagcgccgccgccagcggcagcttccccagccaggtgaccgccaccagcggcaacggcgacttcggcgactggagcgccttcaaccaggcccccagcggccccgtggccagcagcggcgagttcttcggcagcgccagccagcccgccgtggagctggtgagcggcagccagagcgccctgggccccccccccgccgccagcaacagcagcgacctgttcgacctgatgggcagcagccaggccaccatgaccagcagccagagcatgaacttcagcatgatgagcaccaacaccgtgggcctgggcctgcccatgagcagaagccagcccctgcagaacgtgagcaccgtgctgcagaagcccaaccccctgtacaaccagaacaccgacatggtgcagaagagcgtgagcaagaccctgcccagcacctggagcgaccccagcgtgaacatcagcctggacaacctgctgcccggcatgcagcccagcaagccccagcagcccagcctgaacaccatgatccagcagcagaacatgcagcagcccatgaacgtgatgacccagagcttcggcgccgtgaacctgagcagccccagcaacatgctgcccgtgagaccccagaccaacgccctgatcggcggccccatgcccatgagcatgcccaacgtgatgaccggcaccatgggcatggcccccctgggcaacacccccatgatgaaccagagcatgatgggcatgaacatgaacatcggcatgagcgccgccggcatgggcctgaccggcaccatgggcatgggcatgcccaacatcgccatgaccagcggcaccgtgcagcccaagcaggacgccttcgccaacttcgccaacttcagcaagtag

SEQ ID NO: 74982 - protein, 625 aa, Artificial Sequence
  derived and/or modified sequence
MNYSEIESKVREATNDDPWGPSGQLMGEIAKATFMYEQFPELMNMLWSRMLKDNKKNWRRVYKSLLLLAYLIRNGSERVVTSAREHIYDLRSLENYHFVDEHGKDQGINIRQKVKELVEFAQDDDRLREERKKAKKNKDKYVGVSSDSVGGFRYSERYDPEPKSKWDEEWDKNKSAFPFSDKLGELSDKIGSTIDDTISKFRRKDREDSPERCSDSDEEKKARRGRSPKGEFKDEEETVTTKHIHITQATETTTTRHKRTANPSKTIDLGAAAHYTGDKASPDQNASTHTPQSSVKTSVPSSKSSGDLVDLFDGTSQSTGGSADLFGGFADFGSAAASGSFPSQVTATSGNGDFGDWSAFNQAPSGPVASSGEFFGSASQPAVELVSGSQSALGPPPAASNSSDLFDLMGSSQATMTSSQSMNFSMMSTNTVGLGLPMSRSQPLQNVSTVLQKPNPLYNQNTDMVQKSVSKTLPSTWSDPSVNISLDNLLPGMQPSKPQQPSLNTMIQQQNMQQPMNVMTQSFGAVNLSSPSNMLPVRPQTNALIGGPMPMSMPNVMTGTMGMAPLGNTPMMNQSMMGMNMNIGMSAAGMGLTGTMGMGMPNIAMTSGTVQPKQDAFANFANFSK

SEQ ID NO: 74983 - protein, 1829 aa, Artificial Sequence
  derived and/or modified sequence
MKSPALQPLSMAGLQLMTPASSPMGPFFGLPWQQEAIHDNIYTPRKYQVELLEAALDHNTIVCLNTGSGKTFIAVLLTKELSYQIRGDFSRNGKRTVFLVNSANQVAQQVSAVRTHSDLKVGEYSNLEVNASWTKERWNQEFTKHQVLIMTCYVALNVLKNGYLSLSDINLLVFDECHLAILDHPYREIMKLCENCPSCPRILGLTASILNGKCDPEELEEKIQKLEKILKSNAETATDLVVLDRYTSQPCEIVVDCGPFTDRSGLYERLLMELEEALNFINDCNISVHSKERDSTLISKQILSDCRAVLVVLGPWCADKVAGMMVRELQKYIKHEQEELHRKFLLFTDTFLRKIHALCEEHFSPASLDLKFVTPKVIKLLEILRKYKPYERQQFESVEWYNNRNQDNYVSWSDSEDDDEDEEIEEKEKPETNFPSPFTNILCGIIFVERRYTAVVLNRLIKEAGKQDPELAYISSNFITGHGIGKNQPRNKQMEAEFRKQEEVLRKFRAHETNLLIATSIVEEGVDIPKCNLVVRFDLPTEYRSYVQSKGRARAPISNYIMLADTDKIKSFEEDLKTYKAIEKILRNKCSKSVDTGETDIDPVMDDDDVFPPYVLRPDDGGPRVTINTAIGHINRYCARLPSDPFTHLAPKCRTRELPDGTFYSTLYLPINSPLRASIVGPPMSCVRLAERVVALICCEKLHKIGELDDHLMPVGKETVKYEEELDLHDEEETSVPGRPGSTKRRQCYPKAIPECLRDSYPRPDQPCYLYVIGMVLTTPLPDELNFRRRKLYPPEDTTRCFGILTAKPIPQIPHFPVYTRSGEVTISIELKKSGFMLSLQMLELITRLHQYIFSHILRLEKPALEFKPTDADSAYCVLPLNVVNDSSTLDIDFKFMEDIEKSEARIGIPSTKYTKETPFVFKLEDYQDAVIIPRYRNFDQPHRFYVADVYTDLTPLSKFPSPEYETFAEYYKTKYNLDLTNLNQPLLDVDHTSSRLNLLTPRHLNQKGKALPLSSAEKRKAKWESLQNKQILVPELCAIHPIPASLWRKAVCLPSILYRLHCLLTAEELRAQTASDAGVGVRSLPADFRYPNLDFGWKKSIDSKSFISISNSSSAENDNYCKHSTIVPENAAHQGANRTSSLENHDQMSVNCRTLLSESPGKLHVEVSADLTAINGLSYNQNLANGSYDLANRDFCQGNQLNYYKQEIPVQPTTSYSIQNLYSYENQPQPSDECTLLSNKYLDGNANKSTSDGSPVMAVMPGTTDTIQVLKGRMDSEQSPSIGYSSRTLGPNPGLILQALTLSNASDGFNLERLEMLGDSFLKHAITTYLFCTYPDAHEGRLSYMRSKKVSNCNLYRLGKKKGLPSRMVVSIFDPPVNWLPPGYVVNQDKSNTDKWEKDEMTKDCMLANGKLDEDYEEEDEEEESLMWRAPKEEADYEDDFLEYDQEHIRFIDNMLMGSGAFVKKISLSPFSTTDSAYEWKMPKKSSLGSMPFSSDFEDFDYSSWDAMCYLDPSKAVEEDDFVVGFWNPSEENCGVDTGKQSISYDLHTEQCIADKSIADCVEALLGCYLTSCGERAAQLFLCSLGLKVLPVIKRTDREKALCPTRENFNSQQKNLSVSCAAASVASSRSSVLKDSEYGCLKIPPRCMFDHPDADKTLNHLISGFENFEKKINYRFKNKAYLLQAFTHASYHYNTITDCYQRLEFLGDAILDYLITKHLYEDPRQHSPGVLTDLRSALVNNTIFASLAVKYDYHKYFKAVSPELFHVIDDFVQFQLEKNEMQGMDSEKSFLQMYPVPLCENCLKWNQKLPNLARLRELTTGRSESLWK

SEQ ID NO: 74984 - DNA, 5490 bp, Artificial Sequence
  derived and/or modified sequence
atgaaaagccctgctctccagcccctttccatggctggactccagctcatgaccccggcctcttcacccatgggaccttttttcggtcttccctggcagcaggaagccatccacgataatatctacacccctaggaagtaccaggttgagctgcttgaggcggctctcgatcataataccatcgtctgcttgaacaccggctctggtaagacattcatcgccgtgcttctgactaaagagcttagttatcagattagaggagatttctcgcggaatgggaaaaggactgtgttcctcgtgaatagcgctaaccaggtggcccagcaggtcagtgctgtgagaacacactccgaccttaaagtgggagagtatagcaatcttgaagtcaatgcatcatggaccaaagaacgttggaatcaagaattcacaaaacaccaggtgttaatcatgacctgctacgtagcactgaacgtgctcaaaaatggctacctttctcttagtgatatcaatctcttagtgtttgacgagtgccatctggctatactggaccacccttatcgtgaaataatgaagctgtgcgagaattgcccttcctgccctcgcatcttaggtctgaccgcttccattctcaacgggaagtgcgatcctgaagagctcgaggagaagatccagaagttagagaaaatacttaagtctaacgccgagactgcaacggacctggtggtcctggacagatatacaagccagccatgcgagatagtggtggattgtggacccttcactgacaggtccggcctgtatgagagactactcatggagctggaggaagctttgaattttatcaatgattgcaacatctctgtgcattccaaagaaagggattctacactcatttcgaagcagatcctcagtgactgtagagctgtgctggtagtgctcggcccatggtgtgccgacaaggtcgctggcatgatggtgagagaactgcaaaagtacattaaacacgagcaggaggagctacaccggaagttcttgctcttcactgatacattcttacgcaagattcacgccctgtgcgaagaacacttcagccccgccagcctcgacttgaagttcgtgacccccaaggtgatcaaactgcttgagattctgcgcaaatacaagccttatgagaggcaacagtttgagagcgtggagtggtataacaatagaaatcaagataactacgtctcctggtctgacagtgaggacgatgacgaagatgaggagattgaggagaaggaaaagcccgagaccaactttccctccccatttactaacatcctgtgtggcattatcttcgttgagcgccggtacacagccgtggtgctcaatcggctgattaaggaggctggaaagcaggaccccgagcttgcttatatcagctctaatttcatcacaggacatggtatcggcaaaaaccagcctcgaaacaaacaaatggaggccgaatttcggaaacaggaagaagttctaagaaagttccgcgctcacgagacgaatctgttaatagcgacctcaattgttgaggagggcgttgatattcctaagtgtaaccttgtagtgagatttgatttgcccacagagtaccggtcatatgtgcagtcaaagggaagagctagagctcctatctcaaactacataatgctagctgatacagataaaatcaagtccttcgaagaggatctgaagacctataaggctatcgaaaagatcttgcgcaataagtgcagcaagtccgtggatactggggagaccgatattgatcctgttatggatgacgatgatgtatttcctccctatgtcttgcgcccagatgatggcgggccgagagtcaccatcaacaccgctattggtcacattaatcgatactgtgctaggctgcctagcgatccctttacacatctcgccccaaagtgtcgtacgcgtgagctccctgatggaactttttatagtaccctttatctgccaatcaattctcccctacgcgcttcaattgtggggcctcccatgagctgcgtcagattagctgagcgggtagtagctttaatctgttgcgaaaagctacacaagatcggcgagttagacgaccatctgatgccagtaggaaaggagactgttaagtatgaggaggagctcgacctccatgacgaggaggagacgagcgtccctggccgacccgggagtaccaagcgacgccagtgctatcctaaggcaatcccggagtgcctgcgagactcatatcctcgcccggaccaaccgtgctacctctacgttatcggaatggtactcactacccccctcccagatgaattgaattttcggcgaagaaaactttacccgcctgaggataccacacgctgtttcggaatccttaccgccaagccaattcctcagatcccacacttccctgtttatactagatcaggggaggtgacgatatctattgagctcaaaaaaagcggatttatgctgtctcttcaaatgctagagctgattactcgactgcatcagtacattttctcccatattctgaggcttgaaaagccagcgctggagttcaagcctaccgatgcagattccgcgtactgtgtgttgcccctcaacgtggtgaacgacagtagcacactggatatagacttcaaattcatggaggacatcgagaagagcgaggcccgtataggcatcccttccacaaaatacaccaaagagactccatttgttttcaaacttgaggactatcaggacgccgttataattccaagataccgcaactttgaccagcctcacagattttatgtagccgacgtctacaccgatctgacacctttgtctaagtttccatcccctgaatacgaaactttcgcggagtattataaaactaaatataacctcgatctgacgaaccttaatcagcctctgctggacgtggaccacacatccagccgcttgaacctcttgacaccccgtcacctgaatcagaaaggaaaggcactgcccttatcgagcgcagaaaagagaaaggcgaaatgggaatcactccagaacaagcagattttagtccccgagctctgtgcgatacaccctatcccagcatcactgtggagaaaggccgtgtgtttgccatcaattctctatcggctccactgtttgctgactgccgaagagctccgggcccagactgcctctgatgccggagtcggcgtgcgcagccttcctgcagattttagatacccgaatctagacttcgggtggaaaaaaagcatcgatagcaaatcctttatttctatttctaactcgagttcagcagaaaacgacaactactgtaaacacagtactatcgtgcctgagaacgcagcacatcagggggcaaacagaacatccagcctagagaaccatgatcagatgagcgtaaactgccgtactctgttaagtgaaagcccgggcaagctacacgtggaagtgagcgcagatcttaccgccattaatggtctgtcctacaaccaaaatctggccaacggctcatacgatttggctaacagggatttctgtcaaggtaatcagctcaattactacaaacaggagatccctgttcaaccaaccaccagttattccattcaaaacctgtacagctatgaaaaccagcctcaaccaagcgacgaatgcaccctactgtccaacaagtatctcgatgggaacgcgaataagagcacctctgacggatctcccgtgatggctgtgatgcccgggacaactgatactatccaggttctgaagggtaggatggacagtgagcagagcccaagtatcggatattcttctaggactctgggccctaacccagggctaatcttgcaagctctgacactgagtaacgcctcggacggatttaatctcgagagactagagatgcttggggatagtttcctgaagcacgcaatcactacctatctgttctgcacgtatcctgatgcccatgagggacgcttgtcttacatgcgcagtaaaaaagtgagtaattgcaacttgtacagactggggaagaaaaaaggccttccctcaaggatggtggtgagcatttttgacccgccagtaaattggcttcccccgggctacgtggtgaatcaggacaagtcgaacactgataagtgggagaaggacgagatgaccaaagactgcatgcttgccaacggcaagttggatgaggactacgaagaagaggatgaggaggaggaaagtctcatgtggcgagcccctaaagaagaagctgactacgaggatgatttccttgaatatgatcaggaacatatcagattcatagataatatgctgatgggtagcggtgctttcgtcaaaaaaatttcgctgagcccgtttagcactacagacagcgcttacgagtggaagatgcccaaaaaaagttccttgggatctatgcctttttcctcggactttgaagattttgactactcttcttgggatgcaatgtgttacctggacccttcaaaggccgtggaagaagatgacttcgtggtgggattttggaatccatccgaggaaaactgcggggtggacaccggcaaacagtccataagttatgacttgcataccgaacaatgcattgccgataagagcattgccgactgcgtggaagcactgctaggatgttaccttacatcttgcggcgagcgggccgcacagctgttcttgtgttcgctgggacttaaagttctgcctgttatcaagcgcaccgatagagagaaggccctgtgtcccacccgtgagaattttaacagtcagcagaaaaatctatccgttagctgtgctgcggcatccgtcgcctcctcacgaagttcagtgttgaaagactcagagtacggatgcctgaagatccccccgaggtgtatgtttgatcatcccgacgcagataagacgctcaaccatcttatctccggctttgaaaactttgagaaaaaaatcaattatcgctttaagaataaagcgtatctgcttcaggcgtttacccacgcttcatatcactataatacaattacagactgctatcagcgcctggagttcctcggtgatgcaattctcgactacctaatcacaaaacacttgtatgaagaccctagacaacacagccccggggtgttaaccgatctccgtagcgccctggtcaacaacacaattttcgcctcactggctgttaagtacgactaccataagtactttaaggctgtgagccccgagctcttccatgtgattgacgactttgtgcagttccaactggaaaaaaatgagatgcaaggaatggacagtgagaagtcattcctgcaaatgtaccccgtgccattgtgtgagaattgccttaaatggaatcagaagctcccgaacctcgcgcggctgcgcgagctcacaacagggaggagcgaaagtctctggaaatag

SEQ ID NO: 74985 - DNA, 5490 bp, Artificial Sequence
  derived and/or modified sequence
atgaagagccctgccctgcagcccctgtccatggccggcctgcagctgatgaccccagccagcagccccatgggccccttcttcggcctgccctggcagcaggaggccatccatgacaacatctacacccccaggaagtaccaggtggagctgctggaggccgccctggaccacaacaccatcgtgtgcctgaacacaggcagcggcaagaccttcatcgctgtgctgctgaccaaggagctgagctaccagatccggggggacttcagcagaaatggcaagaggacagtgttcctggtgaacagcgccaaccaggtggcccagcaggtgtctgctgtgaggacccacagcgacctgaaggtgggggagtacagcaacctggaggtgaatgcctcctggaccaaggagcgctggaaccaggagttcaccaagcaccaggtgctgatcatgacctgctacgtggccctgaatgtgctgaagaatggctacctgagcctgagtgacatcaacctgctggtgtttgatgagtgccacctggccatcctggaccacccctaccgggagatcatgaagctgtgtgagaactgccccagctgcccccgcatcctgggcctgacagccagcatcctgaatggaaaatgtgaccctgaggagctggaggagaagatccagaagctggagaagatcctgaagagcaatgctgagacagccacagacctggtggtgctggaccgctacaccagccagccctgtgaaattgtggtggactgtggccccttcacagacaggagcggcctgtatgagcggctgctgatggagctggaggaggccctgaacttcatcaatgactgcaacatctctgtgcacagcaaggagcgggacagcaccctcatcagcaagcagatcctgagtgactgcagagctgtgctggtggtgctgggcccctggtgtgccgacaaggtggccggcatgatggtgcgggagctgcagaagtacatcaagcatgagcaggaggagctgcacaggaagttcctgctcttcacagacaccttcctgaggaagatccacgccctgtgtgaggagcacttctccccagccagcctggacctgaagtttgtgacccccaaggtgatcaagctgctggagatcctgaggaagtacaagccctatgaaaggcagcagtttgaatctgtggagtggtacaacaacagaaaccaggacaactacgtgtcctggagcgacagtgaagatgatgatgaagatgaggagattgaggagaaggagaagccagagaccaacttccccagccccttcaccaacatcctgtgtggcatcatctttgtggagcggcgctacacagctgtggtgctgaacagactcatcaaggaggccggcaagcaggaccctgagctggcctacatcagcagcaacttcatcaccggccacggcatcggcaagaaccagcccaggaacaagcagatggaggccgagttcaggaagcaggaggaggtgctgaggaagttccgggcccacgagaccaacctgctgattgccaccagcatcgtggaggagggcgtggacatccccaagtgcaacctggtggtgcgctttgacctgcccacagagtaccgctcctatgtgcagagcaagggccgggcccgggcccccatcagcaactacatcatgctggccgacacagacaagatcaagagctttgaggaggacctgaagacctacaaggccatcgagaagatcctgaggaacaagtgcagcaagtctgtggacaccggggagacagacattgatcctgtgatggatgatgatgatgtgttccccccctacgtgctgcggccagatgatggcggcccccgggtgaccatcaacacagccatcggccacatcaaccgctactgtgcccggctgcccagcgaccccttcacccacctggcccccaagtgcaggacccgggagctgcctgatggcaccttctacagcaccctgtacctgcccatcaacagccccctgcgggccagcatcgtgggcccccccatgagctgtgtgcggctggccgagcgggtggtggccctgatctgctgtgagaagctgcacaagattggagagctggatgaccacctgatgcctgtgggcaaggagaccgtgaagtatgaggaggagctggacctgcatgatgaggaggagacctctgtgcccggccggcccggcagcaccaagaggcggcagtgctaccccaaggccatcccagaatgtctgcgggacagctaccccaggccagaccagccctgctacctgtatgtgattggcatggtgctgaccacccccctgcctgatgagctgaacttcagaagaaggaagctgtacccacctgaggacaccacccgctgcttcggcatcctgacagccaagcccatcccccagatcccccacttccctgtgtacaccaggtctggagaggtgaccatcagcattgagctgaagaagagcggcttcatgctgagcctgcagatgctggagctgatcacccggctgcaccagtacatcttcagccacatcctgcggctggagaagccagccctggagttcaagcccacagatgctgacagcgcctactgtgtgctgcccctgaatgtggtgaatgacagcagcaccctggacatcgacttcaagttcatggaggacatcgagaagtctgaggccagaattggcatccccagcaccaagtacaccaaggagaccccatttgtgttcaagctggaggactaccaggatgctgtgatcatcccccgctacagaaactttgaccagccccaccgcttctacgtggctgatgtgtacacagacctgacccccctgagcaagttccccagcccagaatatgagacctttgctgagtactacaagaccaagtacaacctggacctgaccaacctgaaccagcccctgctggatgtggaccacaccagcagccggctgaacctgctgacccccaggcacctgaaccagaagggcaaggccctgcccctgagcagcgctgagaagaggaaggccaagtgggagagcctgcagaacaagcagatcctggtgcctgagctgtgtgccatccaccccatcccagccagcctgtggaggaaggctgtgtgcctgcccagcatcctgtaccgcctgcactgcctgctgacagctgaggagctgcgggcccagacagccagtgatgctggggtgggcgtgcgcagcctgcctgctgacttccgctaccccaacctggactttggctggaagaagagcattgacagcaagagcttcatcagcatcagcaacagcagcagcgcagaaaatgacaactactgcaagcacagcaccatcgtgcctgaaaatgctgcccaccagggcgccaacagaaccagcagcctggagaaccacgaccagatgtctgtgaactgcaggaccctgctgtctgagagccctgggaagctgcacgtggaggtgtctgctgacctgacagccatcaatggcctgagctacaaccagaacctggccaacggcagctatgacctggccaacagagacttctgccagggcaaccagctgaactactacaagcaggagatccctgtgcagcccaccaccagctacagcatccagaacctgtacagctatgagaaccagccccagcccagtgatgagtgcaccctgctgagcaacaagtacctggatggaaatgccaacaagagcaccagtgatggcagccctgtgatggctgtgatgcctggcaccacagacaccatccaggtgctgaagggccgcatggattctgagcagagccccagcatcggctacagcagcaggaccctgggccccaaccctggcctcatcctgcaggccctgaccctgagcaatgccagtgatggcttcaacctggagcggctggagatgctgggggacagcttcctgaagcacgccatcaccacctacctgttctgcacctacccagatgcccacgagggccgcctgagctacatgaggagcaagaaggtgagcaactgcaacctgtaccgcctgggcaagaagaagggcctgcccagcaggatggtggtgtccatctttgacccccctgtgaactggctgcccccaggctacgtggtgaaccaggacaagagcaacacagacaagtgggagaaggatgagatgaccaaggactgcatgctggccaacgggaagctggatgaagattatgaggaggaggatgaggaggaggagagcctgatgtggagggcccccaaggaggaggccgactatgaagatgacttcctggagtatgaccaggagcacatccgcttcatcgacaacatgctgatgggcagcggggcctttgtgaagaagatcagcctgagccccttcagcaccacagattctgcctatgagtggaagatgcccaagaagagcagcctgggctccatgcccttcagcagtgactttgaagattttgactacagctcctgggatgccatgtgctacctggaccccagcaaggctgtggaggaggatgactttgtggtgggcttctggaaccccagcgaggagaactgtggggtggacaccgggaagcagagcatctcctatgacctgcacacagagcagtgcatcgctgacaagagcattgctgactgtgtggaggccctgctgggctgctacctgaccagctgtggggagcgggccgcccagctgttcctgtgcagcctgggcctgaaggtgctgcccgtcatcaagaggacagaccgggagaaggccctgtgccccacccgggagaacttcaacagccagcagaagaacctgtctgtgtcctgtgccgccgcctctgtggccagcagccgcagctctgtgctgaaggacagtgaatatggctgcctgaagatccccccacgctgcatgtttgaccacccagatgctgacaagaccctgaaccacctgatcagcggctttgaaaattttgagaagaagatcaactaccgcttcaagaacaaggcctacctgctgcaggccttcacccacgccagctaccactacaacaccatcacagactgctaccagaggctggagttcctgggagatgccatcctggactacctgatcaccaagcacctgtatgaggacccccggcagcacagccctggggtgctgacagacctgcggagcgccctggtgaacaacaccatctttgccagcctggccgtgaagtatgactaccacaagtacttcaaggctgtgtccccagagctgttccacgtgattgatgactttgtgcagttccagctggagaagaatgagatgcagggcatggattctgagaagagcttcctgcagatgtaccctgtgcccctgtgtgagaactgcctgaagtggaaccagaagctgcccaacctggcccggctgcgggagctgaccaccggccgctctgagagcctgtggaagtag

SEQ ID NO: 74986 - DNA, 5490 bp, Artificial Sequence
  derived and/or modified sequence
atgaagagccccgccctgcagcccctgagcatggccggcctgcagcttatgacccccgccagtagtcccatgggacctttttttgggctgccttggcagcaggaagctattcacgacaacatctacacccctaggaaataccaagttgagctgctggaagcagctctggatcacaatactatcgtatgtctcaacaccggctctggaaaaacctttattgccgtcttgctgactaaagagttaagttatcagatcagaggcgacttctctaggaatggcaaaagaaccgtctttctggttaactctgcaaatcaggtagcacaacaggtttccgccgtgcgcacccactcagatcttaaggtgggggagtactccaatctcgaggttaatgcttcctggacaaaggaacgctggaatcaggagttcactaagcaccaggtactcataatgacttgttacgtcgctttgaacgtcctcaaaaacggatacctgagcctgtctgacataaacctccttgtcttcgatgagtgtcatctcgctatcctggatcatccatacagggagattatgaaactctgtgagaattgcccctcctgccctcgaattcttgggctcactgccagcatcctgaatggcaagtgcgatcctgaggaacttgaggaaaaaattcagaaactggagaagattctgaaaagcaatgctgagaccgccacagacctggtggtgctagaccgatacaccagccaaccatgcgaaatcgtagtcgactgcggaccttttaccgatcgaagcggcctttacgaacggttgttgatggagctggaggaggccctgaactttatcaatgactgcaatatcagcgtccattcaaaggaacgcgattcaacactgataagcaagcagattctgagcgactgtcgcgccgtgttagtcgtgctgggcccatggtgtgctgacaaggtcgccggtatgatggtgcgggagcttcagaaatacattaagcatgaacaagaggaattgcaccgtaaatttctgctcttcacggataccttcctaagaaagatccacgcgctttgcgaagagcacttcagccctgcttctttggatcttaagttcgtgactccaaaggtgatcaaactcctggagattctcaggaaatataagccctacgaacgccagcagttcgaatcggtggagtggtataataacaggaatcaggacaactatgtgtcctggtccgactccgaagatgatgatgaagatgaagagatcgaggaaaaggagaaaccagagaccaacttcccaagccctttcaccaacattctctgcggtattatcttcgttgagcgtagatacacggcagtcgtcctcaaccgcttgatcaaggaggccggtaagcaagaccctgaactggcttacatatccagcaatttcatcactggacacggcattggcaaaaatcagccccgaaacaagcagatggaagcagaattccgtaaacaggaggaggtgctgcgcaagtttagagcccacgagactaatctccttatcgctactagcattgtagaggagggagtggatatacctaagtgtaacctggttgtgcgctttgacctccccacagaataccggtcttatgtccagagtaaagggagggctcgtgccccaattagcaactatatcatgttagcagacacagacaagattaaaagctttgaggaggatttaaagacatataaagcgatagagaagattttgcgtaataaatgcagcaaatccgtagacacaggggaaaccgacattgacccagtgatggacgacgatgacgtgtttcccccatacgtattgcgcccggatgacggcggaccaagagtgactatcaatacggccataggccatatcaaccgttattgtgccaggctgccttccgacccttttactcatttagctcctaagtgtcgcaccagagagctacccgatggcactttctacagcactttgtatcttcctatcaattcccctttaagagcgtcgatcgtcgggcctcctatgagctgcgtgcggctggccgaaagagtggtggccctgatttgctgtgagaaattacacaaaattggagaactggacgaccacctcatgcccgttggcaaggaaactgtgaagtacgaagaggagctggatctgcacgacgaagaggaaacaagtgtcccagggcgccccgggagcacaaagcgcagacagtgttaccctaaggccatccccgagtgtcttcgagattcatacccccgacctgatcagccctgttatctttatgtgatcggaatggtgctgacaactccattgcccgacgaactgaacttcagaaggcgcaagctttaccccccagaagacacaacaaggtgcttcgggatcctgacagcgaaacccataccacagatcccgcactttcccgtctacacacgttctggagaggttactatctccatcgagctgaagaaaagcggcttcatgctgagcctgcagatgcttgagcttataacccggctccatcagtacatcttttctcacatactgagacttgaaaagccagccttagagttcaaaccaacggatgctgactcggcatattgcgtgctgcctctaaacgtcgtgaacgattcaagcactttagatattgattttaaattcatggaggacatagaaaagtctgaagccaggatcggcatccccagcactaaatacactaaggaaaccccctttgtattcaagttggaggattaccaggacgccgtgatcattccccggtatcgcaacttcgaccagccacaccggttctatgtcgcagatgtctataccgacctgacccctctgtctaagtttccttcacccgaatatgagacttttgcagaatattacaaaacaaaatataatctcgacttgaccaatttgaatcagccactgctggatgtcgatcatacaagttcacggctcaacctactgactccccgccatctgaatcaaaagggcaaggcacttccactcagtagtgctgaaaagcgtaaggccaaatgggaaagcttgcagaacaagcaaattctggtgcctgagctgtgcgccattcacccaatccctgcctctctctggaggaaggcagtttgtttaccctctatcctatatcgcctccattgcctgctgacagccgaagaactgagagctcagaccgcgagcgatgccggggttggagttcggtccctgccagcggactttaggtaccctaacctggattttggatggaaaaagtctatagattccaagagctttatatcgatttccaacagtagttctgctgagaacgacaactactgtaaacactcaacaatcgtgcccgagaatgctgcccaccagggcgccaacagaaccagttcccttgagaatcacgatcagatgagtgtgaattgccggacactactgtctgaatcacctggaaaactgcatgtggaagtgtctgctgaccttacagccattaacggtctgagctataatcaaaatctggcaaatggttcgtatgatcttgccaatcgcgacttctgccagggaaaccagcttaactattacaagcaagagattcctgtccagccaaccacatcatacagcatccagaacctgtatagctacgagaaccagcctcaaccaagtgacgagtgcacacttttgtcaaataaatacctcgacggcaatgctaataaatccacgtctgacggctcaccggttatggccgtcatgccagggaccacagacacaatacaggtccttaagggtcgcatggactctgagcagtcaccatccatcggctattcctccagaacactgggacctaaccctgggctcattctgcaggccctcactctctccaatgcttcggacggctttaacctggagcgcctggagatgctaggcgattccttcctgaaacacgcgatcactacatatctcttctgcacatacccggacgctcatgaagggcgcctgtcctacatgcgctccaagaaagtgtcaaattgcaacctctaccggcttgggaaaaaaaaggggctgccaagccgaatggttgttagcatcttcgacccacccgtgaattggctcccgcccgggtatgtcgtgaatcaggacaagtccaataccgataagtgggaaaaagacgagatgaccaaggattgcatgttggcaaacggaaaactagacgaggactacgaagaggaagacgaggaagaagaaagcctgatgtggagggccccaaaggaggaggccgactatgaggatgactttctggagtacgaccaggaacacattcgtttcatcgataatatgctgatgggctctggcgcatttgtgaagaaaataagtttgtccccattctccactacagacagtgcatatgagtggaaaatgcccaagaagtcatcgcttggctccatgcctttcagctctgacttcgaggatttcgactatagcagttgggatgctatgtgttatttggacccttccaaggcggtggaggaagatgacttcgtggttgggttctggaacccttccgaggaaaactgtggtgtggacactggcaagcagtctatcagctacgacctgcatactgaacagtgtattgctgacaagagcatagctgactgcgtggaggcgctgctaggatgctatctgacaagttgtggtgaacgggcggctcagctttttctctgctccctcggcttgaaggtccttcccgtgatcaaacggacagacagagagaaggctctgtgccccactagggaaaacttcaatagtcagcaaaaaaacctgtctgtttcttgcgcagcagccagcgtggcttccagcagatcttctgtattgaaggatagcgagtacggatgccttaagatcccaccaagatgcatgttcgatcatcctgacgccgacaaaactttaaaccacctaatctcggggtttgaaaatttcgaaaaaaaaatcaactatcggtttaagaacaaagcttacttgcttcaggctttcacccatgctagctaccactataacacgattaccgattgttaccagaggctggaatttctcggggacgccatcctggactacttgataacgaagcacctgtacgaagatcctcgccagcactcccccggtgtgctcacagacttgaggtcagccctcgtcaacaacaccatctttgcgtcgctggctgttaagtacgattaccataagtactttaaagcagtaagtccagagctgtttcatgtcatagacgatttcgtgcagttccaactggagaaaaacgagatgcaggggatggattctgagaagtctttcctacaaatgtaccccgtgccgctctgcgagaactgtctgaagtggaaccagaagctgcccaatctcgccagactccgcgaactgaccacgggccgctctgaatctctgtggaaatag

SEQ ID NO: 74987 - DNA, 5489 bp, Artificial Sequence
  derived and/or modified sequence
atgaagagcccggctttacagccgttgtccatggccggactgcagctcatgacccctgcctcaagcccaatggggcctttttttggattgccgtggcaacaggaggctatccacgataacatctacaccccccgaaagtaccaggtggaactccttgaagcagccctcgatcacaataccattgtgtgcctgaacacaggcagtggcaagacttttatagcggtgttactaacaaaagagctgagctaccaaattcgtggggatttctcacggaacggaaaacggacagtgttcttagtcaactccgccaatcaagtggctcagcaggtatctgccgtacgcactcatagcgatcttaaagtgggcgagtacagcaatctggaagttaacgcgtcttggacaaaggaacgctggaatcaggagttcactaaacaccaggtcctgatcatgacttgctatgtggccctcaatgtgttgaagaacgggtatctgtctctgtcggacatcaatttgctggtctttgacgagtgtcacctggccattctcgaccatccgtacagagagattatgaaactgtgtgagaattgtcctagttgccccagaatactaggccttacagcttcaatcttgaatggtaagtgcgatcctgaggaattggaggagaaaatacaaaagctggagaagatccttaagagtaatgcggagactgctactgacctggtcgtcctggaccggtacacttcacagccctgcgagatagtggtggactgcggaccctttacggaccgttctgggctgtatgagcggttactcatggagcttgaggaggccctcaacttcatcaacgattgcaatattagtgtgcacagcaaagagcgggactccaccctgatttctaagcagatcctatccgattgcagagcagtgttggttgttctgggcccttggtgcgccgacaaagtcgctggtatgatggtgagagaactgcagaaatatattaaacacgaacaggaagaactccatcgcaaattcttgctgttcacagacacctttctgcgcaagattcatgcgctttgcgaggaacacttcagccctgcctcactagatctgaagtttgtgacccccaaagtgattaaactgttggagatcctgcgaaagtacaagccctacgaacgccagcagttcgagtctgttgagtggtacaataaccggaatcaggacaactacgtctcctggtcagattcagaggacgatgacgaggacgaggagatcgaggagaaagagaaacctgagactaactttcctagcccctttacgaacatactgtgcggcataatcttcgtagaaaggcgatacacagccgtcgttttaaacaggctgatcaaagaggccggaaaacaggatcccgagctagcttatatttcttccaatttcatcacgggtcacggtatcgggaagaaccaaccacggaacaagcaaatggaggccgagttccggaagcaagaggaagtgctacggaagttccgggcacatgagactaacctcttgatcgctacatctatcgtggaggagggcgtggacatcccaaaatgcaaccttgtcgttagatttgatttgccgacggagtaccggtcatacgtccagtctaaaggaagggcaagagcccctatctctaactacatcatgctcgcagacactgataagattaagtcctttgaggaagacttgaagacatacaaagccattgaaaaaatcctgcgcaataagtgctctaagtcagtggacaccggagagaccgacatcgaccccgtaatggatgatgatgacgtgttcccgccttacgtcctgagacccgatgacggaggcccacgggtgaccatcaacacggctatcggccacattaaccgctattgtgcacgactgccatccgatccctttacccatctggccccaaaatgccggactcgagaactgccagacggaacattttactccaccctctatctgcccattaatagtccactccgcgcttcaattgtgggccctcctatgagttgcgtccgccttgcagaaagggtggtcgccctcatctgttgcgagaagctccacaagattggtgagctcgatgaccatctgatgccagtgggcaaagagaccgtgaagtacgaagaagagctcgatcttcacgacgaagaagagacttctgtgcccggaagacccggttctacaaagcgcagacagtgttatcctaaggccatcccggagtgcctgagagactcctacccccgaccggaccagccatgttacctttatgtcattggtatggtgctcacaacccccctgcccgatgagctaaatttccggaggcggaaactttacccacctgaagacactacgcggtgttttggaatcctgaccgcaaagcccatccctcagattccccatttccctgtgtacactcggagcggagaagtgactatatcgatagagctcaagaaatccgggtttatgttgagcttgcagatgctcgagctgatcactagactgcatcagtatatcttctcccatatccttcgcctggagaagccagcactagagttcaagccaactgacgctgatagcgcatattgtgtcctaccgctaaatgtggtgaacgattctagtacactggacatcgacttcaaatttatggaggatatcgagaagagcgaggcccgaataggaatcccaagcacaaaatacacaaaggagacacccttcgtattcaagttagaggattaccaggatgccgtgattattccacgataccgcaacttcgatcagccgcacagattctacgtcgctgatgtttacacggacctgacccccctttcaaagttcccgagccctgagtacgagacgtttgcagagtattataagaccaaatacaatctggacttgaccaatttgaatcagcccttgctggacgttgaccacacgagctctaggttgaaccttctgacaccaaggcacctaaatcagaagggtaaagcattgcctctgtcctctgctgaaaaacgaaaagctaaatgggaatctctccagaacaaacagattctagttccggagctctgtgcgattcacccgatcccggcttctctgtggcggaaagccgtctgcctgcccagtatcctataccgtttgcactgtttacttacagctgaggaactgagggcacagaccgcatctgacgcaggagtgggagtgcgatccctgcccgcagatttcaggtatccaaatctcgacttcggatggaagaagagtatcgacagcaagagctttatcagtatttctaactcatcctccgccgaaaatgacaattactgtaaacactctacaatagttcccgagaacgcagcacatcagggagccaatcgtacctcttcgcttgaaaaccatgatcagatgagcgtcaactgcagaacacttttgtccgagagtcctggtaagttacacgtggaggtctctgccgacttgaccgcaattaatggactgagttacaaccagaacctcgcgaatggctcctatgaccttgccaatagggatttttgtcaggggaaccagctgaactactataaacaggaaatacccgtccagcccactacaagctacagcatccagaacctctactcatacgagaatcaaccccaacctagcgacgaatgtaccctgctctcaaataagtatctggacggcaatgctaataaaagtacctccgatggaagccccgttatggccgtcatgcccggaaccaccgacaccatacaggttctgaagggcagaatggattccgagcagtcacccagtatcgggtattcatccaggacactgggcccaaatcctggcctgatcctgcaggcccttacattgtcaaacgcatctgatggttttaatctggaaaggctcgagatgctcggggactcctttctaaagcacgctatcaccacatacctgttctgcacatacccagacgcccatgaagggaggctgagttatatgaggtcaaagaaagtttccaattgcaatttataccggttgggtaaaaagaaagggctcccctcccgtatggtggtcagtatttttgacccccctgtgaattggctgccccctggttacgtggtgaatcaggataaatcaaatactgacaagtgggagaaggacgagatgactaaggattgcatgcttgctaatgggaagctggacgaagactatgaggaagaggatgaggaagaggaatctctcatgtggagagcacccaaggaggaagccgactatgaagatgacttcttagagtatgaccaggaacatatccgcttcatagataatatgttgatgggaagcggggcttttgtgaagaaaatcagcctgagccctttctccactacagattctgcctacgaatggaaaatgcccaagaagtcttcactgggcagcatgccgttttcctctgactttgaggactttgactattcatcgtgggatgcaatgtgctatctggaccccagcaaagcagtagaggaggacgacttcgtcgtgggcttttggaatcctagcgaagagaactgtggagtggatactggaaagcagtctatctcctacgacctgcatactgaacaatgcattgcggataaatctattgccgattgtgtggaagctctgcttggatgctatcttacctcttgtggagaacgggcagcccagctgttcctctgttcgctagggctcaaggttctccccgtcattaagcgcacagaccgcgaaaaggctctgtgtccaacacgcgagaactttaatagccagcagaaaaatctgtctgtgagctgcgccgctgcctccgtggcgagtagtagatccagtgttttaaaggactcggaatatggctgtttaaagattcctccaaggtgcatgttcgatcatccagacgcggacaagaccctgaatcacttgatcagcgggttcgaaaatttcgaaaaaaaaatcaactataggtttaagaataaggcatatcttttgcaggcatttacccacgcctcttaccactacaacaccattactgattgttaccaaaggctcgaattcttgggggacgcaatcctagactatctgataacaaaacacttatacgaggaccctcgccagcatagtcctggtgtgctgaccgacttgagatccgcgctggtgaataatacgatctttgcctccctcgccgtgaaatatgactatcataaatacttcaaggccgtcagtcctgaactcttccacgtaatcgacgatttcgtacaatttcagctggagaaaaatgagatgcagggcatggactccgaaaaatcgttcctgcagatgtaccccgtgccgctgtgtgagaactgtctgaagtggaatcagaagctgcccaatctggctagattgagagaactgaccaccggaaggtccgaatccttgtggaaata

SEQ ID NO: 74988 - DNA, 5490 bp, Artificial Sequence
  derived and/or modified sequence
atgaagagccccgccctgcagcccctgagcatggccggcctgcagctgatgacccccgccagcagccccatgggccccttcttcggcctgccctggcagcaggaggccatccacgacaacatctacacccccagaaagtaccaggtggagctgctggaggccgccctggaccacaacaccatcgtgtgcctgaacaccggcagcggcaagaccttcatcgccgtgctgctgaccaaggagctgagctaccagatcagaggcgacttcagcagaaacggcaagagaaccgtgttcctggtgaacagcgccaaccaggtggcccagcaggtgagcgccgtgagaacccacagcgacctgaaggtgggcgagtacagcaacctggaggtgaacgccagctggaccaaggagagatggaaccaggagttcaccaagcaccaggtgctgatcatgacctgctacgtggccctgaacgtgctgaagaacggctacctgagcctgagcgacatcaacctgctggtgttcgacgagtgccacctggccatcctggaccacccctacagagagatcatgaagctgtgcgagaactgccccagctgccccagaatcctgggcctgaccgccagcatcctgaacggcaagtgcgaccccgaggagctggaggagaagatccagaagctggagaagatcctgaagagcaacgccgagaccgccaccgacctggtggtgctggacagatacaccagccagccctgcgagatcgtggtggactgcggccccttcaccgacagaagcggcctgtacgagagactgctgatggagctggaggaggccctgaacttcatcaacgactgcaacatcagcgtgcacagcaaggagagagacagcaccctgatcagcaagcagatcctgagcgactgcagagccgtgctggtggtgctgggcccctggtgcgccgacaaggtggccggcatgatggtgagagagctgcagaagtacatcaagcacgagcaggaggagctgcacagaaagttcctgctgttcaccgacaccttcctgagaaagatccacgccctgtgcgaggagcacttcagccccgccagcctggacctgaagttcgtgacccccaaggtgatcaagctgctggagatcctgagaaagtacaagccctacgagagacagcagttcgagagcgtggagtggtacaacaacagaaaccaggacaactacgtgagctggagcgacagcgaggacgacgacgaggacgaggagatcgaggagaaggagaagcccgagaccaacttccccagccccttcaccaacatcctgtgcggcatcatcttcgtggagagaagatacaccgccgtggtgctgaacagactgatcaaggaggccggcaagcaggaccccgagctggcctacatcagcagcaacttcatcaccggccacggcatcggcaagaaccagcccagaaacaagcagatggaggccgagttcagaaagcaggaggaggtgctgagaaagttcagagcccacgagaccaacctgctgatcgccaccagcatcgtggaggagggcgtggacatccccaagtgcaacctggtggtgagattcgacctgcccaccgagtacagaagctacgtgcagagcaagggcagagccagagcccccatcagcaactacatcatgctggccgacaccgacaagatcaagagcttcgaggaggacctgaagacctacaaggccatcgagaagatcctgagaaacaagtgcagcaagagcgtggacaccggcgagaccgacatcgaccccgtgatggacgacgacgacgtgttccccccctacgtgctgagacccgacgacggcggccccagagtgaccatcaacaccgccatcggccacatcaacagatactgcgccagactgcccagcgaccccttcacccacctggcccccaagtgcagaaccagagagctgcccgacggcaccttctacagcaccctgtacctgcccatcaacagccccctgagagccagcatcgtgggcccccccatgagctgcgtgagactggccgagagagtggtggccctgatctgctgcgagaagctgcacaagatcggcgagctggacgaccacctgatgcccgtgggcaaggagaccgtgaagtacgaggaggagctggacctgcacgacgaggaggagaccagcgtgcccggcagacccggcagcaccaagagaagacagtgctaccccaaggccatccccgagtgcctgagagacagctaccccagacccgaccagccctgctacctgtacgtgatcggcatggtgctgaccacccccctgcccgacgagctgaacttcagaagaagaaagctgtacccccccgaggacaccaccagatgcttcggcatcctgaccgccaagcccatcccccagatcccccacttccccgtgtacaccagaagcggcgaggtgaccatcagcatcgagctgaagaagagcggcttcatgctgagcctgcagatgctggagctgatcaccagactgcaccagtacatcttcagccacatcctgagactggagaagcccgccctggagttcaagcccaccgacgccgacagcgcctactgcgtgctgcccctgaacgtggtgaacgacagcagcaccctggacatcgacttcaagttcatggaggacatcgagaagagcgaggccagaatcggcatccccagcaccaagtacaccaaggagacccccttcgtgttcaagctggaggactaccaggacgccgtgatcatccccagatacagaaacttcgaccagccccacagattctacgtggccgacgtgtacaccgacctgacccccctgagcaagttccccagccccgagtacgagaccttcgccgagtactacaagaccaagtacaacctggacctgaccaacctgaaccagcccctgctggacgtggaccacaccagcagcagactgaacctgctgacccccagacacctgaaccagaagggcaaggccctgcccctgagcagcgccgagaagagaaaggccaagtgggagagcctgcagaacaagcagatcctggtgcccgagctgtgcgccatccaccccatccccgccagcctgtggagaaaggccgtgtgcctgcccagcatcctgtacagactgcactgcctgctgaccgccgaggagctgagagcccagaccgccagcgacgccggcgtgggcgtgagaagcctgcccgccgacttcagataccccaacctggacttcggctggaagaagagcatcgacagcaagagcttcatcagcatcagcaacagcagcagcgccgagaacgacaactactgcaagcacagcaccatcgtgcccgagaacgccgcccaccagggcgccaacagaaccagcagcctggagaaccacgaccagatgagcgtgaactgcagaaccctgctgagcgagagccccggcaagctgcacgtggaggtgagcgccgacctgaccgccatcaacggcctgagctacaaccagaacctggccaacggcagctacgacctggccaacagagacttctgccagggcaaccagctgaactactacaagcaggagatccccgtgcagcccaccaccagctacagcatccagaacctgtacagctacgagaaccagccccagcccagcgacgagtgcaccctgctgagcaacaagtacctggacggcaacgccaacaagagcaccagcgacggcagccccgtgatggccgtgatgcccggcaccaccgacaccatccaggtgctgaagggcagaatggacagcgagcagagccccagcatcggctacagcagcagaaccctgggccccaaccccggcctgatcctgcaggccctgaccctgagcaacgccagcgacggcttcaacctggagagactggagatgctgggcgacagcttcctgaagcacgccatcaccacctacctgttctgcacctaccccgacgcccacgagggcagactgagctacatgagaagcaagaaggtgagcaactgcaacctgtacagactgggcaagaagaagggcctgcccagcagaatggtggtgagcatcttcgacccccccgtgaactggctgccccccggctacgtggtgaaccaggacaagagcaacaccgacaagtgggagaaggacgagatgaccaaggactgcatgctggccaacggcaagctggacgaggactacgaggaggaggacgaggaggaggagagcctgatgtggagagcccccaaggaggaggccgactacgaggacgacttcctggagtacgaccaggagcacatcagattcatcgacaacatgctgatgggcagcggcgccttcgtgaagaagatcagcctgagccccttcagcaccaccgacagcgcctacgagtggaagatgcccaagaagagcagcctgggcagcatgcccttcagcagcgacttcgaggacttcgactacagcagctgggacgccatgtgctacctggaccccagcaaggccgtggaggaggacgacttcgtggtgggcttctggaaccccagcgaggagaactgcggcgtggacaccggcaagcagagcatcagctacgacctgcacaccgagcagtgcatcgccgacaagagcatcgccgactgcgtggaggccctgctgggctgctacctgaccagctgcggcgagagagccgcccagctgttcctgtgcagcctgggcctgaaggtgctgcccgtgatcaagagaaccgacagagagaaggccctgtgccccaccagagagaacttcaacagccagcagaagaacctgagcgtgagctgcgccgccgccagcgtggccagcagcagaagcagcgtgctgaaggacagcgagtacggctgcctgaagatcccccccagatgcatgttcgaccaccccgacgccgacaagaccctgaaccacctgatcagcggcttcgagaacttcgagaagaagatcaactacagattcaagaacaaggcctacctgctgcaggccttcacccacgccagctaccactacaacaccatcaccgactgctaccagagactggagttcctgggcgacgccatcctggactacctgatcaccaagcacctgtacgaggaccccagacagcacagccccggcgtgctgaccgacctgagaagcgccctggtgaacaacaccatcttcgccagcctggccgtgaagtacgactaccacaagtacttcaaggccgtgagccccgagctgttccacgtgatcgacgacttcgtgcagttccagctggagaagaacgagatgcagggcatggacagcgagaagagcttcctgcagatgtaccccgtgcccctgtgcgagaactgcctgaagtggaaccagaagctgcccaacctggccagactgagagagctgaccaccggcagaagcgagagcctgtggaagtag

SEQ ID NO: 74989 - DNA, 498 bp, Artificial Sequence
  derived and/or modified sequence
gtccgatggttctcgaaggcccgcggcgccccgtgctgcaggttacctagggtatgaattaatacagacttggaaactctgaaagaacttagaatcagcattttgagagttactactgggttatttggatttctcagccaaagcagaagcttgggcatgctgtgattttccaataaactgctatcacaatgtcaaaatgcagttcagacaagagcaacacagagatctcaaacattaaaacgtaagctgtgctagaacaaaaatgcaatgaaagaaacactggatgaatgaaaagccctgctttgcaacccctcagcatggcaggcctgcagctcatgacccctgcttcctcaccaatgggtcctttctttggactgccatggcaacaagaagcaattcatgataacatttatacgccaagaaaatatcaggttgaactgcttgaagcagctctggatcataataccatcgtctgtttaaacactggctcagggaaga

SEQ ID NO: 74990 - DNA, 607 bp, Artificial Sequence
  derived and/or modified sequence
gtccgatggttctcgaaggcccgcggcgccccgtgctgcaggttacctagggtatgaattaatacagacttggaaactctgaaagaacttagaatcagcattttgagagcagaagcttgggcatgctgtgattttccaataaactgctatcacaatgtcaaaatgcagttcagacaagagcaacacagagatctcaaacattaaaacgtttcatagagtaatagcaatgaacactccaaagcagtgcaagagaggaaattcccttctgtggggcgaggaaatcctgctgacagtaaagccagtggtaggctttcacacagatatttgaatccctgaccctctgtttgaaggtaagctgtgctagaacaaaaatgcaatgaaagaaacactggatgaatgaaaagccctgctttgcaacccctcagcatggcaggcctgcagctcatgacccctgcttcctcaccaatgggtcctttctttggactgccatggcaacaagaagcaattcatgataacatttatacgccaagaaaatatcaggttgaactgcttgaagcagctctggatcataataccatcgtctgtttaaacactggctcagggaaga

SEQ ID NO: 74991 - DNA, 5621 bp, Artificial Sequence
  derived and/or modified sequence
actggatgaatgaaaagccctgctttgcaacccctcagcatggcaggcctgcagctcatgacccctgcttcctcaccaatgggtcctttctttggactgccatggcaacaagaagcaattcatgataacatttatacgccaagaaaatatcaggttgaactgcttgaagcagctctggatcataataccatcgtctgtttaaacactggctcagggaagacatttattgcagtactactcactaaagagctgtcctatcagatcaggggagacttcagcagaaatggaaaaaggacggtgttcttggtcaactctgcaaaccaggttgctcaacaagtgtcagctgtcagaactcattcagatctcaaggttggggaatactcaaacctagaagtaaatgcatcttggacaaaagagagatggaaccaagagtttactaagcaccaggttctcattatgacttgctatgtcgccttgaatgttttgaaaaatggttacttatcactgtcagacattaaccttttggtgtttgatgagtgtcatcttgcaatcctagaccacccctatcgagaaattatgaagctctgtgaaaattgtccatcatgtcctcgcattttgggactaactgcttccattttaaatgggaaatgtgatccagaggaattggaagaaaagattcagaaactagagaaaattcttaagagtaatgctgaaactgcaactgacctggtggtcttagacaggtatacttctcagccatgtgagattgtggtggattgtggaccatttactgacagaagtgggctttatgaaagactgctgatggaattagaagaagcacttaattttatcaatgattgtaatatatctgtacattcaaaagaaagagattctactttaatttcgaaacagatactatcagactgtcgtgccgtattggtagttctgggaccctggtgtgcagataaagtagctggaatgatggtaagagaactacagaaatacatcaaacatgagcaagaggagctgcacaggaaatttttattgtttacagacactttcctaaggaaaatacatgcactatgtgaagagcacttctcacctgcctcacttgacctgaaatttgtaactcctaaagtaatcaaactgctcgaaatcttacgcaaatataaaccatatgagcgacagcagtttgaaagcgttgagtggtataataatagaaatcaggataattatgtgtcatggagtgattctgaggatgatgatgaggatgaagaaattgaagaaaaagagaagccagagacaaattttccttctccttttaccaacattttgtgcggaattatttttgtggaaagaagatacacagcagttgtcttaaacagattgataaaggaagctggcaaacaagatccagagctggcttatatcagtagcaatttcataactggacatggcattgggaagaatcagcctcgcaacaaacagatggaagcagaattcagaaaacaggaagaggtacttaggaaatttcgagcacatgagaccaacctgcttattgcaacaagtattgtagaagagggtgttgatataccaaaatgcaacttggtggttcgttttgatttgcccacagaatatcgatcctatgttcaatctaaaggaagagcaagggcacccatctctaattatataatgttagcggatacagacaaaataaaaagttttgaagaagaccttaaaacctacaaagctattgaaaagatcttgagaaacaagtgttccaagtcggttgatactggtgagactgacattgatcctgtcatggatgatgatgacgttttcccaccatatgtgttgaggcctgacgatggtggtccacgagtcacaatcaacacggccattggacacatcaatagatactgtgctagattaccaagtgatccgtttactcatctagctcctaaatgcagaacccgagagttgcctgatggtacattttattcaactctttatctgccaattaactcacctcttcgagcctccattgttggtccaccaatgagctgtgtacgattggctgaaagagttgtagctctcatttgctgtgagaaactgcacaaaattggcgaactggatgaccatttgatgccagttgggaaagagactgttaaatatgaagaggagcttgatttgcatgatgaagaagagaccagtgttccaggaagaccaggttccacgaaacgaaggcagtgctacccaaaagcaattccagagtgtttgagggatagttatcccagacctgatcagccctgttacctgtatgtgataggaatggttttaactacacctttacctgatgaactcaactttagaaggcggaagctctatcctcctgaagataccacaagatgctttggaatactgacggccaaacccatacctcagattccacactttcctgtgtacacacgctctggagaggttaccatatccattgagttgaagaagtctggtttcatgttgtctctacaaatgcttgagttgattacaagacttcaccagtatatattctcacatattcttcggcttgaaaaacctgcactagaatttaaacctacagacgctgattcagcatactgtgttctacctcttaatgttgttaatgactccagcactttggatattgactttaaattcatggaagatattgagaagtctgaagctcgcataggcattcccagtacaaagtatacaaaagaaacaccctttgtttttaaattagaagattaccaagatgccgttatcattccaagatatcgcaattttgatcagcctcatcgattttatgtagctgatgtgtacactgatcttaccccactcagtaaatttccttcccctgagtatgaaacttttgcagaatattataaaacaaagtacaaccttgacctaaccaatctcaaccagccactgctggatgtggaccacacatcttcaagacttaatcttttgacacctcgacatttgaatcagaaggggaaagcgcttcctttaagcagtgctgagaagaggaaagccaaatgggaaagtctgcagaataaacagatactggttccagaactctgtgctatacatccaattccagcatcactgtggagaaaagctgtttgtctccccagcatactttatcgccttcactgccttttgactgcagaggagctaagagcccagactgccagcgatgctggcgtgggagtcagatcacttcctgcggattttagataccctaacttagacttcgggtggaaaaaatctattgacagcaaatctttcatctcaatttctaactcctcttcagctgaaaatgataattactgtaagcacagcacaattgtccctgaaaatgctgcacatcaaggtgctaatagaacctcctctctagaaaatcatgaccaaatgtctgtgaactgcagaacgttgctcagcgagtcccctggtaagctccacgttgaagtttcagcagatcttacagcaattaatggtctttcttacaatcaaaatctcgccaatggcagttatgatttagctaacagagacttttgccaaggaaatcagctaaattactacaagcaggaaatacccgtgcaaccaactacctcatattccattcagaatttatacagttacgagaaccagccccagcccagcgatgaatgtactctcctgagtaataaataccttgatggaaatgctaacaaatctacctcagatggaagtcctgtgatggccgtaatgcctggtacgacagacactattcaagtgctcaagggcaggatggattctgagcagagcccttctattgggtactcctcaaggactcttggccccaatcctggacttattcttcaggctttgactctgtcaaacgctagtgatggatttaacctggagcggcttgaaatgcttggcgactcctttttaaagcatgccatcaccacatatctattttgcacttaccctgatgcgcatgagggccgcctttcatatatgagaagcaaaaaggtcagcaactgtaatctgtatcgccttggaaaaaagaagggactacccagccgcatggtggtgtcaatatttgatccccctgtgaattggcttcctcctggttatgtagtaaatcaagacaaaagcaacacagataaatgggaaaaagatgaaatgacaaaagactgcatgctggcgaatggcaaactggatgaggattacgaggaggaggatgaggaggaggagagcctgatgtggagggctccgaaggaagaggctgactatgaagatgatttcctggagtatgatcaggaacatatcagatttatagataatatgttaatggggtcaggagcttttgtaaagaaaatctctctttctcctttttcaaccactgattctgcatatgaatggaaaatgcccaaaaaatcctccttaggtagtatgccattttcatcagattttgaggattttgactacagctcttgggatgcaatgtgctatctggatcctagcaaagctgttgaagaagatgactttgtggtggggttctggaatccatcagaagaaaactgtggtgttgacacgggaaagcagtccatttcttacgacttgcacactgagcagtgtattgctgacaaaagcatagcggactgtgtggaagccctgctgggctgctatttaaccagctgtggggagagggctgctcagcttttcctctgttcactggggctgaaggtgctcccggtaattaaaaggactgatcgggaaaaggccctgtgccctactcgggagaatttcaacagccaacaaaagaacctttcagtgagctgtgctgctgcttctgtggccagttcacgctcttctgtattgaaagactcggaatatggttgtttgaagattccaccaagatgtatgtttgatcatccagatgcagataaaacactgaatcaccttatatcggggtttgaaaattttgaaaagaaaatcaactacagattcaagaataaggcttaccttctccaggcttttacacatgcctcctaccactacaatactatcactgattgttaccagcgcttagaattcctgggagatgcgattttggactacctcataaccaagcacctttatgaagacccgcggcagcactccccgggggtcctgacagacctgcggtctgccctggtcaacaacaccatctttgcatcgctggctgtaaagtacgactaccacaagtacttcaaagctgtctctcctgagctcttccatgtcattgatgactttgtgcagtttcagcttgagaagaatgaaatgcaaggaatggattctgagaaaagttttctgcaaatgtaccccgttcccctgtgcgagaattgcttgaaatggaaccagaaactgccaaatttagcccggctgagagaacttacgacgggaaggtcagagtcactgtggaagtagtaggaaaggggaaatttaaaggtgttggtcgaagttacaggattgccaaatctgcagcagcaagaagagccctccgaagcctcaaagctaatcaacctcaggttcccaatagctgaaaccgc

SEQ ID NO: 74992 - DNA, 978 bp, Artificial Sequence
  derived and/or modified sequence
atggatacttgcgtgatccccctgcgccatggcggcctgtcactcgttcaaaccacagactatatctatccaatcgtcgacgatccctacatgatggggcggattgcatgcgctaacgtgctcagcgatttgtacgctatgggagtgacagaatgtgataacatgctcatgttgctcggtgtgtctaacaagatgacagaccgcgaacgcgacaaagtgatgcccttaattattcagggatttaaagatgctgccgaggaggcaggtacctcagttaccggagggcagaccgtcttgaatccatggatcgtgctggggggagtggccaccactgtgtgtcaacctaatgagttcatcatgccagataacgctgtgccaggagatgtcctcgtactgaccaaaccattaggaacccaagtcgcggttgctgtgcaccaatggctagacattcctgagaagtggaataagatcaagctagtcgtgacacaggaggatgttgagctggcctatcaggaagcaatgatgaacatggccaggctgaataggacagcggcaggcctgatgcataccttcaacgcccatgccgctaccgacatcactggctttggtattctgggacacgctcagaacctcgctaagcagcaacgcaacgaggttagcttcgtgatacacaacctcccagttctggctaaaatggccgccgtgagtaaggcatgtggcaatatgttcggactgatgcacgggacttgtccagaaactagcggaggcctgctgatctgcctgccccgcgagcaggccgcccgtttctgtgctgaaataaaaagtcccaagtacggagaaggacaccaggcatggattattgggattgttgagaaaggaaatcggactgcacgcattattgacaagccaaggatcatagaagtggctccacaggttgctacccaaaatgtaaacccaactcctggagccacttcctag

SEQ ID NO: 74993 - DNA, 978 bp, Artificial Sequence
  derived and/or modified sequence
atggacacctgtgtgatccccctgcggcacggcggcctgagcctggtgcagaccacagactacatctaccccatcgtggatgacccctacatgatgggcagaattgcctgtgccaacgtgctgagtgacctgtatgccatgggcgtgacagaatgtgacaacatgctgatgctgctgggcgtgagcaacaagatgacagaccgggagcgggacaaggtgatgcccctcatcatccagggcttcaaggatgctgctgaggaggccggcacctctgtgactggaggccagacagtgctgaacccctggatcgtgctgggcggcgtggccaccaccgtgtgccagcccaatgagttcatcatgccagacaatgctgtgcctggagatgtgctggtgctgaccaagcccctgggcacccaggtggccgtggccgtgcaccagtggctggacatccctgagaagtggaacaagatcaagctggtggtgacccaggaggatgtggagctggcctaccaggaggccatgatgaacatggcccggctgaacagaacagctgctggcctgatgcacaccttcaatgcccatgctgccacagacatcaccggcttcggcatcctgggccacgcccagaacctggccaagcagcagagaaatgaggtgtcctttgtgatccacaacctgcctgtgctggccaagatggctgctgtgtccaaggcctgtggcaacatgtttggcctgatgcacggcacctgcccagagaccagcggcggcctgctgatctgcctgccccgggagcaggccgcccgcttctgtgccgagatcaagagccccaagtacggggagggccaccaggcctggatcattggaattgtggagaagggcaacagaacagcccgcatcatcgacaagccccgcatcatcgaggtggccccccaggtggccacccagaatgtgaaccccacccctggggccaccagctag

SEQ ID NO: 74994 - DNA, 978 bp, Artificial Sequence
  derived and/or modified sequence
atggacacctgcgtgatccccctgcggcacggcggcctgagcctggttcaaaccacagattacatatacccaatcgtggacgatccatatatgatgggaagaattgcttgtgctaacgtcttgtcagatctgtatgccatgggggtcacggagtgtgataacatgctgatgctcctcggtgtgtctaacaaaatgacggacagggagcgagacaaggtcatgcccttgattatccagggcttcaaagacgccgcagaagaagccgggacttccgtgaccggaggccagactgtcctgaacccctggatcgtattaggcggggtggccaccacggtgtgtcagccaaatgaattcatcatgccggataacgccgtccccggagatgttcttgtgcttaccaaaccgcttggcacacaggtggctgtagccgtccaccaatggctggacatccctgaaaagtggaacaagattaagttggttgtcacccaggaggatgtggagttagcataccaggaggccatgatgaatatggcacgtttgaacagaaccgctgccggtctgatgcacacttttaacgctcacgcagccactgatatcactggatttggcatccttgggcatgcacagaacctcgccaagcaacagagaaacgaggttagttttgtcatccataacttacccgttctggctaagatggccgctgtttctaaagcttgcggcaatatgttcggactgatgcatggcacctgcccggagacctccggtggcctgctaatctgcttgccgcgggaacaggctgcgcgtttctgcgccgagattaaatcccccaagtatggagagggacaccaagcttggatcattggcatagtggagaagggtaataggacagccaggatcattgataaaccacggattatcgaggtagcaccccaagtcgcaacacagaatgtgaaccccactcctggagcaacatcctag

SEQ ID NO: 74995 - DNA, 978 bp, Artificial Sequence
  derived and/or modified sequence
atggatacgtgcgtgattccgttgcgccacggagggttgtccttggtgcaaaccacagattatatttaccccatcgtggatgacccctacatgatggggcgtatcgcctgcgcaaatgtgctgtcagacctttacgcaatgggggtcactgagtgcgacaatatgcttatgcttctgggcgtctctaacaagatgacagaccgagagcgagacaaggttatgccactcataattcagggatttaaagatgccgctgaggaggccggtacctctgtaactggcggacaaacagtgctcaacccctggatagtactgggcggtgtagcaacaaccgtgtgtcagccgaatgaattcataatgccggacaacgccgtgcccggagatgtcctagttctcacaaagccactcggcactcaggtggccgtcgccgtgcaccaatggctcgacattccggagaagtggaataaaatcaagttagtggtgacccaagaagacgtggagctggcttaccaggaagccatgatgaatatggctagattgaatcgtaccgctgccggtctaatgcatacttttaacgcccacgctgcgacagatatcaccggttttgggatactgggccatgcacagaatctggctaaacaacagagaaacgaagtgagctttgtcatccacaacctcccagtcctcgctaagatggctgccgtctccaaagcatgcggaaacatgtttggcctcatgcatgggacatgcccagagacctccggcggacttctaatctgtcttccaagggaacaggcggctcgcttttgtgccgagatcaaaagcccaaagtacggcgagggacatcaggcatggatcattgggattgttgagaaaggcaaccggaccgccaggattatcgacaagcctcggatcatagaggtggctccacaagtggccactcagaacgtcaatccaacacccggagcaacatcttag

SEQ ID NO: 74996 - DNA, 978 bp, Artificial Sequence
  derived and/or modified sequence
atggacacctgcgtgatccccctgagacacggcggcctgagcctggtgcagaccaccgactacatctaccccatcgtggacgacccctacatgatgggcagaatcgcctgcgccaacgtgctgagcgacctgtacgccatgggcgtgaccgagtgcgacaacatgctgatgctgctgggcgtgagcaacaagatgaccgacagagagagagacaaggtgatgcccctgatcatccagggcttcaaggacgccgccgaggaggccggcaccagcgtgaccggcggccagaccgtgctgaacccctggatcgtgctgggcggcgtggccaccaccgtgtgccagcccaacgagttcatcatgcccgacaacgccgtgcccggcgacgtgctggtgctgaccaagcccctgggcacccaggtggccgtggccgtgcaccagtggctggacatccccgagaagtggaacaagatcaagctggtggtgacccaggaggacgtggagctggcctaccaggaggccatgatgaacatggccagactgaacagaaccgccgccggcctgatgcacaccttcaacgcccacgccgccaccgacatcaccggcttcggcatcctgggccacgcccagaacctggccaagcagcagagaaacgaggtgagcttcgtgatccacaacctgcccgtgctggccaagatggccgccgtgagcaaggcctgcggcaacatgttcggcctgatgcacggcacctgccccgagaccagcggcggcctgctgatctgcctgcccagagagcaggccgccagattctgcgccgagatcaagagccccaagtacggcgagggccaccaggcctggatcatcggcatcgtggagaagggcaacagaaccgccagaatcatcgacaagcccagaatcatcgaggtggccccccaggtggccacccagaacgtgaaccccacccccggcgccaccagctag

SEQ ID NO: 74997 - protein, 321 aa, Artificial Sequence
  derived and/or modified sequence
MSTRESFNPESYELDKSFRLTRFTELKGTGCKVPQDVLQKLLESLQENHFQEDEQFLGAVMPRLGIGMDTCVIPLRHGGLSLVQTTDYIYPIVDDPYMMGRIACANVLSDLYAMGVTECDNMLMLLGVSNKMTDRERDKVMPLIIQGFKDAAEEAGTSVTGGQTVLNPWIVLGGVATTVCQPNEFIMPDNAVPGDVLVLTKPLGTQVAVAVHQWLDIPEKWNKIKLVVTQEDVELAYQEAMMNMARLNRTGGLLICLPREQAARFCAEIKSPKYGEGHQAWIIGIVEKGNRTARIIDKPRIIEVAPQVATQNVNPTPGATS

SEQ ID NO: 74998 - DNA, 966 bp, Artificial Sequence
  derived and/or modified sequence
atgtctaccagggagtctttcaatcctgagtcctatgagttggacaaaagttttaggcttacccggttcacagagcttaaaggtaccgggtgcaaagttccacaagatgtcctgcaaaagctgcttgagagcctgcaagagaatcatttccaggaagacgaacagtttctaggcgccgtgatgcctagactaggcataggcatggatacttgcgtcataccgctcagacacgggggtctgagtctggtgcagaccaccgattacatctaccccattgtggacgacccctacatgatggggagaatagcctgcgcgaatgtgttaagcgatctgtatgcaatgggcgtgacggagtgcgataatatgttaatgctcctgggcgtgtctaataaaatgacggatcgtgagagggataaagtgatgcctctgatcatccagggcttcaaggatgctgctgaagaagccggtacctctgtaacagggggccagaccgtcctcaatccttggattgtgctcggcggcgtggcaacaactgtctgccagcccaatgagttcatcatgcccgacaatgctgttcctggggacgtgctcgtgctcacaaagccactgggaacacaggtggccgtggccgttcatcagtggctggacatccctgagaagtggaataagataaaactcgttgtcacccaggaggacgtcgaactggcttaccaggaggctatgatgaacatggctcggctcaaccggaccggtggtctgctcatctgcctcccccgggaacaggccgcgaggttttgtgccgagatcaagtcccctaaatacggagaagggcatcaagcctggattatcggtatcgtggagaagggcaaccggacagctcggataattgataaaccccggatcatcgaggttgctccccaagtggccacccagaatgttaaccccacacctggcgccacaagctag

SEQ ID NO: 74999 - DNA, 966 bp, Artificial Sequence
  derived and/or modified sequence
atgtccacccgggagtcttttaaccctgagtcctacgaactcgacaaatccttccgcctcacgcgtttcaccgagctgaaaggcactggctgcaaagtcccacaagacgttctgcagaaactcctggagagcctgcaggagaatcacttccaggaggacgagcaattcctaggggctgtgatgcctcgtttgggcataggtatggatacctgtgtgatcccactaagacacgggggcctctcattagtgcagaccactgactacatctaccccatagtggacgacccatatatgatgggcagaatcgcctgtgcaaatgtcctttctgacctatatgcaatgggtgtcactgagtgcgacaacatgctcatgctgctgggagtctccaacaaaatgaccgaccgagagagagacaaggtcatgcctttaataattcagggatttaaggatgccgctgaggaggccggcacttccgtaactggtggacaaacggtcctcaacccttggattgtgctgggtggcgtcgctacaaccgtgtgtcaaccaaatgagtttatcatgccagacaatgctgtccctggggacgtgctcgtgctgactaagcctctgggtacccaagtcgcagtggccgttcaccagtggcttgatatcccagagaaatggaacaagatcaagctcgtggtgacgcaggaggatgtagaactggcatatcaagaggctatgatgaatatggcgcggctaaatcgcacaggtgggttgctgatttgtttgcccagggagcaggcagctcggttttgtgccgagattaaatcacctaagtatggagagggacaccaggcatggattattggcattgtggagaagggcaaccggaccgcccggataatcgacaaacccagaattattgaagtcgcccctcaagttgcaacccagaatgttaatccaacaccaggggcaacctcctag

SEQ ID NO: 75000 - DNA, 501 bp, Artificial Sequence
  derived and/or modified sequence
atgagcacacgggaatcatttaatcccgagtcttacgaacttgacaagtcttttcgcctaacgcgcttcactgagctgaaagggactggttgtaaggttccacaggacgtactgcaaaagctgctggagagtctccaggagaaccacttccaggaggacgagcaattcctgggggcagtaatgccacgcctaggcatcgggatggatacgtgcgtcatccccctccggcacggaggcttgtctctggtacaaacaacagattatatctatcctatcgttgatgacccttacatgatgggacgcatcgcctgcgcaaacgtgctgtctgacctctacgccatgggagtcactgaatgcgataacatgttgatgctgctcggggtgtccaacaagatgacagatagggagagagataaggtgatgcccctaattattcagggtttcaaagatgccgccgaagaggcgggtacatcggttaccgggggccaaacggtgctgtag

SEQ ID NO: 75001 - DNA, 279 bp, Artificial Sequence
  derived and/or modified sequence
atggacacttgcgtgatccctctgagacacggaggattgtccttagtccaaaccactgactacatctatcctatagtggacgatccctacatgatgggaaggattgcctgtgccaatgtgctgagtgacttatacgctatgggggtgaccgaatgcgataacatgctcatgctgcttggggtgtctaataagatgaccgacagggagcgagataaggtcatgcctctcatcattcaaggattcaaagatgccgctgaagaggccggcaccagcgtttag

SEQ ID NO: 75002 - DNA, 966 bp, Artificial Sequence
  derived and/or modified sequence
atgagcacccgggagagcttcaaccctgagagctatgagctggacaagagcttccggctgacccgcttcacagagctgaagggcaccggctgcaaggtgccccaggatgtgctgcagaagctgctggagagcctgcaggagaaccacttccaggaggatgagcagttcctgggcgctgtgatgccccggctgggcatcggcatggacacctgtgtgatccccctgcggcatggaggcctgagcctggtgcagaccacagactacatctaccccatcgtggatgacccctacatgatgggccgcatcgcctgtgccaacgtgctgagtgacctgtatgccatgggcgtgacagaatgtgacaacatgctgatgctgctgggcgtgagcaacaagatgacagaccgggagcgggacaaggtgatgcccctcatcatccagggcttcaaggatgctgctgaggaggccggcacctctgtgactggaggccagacagtgctgaacccctggatcgtgctgggcggcgtggccaccaccgtgtgccagcccaatgagttcatcatgccagacaatgctgtgcctggagatgtgctggtgctgaccaagcccctgggcacccaggtggccgtggccgtgcaccagtggctggacatccctgagaagtggaacaagatcaagctggtggtgacccaggaggatgtggagctggcctaccaggaggccatgatgaacatggcccggctgaacagaactggaggcctgctgatctgcctgccccgggagcaggccgcccgcttctgtgccgagatcaagagccccaagtacggggagggccaccaggcctggatcattggaattgtggagaagggcaacagaacagcccgcatcatcgacaagccccgcatcatcgaggtggccccccaggtggccacccagaatgtgaaccccacccctggggccaccagctag

SEQ ID NO: 75003 - DNA, 501 bp, Artificial Sequence
  derived and/or modified sequence
atgagcacccgggagagcttcaaccctgagagctatgagctggacaagagcttccggctgacccgcttcacagagctgaagggcaccggctgcaaggtgccccaggatgtgctgcagaagctgctggagagcctgcaggagaaccacttccaggaggatgagcagttcctgggcgctgtgatgccccggctgggcatcggcatggacacctgtgtgatccccctgcggcatggaggcctgagcctggtgcagaccacagactacatctaccccatcgtggatgacccctacatgatgggccgcatcgcctgtgccaacgtgctgagtgacctgtatgccatgggcgtgacagaatgtgacaacatgctgatgctgctgggcgtgagcaacaagatgacagaccgggagcgggacaaggtgatgcccctcatcatccagggcttcaaggatgctgctgaggaggccggcacctctgtgactggaggccagacagtgctgtag

SEQ ID NO: 75004 - DNA, 279 bp, Artificial Sequence
  derived and/or modified sequence
atggacacctgtgtgatccccctgcggcacggcggcctgagcctggtgcagaccacagactacatctaccccatcgtggatgacccctacatgatgggcagaattgcctgtgccaacgtgctgagtgacctgtatgccatgggcgtgacagaatgtgacaacatgctgatgctgctgggcgtgagcaacaagatgacagaccgggagcgggacaaggtgatgcccctcatcatccagggcttcaaggatgctgctgaggaggccggcacctctgtgtag

SEQ ID NO: 75005 - DNA, 966 bp, Artificial Sequence
  derived and/or modified sequence
atgagcacccgggagagcttcaaccccgagagctacgagctggacaaaagcttccgcctcacaaggttcacggagctgaaaggaaccgggtgcaaggttccccaggacgtgctccagaaactgctggagagtttacaggagaatcacttccaggaagacgaacagttcctgggggcagttatgcctaggttggggattggaatggacacatgtgttatccccctgagacacggcgggctgtcattggtgcaaacgacagattacatttacccaatcgtggatgatccctacatgatgggacgtatcgcttgcgccaacgtcctttcagatctgtacgctatgggcgtgactgaatgcgataacatgctaatgctgctgggggtgtccaacaagatgacagaccgcgagcgggataaagtaatgccgttgattatccagggcttcaaggacgccgctgaagaagccgggacaagcgtgaccggcggccaaactgtgttaaatccatggattgtattgggcggcgtcgctacaactgtgtgtcaacccaacgagttcatcatgcctgacaacgccgtcccgggtgacgtccttgttctgacaaaaccattgggcacacaggtggcagtggccgtacatcagtggctagatatcccagagaagtggaataaaatcaagctcgtggtcacacaggaggatgtcgagttggcctatcaagaggctatgatgaacatggcacgcctgaaccgaaccggaggtctgcttatttgcttacctcgggaacaggctgcacgcttttgtgcggagatcaaaagtccaaagtacggagagggccatcaggcatggataattgggatagtagaaaagggaaataggacggcacgcatcatagacaagccaaggatcattgaggtggcgccacaggttgctacgcagaatgtgaatcctacacccggagctactagctag

SEQ ID NO: 75006 - DNA, 966 bp, Artificial Sequence
  derived and/or modified sequence
atgagcacccgggagagcttcaaccccgagagctacgagctggacaagtccttcagactgacgaggttcaccgagctcaagggcaccgggtgcaaagtgccacaggacgtgctgcaaaagctgctcgagtctctgcaggagaaccactttcaggaggacgagcagtttcttggcgcagtgatgcccagactagggataggcatggacacttgcgtaatccccctgcggcacggggggctatcactagtacaaacaacagattacatctacccaattgtggatgacccctatatgatggggaggatagcctgcgcaaatgtgttgtcagacttatatgcaatgggtgtgaccgagtgtgacaacatgctcatgctccttggggtttccaataagatgacagatcgggagcgagacaaagtgatgcccctaattattcaggggtttaaagacgcagctgaagaagctggcacaagcgtgaccgggggacagacggttttaaacccctggattgtgctcggcggcgtagccaccactgtgtgtcaacctaatgaattcatcatgccggacaatgccgtgcctggcgacgtactggtgctcactaaacccctagggacgcaggtggccgtggcagtgcatcagtggctggatatcccagaaaaatggaataagatcaagctagtggtgacccaggaagatgtagaattagcatatcaagaggcaatgatgaatatggcaagacttaatagaaccggaggtctcctaatatgtctgccacgagaacaggccgccagattttgtgcggagattaaaagtcccaagtacggcgaaggacaccaagcttggatcattggaattgtggaaaaaggaaacaggacggctcggattatcgacaagccaagaatcatcgaggtggctccacaagtggccacccagaacgtgaacccaacacctggcgcgacatcttag

SEQ ID NO: 75007 - DNA, 501 bp, Artificial Sequence
  derived and/or modified sequence
atgagcacccgggagagcttcaaccccgagagctacgagctggacaagtctttccggttgactcgattcacggagctgaaggggaccggctgtaaggtcccccaagacgtgctgcagaaactgctcgaaagcttacaggaaaaccattttcaggaggacgaacagttcctgggggctgtcatgcctcggctgggcataggcatggacacttgcgtaatcccattgagacacggtggcctgtcactagtgcaaacaaccgactatatttaccctattgtggatgacccttacatgatggggagaattgcgtgcgctaatgtactgtccgatctttatgctatgggggttacggaatgcgataatatgctgatgcttctgggcgtatccaacaagatgactgacagagagagagacaaggtgatgccactgattatccagggatttaaagacgcagccgaggaggccggtacaagcgtcactggcggccagaccgtactatag

SEQ ID NO: 75008 - DNA, 279 bp, Artificial Sequence
  derived and/or modified sequence
atggacacctgcgtgatccccctgcggcacggcggcctgagcctggttcagaccacagattatatttaccccatagtcgacgacccatacatgatgggacgaattgcttgcgccaatgtcctgagcgatctgtatgccatgggagtgactgagtgtgacaacatgctgatgctcttgggcgtgtctaacaaaatgactgacagggaaagagataaggtaatgccccttatcatccagggattcaaagatgcagctgaggaggccggtactagcgtgtag

SEQ ID NO: 75009 - DNA, 966 bp, Artificial Sequence
  derived and/or modified sequence
atgagcacacgggaaagcttcaatcccgagtcgtacgagctggataagagcttccgcctgacacgctttaccgaacttaaaggcactgggtgtaaggtcccccaggatgtgctccagaagcttctggagtccctgcaggagaatcattttcaggaagatgagcaattcctcggcgcagtcatgcccagactgggcattggcatggacacatgtgtgattcccctccgccacggcggactgtctctggtacagaccaccgactacatctatcctatagtagacgacccttacatgatgggcagaattgcatgtgctaacgtgctgagcgatctctacgctatgggggtcactgaatgcgataatatgctgatgctcttgggggtttcgaacaaaatgacggatagggagcgagataaggtgatgccactgataattcagggatttaaagatgcagcagaggaggccggaacgagcgtgaccggcggacagacggtcctgaatccctggattgtattgggtggggtagctacaaccgtgtgtcaacccaatgagtttatcatgcccgataatgcagtgccaggagacgtgttggttctgactaaaccgctcgggacccaagtcgccgtggcagtccaccagtggttggatattcctgagaagtggaacaagatcaaactggtggttacccaagaggacgtggaattggcctatcaggaggccatgatgaatatggcaaggctaaacaggactggcggactgcttatttgcctcccccgtgaacaggcggctaggttctgtgccgagatcaagtcccccaagtacggtgagggccatcaggcttggatcattggcatagtcgagaaaggcaataggacagcacgcataatagataaacctcgaattattgaggtcgcaccccaggtggctactcaaaatgtgaatcccaccccaggtgccactagctag

SEQ ID NO: 75010 - DNA, 966 bp, Artificial Sequence
  derived and/or modified sequence
atgagtactcgggagagtttcaatccagaatcatatgagctcgacaaatccttccggttaacgcgattcaccgaactgaaaggcactggctgcaaggtgccacaggacgtcttgcagaaactgctggagagccttcaagagaatcactttcaggaagacgagcaattcctgggcgcagtcatgccacgcctgggaataggcatggacacttgcgttattcctctgagacatggcggactgtctctggttcaaaccaccgactacatttaccctatcgttgacgacccctacatgatgggtagaatcgcatgtgccaacgtgctctccgatctctacgccatgggtgttacggagtgcgataacatgctgatgctgctgggcgtgagtaataaaatgactgacagggaacgcgataaggttatgcctcttattatccagggatttaaagacgcagcagaggaagccggaacgtcagttaccggcggacagacagtgctgaacccctggatcgtgctgggtggcgtggctacaactgtttgtcagccaaatgagtttatcatgcccgataacgcagttcctggagacgtcctcgttctgactaagccgttgggaacgcaggtggcagtggccgtgcatcagtggcttgatattcctgaaaaatggaacaaaataaaactggtcgtgacgcaggaggatgtggaactcgcttaccaggaagccatgatgaacatggctcgcctgaatcgcaccggcggactgctgatttgtttgcctagggaacaagctgcccgtttttgcgcagaaattaagagccctaaatatggcgaaggacatcaggcctggatcatcggcatagtggagaagggaaacaggacggcaagaattatcgataagcctcgcatcatcgaggtggcccctcaggtcgccacccagaatgtaaatcctactccaggcgcaacaagttag

SEQ ID NO: 75011 - DNA, 501 bp, Artificial Sequence
  derived and/or modified sequence
atgtctacaagggagtcatttaaccccgagtcctacgagctggacaagagcttcaggcttacccgctttaccgaactgaagggcacaggttgtaaggtgccgcaagacgtactccaaaagttgctcgaaagccttcaggagaaccactttcaagaagacgagcagtttctcggagccgtgatgccaagactcggaattggcatggacacctgtgtgatcccccttaggcacgggggtctgagtctggtacagactaccgattacatctaccccatagtggatgacccatatatgatggggaggatagcttgcgctaacgtgcttagcgacctgtacgcaatgggggtcaccgaatgtgacaatatgctgatgctgctgggggtgtctaataaaatgaccgatcgcgaaagagacaaagttatgcccctgataattcagggatttaaagacgccgctgaggaggccggaacatcagtgactggcggacagaccgtcctatag

SEQ ID NO: 75012 - DNA, 279 bp, Artificial Sequence
  derived and/or modified sequence
atggatacctgcgttatcccactgcgtcatggtggcctctcattggtgcagaccaccgactatatttacccgatcgtagacgacccatacatgatggggagaatcgcatgtgctaacgttctgagtgatttgtacgcaatgggagtcacagagtgtgataacatgctaatgctgctcggcgtgagcaacaagatgacagatagagaaagggataaagtcatgcccctcattatccagggtttcaaggacgcggctgaggaagctggaaccagtgtgtag

SEQ ID NO: 75013 - DNA, 2762 bp, Artificial Sequence
  derived and/or modified sequence
gtggatccataaagaacccagccaacccgcagagggaggggaggggctgagctgtgaggagagcggggcccaagaaccatgtctacgcgggagtcctttaacccggaaagttacgaattggacaaaagcttccggctaaccagattcactgaactgaagggcacaggctgcaaagtgccccaagatgtcctgcaaaaattgctggaatctttacaggagaaccacttccaagaagatgagcagtttctgggagccgttatgccaaggcttggcattggaatggatacttgtgtcattcctttgaggcacggtgggctttccttggttcaaaccacagattacatttacccgatcgtagacgacccttacatgatgggcaggatagcgtgtgccaatgtcctcagtgacctctatgcaatgggggtcacggaatgtgacaatatgctgatgctccttggagtcagtaataaaatgaccgacagggaaagggataaagtgatgcctctgattatccaaggttttaaagacgcagctgaggaagcaggaacatctgtaacaggcggccaaacagtactaaacccctggattgtcctgggaggagtggctaccactgtctgccaacccaatgaatttatcatgccagacaatgcagtgccaggggacgtgctggtgctgacaaaacccctggggacacaggtggcagtggctgtgcaccagtggctggatatccctgagaaatggaataagattaaactagtggtcacccaagaagatgtagagctggcctaccaggaggcgatgatgaacatggcgaggctcaacaggacaggcggccttctgatctgtttaccacgtgagcaagcagctcggttctgtgcagagataaagtcccccaaatatggtgaaggccaccaagcatggattattgggattgtagagaagggcaaccgcacagccagaatcatagacaaaccccggatcatcgaggtcgcaccacaagtggccactcaaaatgtgaatcccacacccggggccacctcttaatctagacagaaatagctgtttggttttgtttttaaatagatctatttcccttatcacttcaattaaagactataaacaacaaaaatctcattgtgtctacacatcggggtgaccttaggtcggtttgtaagtggatacaattaataaaataaaatccattgcctttttttcctgttacattaactgaagatgcacctaatcttgaggcagcttctgagttgagaattatattgttatccaatactgttgattcattttgaatctttagacacttatctcttgccgcataggctttttaaaggtgctttcacatagcacaggcattacccgtagtcgtgtcaaatagcagttggtgtcttcattttatgtatatttatcatataagtctgatttttttttttaagcgtcttgaatggttttctggagagacagcattggtaagtggcacatgacggtatcccagtcataagagggttgcatgattcctttgagtgtttgatttgaaaagcctagtcttgtctctcaagagcatctcggacccagaacattctccagtagtgcattcagttcaacacagcaagtgcttcattgcatggaaaacactttgaagacaaaaaagaaatcttatttctttttttgtagccttcctgatatttacagtaataccattaactgttttatcgatagcaaaaaaggatactttttgcaatgttattagatgttctatagtgctacaaggaattgccttccgaatggaggttcatgtataatactcatttacaattcaatatataattacacaaataatttttaaatataatcaatagtaaagactgttctgtggatggtagtgtttaatacattttctattttgtacagtgatttcaggccttttgttttcttaaaatcagcagctgtttggcctaattcttagcattattttgtcctttgcgccagtacttttttgtgcacgctttttgtgatctgtgttaaaaacctgcattgccaacattgcagctcgaacttaaacttgttattcaaataaatatttaattttttaaattgctcttgtataatcagatgccccttttagtattattttagaagcgttgggagggttttgcctaaagtacaatttatcgggaaaaactagattttagttttataaaacttttaagtctttcatgggacctatattttcttgaattaaattttgtagttctagaataaataggcaatctaaaaaggtgttctctgtgttatgtaaagtggaggcttccttatattttaacctactaagcaatgaggagggattcctgtcattaagcacaagggcgctggatcctcaagtgcccatcttcgtgagagaaaaagcagcacatcctgcccatttctggtgctttctgctcacaggcaccaaagctgcacatgtaaactgacttcttgccaaaggaaatgacccctgggaagttcaagctcctggaagaggctttaactcggacgcgccctcctccaggaaccagtgggcagggcagccttcatgcatgtgtaactggacctccagccataagcatggtgtgcagtatggaagagcctgctacggaactgaaagtgattggacattttataggaattgatagagatgttggtcctcaaaagctacaaaccagtggtctgcaaaataaagtgtgttggaaacctctagtgagataaaccta

SEQ ID NO: 75014 - DNA, 2384 bp, Artificial Sequence
  derived and/or modified sequence
cagcagccagggccgcctcttaaagggaggtggccggccttaaaggacccccgcgcgcccagccggcgggagcgcggcggcccggctcccgcagggccgcgccgaggcaggcgagcccccgcggcgcccaggcgcgggcccgggcccccgccgccgccgccgccgccgggcgcggcatttttattcaggcgacgcttaagggagcccggccgcgcccggtgcattgtgggagcggcccgcggcccgttttcgggaggaggcggagggcgcaaagcgagccggtggatccataaagaacccagccaacccgcagagggaggggaggggctgagctgtgaggagagcggggcccaagaaccatgtctacgcgggagtcctttaacccggaaagttacgaattggacaaaagcttccggctaaccagattcactgaactgaagggcacaggctgcaaagtgccccaagatgtcctgcaaaaattgctggaatctttacaggagaaccacttccaagaagatgagcagtttctgggagccgttatgccaaggcttggcattggaatggatacttgtgtcattcctttgaggcacggtgggctttccttggttcaaaccacagattacatttacccgatcgtagacgacccttacatgatgggcaggatagcgtgtgccaatgtcctcagtgacctctatgcaatgggggtcacggaatgtgacaatatgctgatgctccttggagtcagtaataaaatgaccgacagggaaagggataaagtgatgcctctgattatccaaggttttaaagacgcagctgaggaagcaggaacatctgtaacaggcggccaaacagtactaaacccctggattgtcctgggaggagtggctaccactgtctgccaacccaatgaatttatcatgccagacaatgcagtgccaggggacgtgctggtgctgacaaaacccctggggacacaggtggcagtggctgtgcaccagtggctggatatccctgagaaatggaataagattaaactagtggtcacccaagaagatgtagagctggcctaccaggaggcgatgatgaacatggcgaggctcaacaggacaggcggccttctgatctgtttaccacgtgagcaagcagctcggttctgtgcagagataaagtcccccaaatatggtgaaggccaccaagcatggattattgggattgtagagaagggcaaccgcacagccagaatcatagacaaaccccggatcatcgaggtcgcaccacaagtggccactcaaaatgtgaatcccacacccggggccacctcttaatctagacagaaatagctgtttggttttgtttttaaatagatctatttcccttatcacttcaattaaagactataaacaacaaaaatctcattgtgtctacacatcggggtgaccttaggtcggtttgtaagtggatacaattaataaaataaaatccattgcctttttttcctgttacattaactgaagatgcacctaatcttgaggcagcttctgagttgagaattatattgttatccaatactgttgattcattttgaatctttagacacttatctcttgccgcataggctttttaaaggtgctttcacatagcacaggcattacccgtagtcgtgtcaaatagcagttggtgtcttcattttatgtatatttatcatataagtctgatttttttttttaagcgtcttgaatggttttctggagagacagcattggtaagtggcacatgacggtatcccagtcataagagggttgcatgattcctttgagtgtttgatttgaaaagcctagtcttgtctctcaagagcatctcggacccagaacattctccagtagtgcattcagttcaacacagcaagtgcttcattgcatggaaaacactttgaagacaaaaaagaaatcttatttctttttttgtagccttcctgatatttacagtaataccattaactgttttatcgatagcaaaaaaggatactttttgcaatgttattagatgttctatagtgctacaaggaattgccttccgaatggaggttcatgtataatactcatttacaattcaatatataattacacaaataatttttaaatataatcaatagtaaagactgttctgtggatggtagtgtttaatacattttctattttgtacagtgatttcaggccttttgttttcttaaaatcagcagctgtttggcctaattcttagcattattttgtcctttgcgccagtacttttttgtgcacgctttttgtgatctgtgttaaaaacctgcattgccaacattgcagctcgaacttaaacttgttattcaaataaatatttaatttttt

SEQ ID NO: 75015 - DNA, 660 bp, Artificial Sequence
  derived and/or modified sequence
cgggttccttgctcccctccccggccgcctccgacgcgggcgtcctggagagcgcgccccattgtgcggggccggcggggaggtggatccataaagaacccagccaacccgcagagggaggggaggggctgagctgtgaggagagcggggcccaagaaccatgtctacgcgggagtcctttaacccggaaagttacgaattggacaaaagcttccggctaaccagattcactgaactgaagggcacaggctgcaaagtgccccaagatgtcctgcaaaaattgctggaatctttacaggagaaccacttccaagaagatgagcagtttctgggagccgttatgccaaggcttggcattggaatggatacttgtgtcattcctttgaggcacggtgggctttccttggttcaaaccacagattacatttacccgatcgtagacgacccttacatgatgggcaggatagcgtgtgccaatgtcctcagtgacctctatgcaatgggggtcacggaatgtgacaatatgctgatgctccttggagtcagtaataaaatgaccgacagggaaagggataaagtgatgcctctgattatccaaggttttaaagacgcagctgaggaagcaggaacatctgtaacaggcggccaaacagtactaaa

SEQ ID NO: 75016 - DNA, 383 bp, Artificial Sequence
  derived and/or modified sequence
cggagctgcttttcagccctaggggcgtgctcaagaatcccccgttactctgatcaaaggacttgctaagtttagaaataaagcgctttacaaatcaaatgcattggaatggatacttgtgtcattcctttgaggcacggtgggctttccttggttcaaaccacagattacatttacccgatcgtagacgacccttacatgatgggcaggatagcgtgtgccaatgtcctcagtgacctctatgcaatgggggtcacggaatgtgacaatatgctgatgctccttggagtcagtaataaaatgaccgacagggaaagggataaagtgatgcctctgattatccaaggttttaaagacgcagctgaggaagcaggaacatctgt

SEQ ID NO: 75017 - DNA, 966 bp, Artificial Sequence
  derived and/or modified sequence
atgagcaccagagagagcttcaaccccgagagctacgagctggacaagagcttcagactgaccagattcaccgagctgaagggcaccggctgcaaggtgccccaggacgtgctgcagaagctgctggagagcctgcaggagaaccacttccaggaggacgagcagttcctgggcgccgtgatgcccagactgggcatcggcatggacacctgcgtgatccccctgagacacggcggcctgagcctggtgcagaccaccgactacatctaccccatcgtggacgacccctacatgatgggcagaatcgcctgcgccaacgtgctgagcgacctgtacgccatgggcgtgaccgagtgcgacaacatgctgatgctgctgggcgtgagcaacaagatgaccgacagagagagagacaaggtgatgcccctgatcatccagggcttcaaggacgccgccgaggaggccggcaccagcgtgaccggcggccagaccgtgctgaacccctggatcgtgctgggcggcgtggccaccaccgtgtgccagcccaacgagttcatcatgcccgacaacgccgtgcccggcgacgtgctggtgctgaccaagcccctgggcacccaggtggccgtggccgtgcaccagtggctggacatccccgagaagtggaacaagatcaagctggtggtgacccaggaggacgtggagctggcctaccaggaggccatgatgaacatggccagactgaacagaaccggcggcctgctgatctgcctgcccagagagcaggccgccagattctgcgccgagatcaagagccccaagtacggcgagggccaccaggcctggatcatcggcatcgtggagaagggcaacagaaccgccagaatcatcgacaagcccagaatcatcgaggtggccccccaggtggccacccagaacgtgaaccccacccccggcgccaccagctag

SEQ ID NO: 75018 - DNA, 501 bp, Artificial Sequence
  derived and/or modified sequence
atgagcaccagagagagcttcaaccccgagagctacgagctggacaagagcttcagactgaccagattcaccgagctgaagggcaccggctgcaaggtgccccaggacgtgctgcagaagctgctggagagcctgcaggagaaccacttccaggaggacgagcagttcctgggcgccgtgatgcccagactgggcatcggcatggacacctgcgtgatccccctgagacacggcggcctgagcctggtgcagaccaccgactacatctaccccatcgtggacgacccctacatgatgggcagaatcgcctgcgccaacgtgctgagcgacctgtacgccatgggcgtgaccgagtgcgacaacatgctgatgctgctgggcgtgagcaacaagatgaccgacagagagagagacaaggtgatgcccctgatcatccagggcttcaaggacgccgccgaggaggccggcaccagcgtgaccggcggccagaccgtgctgtag

SEQ ID NO: 75019 - DNA, 279 bp, Artificial Sequence
  derived and/or modified sequence
atggacacctgcgtgatccccctgagacacggcggcctgagcctggtgcagaccaccgactacatctaccccatcgtggacgacccctacatgatgggcagaatcgcctgcgccaacgtgctgagcgacctgtacgccatgggcgtgaccgagtgcgacaacatgctgatgctgctgggcgtgagcaacaagatgaccgacagagagagagacaaggtgatgcccctgatcatccagggcttcaaggacgccgccgaggaggccggcaccagcgtgtag

SEQ ID NO: 75020 - protein, 334 aa, Artificial Sequence
  derived and/or modified sequence
MPYVDRQNRICGFLDIEENENSGKFLRRYFILDTREDSFVWYMDNPQNLPSGSSRVGAIKLTYISKVSDATKLRPKAEFCFVMNAGMRKYFLQANDQQDLVEWVNVLNKAIKITVPKQSDSQPNSDNLSRHGECGKKQVSYRTDIVGGVPIITPTQKEEVNECGESIDRNNLKRSQSHLPYFTPKPPQDSAVIKAGYCVKQGAVMKNWKRRYFQLDENTIGYFKSELEKEPLRVIPLKEVHKVQECKQSDIMMRDNLFEIVTTSRTFYVQADSPEEMHSWIKAVSGAIVAQRGPGRSASSMRQARRLSNPCIQRYTSRAGECSTYVGSHANVPS

SEQ ID NO: 75021 - DNA, 345 bp, Artificial Sequence
  derived and/or modified sequence
atgccctatgtagatcggcaaaaccgaatttgcggatttctggatattgaggaaaacgagaatagcggtaaattcctaaggagatattttattctggacactagagaggacagcttcgtgtggtatatggataacccccagaatcttccatctgggagcagccgagttggtgcaatcaagctaacatatataagtaaggtgtcagacgcaacaaaactccgccccaaagcagagttctgtttcgtgatgaatgccggtatgaggaaatatttcttgcaagcaaatgaccagcaagacttggtggaatgggtcaacgtacttaacaaggctatcaaaattacctag

SEQ ID NO: 75022 - DNA, 1005 bp, Artificial Sequence
  derived and/or modified sequence
atgccctatgtagacaggcagaataggatatgtggatttctcgatattgaggagaatgagaactctggaaaatttctgcgacggtattttatcttggatacccgcgaagactccttcgtctggtacatggacaacccgcagaaccttccctccggcagctctcgagttggtgccattaagctgacatacataagcaaggtgtctgatgccaccaagctacgcccaaaggcagagttttgttttgtaatgaatgccggaatgcgcaagtatttcctccaggctaacgatcaacaggacctggtggagtgggtcaatgtgctcaataaggccattaaaattactgtacccaagcagagcgattcccagccaaacagtgacaatttatctcggcatggcgagtgcgggaaaaaacaagtgtcttaccggaccgatatcgtgggcggcgtgccaatcattacaccaacacaaaaggaggaggtgaatgaatgcggagagtctatagatagaaacaatctcaagcgctcccagagccatttaccatatttcactcccaaacccccccaggatagcgctgtgatcaaggccggctactgtgtgaaacagggggccgtcatgaagaattggaaacgccggtacttccagctggatgagaatactattggctacttcaaatcggaattagaaaaagagcccttaagagtgattccactcaaagaggttcataaagtccaggagtgcaagcaatcagatattatgatgcgcgataatctatttgaaattgtgaccactagtcgcacgttttacgtgcaggcagacagccctgaagagatgcacagctggattaaggcagtttcgggtgctatcgttgcccagcgtggtcccggtagatctgcctcaagtatgcgacaggcacgtcgcctgtccaacccatgcatccaacgctatacgtcacgagcaggggagtgttccacctatgtggggtctcatgctaatgtgccaagttag

SEQ ID NO: 75023 - DNA, 345 bp, Artificial Sequence
  derived and/or modified sequence
atgccctacgtggaccggcagaaccgcatctgtggcttcctggacatcgaggagaatgaaaacagcggcaagttcctgcggcgctacttcatcctggacacccgggaggacagctttgtgtggtacatggacaacccccagaacctgcccagcggcagcagccgggtgggcgccatcaagctgacctacatcagcaaggtgtctgatgccaccaagctgcggcccaaggccgagttctgctttgtgatgaatgccggcatgaggaagtacttcctgcaggccaatgaccagcaggacctggtggagtgggtgaatgtgctgaacaaggccatcaagatcacctag

SEQ ID NO: 75024 - DNA, 1005 bp, Artificial Sequence
  derived and/or modified sequence
atgccctacgtggaccggcagaaccgcatctgtggcttcctggacatcgaggagaatgaaaacagcggcaagttcctgcggcgctacttcatcctggacacccgggaggacagctttgtgtggtacatggacaacccccagaacctgcccagcggcagcagccgggtgggcgccatcaagctgacctacatcagcaaggtgtctgatgccaccaagctgcggcccaaggccgagttctgctttgtgatgaatgccggcatgaggaagtacttcctgcaggccaatgaccagcaggacctggtggagtgggtgaatgtgctgaacaaggccatcaagatcaccgtgcccaagcagagcgacagccagcccaacagcgacaacctgagcagacatggagaatgtgggaagaagcaggtgtcctacagaacagacatcgtgggcggcgtgcccatcatcacccccacccagaaggaggaggtgaatgaatgtggggagagcattgacaggaacaacctgaagaggagccagagccacctgccctacttcacccccaagccaccccaggacagcgctgtgatcaaggccggctactgtgtgaagcagggcgctgtgatgaagaactggaagaggcgctacttccagctggatgagaacaccatcggctacttcaagtctgagctggagaaggagcccctgcgggtcatccccctgaaggaggtgcacaaggtgcaggagtgcaagcagagcgacatcatgatgagggacaacctgtttgagatcgtgaccaccagcaggaccttctacgtgcaggccgacagccctgaggagatgcacagctggatcaaggctgtgtctggggccatcgtggcccagaggggccctggccgcagcgccagctccatgaggcaggcccggcggctgagcaacccctgcatccagcgctacaccagcagagctggagaatgttccacctacgtgggcagccacgccaacgtgcccagctag

SEQ ID NO: 75025 - DNA, 345 bp, Artificial Sequence
  derived and/or modified sequence
atgccctacgtggaccggcagaaccggatctgcggcttcctggacattgaagaaaacgagaactccggaaaattcttgcgaagatattttatcctggatacacgcgaagactcgttcgtttggtacatggacaacccgcagaaccttccaagcggatcttcccgggtaggcgccatcaaacttacttacatttcaaaggtcagtgatgcaaccaagctgaggcccaaagcagaattttgttttgtaatgaacgctggaatgagaaagtactttttgcaggctaatgatcagcaggaccttgtcgaatgggtgaatgtgctaaataaggccataaagatcacatag

SEQ ID NO: 75026 - DNA, 1005 bp, Artificial Sequence
  derived and/or modified sequence
atgccctacgtggaccggcagaaccggatctgcggcttcctggacatcgaggagaacgaaaactctggaaaattccttcgtcggtatttcattcttgatacccgggaagacagttttgtgtggtacatggacaatccccagaacctccctagcggctctagccgggttggagccattaagttaacctacattagcaaggtatccgacgccacgaagctgaggcctaaggcggagttttgtttcgtaatgaatgcagggatgagaaaatatttcttgcaagccaatgatcagcaggacctggtagagtgggtcaatgtgctcaataaggcaatcaagatcactgtgcccaagcagtcagattcgcaacccaattcggacaatttgagccgacacggcgagtgcggcaaaaagcaggtgagttaccgaacagacatagtcgggggggttcccattatcacaccaactcagaaggaagaggtcaacgaatgtggagaaagcatcgaccggaacaatcttaagcgatcccagtctcacctgccgtattttaccccgaagccaccccaggactccgcagtaattaaagctggctactgtgtgaaacagggtgctgtgatgaaaaactggaaacgacgctactttcagctggatgaaaacacaatcgggtactttaaatctgagttagaaaaggagccattgcgcgttattccattgaaggaggtgcacaaagtccaggagtgtaaacaaagcgatataatgatgcgagacaatttatttgagatcgtgactacgtcgcggaccttttacgtacaggctgactcaccagaggaaatgcactcttggatcaaggccgtatccggcgctatcgtagcgcagaggggtcctggcagaagcgcgtctagcatgcgccaggctcggagattgtccaatccctgtatacagcgctacaccagcagagcaggagaatgcagcacatatgtgggaagccacgctaatgtcccttcctag

SEQ ID NO: 75027 - DNA, 1737 bp, Artificial Sequence
  derived and/or modified sequence
attttacattgagtcagtgatccatttgagttagtttttttcctcatagacagtcgattattccagtcttgtttgttgaaaagactgtcctttctctacaaaattgccttggcaccttggttgaaaattaactgttctctcttcctgtttactagaagaatttttaaaagaccggtgttatttttttccttaagggattggtagaattcacatatgaactatttctaggctttgacttttctttttggggttttagtagtgaattcatttgctttagtagaaataggtacttcagattttcttttttgtcttgtgtcagttttttcaaagttgtgttttttcaaagaatttgtttacttctaaattgtcaaatttgtttgcatgaattcttattacccacttaatgtctatagggtgtgtagtgtgtacttcctaatattggtgatttgctttctctctttcacttggttcacatagctatagatttatcaatttgatcttttcaagaaacagcttttggttttaatttgtattgtttgttttcaattttattagtttcttttctgatatttattattccctttctattttgggtttactttacctttttctagctttttagggtggagtttatgccattcatattagaccttttctaataaaaatatcttaagactataaattttctttcaaaatcacctttagctgcatactacaaattttgacttttaaaatttttcatttagttaagaatgttttctgatttcccttttgatttcttcttttacccatattttatttaaaagtgtattttaattttcaaatagctattcaggtgataatttcatctatagcactaaaaaccaatgaaaattctgacatatatttgtttataaaattccttgaatgctctgtatattgtatttatatggtatatacctgagggcttttctgtagcataaaagaacagttcattatttttcactgttctctgggttgaaggagctcatttgggcagctccatcttgggggtctctctcttgtagttgcagtcagatggcagctggaatgagagtcatctgaaggcttgactgggctggatggtcaagatagcctcttcactcactctgctagaatgactgggacagctgggtgtgggctggtcacctctctccgcacagcttcttcatgggactagttggctttcacacaacggggcagtctgaaggcagtcagatttcctacatgacagctgacttctagagtgagcattctaagacattgagttttttcaagtagataatttatttgctctactctttcaaactaagaagtaagataaatgtatggggccagtcattgtagaaactgcctgtgtaatgttcaagctcagaaatgccttatgtggatcgtcagaatcgcatttgtggttttctagacattgaagaaaatgaaaacagtgggaaatttcttcgaaggtacttcatactggataccagagaagatagtttcgtgtggtacatggataatccacagaacctaccttctggatcatcacgtgttggagccattaagcttacctacatttcaaaggttagcgatgctactaagctaaggccaaaggcggagttctgttttgttatgaatgcaggaatgaggaagtacttcctacaagccaatgatcagcaggacctagtggaatgggtaaatgtgttaaacaaagctataaaaattaca

SEQ ID NO: 75028 - DNA, 345 bp, Artificial Sequence
  derived and/or modified sequence
atgccatatgtggaccggcaaaatagaatctgtggctttcttgacattgaggagaacgaaaactctggaaagtttttgcgacgttatttcatcctggatactcgggaggactccttcgtgtggtatatggacaatccacagaacctgcccagtggcagcagtcgggtgggcgcaatcaaactgacctacatcagtaaggtgagtgacgccaccaaactgagacccaaagccgagttctgctttgtcatgaatgctggaatgaggaaatactttctacaggcaaatgatcaacaggatttggttgaatgggtgaatgttttgaacaaggccatcaaaattacatag

SEQ ID NO: 75029 - DNA, 1005 bp, Artificial Sequence
  derived and/or modified sequence
atgccttacgttgatcgacagaacaggatctgtggcttcttggacatcgaggaaaatgagaatagtggcaagttcctgcggcgatactttattctagatacccgggaagattcgttcgtttggtacatggacaacccacaaaatcttccctccggttcttccagagtgggcgctattaagctgacctatatctccaaggtaagtgacgccaccaagttgaggccaaaagctgaattctgcttcgttatgaatgccggtatgcgtaagtatttcctccaggccaacgatcagcaagacctggtcgaatgggtgaatgtgctgaataaggcaatcaaaattaccgtgcctaagcaaagcgattcacagcccaacagcgacaacctctcaaggcatggggagtgcggtaagaagcaggtgtcataccggaccgacatcgtagggggtgtaccaatcattactccaactcaaaaagaggaggtaaatgagtgtggtgaaagtatcgatcggaacaacctcaagcgtagccagagtcatttgccatactttacaccaaagcccccacaagattcggccgtcatcaaggccggttactgcgtgaagcaaggggctgttatgaagaactggaaacgccgttatttccagcttgacgaaaataccattggctattttaagagcgagctcgagaaagaaccgttgcgggtgatcccgctcaaagaggtgcataaggttcaagaatgtaagcagtcagatatcatgatgcgggataatctctttgagatcgttacaacgagtcggaccttttacgtgcaggccgatagccctgaggagatgcattcatggatcaaagcagtatcaggcgcaatcgtggctcagaggggcccaggtagatccgccagctccatgaggcaggcaaggcgcctgagtaacccatgcattcagagatatacgagccgcgctggtgaatgctccacgtacgtgggatctcatgcaaacgtgccatcatag

SEQ ID NO: 75030 - DNA, 345 bp, Artificial Sequence
  derived and/or modified sequence
atgccctacgtggacagacagaacagaatctgcggcttcctggacatcgaggagaacgagaacagcggcaagttcctgagaagatacttcatcctggacaccagagaggacagcttcgtgtggtacatggacaacccccagaacctgcccagcggcagcagcagagtgggcgccatcaagctgacctacatcagcaaggtgagcgacgccaccaagctgagacccaaggccgagttctgcttcgtgatgaacgccggcatgagaaagtacttcctgcaggccaacgaccagcaggacctggtggagtgggtgaacgtgctgaacaaggccatcaagatcacctag

SEQ ID NO: 75031 - DNA, 1005 bp, Artificial Sequence
  derived and/or modified sequence
atgccctacgtggacagacagaacagaatctgcggcttcctggacatcgaggagaacgagaacagcggcaagttcctgagaagatacttcatcctggacaccagagaggacagcttcgtgtggtacatggacaacccccagaacctgcccagcggcagcagcagagtgggcgccatcaagctgacctacatcagcaaggtgagcgacgccaccaagctgagacccaaggccgagttctgcttcgtgatgaacgccggcatgagaaagtacttcctgcaggccaacgaccagcaggacctggtggagtgggtgaacgtgctgaacaaggccatcaagatcaccgtgcccaagcagagcgacagccagcccaacagcgacaacctgagcagacacggcgagtgcggcaagaagcaggtgagctacagaaccgacatcgtgggcggcgtgcccatcatcacccccacccagaaggaggaggtgaacgagtgcggcgagagcatcgacagaaacaacctgaagagaagccagagccacctgccctacttcacccccaagcccccccaggacagcgccgtgatcaaggccggctactgcgtgaagcagggcgccgtgatgaagaactggaagagaagatacttccagctggacgagaacaccatcggctacttcaagagcgagctggagaaggagcccctgagagtgatccccctgaaggaggtgcacaaggtgcaggagtgcaagcagagcgacatcatgatgagagacaacctgttcgagatcgtgaccaccagcagaaccttctacgtgcaggccgacagccccgaggagatgcacagctggatcaaggccgtgagcggcgccatcgtggcccagagaggccccggcagaagcgccagcagcatgagacaggccagaagactgagcaacccctgcatccagagatacaccagcagagccggcgagtgcagcacctacgtgggcagccacgccaacgtgcccagctag

SEQ ID NO: 75032 - protein, 980 aa, Artificial Sequence
  derived and/or modified sequence
MIMASAAKEFKMDNFSPKAGTSKLQQTVPADASPDSKCPICLDRFDNVSYLDRCLHKFCFRCVQEWSKNKAECPLCKQPFDSIFHSVRAEDDFKEYVLRPSYNGSFVTPDRRFRYRTTLTRERNASVYSPSGPVNRRTTTPPDSGVLFEGLGISTRPRDVEIPQFMRQIAVRRPTTADERSLRKIQEQDIINFRRTLYRAGARVRNIEDGGRYRDISAEFFRRNPACLHRLVPWLKRELTVLFGAHGSLVNIVQHIIMSNVTRYDLESQAFVSDLRPFLLNRTEHFIHEFISFARSPFNMAAFDQHANYDCPAPSYEEGSHSDSSVITISPDEAETQELDINVATVSQAPWDDETPGPSYSSSEQVHVTMSSLLNTSDSSDEELVTGGATSQIQGVQTNDDLNNDSDDSSDNCVIVGFVKPLAERTPELVELSSDSEDLGSYEKMETVKTQEQEQSYSSGDSDVSRCSSPHSVLGKDEQINKGHCDSSTRIKSKKEEKRSTSLSSPRNLNSSVRGDRVYSPYNHRHRKRGRSRSSDSRSQSRSGHDQKNHRKHHGKKRMKSKRSRSRESSRPRGRRDKKRSRTRDSSWSRRSQTLSLSSESTSRSRSRSSDHGKRRSRSRNRDRYYLRNNYGSRYKWEYTYYSRNKDRDGYESSYRRRTLSRAHYSRQSSSPEFRVQSFSERTNARKKNNHSERKYYYYERHRSRSLSSNRSRTASTGTDRVRNEKPGGKRKYKTRHLEGTNEVAQPSREFASKAKDSHYQKSSSKLDGNYKNESDTFSDSRSSDRETKHKRRKRKTRSLSVEIVYEGKATDTTKHHKKKKKKHKKKHKKHHGDNASRSPVVITIDSDSDKDSEVKEDTECDNSGPQDPLQNEFLAPSLEPFETKDVVTIEAEFGVLDKECDIATLSNNLNNANKTVDNIPPLAASVEQTLDVREESTFVSDLENQPSNIVSLQTEPSRQLPSPRTSLMSVCLGRDCDMS

SEQ ID NO: 75033 - DNA, 2943 bp, Artificial Sequence
  derived and/or modified sequence
atgatcatggccagcgccgccaaggagttcaagatggacaacttcagccccaaggccggcaccagcaagctgcagcagaccgtgcccgccgacgccagccccgacagcaagtgccccatctgcctggacagattcgacaacgtgagctacctggacagatgcctgcacaagttctgcttcagatgcgtgcaggagtggagcaagaacaaggccgagtgccccctgtgcaagcagcccttcgacagcatcttccacagcgtgagagccgaggacgacttcaaggagtacgtgctgagacccagctacaacggcagcttcgtgacccccgacagaagattcagatacagaaccaccctgaccagagagagaaacgccagcgtgtacagccccagcggccccgtgaacagaagaaccaccaccccccccgacagcggcgtgctgttcgagggcctgggcatcagcaccagacccagagacgtggagatcccccagttcatgagacagatcgccgtgagaagacccaccaccgccgacgagagaagcctgagaaagatccaggagcaggacatcatcaacttcagaagaaccctgtacagagccggcgccagagtgagaaacatcgaggacggcggcagatacagagacatcagcgccgagttcttcagaagaaaccccgcctgcctgcacagactggtgccctggctgaagagagagctgaccgtgctgttcggcgcccacggcagcctggtgaacatcgtgcagcacatcatcatgagcaacgtgaccagatacgacctggagagccaggccttcgtgagcgacctgagacccttcctgctgaacagaaccgagcacttcatccacgagttcatcagcttcgccagaagccccttcaacatggccgccttcgaccagcacgccaactacgactgccccgcccccagctacgaggagggcagccacagcgacagcagcgtgatcaccatcagccccgacgaggccgagacccaggagctggacatcaacgtggccaccgtgagccaggccccctgggacgacgagacccccggccccagctacagcagcagcgagcaggtgcacgtgaccatgagcagcctgctgaacaccagcgacagcagcgacgaggagctggtgaccggcggcgccaccagccagatccagggcgtgcagaccaacgacgacctgaacaacgacagcgacgacagcagcgacaactgcgtgatcgtgggcttcgtgaagcccctggccgagagaacccccgagctggtggagctgagcagcgacagcgaggacctgggcagctacgagaagatggagaccgtgaagacccaggagcaggagcagagctacagcagcggcgacagcgacgtgagcagatgcagcagcccccacagcgtgctgggcaaggacgagcagatcaacaagggccactgcgacagcagcaccagaatcaagagcaagaaggaggagaagagaagcaccagcctgagcagccccagaaacctgaacagcagcgtgagaggcgacagagtgtacagcccctacaaccacagacacagaaagagaggcagaagcagaagcagcgacagcagaagccagagcagaagcggccacgaccagaagaaccacagaaagcaccacggcaagaagagaatgaagagcaagagaagcagaagcagagagagcagcagacccagaggcagaagagacaagaagagaagcagaaccagagacagcagctggagcagaagaagccagaccctgagcctgagcagcgagagcaccagcagaagcagaagcagaagcagcgaccacggcaagagaagaagcagaagcagaaacagagacagatactacctgagaaacaactacggcagcagatacaagtgggagtacacctactacagcagaaacaaggacagagacggctacgagagcagctacagaagaagaaccctgagcagagcccactacagcagacagagcagcagccccgagttcagagtgcagagcttcagcgagagaaccaacgccagaaagaagaacaaccacagcgagagaaagtactactactacgagagacacagaagcagaagcctgagcagcaacagaagcagaaccgccagcaccggcaccgacagagtgagaaacgagaagcccggcggcaagagaaagtacaagaccagacacctggagggcaccaacgaggtggcccagcccagcagagagttcgccagcaaggccaaggacagccactaccagaagagcagcagcaagctggacggcaactacaagaacgagagcgacaccttcagcgacagcagaagcagcgacagagagaccaagcacaagagaagaaagagaaagaccagaagcctgagcgtggagatcgtgtacgagggcaaggccaccgacaccaccaagcaccacaagaagaagaagaagaagcacaagaagaagcacaagaagcaccacggcgacaacgccagcagaagccccgtggtgatcaccatcgacagcgacagcgacaaggacagcgaggtgaaggaggacaccgagtgcgacaacagcggcccccaggaccccctgcagaacgagttcctggcccccagcctggagcccttcgagaccaaggacgtggtgaccatcgaggccgagttcggcgtgctggacaaggagtgcgacatcgccaccctgagcaacaacctgaacaacgccaacaagaccgtggacaacatcccccccctggccgccagcgtggagcagaccctggacgtgagagaggagagcaccttcgtgagcgacctggagaaccagcccagcaacatcgtgagcctgcagaccgagcccagcagacagctgcccagccccagaaccagcctgatgagcgtgtgcctgggcagagactgcgacatgagctag

SEQ ID NO: 75034 - DNA, 2943 bp, Artificial Sequence
  derived and/or modified sequence
atgatcatggcatcagctgcaaaagaattcaagatggacaacttttccccaaaggccgggacaagtaaactgcagcagacggtgccagcagacgcttccccagactcaaagtgcccaatatgcctggacagattcgataatgtctcttacttagaccgctgtctgcacaagttctgctttagatgcgttcaggagtggagcaagaataaagcagaatgtccactgtgcaaacagccctttgactccatattccactcagtgagggcagaggatgattttaaagaatatgtcctcagaccttcatacaacggttcttttgttaccccagatagaagattccgctacaggaccaccctgacgcgggaacggaacgcctcggtgtacagcccgagtggccctgtcaacaggcggacaaccaccccccctgattcaggagtgcttttcgagggattgggcatctcaactcgacccagagacgtggaaatcccccagtttatgagacaaattgccgtgcggaggccaaccaccgctgatgaacgctccctgaggaagattcaggagcaggacatcatcaatttcagacgaacactgtacagagcaggggctagagtgcgcaatatagaagatggcggccgctatagagacatctccgcagagttttttagaagaaaccctgcctgcctgcatcggctcgtcccctggctgaaacgcgaactgactgtgctgtttggcgcacacggatccctagtaaacatcgtgcagcacatcataatgagcaacgtgactagatatgatcttgaatcacaggcctttgtcagcgacctgaggccatttttactcaatcggacggaacattttatacacgaatttatttcttttgctaggtctccctttaatatggctgcgttcgatcagcacgctaactacgactgccctgctccaagttacgaggaagggtctcatagtgactcttcagtcataaccatctcacccgacgaggcagagacccaagaactcgacattaacgtggcaactgtgtcgcaggccccgtgggatgatgagaccccagggccctcttactcatcctcagagcaggtccacgtgactatgtccagcttgctgaacacttctgattcaagtgatgaggagctagtgacaggcggagccacatctcaaatccagggagtgcagacaaatgacgatttaaacaatgactccgatgatagctccgataattgtgttattgtgggcttcgttaaaccgctagcagagaggactcctgagctggttgagctcagttcagactccgaggatctgggaagttatgagaaaatggaaaccgtgaagacacaggagcaagaacagagctatagttccggagatagcgacgtgagtcgttgcagcagtccccactccgtcctgggaaaagacgagcagatcaacaagggccattgcgacagctctacacgcattaagtcaaagaaagaagaaaaacggagtacctccctcagctcaccccgaaatttaaattcctcagtgcgcggggatcgtgtatatagtccatacaaccacagacatagaaaacgcgggcggagccgttcttccgacagccgttctcagtccaggtcgggccatgatcaaaaaaaccatcggaaacatcatggtaagaagcgcatgaagtcaaaaagaagcagatcccgtgagtcatcccgcccacggggtaggagagataagaagcgctcgcgtacgcgcgacagcagttggtcacgacggtctcagaccctgagcctgtcatccgagtcgacctcgcgcagcaggtctaggtcctcagatcacgggaagcggcgcagcaggtcgagaaaccgagaccggtactacctgcgtaacaattatgggtctcggtataagtgggagtacacctactacagccggaacaaagacagggatgggtacgagtcaagctatcgcaggaggactcttagccgtgcccactacagcaggcagtcaagctcaccagagttccgcgtccaaagcttttcagagaggactaacgccagaaagaagaacaaccactctgagcggaagtattattactatgaacgtcacaggagtagaagcttatccagcaatcgctcacgaacggcaagtacaggtaccgatcgcgtgagaaacgagaagcctgggggcaagaggaagtataaaacacgtcatctggagggcaccaatgaggtggcccaacctagtcgcgagtttgcttcgaaagccaaggattcccactatcagaagagctccagtaaactagatggaaactacaaaaacgaaagtgatacattctcggacagtcgttcttctgacagagagacgaaacataaacgccggaagcggaagacacggtcactgtccgtggagatagtctatgagggcaaggctaccgatacaacaaagcaccataagaaaaagaagaagaagcacaagaagaaacataaaaaacaccatggtgataacgctagcagatctcctgttgtcatcactatagatagcgattctgacaaagatagtgaagtcaaagaagacacagaatgcgacaacagcggcccacaggatcccctgcagaatgagtttctggccccaagcctcgagccttttgagactaaagatgtggtgactattgaggccgaattcggcgttttagacaaggagtgcgatatagccaccctgtctaacaatctgaataatgcaaacaaaacggtcgataacattcccccactagccgcgtctgtggaacaaaccctggacgtgcgggaagaatcaacgttcgtatcggatctggaaaatcaaccttcaaatatcgtgagcttgcagacagagcctagcaggcaactgccgagtccacggacgagtcttatgtccgtctgtctaggccgcgactgtgacatgtcgtag

SEQ ID NO: 75035 - DNA, 2943 bp, Artificial Sequence
  derived and/or modified sequence
atgatcatggccagcgctgccaaggagttcaagatggacaacttcagccccaaggccggcaccagcaagctgcagcagacagtgcctgcagatgccagcccagacagcaaatgtcccatctgcctggacagatttgacaacgtgtcctacctggaccgctgcctgcacaagttctgcttccgctgtgtgcaggagtggagcaagaacaaggccgagtgccccctgtgcaagcagccctttgacagcatcttccacagcgtgcgggcagaagatgacttcaaggagtatgtgctgcggcccagctacaacggcagctttgtgaccccagaccggcgcttccgctaccgcaccaccctgacccgggagagaaatgcctctgtgtacagccccagcggccctgtgaacagaaggaccaccaccccaccagacagcggcgtgctgtttgagggcctgggcatcagcacccggcccagagatgtggagatcccccagttcatgaggcagattgctgtgcggcggcccaccacagcagatgagaggagcctgaggaagatccaggagcaggacatcatcaacttccggaggaccctgtaccgggccggggcccgggtgagaaatattgaagatggcggccgctacagagacatctctgctgagttcttcagaagaaatcctgcctgcctgcaccggctggtgccctggctgaagcgggagctgactgtgctgtttggagcccacggcagcctggtgaacatcgtgcagcacatcatcatgagcaatgtgaccaggtatgacctggagagccaggcctttgtgtctgacctgcggcccttcctgctgaacagaacagagcacttcatccacgagttcatcagctttgcccggagccccttcaacatggccgcctttgaccagcacgccaactatgactgcccagcccccagctatgaggagggcagccacagcgacagcagcgtcatcaccatcagcccagatgaggccgagacccaggagctggacatcaacgtggccaccgtgtcccaggccccctgggatgatgagaccccaggccccagctacagcagcagcgagcaggtgcacgtgaccatgagcagcctgctgaacaccagtgacagcagtgatgaggagctggtgactggaggagccaccagccagatccagggcgtgcagaccaatgatgacctgaacaatgacagtgatgacagcagtgacaactgtgtgattgtgggctttgtgaagcccctggccgagaggaccccagagctggtggagctgagcagtgacagcgaggacctgggcagctatgagaagatggagaccgtgaagacccaggagcaggagcagagctacagcagcggggacagtgatgtgagccgctgcagcagcccccacagcgtgctgggcaaggatgagcagatcaacaagggccactgtgacagcagcacccgcatcaagagcaagaaggaggagaagaggagcaccagcctgagcagccccaggaacctgaacagctctgtgcggggggacagagtgtacagcccctacaaccaccgccacaggaagaggggccgcagccgcagcagtgacagccgcagccagagccgcagcggccatgaccagaagaaccacaggaagcaccacggcaagaagaggatgaagagcaagaggagccgcagccgggagagcagccggccccggggcagaagagacaagaagaggagcaggacccgggacagctcctggagccgccgcagccagaccctgagcctgagcagcgagagcaccagccgcagccgcagccgcagcagtgaccacggcaagagaagaagccgcagcaggaacagagaccgctactacctgaggaacaactacggcagccgctacaagtgggagtacacctactacagcaggaacaaggacagagatggctatgagagcagctacagaagaaggaccctgagccgggcccactacagccggcagagcagcagccctgagttccgggtgcagagcttcagcgagaggaccaatgccaggaagaagaacaaccacagcgagaggaagtactactactatgagcggcacaggagccgcagcctgagcagcaacagaagcaggacagccagcactggaacagacagagtgagaaatgagaagccaggcggcaagaggaagtacaagaccaggcacctggagggcaccaatgaggtggcccagcccagccgggagtttgccagcaaggccaaggacagccactaccagaagagcagcagcaagctggatggcaactacaagaatgaaagtgacaccttcagtgacagccgcagcagtgaccgggagaccaagcacaagaggaggaagaggaagaccaggagcctgtctgtggagatcgtgtatgagggcaaggccacagacaccaccaagcaccacaagaagaagaagaagaagcacaagaagaagcacaagaagcaccacggggacaatgccagccgcagccctgtggtgatcaccatcgacagcgacagcgacaaggacagcgaggtgaaggaggacacagaatgtgacaacagcggcccccaggaccccctgcagaatgagttcctggcccccagcctggagccctttgagaccaaggatgtggtgaccatcgaggccgagtttggagtgctggacaaggaatgtgacatcgccaccctgagcaacaacctgaacaatgccaacaagacagtggacaacatcccccccctggccgcctctgtggagcagaccctggatgtgcgggaggagagcacctttgtgtctgacctggagaaccagcccagcaacatcgtgtccctgcagacagagcccagccggcagctgcccagccccaggaccagcctgatgtctgtgtgcctgggccgggactgtgacatgtcctag

SEQ ID NO: 75036 - DNA, 2943 bp, Artificial Sequence
  derived and/or modified sequence
atgatcatggccagcgccgccaaggagttcaagatggacaacttctccccaaaagccgggactagcaagttacagcagaccgtccctgcggatgctagtcccgactcaaagtgtccaatttgcctggacaggttcgataacgtcagttatttggatcgctgtcttcacaaattttgcttcaggtgtgtgcaggaatggagcaaaaataaagcagaatgtcccctttgcaagcagcctttcgacagcatctttcacagcgtccgcgccgaagatgatttcaaggaatatgtgctaagaccctcatataatggatccttcgtgactcccgaccgccgcttcaggtatcgaactacgctcactcgggagaggaatgcaagcgtgtactctcccagtgggcccgttaacaggcgaacaactacgccacccgatagtggagtgttgtttgagggcctgggtatttctacccgcccacgcgacgtggaaattccacaattcatgcgacagatcgccgtgcgcaggccgaccactgccgacgaacgttctttgagaaaaatacaggaacaggatatcattaacttcagacggacactgtacagggccggcgctagagtgcggaatatagaagatggcggacgttatcgcgatatctctgcggaattcttcaggaggaatcccgcctgtcttcaccgattagtgccctggctcaagagagaactcaccgtgctcttcggcgcccatggctcattagttaacatcgtgcagcatattattatgtcgaacgtgacacgatatgacctggagtcacaggcgttcgtttcagacctgcggccattcctgctcaataggaccgagcacttcatccacgaatttatttcttttgcaaggtcacccttcaacatggccgcttttgaccagcacgctaattacgactgcccagctccatcttacgaagaagggtcacactctgattctagcgtcatcaccatcagtcctgacgaggccgagacccaagaacttgacattaatgttgccacagtctcacaggctccctgggacgatgaaactccaggcccctcctacagcagctccgaacaggtacacgtgacaatgtcgtctctgctgaacacatcagactcttcagatgaggagttggttactggaggggccacttcccagattcagggggtacaaaccaacgatgaccttaataatgacagcgacgactcctccgacaattgcgtgatagtgggtttcgtgaagccacttgcggaacgcactccagagctggtggagttgtcctccgactcagaggatctggggagttacgagaagatggagactgttaagacacaagaacaagaacagtcatactcaagcggagacagcgacgtgtcccgctgttctagtccacacagtgtgctcggcaaggatgaacagatcaacaagggccactgtgactcctccaccaggatcaagtcaaaaaaggaagagaaacgctcaacatcattaagctcacccagaaacctcaactcatccgttcgtggcgaccgcgtctacagtccgtataaccatagacatagaaagcgtggacggtctaggtccagtgattcacgttctcagagtaggagcggccacgaccagaagaaccacagaaagcaccacggaaagaagaggatgaagtccaaaagatcgcggagtcgcgagagctcacggcctagagggcggagggataagaagagaagccgcactcgtgattcttcttggtcccggcggtcacagaccctctcactaagcagcgagtctacaagtcgcagcagatcccggtcctcagatcacggaaaacggcggtccagatctcggaaccgcgaccgttattacctcaggaataattacggtagccgctacaagtgggaatacacctactacagtcggaataaggaccgggacggttatgaaagctcctaccgcagaaggacactatctagagctcattattcgcgccaaagctcttcacctgagttccgggtccagtctttttcagaacgcacaaacgccaggaaaaaaaataatcactccgagcggaagtattactattatgagcgacacaggtcacgttcgttatcatcaaaccggagtcgcactgctagcacaggaactgatcgggtgagaaacgagaaacctggtggcaagcgaaagtacaaaactagacacctagaaggcactaacgaagtggcacaaccgtcaagagagtttgcctccaaggccaaggattctcattaccagaaatccagcagtaagctggatgggaactacaaaaacgagtctgataccttctccgatagcagatccagtgaccgggagaccaaacacaaacgccggaagaggaaaactcgctcgctttccgtggaaatcgtgtacgaagggaaggcaacggacacaacgaagcaccataagaaaaagaaaaaaaaacataagaagaaacataaaaagcatcacggagacaacgcatcgagaagccccgtggtgattactatcgacagtgacagtgataaggattctgaagtcaaggaggacacagaatgcgataattcggggcctcaagaccccttacaaaacgagttcctggccccatcgttggaacctttcgagacgaaagacgtagtgactatagaagctgagttcggagtgttggataaggagtgtgatatcgctaccctgtccaacaatctgaacaatgccaacaagacggtggacaacattccgcccttggcggcttctgtggagcagacacttgacgtccgagaggagagtacattcgtgagcgacctcgagaaccagccaagcaatatcgtgagtcttcagacggagccttcccgccagttgccttctccacgcacatcactgatgtcagtgtgcctcggtagagattgtgatatgtcttag

SEQ ID NO: 75037 - DNA, 2943 bp, Artificial Sequence
  derived and/or modified sequence
atgataatggcctccgccgcaaaggaattcaaaatggacaatttcagccccaaggcaggaacatccaagttacagcaaaccgtgccagcggacgcatcacctgacagtaagtgccccatatgtctggatcgtttcgacaatgtctcttacttggaccgctgtctccataaattctgtttccgatgcgtgcaagaatggagcaagaacaaagccgaatgtccactctgtaagcagcctttcgactctatattccactcagtgagagccgaggatgactttaaagagtacgtcctgagacccagttacaacggatcctttgtcacacccgacagaaggttcagataccgcacgactctcacaagggaaaggaacgcctctgtatacagtccctcaggacctgtgaataggcggaccacaaccccccctgattctggggttctgttcgagggactggggatctccacaagacccagggatgttgaaatcccacagttcatgagacagatagccgtgcgacgtcccaccactgctgacgagcggagtctgagaaaaatccaggaacaggatatcatcaactttaggagaaccctctatcgagctggcgcaagagtcaggaacatcgaggatggtggacgctatcgagacatttccgccgagttcttccgcaggaacccggcatgtctgcaccggctggtgccttggttaaaacgcgagctgactgtgctgttcggcgcacacggatcactcgtgaatatcgtccagcatataattatgtctaatgtgactagatatgacctagagagccaggccttcgtgagtgatcttcggccttttctgttaaaccgaactgagcactttatccacgagttcataagctttgccagatcccccttcaatatggctgcctttgaccagcacgcgaattacgattgcccggcaccttcttacgaggaaggttcgcacagtgatagcagcgttattacaatttcccccgacgaggccgaaactcaggagctggatattaatgttgccacagtgtcacaggctccttgggatgatgagacccccggaccaagctacagctctagcgagcaggttcatgttactatgagttctttgttaaatacgtccgactcatctgatgaggagctcgtcacaggaggggctacatctcaaatccagggagtgcagactaatgatgacctgaataatgacagcgatgattctagtgataactgtgtgattgtgggtttcgtgaagcccttggctgagaggactccagaactcgtggagttgagttctgattccgaggacttaggctcatacgagaaaatggaaacagttaagactcaggaacaagaacagagttacagctcaggtgacagcgacgtgtcacggtgcagctcccctcactccgtgctgggaaaggatgaacagattaataagggccattgcgattcaagtacacgaattaagtcgaaaaaggaggaaaaaaggtccacctccctcagctcgccgagaaatctgaatagctccgttcgcggtgaccgggtgtattcaccctacaatcaccgccatagaaagcgtggacgcagtaggtcctccgacagtcgaagtcagtcccggtcggggcacgaccagaagaatcaccgcaaacatcatggcaaaaagcggatgaagtccaagagatctagaagtcgcgaatcttcccgcccacggggtaggcgggataaaaagagatcccggacacgcgactccagctggagtcggcgatcccagacactgtcactgtcctccgaatcgacaagcagatccagatccagatccagtgaccacggcaagaggagaagtagatcgagaaatagagatagatattatctccgcaacaactatggcagtcgctacaaatgggagtatacctattactccaggaataaagatcgcgatggatatgaaagctcatatcgacgccgaactctttcacgggcacactactcaaggcagtcctccagccctgaatttcgggtgcaatcattcagcgaaagaaccaacgcacgcaaaaagaacaatcattcggagcggaaatattactactatgaaagacatcgatctaggtcgctttctagcaaccgaagtcgcaccgcctccacgggaactgatagagtgcgaaatgaaaagcctggtggaaaaaggaagtataagacccggcatctagaaggtacaaacgaagtcgcccaaccatcaagggagttcgcatcaaaagcgaaggattcccactatcagaaaagttcttccaaacttgacggcaactacaaaaacgaaagcgacacctttagtgactctcgttccagtgaccgggaaacaaagcataaacgacggaaaaggaagacccggtccctgagcgtggaaatcgtctatgaaggcaaagccaccgatacaaccaagcatcacaaaaaaaaaaagaagaagcataaaaaaaagcataaaaaacaccatggtgacaacgcttcacggtctcccgtcgtgatcactatcgactctgacagtgacaaggattccgaggttaaagaagatactgaatgtgataactcaggtccccaggatccattgcaaaatgaatttttagcaccttcactcgaaccttttgaaactaaagatgttgttaccatcgaagccgaattcggagtgctcgacaaagaatgtgacatcgcaaccctaagcaacaacctaaataacgcaaataagacagtggacaacattcctcccttagctgcctcagtcgaacagacgttggacgtgcgagaagagtctacattcgtgtcggacctggagaaccagccttcaaacatcgttagcttgcagaccgagccgtctagacaattgccttctcctaggacctccctgatgtcagtgtgcctgggacgtgactgcgacatgagttag

SEQ ID NO: 75038 - DNA, 3621 bp, Artificial Sequence
  derived and/or modified sequence
tgaagaaatagggcctttccgcctgcgggcccagtgagtcgacacggtgggggcccgcgatccccgggacttaccactgaataaatccagtccagcgtgcgacgacttactggcttcatgataatggcatcagctgctaaggaatttaaaatggacaacttttcacctaaagctggcactagcaaattgcaacagacagtaccagctgatgcatctcctgattctaagtgtcctatatgcttggatagatttgataatgtgtcttacttagatcgctgcttacataagttctgttttcgctgtgtacaggagtggtcaaaaaacaaagctgaatgcccactatgtaaacagccctttgattctattttccattctgtgagggcagaagatgacttcaaggagtatgtcctaaggccttcgtataatggttcttttgtcacccctgatcgacgatttcgctaccgtacaactctgacaagggaacgaaatgcttctgtgtattcacctagtggtcctgtgaacagaagaacaacaactccaccggatagtggagtactgtttgaagggttaggcatttcaacaagacctagagatgttgaaattcctcagtttatgagacagattgcagtaaggaggccaactacggcagatgaaagatctttgcggaaaattcaagaacaagatattattaattttagacgaactctttatcgtgctggtgctcgagttagaaatattgaagatggtggccgctacagggatatttcagctgaatttttccgtagaaatccagcttgccttcacagattagtcccctggttaaaacgtgaacttacagttctttttggagctcatggatctttagtgaatattgtccagcatattatcatgagtaatgttactcgctatgacttggagagtcaggcatttgtgtctgatttaagaccatttttacttaatcgaactgagcattttatacatgaatttatcagttttgcccgatctccttttaacatggcagcctttgaccagcatgccaattatgattgccctgctccttcatacgaagaaggcagccattctgattcttcagtcataacaatatctccagatgaggctgagacccaagagctggatattaatgtagccactgttagtcaggcaccatgggatgatgaaactccaggaccatcttactcaagctcagagcaggtacacgttactatgtcttctcttttaaatacttctgacagttcagatgaagaacttgtcacaggaggagccacgtctcagatacaaggagtacaaaccaatgacgacctaaataatgacagtgatgattcttcagataattgtgtcattgttgggtttgttaaaccactagctgagaggaccccagaacttgttgaactgtcctctgattctgaggacttaggttcttatgagaaaatggagacagtgaagacacaagaacaggagcaatcttacagttctggtgatagcgatgttagtagatgctcatctccacactctgtccttggaaaggatgaacaaataaataaaggtcattgtgattctagtacaagaatcaaatcaaagaaggaagagaaacgatctacatcattgtcatctcccagaaacctgaactcatctgtaagaggagacagagtatattctccatataaccatagacacagaaagaggggaagatcaagaagttcagattcacgttctcagagtagaagtgggcatgatcagaagaatcatagaaagcatcatgggaagaaaagaatgaaaagtaaacgatccagaagcagggaaagtagcagacctagagggagaagagacaaaaagagatcaagaactagagatagcagttggtccagaagaagccaaactctgtctctaagtagtgaaagcacaagcagatcaaggtctcgtagcagtgatcatggtaaaagaagatcacggagcagaaatagagatcgttattatttaagaaataattatggaagcagatacaaatgggagtatacttattacagtagaaacaaggacagggatgggtacgaatcatcttacaggaggaggactctgtccagagctcattattctagacagtcttcaagtccagaatttagagttcagtccttttctgaaagaacaaatgctaggaaaaaaaataatcacagtgagaggaagtattactactatgaaaggcacagatcaaggagcctgtctagtaacagatcaaggactgcatctaccgggactgaccgggtgagaaatgaaaagcctggagggaaacgaaaatacaaaacacggcatttggagggtactaacgaagtggctcagccatctcgtgaatttgcttctaaagcaaaggacagtcattaccaaaaatcttcatcaaaattggatggaaactacaaaaatgagagtgataccttttcagacagccgatcatcagacagagagacaaaacacaaaaggagaaaaaggaagacccggagcctaagtgtagagatagtttatgaaggaaaagctactgatacaactaaacaccataaaaagaaaaagaagaaacataagaagaagcataagaaacaccatggagataatgcttcacgttccccagttgtaattaccattgacagtgacagtgataaggattctgaagtaaaggaggatacagaatgtgacaatagtggtcctcaagaccctctacaaaatgagtttttggctccttccttggaaccatttgaaactaaagatgtagttacaatagaagctgaatttggtgtgctggacaaggaatgtgatattgccacacttagtaacaacttgaataatgccaacaaaactgtagataatattccacctctggcagcttcagttgaacaaactctcgatgtaagagaagagagcacctttgtttctgatttggagaaccagcccagtaacattgtgtctcttcaaactgagccatcaaggcaattgccatcgccacggacatcattaatgtcagtatgtcttggtagagactgtgatatgtcttaaaactgccaaagcatttcattgagaattatgatgttataaaaaggaaaaaggaagaatgtcgtctactgcagtctatttaaagatgacatttggtgaaaactctcttcctccttacaatattttaaatgattttttttttggtgttaatttgtaaaaatcattatttgttcaaaatgtatgtcccaccctcaaagatatgcacttttaagtgaagaaaatgatactgctagcagcttatttaaaacttggggtcctttttaaataagaaaaattatataaattttagaagttatttcataaagccatacggtattgacatatttttaaggtagtcaatgagtatttttgaattttttttttttgagagttattctggaaatgtgttataagctaggagaatccctttggacagtctttatttttcttcttaaaaatttatatgattcaaaaccatttcttcaggttaaattgaggcattttaatctgcacagtttatcttctgccaaaataaaaatttactatttcctttatatacttgtttatctggactgccagtaaaac

SEQ ID NO: 75039 - protein, 1068 aa, Artificial Sequence
  derived and/or modified sequence
MVSSDRPVSLEDEVSHSMKEMIGGCCVCSDERGWAENPLVYCDGHGCSVAVHQACYGIVQVPTGPWFCRKCESQERAARVRCELCPHKDGALKRTDNGGWAHVVCALYIPEVQFANVSTMEPIVLQSVPHDRYNKTCYICDEQGRESKAATGACMTCNKHGCRQAFHVTCAQFAGLLCEEEGNGADNVQYCGYCKYHFSKLKKSKRGSNRSYDQSLSDSSSHSQDKHHEKEKKKYKEKDKHKQKHKKQPEPSPALVPSLTVTTEKTYTSTSNNSISGSLKRLEDTTARFTNANFQEVSAHTSSGKDVSETRGSEGKGKKSSAHSSGQRGRKPGGGRNPGTTVSAASPFPQGSFSGTPGSVKSSSGSSVQSPQDFLSFTDSDLRNDSYSHSQQSSATKDVHKGESGSQEGGVNSFSTLIGLPSTSAVTSQPKSFENSPGDLGNSSLPTAGYKRAQTSGIEEETVKEKKRKGNKQSKHGPGRPKGNKNQENVSHLSVSSASPTSSVASAAGSITSSSLQKSPTLLRNGSLQSLSVGSSPVGSEISMQYRHDGACPTTTFSELLNAIHNGIYNSNDVAVSFPNVVSGSGSSTPVSSSHLPQQSSGHLQQVGALSPSAVSSAAPAVATTQANTLSGSSLSQAPSHMYGNRSNSSMAALIAQSENNQTDQDLGDNSRNLVGRGSSPRGSLSPRSPVSSLQIRYDQPGNSSLENLPPVAASIEQLLERQWSEGQQFLLEQGTPSDILGMLKSLHQLQVENRRLEEQIKNLTAKKERLQLLNAQLSVPFPTITANPSPSHQIHTFSAQTAPTTDSLNSSKSPHIGNSFLPDNSLPVLNQDLTSSGQSTSSSSALSTPPPAGQSPAQQGSGVSGVQQVNGVTVGALASGMQPVTSTIPAVSAVGGIIGALPGNQLAINGIVGALNGVMQTPVTMSQNPTPLTHTTVPPNATHPMPATLTNSASGLGLLSDQQRQILIHQQQFQQLLNSQQLTPEQHQAFLYQLMQHHHQQHHQPELQQLQIPGPTQIPINNLLAGTQAPPLHTATTNPFLTIHGDNASQKVARLSDKTGPVAQEKS

SEQ ID NO: 75040 - DNA, 3207 bp, Artificial Sequence
  derived and/or modified sequence
atggtctcttctgaccgccccgtctctctcgaggatgaagtgtcgcactccatgaaagagatgatcgggggctgctgtgtctgttcagacgaacgaggatgggccgaaaatcccctggtgtattgcgacggacatggttgtagtgttgcagtgcatcaggcatgctatggcatcgtgcaagtaccgactggaccatggttctgtagaaaatgtgaatctcaggaacgtgcggcgagggtgcggtgtgaactttgtccacacaaggatggggccctgaaaaggaccgacaatgggggctgggctcacgttgtgtgcgcactgtacattccagaggtgcagttcgcaaatgttagtacaatggaacccatcgtcttacagtccgtcccccacgataggtacaataagacctgttatatttgcgatgagcaagggcgcgagagcaaagccgccactggagcctgtatgacctgcaataaacacgggtgccggcaggcattccatgtcacatgtgctcagtttgccgggctcctgtgcgaagaggaagggaacggggctgacaacgtacagtactgcggctactgtaaatatcatttctccaagttaaaaaagtccaaaaggggaagcaaccgtagttacgaccagagcctgtccgatagttcttctcatagccaagacaagcatcacgagaaggaaaaaaagaaatacaaagagaaggacaaacacaaacaaaagcacaaaaagcagccggaaccaagccctgcactggtacccagcctgactgtgactaccgaaaagacatacactagtacaagcaataacagtatctcaggtagcctgaagcgcctggaggacaccaccgcgagattcactaatgcgaactttcaggaggtgagtgcacacacatcttctggaaaggacgtttcggaaacgagaggctccgagggaaaagggaagaagtcctcggcacacagcagtggtcagcggggtaggaaacccggcggcgggcgtaaccctggcaccactgtgtctgccgcttccccttttccccaaggctctttttctgggacacccgggagcgttaaaagctcttctggcagttcagtgcagtctccccaggacttcctgtcctttacggacagtgacttgcggaatgactcctactcgcactctcaacagtcatccgccactaaagacgtccacaaaggagagtccgggagtcaagaaggaggggtcaacagcttctcaacactgataggactgcctagcacaagtgctgtgacgtcccaaccaaagtcatttgaaaactctccaggcgatttggggaatagcagcctgcctactgctggttataaaagagcccagacaagtggaatcgaagaagagacagtcaaggagaaaaagaggaagggtaataaacaatctaagcatggtccagggagacccaaaggcaacaagaaccaggagaatgtgagtcacctctccgtgtcctccgcatcccccacctcctctgttgcatccgctgctgggtcaatcacatcttcaagtctgcagaagtccccgactctgctgcggaacgggtcgctccagtctctgtccgtgggctcctctccagtcgggagtgagatttctatgcagtacaggcacgacggggcttgccctacaaccaccttcagcgagctccttaacgcgattcacaacggtatttataatagtaacgacgtggcagtttcttttccgaatgtcgtttctgggagcggatcgtctacaccagtcagctctagccacctcccacaacagagttctggtcacttacaacaagtgggagcgttatctccgtccgccgtctctagcgccgcacccgccgtcgctaccactcaggccaacactctatcgggctcttccctgtctcaagctccctcccacatgtatgggaaccgctctaattcaagcatggccgccttaatagcgcagtccgagaacaaccagaccgatcaggatctgggggacaattctagaaacctggtgggtcgcggaagcagccctcggggttctttatcgccccggtctccggtttcatcactgcagatccggtacgatcagcccggcaatagctccctggaaaatttgccacccgtggcagcgagcatcgagcagcttttggaaaggcagtggagtgagggacaacaattcttgcttgagcaaggcacgccatcagatattctcggcatgctaaaaagcttgcatcagctgcaagtcgagaaccgccgactagaagagcagatcaaaaacctgactgccaaaaaggagcgccttcagctgctgaatgctcagctctccgtccctttccccacaatcactgccaatccgtccccaagccatcagatccataccttctccgctcagactgcacccacaaccgactccctcaatagctcgaagtccccccatatcggaaacagcttcctgccggacaatagcctcccagtgctgaatcaagatttgacgagcagtggacagagcacttcatcaagtagcgccctgtctacgcccccgcctgcaggccagagccctgctcagcagggctcaggagtctccggggtgcaacaggttaacggagtgactgtgggcgcactggccagcggtatgcaaccagtcaccagcaccatacccgcggtgagtgccgtgggagggatcatcggcgccttgccaggcaatcagcttgcaattaacgggatcgtaggcgccttgaatggcgtgatgcagacgccggtgactatgtctcagaacccaaccccacttacacacacgacagtaccaccaaatgcgacccacccgatgccggccacattgaccaatagcgcctctggactgggcctgcttagtgaccaacagcggcaaattctcatccatcagcagcaattccagcagctcctcaactctcagcagctaaccccggagcagcaccaggcttttctctaccagctgatgcagcaccaccaccaacaacaccaccagccagaactgcagcagcttcagatcccagggccaactcagattcctattaacaacttactggcaggcacccaggcaccccctcttcataccgcaactactaaccccttcctgacaattcacggagataacgcatctcaaaaggtggcccgcttgagcgataaaactgggccggtcgcccaggaaaaatcttag

SEQ ID NO: 75041 - DNA, 3207 bp, Artificial Sequence
  derived and/or modified sequence
atggtgtccagtgacaggcctgtgtccctggaggatgaggtgagccacagcatgaaggagatgattggaggctgctgcgtgtgcagtgatgagcggggctgggccgagaaccccctggtgtactgtgatggccacggctgcagcgtggccgtgcaccaggcctgctacggcatcgtgcaggtgcccaccggcccctggttctgcaggaaatgtgagagccaggagagagctgcccgggtgcgctgtgagctgtgcccccacaaggatggagccctgaagaggacagacaatggaggctgggcccacgtggtgtgtgccctgtacatccctgaggtgcagtttgccaacgtgtccaccatggagcccatcgtgctgcagagcgtgccccatgaccgctacaacaagacctgctacatctgtgatgagcagggccgggagagcaaggccgccactggagcctgcatgacctgcaacaagcacggctgccggcaggccttccacgtgacctgtgcccagtttgctggcctgctgtgtgaggaggagggcaatggagctgacaacgtgcagtactgcggctactgcaagtaccacttcagcaagctgaagaagagcaagaggggcagcaacagaagctatgaccagagcctgagtgacagcagcagccacagccaggacaagcaccacgagaaggagaagaagaagtacaaggagaaggacaagcacaagcagaagcacaagaagcagcctgagcccagccctgccctggtgcccagcctgactgtgaccacagagaagacctacaccagcaccagcaacaacagcatcagcggcagcctgaagaggctggaggacaccacagcccgcttcaccaatgccaacttccaggaggtgtctgcccacaccagcagcggcaaggatgtgtctgagacccggggcagcgagggcaagggcaagaagagcagcgcccacagcagcggccagaggggcaggaagccaggcggcggcaggaaccctggcaccaccgtgtctgctgccagccccttcccccagggcagcttcagcggcaccccaggctctgtgaagagcagcagcggcagctctgtgcagagcccccaggacttcctgtccttcacagacagcgacctgagaaatgacagctacagccacagccagcagagcagcgccaccaaggatgtgcacaagggggagagcggcagccaggagggcggcgtgaacagcttcagcaccctcatcggcctgcccagcaccagcgctgtgaccagccagcccaagagctttgagaacagccctggggacctgggcaacagcagcctgcccacagctggctacaagagggcccagaccagcggcatcgaggaggagaccgtgaaggagaagaagaggaaaggaaacaagcagagcaagcacggccctggccggcccaagggcaacaagaaccaggagaatgtgagccacctgtctgtgtcctctgccagccccaccagctctgtggccagcgctgctggcagcatcaccagcagcagcctgcagaagagccccaccctgctgagaaatggcagcctgcagagcctgtctgtgggcagcagccctgtgggcagcgagatctccatgcagtacagacatgatggagcctgccccaccaccaccttcagcgagctgctgaatgccatccacaacggcatctacaacagcaatgatgtggccgtgtccttccccaacgtggtgtctggcagcggcagcagcacccctgtgagcagcagccacctgccccagcagagcagcggccacctgcagcaggtgggcgccctgagccccagcgctgtgtcctctgctgccccagctgtggccaccacccaggccaacaccctgagcggcagcagcctgagccaggcccccagccacatgtatggcaacagaagcaacagctccatggccgccctgattgcccagagcgagaacaaccagacagaccaggacctgggggacaacagcaggaacctggtgggccggggcagcagcccccggggcagcctgagccccaggagccctgtgagcagcctgcagatccgctatgaccagcccggcaacagcagcctggagaacctgccccctgtggccgccagcattgagcagctgctggagcggcagtggagcgagggccagcagttcctgctggagcagggcacccccagcgacatcctgggcatgctgaagagcctgcaccagctgcaggtggagaacagaaggctggaggagcagatcaagaacctgacagccaagaaggagcggctgcagctgctgaatgcccagctgtctgtgcccttccccaccatcacagccaaccccagccccagccaccagatccacaccttcagcgcccagacagcccccaccacagacagcctgaacagcagcaagagcccccacatcggcaacagcttcctgcctgacaacagcctgcctgtgctgaaccaggacctgaccagcagcggccagagcaccagcagcagcagcgccctgagcaccccacctcctgctggccagagccctgcccagcagggcagcggcgtgtctggagtgcagcaggtgaatggagtgacagtgggcgccctggccagcggcatgcagcctgtgaccagcaccatcccagctgtgtctgctgtgggcggcatcattggagccctgcccggcaaccagctggccatcaatggcatcgtgggcgccctgaatggagtgatgcagacccctgtgaccatgagccagaaccccacccccctgacccacaccaccgtgcccccaaatgccacccaccccatgcctgccaccctgaccaacagcgccagcggcctgggcctgctgagtgaccagcagaggcagatcctgatccaccagcagcagttccagcagctgctgaacagccagcagctgaccccagagcagcaccaggccttcctgtaccagctgatgcagcaccaccaccagcagcaccaccagcctgagctgcagcagctgcagatccctggccccacccagatccccatcaacaacctgctggccggcacccaggccccacccctgcacacagccaccaccaaccccttcctgaccatccatggagacaatgccagccagaaggtggcccggctgagtgacaagacaggccctgtggcccaggagaagagctag

SEQ ID NO: 75042 - DNA, 3207 bp, Artificial Sequence
  derived and/or modified sequence
atggtgagcagcgaccggcccgtgagcctggaggacgaggtgagccacagcatgaaggaaatgataggtgggtgctgtgtctgcagcgacgagaggggctgggcggagaatcccctggtgtactgtgacggtcacggttgctccgtggctgttcaccaagcctgctatggaatcgtccaagtccccacaggcccttggttctgcaggaaatgtgagagtcaggaaagggctgcccgagtccggtgcgaactctgcccccacaaagatggggctctaaaaaggactgacaacggaggttgggcccacgtggtgtgcgctctgtacattcctgaggtgcagttcgctaatgtgtcaaccatggagccaatagtcctgcaatcagtccctcatgacagatacaataagacctgctatatttgcgacgaacagggccgagagtcgaaggccgctaccggcgcttgcatgacatgcaacaagcatggctgccggcaggcctttcatgtcacctgcgcgcaattcgcagggctgctttgcgaggaggaaggaaacggggccgacaacgtccagtactgcggttattgtaagtaccacttcagcaaactcaaaaagagcaaacggggatctaatcgttcctatgaccagagcttgtccgactcttcgtcccacagtcaggataaacatcacgaaaaagagaaaaaaaagtataaggagaaggataaacacaagcagaagcataagaaacaacccgagccttcacccgcgctggtgccatccttgacagttaccaccgagaagacttacacttcaacgtccaataacagcatcagtgggtccctgaagcgattagaggatactactgcacgttttaccaacgcaaattttcaggaagtgtcagcacacaccagtagcggtaaggacgttagcgaaaccaggggttcagagggaaaaggcaagaagtcttctgcgcactcctcaggacagaggggccgcaagcccggcggaggtagaaatcccggcacgacggttagtgccgccagcccctttcctcaaggcagcttctctgggacacccgggtccgtgaaatccagctcagggtctagcgtgcaaagccctcaagatttcctgagtttcaccgacagtgatctcaggaatgactcgtatagtcacagccagcagtcttctgccaccaaggatgtgcacaagggcgagtctggctcacaggaagggggcgtaaactccttcagcacactgatcggattaccgagcacgagcgccgtaacctcccagccaaagagcttcgagaactcaccaggagatttgggcaatagtagcttacctacagcagggtataaacgggcccagactagtggcattgaggaggagacagtgaaggaaaaaaaaagaaaagggaataaacagagtaaacatggaccggggcgaccaaaaggcaacaaaaaccaggagaatgtaagccacctctccgtctcaagcgcctcacccaccagctctgttgcatccgccgcgggctctattacctcttcttctcttcagaaatctcccacactgctgagaaatggtagtttgcagtcgctctccgtcgggtcctcacctgttggatctgaaatttctatgcagtacaggcacgatggcgcctgtccgaccacaacgttctcagaactcctgaatgcaatacataacggaatctataactcaaatgacgtagccgtcagctttccaaatgtcgtgtcgggatctggttcaagtacaccagtgtctagcagccatctgcctcaacagagctcggggcatctgcagcaagtgggcgcgctatcccctagtgcggtctcctctgccgctcctgccgtcgctaccacacaggccaacactctgtctggttcatccctcagccaagcgcccagtcacatgtacgggaatcgatccaactcaagcatggcggcactgattgcccagtcagagaacaatcagactgaccaagatctcggagacaactctaggaacttagttgggaggggaagtagcccccgtgggtctctgtcccctcggtctccagtttcctcactccaaattagatacgatcagccgggaaactccagcctggagaacttgccacccgtggcagcaagcatagagcagttacttgagagacagtggagtgagggccagcaatttttactagagcaaggcaccccaagtgatatccttgggatgctgaaaagcctacaccagctgcaggtcgagaaccgacgtttagaggaacagattaagaacctgacagccaaaaaagagaggctgcagctcctaaacgcacaattatcagttccatttcctactattacagcaaatcctagccccagccaccaaatccataccttttccgcccaaaccgctcccaccacagattcgctcaatagttcgaagtctccacatatcgggaattctttcctgcctgataactccttgcccgtgctcaaccaggatctgactagttctggacagtccacaagcagttctagcgcattaagtaccccgcctccagccgggcaatccccagcacagcaagggagcggcgtcagcggtgtacagcaggtgaatggagtaactgtgggagccttggcttctgggatgcagcctgtgaccagcacaatccccgcagttagcgctgttggaggtatcattggcgcactgccaggaaaccagctggccatcaacggcatcgtgggcgctctgaatggggttatgcagacgccagtgactatgtcccagaacccgaccccactgacacacacaaccgtaccgccaaatgctactcacccgatgccggcaacattaaccaattccgcttccggactgggcctgcttagcgatcagcagcggcagatcctgatccatcaacagcaattccagcaactcttaaacagccagcagttgaccccagagcagcaccaagctttcctgtatcagctcatgcagcaccatcatcagcagcaccaccagccagagctgcaacaattgcaaatcccaggacccactcaaattcccatcaacaaccttctagctgggacacaggcacccccgttgcacacagctacaactaatcctttcctgaccattcatggcgataatgctagtcagaaagtcgcccggctttcagacaaaacaggcccagtagcccaggagaaatcctag

SEQ ID NO: 75043 - DNA, 3207 bp, Artificial Sequence
  derived and/or modified sequence
atggtgagttctgatagacctgtgtccctcgaagatgaggtgtctcatagtatgaaagagatgattggaggatgctgcgtgtgtagcgacgaaagaggatgggctgagaaccctctggtctattgcgatgggcacggctgcagcgttgctgtccatcaggcttgctatggcattgttcaggtgccgactgggccatggttttgccgaaagtgtgagtctcaggaacgggctgctcgcgtgagatgtgagctgtgtcctcacaaagacggtgccctgaagcgtacggataatggaggatgggcgcacgtggtctgtgcgctgtatattcctgaagtacagttcgcaaatgtaagtacaatggagccgattgtgcttcagtctgtccctcatgacagatacaacaaaacatgctacatctgtgatgagcaaggcagggagtccaaggccgctaccggcgcttgcatgacatgtaacaagcacggctgccggcaggctttccatgtgacgtgcgcccagttcgccggtctcctatgcgaagaggaggggaacggcgctgataatgttcagtattgcggttattgcaagtaccatttctcaaaactcaagaaatctaagcggggttccaaccgatcctatgatcagtccctctctgattcctcatcccactcccaggataaacatcatgagaaggagaaaaagaagtacaaagagaaggacaaacacaaacagaagcacaagaagcagccggaacccagtcctgccctggtgcctagtttgaccgtcaccaccgagaaaacctacacgagcacctccaacaatagtatctctggcagcctcaagcggctagaagatacaaccgcaaggtttacaaatgccaatttccaggaagtatctgcacataccagttcaggaaaggacgtctccgagaccagggggtcggaaggcaagggcaaaaagtcctcggctcattcctccggccagcgaggcagaaagcccggtggagggaggaatcccggaactaccgtgagcgcagctagcccattcccacagggctctttttcgggcacacccggttcagtaaaatcaagtagcggatcttcggtacagagccctcaagactttctgtcgttcaccgatagcgatctgcggaatgattcctacagccattcccaacagagttcagctaccaaagacgtgcataagggcgagtcaggatcccaggagggaggcgtcaactccttctccacactgatcggcctcccatccaccagcgccgtgacaagtcagcctaagtcattcgagaactcccccggagacctaggtaattcgtctttaccgaccgccggttataaaagagctcaaacttcgggcattgaagaggagactgtgaaagaaaagaagaggaaaggaaacaagcaatctaagcacgggccagggcgacctaaaggcaacaagaatcaagaaaatgtgtctcacctgtctgtaagttccgcctccccaacaagctcagttgcatcagctgctggctccatcacgtccagcagcctgcagaagtcaccaactctcttgagaaatggaagcctgcagtcccttagcgttggcagctcccctgtgggaagcgagatatccatgcagtatagacacgatggcgcttgcccgacaacaaccttctctgaactcctgaacgccattcacaacgggatatacaactctaatgatgttgccgtgtcattccccaatgtggtctcaggctcaggcagttcaacacccgtatcaagttcacacctgccccaacaatcgtccggccacctgcaacaagtgggtgctctcagtcctagtgcagtgtcttctgccgcacccgctgtggcgacgactcaggccaacacactgtcaggtagctctctgtcccaagcgcctagccatatgtacggcaatcggtcaaactccagtatggcagctctcattgcgcaatcagagaataaccagacagatcaagatttgggtgataattctcgaaacctggtcggtaggggcagtagtcctcgcggatccctctcgcccagatcaccggtgtcatctctgcaaattcgttacgatcagcctggcaattctagccttgagaacctgccacccgtggccgcaagtattgagcagctacttgagcgacagtggtccgaaggtcagcagttcctgctcgagcaaggaaccccttccgatatcctgggcatgctgaaatccctgcaccaactacaggtggaaaacaggcggttagaagaacagataaaaaatctgaccgctaaaaaagagcgcctgcagctgctgaacgctcaattgagtgtgccctttcctacaattactgccaacccctctccttctcatcagatacacacattctccgcccaaactgcgccaacaactgactctttgaattcgtccaagagtccccacatcggtaattccttcttaccagataacagtctgcccgttctcaaccaggatctgacaagttcgggccagtccacatctagctcttcagctctctcgacaccacccccagccggacagagccctgcccaacaaggctctggtgtttctggcgtgcagcaagtgaacggggtgactgtaggggcactcgcaagcggaatgcagccagtgactagcacaattcccgcagtatcagctgtcgggggaatcatcggagcactcccaggcaatcagctcgcgatcaatggcatcgtaggcgctctcaatggggtcatgcagacccctgtgacaatgagccaaaaccctacccctctcacccacacgactgtaccccctaacgctacccacccaatgccggctaccctaaccaatagcgcaagtggactcggacttctctccgaccagcagagacaaattctgattcaccaacaacagttccaacaactcctgaactctcagcagctgacgccagagcagcaccaggccttcctgtatcagctgatgcagcatcatcatcaacaacaccaccagcctgagctgcagcagctccagatccccggacccacacagattcccataaacaacctgctcgccggtacccaggctcctcctctccacaccgccaccaccaaccccttccttacaatccacggggacaacgcttctcagaaagtcgcgagactgagcgacaagactggcccagtggcgcaggaaaaaagctag

SEQ ID NO: 75044 - DNA, 5032 bp, Artificial Sequence
  derived and/or modified sequence
cttgattatgtgtgccctctccgggcgcccgcgttagcggccgggtggaggtggggagggaagacgctgaggaggaggaggaggcggaggaggcggtggaggggaggtggggggaatcagcaaggacatggctcctgactcctgtgcggaacgtgagtgactgagcggcaaagcccgaatggtctctagcgaccggcccgtgtcactggaggacgaggtctcccatagtatgaaggagatgattggaggctgttgcgtttgctcagacgagagaggctgggccgagaacccgctggtttattgcgacgggcacggctgcagcgtcgcggtgcatcaagcttgctatggcattgttcaagtacccactggaccgtggttttgcaggaaatgtgaatctcaggagagagcagccagagtgagatgtgaactttgtccccataaggatggagctttaaaaagaacagataatgggggttgggcccatgtggtttgtgccctgtatattccagaggtacaatttgccaatgtttccacaatggaaccaattgttttacagtctgttccgcatgatcgttataataagacttgctacatttgtgatgaacaaggaagagaaagcaaagcagccactggtgcttgcatgacatgtaataaacatggatgtcgacaggctttccatgtaacatgcgctcagtttgccggactgctttgtgaagaagaaggtaatggtgccgataatgtccaatactgtggctactgtaaataccattttagtaagctgaaaaagagcaaacggggatctaataggtcatatgatcaaagtttaagtgattcttcctctcactctcaggataaacatcatgagaaagagaaaaaaaaatataaagagaaggacaaacacaaacagaaacacaagaagcagccagaaccatcacctgcattggttccatccttgactgttactacagaaaaaacttatacaagcactagcaacaactctatatctggatcattgaagcgcttggaagatactactgcacgatttacaaatgcaaatttccaggaagtctctgcacacacctctagtggaaaagatgtttcagagactagagggtcagagggcaaagggaagaaatcttcagctcacagctcaggtcaaaggggaagaaagcctggtggtggaagaaatccaggaacaactgtgtcagcagctagcccttttcctcaaggcagtttttcaggaactccaggcagtgtaaagtcatcttctggaagttcagtgcagtctccccaggatttcctgagctttacagactcagatctgcgtaatgacagttactctcactcccaacagtcatcagcaaccaaagatgtacataaaggagagtctggaagccaggaagggggggtaaatagttttagtaccttaattggcctcccttcaacctcagctgttacttcacagcctaaaagctttgaaaattcacctggagatttgggtaattccagccttcctacagcaggatataagcgggctcaaacttctggcatagaagaagaaactgtaaaggaaaagaaaaggaaaggaaataaacaaagtaagcatgggcctggcagacccaaaggaaacaaaaatcaagagaatgtttctcatctctcagtttcttctgcttcaccaacatcatctgtagcatcagctgcaggaagcataacaagctctagtctgcagaaatctcctacattgctcaggaatggaagtttacagagcctcagtgttggctcatctccagttggttcagaaatttccatgcagtatcggcatgatggagcttgcccaacaactacgttctcagagttgctgaatgcaatacacaacggtatttataacagcaatgatgtagcagtatcgtttccaaatgtagtatctggctcgggatctagtactcctgtctccagctctcacttacctcagcagtcttctgggcatttgcaacaagtaggagcgctctctccctcagctgtgtcatctgcagcccctgctgttgctacaactcaggcaaatactctatctggatcttctctcagtcaggcaccatctcatatgtatggcaatagatcaaattcatcaatggcagctcttatagctcagtctgaaaacaatcaaacagatcaagatcttggagacaatagccgcaacctagttggcagaggaagctcaccccgaggaagtctctcgccacgatcccctgtaagcagcttacagattcgctatgatcaaccaggcaacagcagtttggaaaatctgcctccagtagcagccagcatagaacagcttttggagaggcagtggagtgaaggacagcaatttttactagaacagggtactcctagtgacattttaggaatgctgaagtcattacaccaacttcaagttgaaaaccgaagattagaggaacaaattaaaaacttgactgccaaaaaggaacggcttcagttattgaatgcacagctttcagtgccttttccaacaataacagcaaatcctagtccgtctcatcaaatacacacattttcagcacagactgctcctactactgattccttgaacagcagtaagagccctcatataggaaacagctttttacctgataattctcttcctgtattaaatcaggacttaacctccagtggacaaagtaccagcagctcatcagctctttctaccccacctcctgctgggcagagtccggctcaacaaggctcaggagtgagtggagttcagcaggtcaatggcgtgacagtgggggcactagctagtggaatgcagcctgtaacttccaccattcctgccgtgtctgcagtgggtggaataattggagctttgccaggtaaccaactggcaattaatggcattgtaggagctttaaatggggttatgcagactcctgtcacaatgtcccagaaccctacccctctcacccacacaaccgtaccacctaatgcaacacatccaatgccagctacactgactaacagtgcctcaggactaggattactttctgaccagcaacgacaaatacttattcatcaacagcagtttcagcagttgttaaattctcaacagctcacaccagaacaacatcaagcctttttgtatcagttaatgcaacatcaccaccagcagcaccaccaacctgaacttcagcagctgcagatccctggaccaacacaaatacccataaacaaccttcttgcaggtacacaggcacccccacttcacacagctaccaccaacccatttctcaccatccatggagataatgcaagtcagaaagtagcaagacttagtgataaaactgggcctgtagctcaagagaaaagttgacacctgagaaacatctagaaattgcctatcctgctgttctagcacttcatctggctgcctttgcagtccttttactacagctatgaagaaacgcaacaagaaactcaatgcacaacaaaggattaattgctgcaaggacattcttgtaaggctttgattagttttcttgttgctttgttgcactgaaatggaattcccatgcccctaccccttaccccagttttttgaacatggaaagaaaatttaataactttttaaagtgacataatttacatgcaatatgtttatcaactcaagaatttaatatagttggtacacaactagttttgtttataaattggagatgcaaatagcaaaactaaatacttgctccatttacaaactacttgattttattgtacaagttgaaatatgctcttttgtttgggttacagtatgcttgctctaagtcaaattccaaggaactaatttcttctcctggagttgcattgattcagtattacaaatatatagcacatcacctgggacttggcaatctttgttaaaaaaaaatttcctttctaatgggatttggccaattttggtaatgaagttaggatggtaatgtctgcatctgctaaaggtaattttcttttgagaattgctttctttagtgttaagacctactcatattttgaagaaatcttgagttaagtgagttctgaggctgctgggggaaccagatcaattcaaagctaaatacttctttcagaaaggggccactgtggaaagtgctggtggggtttgcccttgatcaagtgcctccattgtgctgcaagggctgtagacagcagggtgggacagtcagtcctccgagcagcaggaatcatcccgtcacctgcagccttcccatgcttccgcctttattcagaactttctgtgccactgtagatagctcaggcaaaactattacctgggtatttatccactaatgagtcacaagaaaaggagtggatttggtaagaatagagatttgttttatttaaaccacttcccattactgaccattaaaagctcaccactagagttcctgaaacaggtgaaacctgtatgacagcccttccactttggggagccacgcttttgatgtgacagtaccgcagagtgattcccccactgaggatgtcatcatcaaactcttctttggtgtgtgaattattagtggaaaagacccagctgtaattagacctccactgtgtacttagctggaagaacatgttaattctgcaatatgtttcttggttaaacattgcacagttcttacctcatttctgtaaataaagttttgtgaatctgttttgtattgtgacaaattcataagataacattgatattttgatttgtaatatttctaattggtagatttaattgaaaagtaaaattaatttatttttatatgttcaggggaattttaaagtcaaatcttttgtagataatttaaaaaatcagtgtggtttattttacttatttaacccactggttgttattctgtaacagtttgtataaatggtaaattttgaatgtgttgttattttacctagatgtaaaattccacatgtattaaaatgtacaaaatgttttgttaataaaatttaataatgtttataa

SEQ ID NO: 75045 - DNA, 3207 bp, Artificial Sequence
  derived and/or modified sequence
atggtgagcagcgacagacccgtgagcctggaggacgaggtgagccacagcatgaaggagatgatcggcggctgctgcgtgtgcagcgacgagagaggctgggccgagaaccccctggtgtactgcgacggccacggctgcagcgtggccgtgcaccaggcctgctacggcatcgtgcaggtgcccaccggcccctggttctgcagaaagtgcgagagccaggagagagccgccagagtgagatgcgagctgtgcccccacaaggacggcgccctgaagagaaccgacaacggcggctgggcccacgtggtgtgcgccctgtacatccccgaggtgcagttcgccaacgtgagcaccatggagcccatcgtgctgcagagcgtgccccacgacagatacaacaagacctgctacatctgcgacgagcagggcagagagagcaaggccgccaccggcgcctgcatgacctgcaacaagcacggctgcagacaggccttccacgtgacctgcgcccagttcgccggcctgctgtgcgaggaggagggcaacggcgccgacaacgtgcagtactgcggctactgcaagtaccacttcagcaagctgaagaagagcaagagaggcagcaacagaagctacgaccagagcctgagcgacagcagcagccacagccaggacaagcaccacgagaaggagaagaagaagtacaaggagaaggacaagcacaagcagaagcacaagaagcagcccgagcccagccccgccctggtgcccagcctgaccgtgaccaccgagaagacctacaccagcaccagcaacaacagcatcagcggcagcctgaagagactggaggacaccaccgccagattcaccaacgccaacttccaggaggtgagcgcccacaccagcagcggcaaggacgtgagcgagaccagaggcagcgagggcaagggcaagaagagcagcgcccacagcagcggccagagaggcagaaagcccggcggcggcagaaaccccggcaccaccgtgagcgccgccagccccttcccccagggcagcttcagcggcacccccggcagcgtgaagagcagcagcggcagcagcgtgcagagcccccaggacttcctgagcttcaccgacagcgacctgagaaacgacagctacagccacagccagcagagcagcgccaccaaggacgtgcacaagggcgagagcggcagccaggagggcggcgtgaacagcttcagcaccctgatcggcctgcccagcaccagcgccgtgaccagccagcccaagagcttcgagaacagccccggcgacctgggcaacagcagcctgcccaccgccggctacaagagagcccagaccagcggcatcgaggaggagaccgtgaaggagaagaagagaaagggcaacaagcagagcaagcacggccccggcagacccaagggcaacaagaaccaggagaacgtgagccacctgagcgtgagcagcgccagccccaccagcagcgtggccagcgccgccggcagcatcaccagcagcagcctgcagaagagccccaccctgctgagaaacggcagcctgcagagcctgagcgtgggcagcagccccgtgggcagcgagatcagcatgcagtacagacacgacggcgcctgccccaccaccaccttcagcgagctgctgaacgccatccacaacggcatctacaacagcaacgacgtggccgtgagcttccccaacgtggtgagcggcagcggcagcagcacccccgtgagcagcagccacctgccccagcagagcagcggccacctgcagcaggtgggcgccctgagccccagcgccgtgagcagcgccgcccccgccgtggccaccacccaggccaacaccctgagcggcagcagcctgagccaggcccccagccacatgtacggcaacagaagcaacagcagcatggccgccctgatcgcccagagcgagaacaaccagaccgaccaggacctgggcgacaacagcagaaacctggtgggcagaggcagcagccccagaggcagcctgagccccagaagccccgtgagcagcctgcagatcagatacgaccagcccggcaacagcagcctggagaacctgccccccgtggccgccagcatcgagcagctgctggagagacagtggagcgagggccagcagttcctgctggagcagggcacccccagcgacatcctgggcatgctgaagagcctgcaccagctgcaggtggagaacagaagactggaggagcagatcaagaacctgaccgccaagaaggagagactgcagctgctgaacgcccagctgagcgtgcccttccccaccatcaccgccaaccccagccccagccaccagatccacaccttcagcgcccagaccgcccccaccaccgacagcctgaacagcagcaagagcccccacatcggcaacagcttcctgcccgacaacagcctgcccgtgctgaaccaggacctgaccagcagcggccagagcaccagcagcagcagcgccctgagcacccccccccccgccggccagagccccgcccagcagggcagcggcgtgagcggcgtgcagcaggtgaacggcgtgaccgtgggcgccctggccagcggcatgcagcccgtgaccagcaccatccccgccgtgagcgccgtgggcggcatcatcggcgccctgcccggcaaccagctggccatcaacggcatcgtgggcgccctgaacggcgtgatgcagacccccgtgaccatgagccagaaccccacccccctgacccacaccaccgtgccccccaacgccacccaccccatgcccgccaccctgaccaacagcgccagcggcctgggcctgctgagcgaccagcagagacagatcctgatccaccagcagcagttccagcagctgctgaacagccagcagctgacccccgagcagcaccaggccttcctgtaccagctgatgcagcaccaccaccagcagcaccaccagcccgagctgcagcagctgcagatccccggccccacccagatccccatcaacaacctgctggccggcacccaggccccccccctgcacaccgccaccaccaaccccttcctgaccatccacggcgacaacgccagccagaaggtggccagactgagcgacaagaccggccccgtggcccaggagaagagctag

SEQ ID NO: 75046 - protein, 126 aa, Artificial Sequence
  derived and/or modified sequence
MVSSDRPVSLEDEVSHSMKEMIGGCCVCSDERGWAENPLVYCDGHGCSVAVHQACYGIVQVPTGPWFCRKCESQERAARVAESRSVAQAKVQWCDLSPLQPLLPGFKRFSCLSLPNGMQFLLVSLI

SEQ ID NO: 75047 - DNA, 381 bp, Artificial Sequence
  derived and/or modified sequence
atggtgagcagcgacagacccgtgagcctggaggacgaggtgagccacagcatgaaggagatgatcggcggctgctgcgtgtgcagcgacgagagaggctgggccgagaaccccctggtgtactgcgacggccacggctgcagcgtggccgtgcaccaggcctgctacggcatcgtgcaggtgcccaccggcccctggttctgcagaaagtgcgagagccaggagagagccgccagagtggccgagagcagaagcgtggcccaggccaaggtgcagtggtgcgacctgagccccctgcagcccctgctgcccggcttcaagagattcagctgcctgagcctgcccaacggcatgcagttcctgctggtgagcctgatctag

SEQ ID NO: 75048 - DNA, 189 bp, Artificial Sequence
  derived and/or modified sequence
tgagagaaccccctggtgtactgcgacggccacggctgcagcgtggccgtgcaccaggcctgctacggcatcgtgcaggtgcccaccggcccctggttctgcagaaagtgcgagagccaggagagagccgccagagtggtgggccccatgtggttcgtgccctgcatcttccagagatacaacctgtag

SEQ ID NO: 75049 - DNA, 381 bp, Artificial Sequence
  derived and/or modified sequence
atggtttcaagcgacagaccggtctccctcgaagacgaggtttcccattcgatgaaggaaatgattggaggttgctgtgtttgttcagacgaacgtggatgggccgagaatccactggtctactgtgacgggcacgggtgctctgtggccgtacaccaggcctgctatggtatcgtgcaggtccctaccgggccatggttttgtaggaaatgcgagtcccaggagcgggcagcacgagtcgccgagtcccgaagtgtagctcaggcaaaagtgcagtggtgtgacctgagcccattacagccgttgctgccaggctttaagaggttttcttgtctttcgctgcctaacggaatgcagtttctgctcgttagcctgatctag

SEQ ID NO: 75050 - DNA, 189 bp, Artificial Sequence
  derived and/or modified sequence
tgagagaatcctctggtctactgcgatggccatggctgctccgtggctgtccatcaggcttgttatggaatagtccaagtgcctaccgggccttggttttgccgaaagtgcgagtcccaagagcgcgcggcccgggtggttggccctatgtggttcgtcccatgcatcttccagagatataatttgtag

SEQ ID NO: 75051 - DNA, 905 bp, Artificial Sequence
  derived and/or modified sequence
tgattatgtgtgccctctccgggcgcccgcgttagcggccgggtggaggtggggagggaagacgctgaggaggaggaggaggcggaggaggcggtggaggggaggtggggggaatcagcaaggacatggctcctgactcctgtgcggaacgtgagtgactgagcggcaaagcccgaatggtctctagcgaccggcccgtgtcactggaggacgaggtctcccatagtatgaaggagatgattggaggctgttgcgtttgctcagacgagagaggctgggccgagaacccgctggtttattgcgacgggcacggctgcagcgtcgcggtgcatcaagcttgctatggcattgttcaagtacccactggaccgtggttttgcaggaaatgtgaatctcaggagagagcagccagagtggcagagtctcgctctgttgcccaggctaaagtgcagtggtgtgatctcagcccactgcaacctctgctccccgggttcaagcgattctcctgcctcagcctcccaaatggtatgcaattcctgttggttagcctcatctgaaaacgtcactcctggatacatagaacatcactgcgcatgtgcatctccccacccccgatgcctggtgtctaacgttcctccagtttctggtgctctgatgcattgcttttgggcttgtcttactacagcagctttcttcggtcctcagtcatttaccacttgtcatatgtcctttctagtttccagggatattcttttttatatttatggctttatgccatttatctcagttgtcatttggcgtttcaagaaggagaggtggtagtgtttaagtggaattaactacttgtgtttctgatgtggtcttttatatttcttacagggttttgttttaccaagtactagtct

SEQ ID NO: 75052 - DNA, 381 bp, Artificial Sequence
  derived and/or modified sequence
atggtgtccagtgacaggcctgtgtccctggaggatgaggtgagccacagcatgaaggagatgattggaggctgctgcgtgtgcagtgatgagcggggctgggccgagaaccccctggtgtactgtgatggccacggctgcagcgtggccgtgcaccaggcctgctacggcatcgtgcaggtgcccaccggcccctggttctgcaggaaatgtgagagccaggagagagctgcccgggtggccgagagccgctctgtggcccaggccaaggtgcagtggtgtgacctgagccccctgcagcccctgctgcccggcttcaagcgcttcagctgcctgagcctgcccaacggcatgcagttcctgctggtgtccctcatctag

SEQ ID NO: 75053 - DNA, 189 bp, Artificial Sequence
  derived and/or modified sequence
tgagaaaaccccctggtgtactgtgatggccacggctgcagcgtggccgtgcaccaggcctgctacggcatcgtgcaggtgcccaccggcccctggttctgcaggaaatgtgagagccaggagagagctgcccgggtggtgggccccatgtggtttgtgccctgcatcttccagcgctacaacctgtag

SEQ ID NO: 75054 - DNA, 381 bp, Artificial Sequence
  derived and/or modified sequence
atggtgagcagcgaccggcccgtgagcctggaggacgaggtgagccatagcatgaaggaaatgattgggggttgctgcgtttgttccgacgagcgaggctgggccgagaaccccctggtttactgcgatggccatgggtgtagcgtagcggtgcaccaagcctgctacggtatcgttcaggtcccaactggaccctggttttgtcgcaaatgcgagtcccaagaacgcgccgcgagagtcgccgagtcaagaagcgtggctcaggccaaggtacagtggtgcgacttgtctccacttcagcccctgctgcctggattcaaacgcttctcctgcctcagcctgccaaacggaatgcagtttctcctcgtgagcctcatctag

SEQ ID NO: 75055 - DNA, 189 bp, Artificial Sequence
  derived and/or modified sequence
tgagagaaccccctggtgtactgcgacggccacggctgcagcgtggccgttcatcaggcctgttacggcattgtccaggtccccactggaccctggttctgcaggaaatgcgagagccaggagcgcgcggctagggtggtgggcccaatgtggtttgtcccttgtatattccagcggtacaacctctag

SEQ ID NO: 75056 - DNA, 381 bp, Artificial Sequence
  derived and/or modified sequence
atggtgtcctctgacagaccggtcagcctggaggatgaagtgtcgcactcaatgaaagagatgatcggcggatgctgcgtttgtagcgatgagcgcggatgggccgaaaaccccttggtgtactgcgacggacacggatgctctgtcgcagtacaccaggcgtgctatggaattgtgcaggtgccaaccggtccatggttttgccggaagtgtgaatcccaagagcgggctgcaagggtagccgagtctcgctccgttgcacaagcaaaagttcagtggtgcgatctgtcgcctctgcagccactgctgccgggatttaaacgcttctcctgcctgtccctgccaaacggtatgcagttcctgctggtgtctctcatttag

SEQ ID NO: 75057 - DNA, 189 bp, Artificial Sequence
  derived and/or modified sequence
taagaaaacccgctcgtttattgcgacgggcacggatgctcagttgcagtgcatcaggcctgttacggaatagtgcaggttcctacgggcccatggttttgtaggaaatgcgagagccaggagagggcggcaagggtagttggaccaatgtggtttgttccttgtattttccagagatataacctgtag

SEQ ID NO: 75058 - DNA, 184 bp, Artificial Sequence
  derived and/or modified sequence
cgagaacccgctggtttattgcgacgggcacggctgcagcgtcgcggtgcatcaagcttgctatggcattgttcaagtacccactggaccgtggttttgcaggaaatgtgaatctcaggagagagcagccagagtggttgggcccatgtggtttgtgccctgtatattccagaggtacaatttg

SEQ ID NO: 75059 - protein, 179 aa, Artificial Sequence
  derived and/or modified sequence
MVSSDRPVSLEDEVSHSMKEMIGGCCVCSDERGWAENPLVYCDGHGCSVAVHQACYGIVQVPTGPWFCRKCESQERAARVMVCNSCWLASSENVTPGYIEHHCACASPHPRCLVSNVPPVSGALMHCFWACLTTAAFFGPQSFTTCHMSFLVSRDILFYIYGFMPFISVVIWRFKKERW

SEQ ID NO: 75060 - DNA, 540 bp, Artificial Sequence
  derived and/or modified sequence
atggtgagcagcgacagacccgtgagcctggaggacgaggtgagccacagcatgaaggagatgatcggcggctgctgcgtgtgcagcgacgagagaggctgggccgagaaccccctggtgtactgcgacggccacggctgcagcgtggccgtgcaccaggcctgctacggcatcgtgcaggtgcccaccggcccctggttctgcagaaagtgcgagagccaggagagagccgccagagtgatggtgtgcaacagctgctggctggccagcagcgagaacgtgacccccggctacatcgagcaccactgcgcctgcgccagcccccaccccagatgcctggtgagcaacgtgccccccgtgagcggcgccctgatgcactgcttctgggcctgcctgaccaccgccgccttcttcggcccccagagcttcaccacctgccacatgagcttcctggtgagcagagacatcctgttctacatctacggcttcatgcccttcatcagcgtggtgatctggagattcaagaaggagagatggtag

SEQ ID NO: 75061 - DNA, 540 bp, Artificial Sequence
  derived and/or modified sequence
atggtgagcagtgaccgacctgtcagcctcgaggatgaagttagtcatagtatgaaagaaatgataggaggctgctgcgtgtgtagtgacgagcggggatgggcagagaacccccttgtatattgcgatgggcatggttgtagcgtggccgtccaccaggcttgttacgggatcgtgcaagtgcccacaggaccatggttctgccggaaatgtgagtcccaagaaagagccgcaagggttatggtctgcaacagttgctggttagcatcttctgagaatgtgacaccaggatatatcgaacaccactgtgcctgtgcatcccctcacccgaggtgcctagtcagcaacgtacccccagtgtccggcgctctgatgcattgtttctgggcctgtcttaccaccgcggcttttttcggtccccaatcttttaccacatgtcatatgagctttctggtgtccagagatatactattctacatatatgggttcatgcctttcatctccgttgtgatttggagattcaaaaaggaacggtggtag

SEQ ID NO: 75062 - DNA, 1136 bp, Artificial Sequence
  derived and/or modified sequence
cgcggcagcgcgcacgcagggctagcctcgcccaggcctcctccctcacgccggccgcaggacgggcgcgcacgccaagtgacgctccgaggaggaagcgcagcccccttcccctccctcgctgcccctggcccagcgggagccccccctccccccagtgcgcctgtgcggaggccctcttgattatgtgtgccctctccgggcgcccgcgttagcggccgggtggaggtggggagggaagacgctgaggaggaggaggaggcggaggaggcggtggaggggaggtggggggaatcagcaaggacatggctcctgactcctgtgcggaacgtgagtgactgagcggcaaagcccgaatggtctctagcgaccggcccgtgtcactggaggacgaggtctcccatagtatgaaggagatgattggaggctgttgcgtttgctcagacgagagaggctgggccgagaacccgctggtttattgcgacgggcacggctgcagcgtcgcggtgcatcaagcttgctatggcattgttcaagtacccactggaccgtggttttgcaggaaatgtgaatctcaggagagagcagccagagtgatggtatgcaattcctgttggttagcctcatctgaaaacgtcactcctggatacatagaacatcactgcgcatgtgcatctccccacccccgatgcctggtgtctaacgttcctccagtttctggtgctctgatgcattgcttttgggcttgtcttactacagcagctttcttcggtcctcagtcatttaccacttgtcatatgtcctttctagtttccagggatattcttttttatatttatggctttatgccatttatctcagttgtcatttggcgtttcaagaaggagaggtggtagtgtttaagtggaattaactacttgtgtttctgatgtggtcttttatatttcttacagggttttgttttaccaagtactagtcttcagtctatcctgtttacttgattttttcccactcaactcacaaacatttttgaatcatctcatgaattctgctttccatttacatttttgcccttttgtcttttcctcttcgctgttaaacttcctgaaaaaataaaactagttgattcacttctt

SEQ ID NO: 75063 - DNA, 540 bp, Artificial Sequence
  derived and/or modified sequence
atggtgtccagtgacaggcctgtgtccctggaggatgaggtgagccacagcatgaaggagatgattggaggctgctgcgtgtgcagtgatgagcggggctgggccgagaaccccctggtgtactgtgatggccacggctgcagcgtggccgtgcaccaggcctgctacggcatcgtgcaggtgcccaccggcccctggttctgcaggaaatgtgagagccaggagagagctgcccgggtgatggtgtgcaacagctgctggctggccagcagtgaaaatgtgaccccaggctacatcgagcaccactgtgcctgtgccagcccccacccccgctgcctggtgtccaatgtgccccctgtgtctggggccctgatgcactgcttctgggcctgcctgaccacagctgccttcttcggcccccagagcttcaccacctgccacatgtccttcctggtgtcccgggacatcctcttctacatctacggcttcatgcccttcatctctgtggtgatctggaggttcaagaaggagcgctggtag

SEQ ID NO: 75064 - DNA, 540 bp, Artificial Sequence
  derived and/or modified sequence
atggtgagcagcgaccggcccgtgagcctggaggacgaggtgagccacagtatgaaggagatgataggcggatgctgcgtatgctcagatgaacgaggctgggccgagaatcctctcgtgtactgcgacgggcacggctgttctgtggctgtgcaccaagcttgttacgggatcgttcaagtgccgaccggaccctggttttgcagaaaatgtgagagccaggaacgcgccgctcgtgtaatggtttgcaactcctgctggctggcgtcgagcgagaacgtgacaccaggctatattgagcatcactgtgcatgtgctagccctcatccccgatgcctggtgagcaatgtgcctccagtgagtggagccctgatgcattgcttctgggcatgcctgactacagccgctttcttcgggcctcagtcttttactacatgccatatgagcttcttggtgtctcgagacattctgttttatatttatggcttcatgccattcatcagcgtggtgatctggcgcttcaagaaagagcgatggtag

SEQ ID NO: 75065 - DNA, 540 bp, Artificial Sequence
  derived and/or modified sequence
atggtaagctccgatcgccctgtgtcactggaggatgaggtgagccacagtatgaaggagatgattggtggttgctgtgtctgttccgacgagcgcggatgggccgagaatcccctcgtttattgtgatgggcacggatgctccgtggccgtgcatcaggcttgctatggaattgtgcaagttcctacaggaccttggttttgtcggaaatgcgaatcacaagagcgcgctgcccgagtgatggtttgtaactcatgctggctggctagcagcgagaacgtaacaccaggttacattgaacatcactgcgcttgtgccagtcctcatcctcgttgtcttgtatcaaacgtcccacccgtgtccggggctctcatgcactgtttctgggcctgcctgacgaccgcggctttctttgggcctcagagcttcacaacctgtcacatgtctttcctggtgagtcgagatatcctattttacatttacggttttatgccatttataagcgtcgtcatttggagatttaagaaggaacgatggtag

SEQ ID NO: 75066 - protein, 287 aa, Artificial Sequence
  derived and/or modified sequence
MASHPQTRIQAYLEKNKIGPLFEELMTKLITETPDQPIPFLIDHLQSKQGNRGQLQRTLSGSAALWAESEKSESKGTRRDFRSYDKPWQLNAKKPKKSKSDLAVSNISPPSPDSKSLPRSVEHPKWNWRTKPQSRDFDELNHILQESKKLGKALENLSRSIAISDELDKETVTFNSSLLRPRVIGEWIGREENDADPLAAEMLQPPIPRSKNDQWESEDSGSSPAGSLKMEPKNKGLKQQQQQHKKLLAAMLSQDSFESIHSPTPSVTEEDIDNEDDAMELLGNFKN

SEQ ID NO: 75067 - DNA, 864 bp, Artificial Sequence
  derived and/or modified sequence
atggccagccacccccagaccagaatccaggcctacctggagaagaacaagatcggccccctgttcgaggagctgatgaccaagctgatcaccgagacccccgaccagcccatccccttcctgatcgaccacctgcagagcaagcagggcaacagaggccagctgcagagaaccctgagcggcagcgccgccctgtgggccgagagcgagaagagcgagagcaagggcaccagaagagacttcagaagctacgacaagccctggcagctgaacgccaagaagcccaagaagagcaagagcgacctggccgtgagcaacatcagcccccccagccccgacagcaagagcctgcccagaagcgtggagcaccccaagtggaactggagaaccaagccccagagcagagacttcgacgagctgaaccacatcctgcaggagagcaagaagctgggcaaggccctggagaacctgagcagaagcatcgccatcagcgacgagctggacaaggagaccgtgaccttcaacagcagcctgctgagacccagagtgatcggcgagtggatcggcagagaggagaacgacgccgaccccctggccgccgagatgctgcagccccccatccccagaagcaagaacgaccagtgggagagcgaggacagcggcagcagccccgccggcagcctgaagatggagcccaagaacaagggcctgaagcagcagcagcagcagcacaagaagctgctggccgccatgctgagccaggacagcttcgagagcatccacagccccacccccagcgtgaccgaggaggacatcgacaacgaggacgacgccatggagctgctgggcaacttcaagaactag

SEQ ID NO: 75068 - DNA, 3571 bp, Artificial Sequence
  derived and/or modified sequence
gccgcgcgttctccctgcactctcttcgcggtcccatctgttccccatggcgtctcatccgcaaacccggatccaggcttacctggagaagaacaagatcggtcccctgtttgaggaattaatgaccaagttaataactgagacacctgaccagccaatcccatttctcattgaccatcttcagtctaaacaagggaaccgtggacaacttcaaagaactttgtctggatctgcagctctatgggcagaaagtgaaaaatcagaatccaaaggaacaagaagggatttcagaagctatgataaaccttggcaattaaatgcaaagaagcctaaaaaatcaaaaagtgaccttgctgtgtctaatatttctccaccatcaccggactccaaatcattgccaaggtcagtagagcatccaaagtggaactggaggactaaaccacaaagccgtgattttgatgaattgaatcacatccttcaggagagcaagaagctggggaaagcccttgagaatctctctcgaagtattgcaatttcagatgaactcgataaggaaacagtgacatttaattcttctcttctgaggccccgtgtgattggagaatggattggtagagaagaaaatgatgctgatcccctagctgctgaaatgctacagcctccaattccaagaagcaaaaatgaccaatgggaaagtgaagatagtggctctagtcctgcaggaagcttaaagatggagcctaagaacaaaggattaaaacagcagcaacagcaacataagaaactcctggccgcaatgctctctcaagattcttttgagtccatccacagccctaccccatctgtaacagaagaagatattgataatgaagatgatgcaatggaattgctgggtaattttaaaaattaataatttctcattttcttctttgacattgtaaaaaaaacgtgtggtgattaagagattttaaaagttttgaatagccttgtcttagggaaaagaaaccatttagtacatattttatttacattagactcacataaagttgcatgtaagaactaaattgaaataccctaagcatatgaatatttattagactgtattttgtgctttgtgtatgctgcactttaccttctgactacgtaatgaagcgttattctgtgtgcaactgtgatcaaaattcaagtctgtctgctttattctctgataataattgccttgtttacatctattgtctataaaatatacccaaagtacatatttcagccctcactccaaaatgtctaccttttattttgaggatgctttagaaaaatagaataaagttgaaaggggcagatagtaaattcaggttttatgttttccgtaaatgacgggaaagtttgcagagatttcaaagtttcttcaggcctgttactttcatgaaaccttattaatcttgtatatgtaggatatctttttatattttttaatgtagtatatgtatgtttttgcttcatcagaaatctcttcatataaatttttaaactgaacttctctttggaacatcatttttctgaagaaagaaaatgaaatgttatttcagagtgatccacatataaaacaatgagttttgaagtcagtggtatcaattattctgctacaaataaagagtatgattttcaaatactttataacaatatgctgttgtattttatttagaaagagaataaataatataattatttgaaagccttaaacacgttttacatatagaatatggaatctcagaaaaatataggccattttctgaagtttttgttaaaaatgagattccttggttttaagtgtttatggcagtaaaatactatcattataaaaaatgatatattgcttatcatttttgcataggcctacaaaggtgttatttggtcaatggtgacaggtttgaaagatgttttctgatgctgtaaaaactgcattcatgctaacattaaggagattgtatcatggcgttttcattacatgctgttggtcccttccaattgggtcttttcctcacctccaaatcattaacatggcagacgtgccctatgtggcagtggtagcttcattcaacaaacatttactgagcacttactctatgctaagcacttggctggggtctgggaacataaaaataaaatcattgtgatctgtgtttgaaggaattttacattgtaatgttcaagatacaatacgtcactacctgtgctaactgcgctaattggatgaagcacacagttgtgtataggggtaacacctaaagcagaggtaagggacagtgacccaggaatgtttcctagagaagccgattactctggctagtcctgaaaagcaaatagatgtaagctcagcaggtggggtgtggtcattgtaggtttgctcacgtaggtatgggctgttttgcgattgtgctccataactatacctgtaaatggttcctctgctttggacagtaacagggaaggggcaactgagatccagggtttctttcaggagatgcagttgtccactccatgctggtactccctagatctcagctgccctgactgaaggttctagtctcccaagctgaagaccgaggattgagtcttggagactatctaatgatgagcaattaataactagtcctcattaattctttttttagacattttagcctgtggtctgagcaagtttaataataagagatagttgaaggtttggactttcttcatgtaattccacatatctcagcacaggtggcaagcagtgtaataatgttggtctctaggtcatgagattatcctcttatagcttggaatgttacaagtccactggactttatcttaaaataatgccatattcaatttcttgtttttgaaatggattccagcaaaatgtatgtgattgtgtctatttcagaaaaatataaatgctaagttcttggaaatttatgtgaaatctaattttatagagtttatatagaatcattgtaagatgcaatagagacatctggtatttaaaatctttttgaatctacattttgtagatgtgtgtgctatagcttatgtgtttgtaaatgtttaacttgtctttgttatctataccaagatataactggctgaaaaatatttattatgcatggaaagcactctgtaaaccttgtgaagtgataaataagtgaaaggtataattgttagttgacattaatataaaaaaggattattcttcaataaaattggttgatttgaagggaaaaaatccttttagttgaactagtagaagttagtaataactattgactcttgttttgtttattaaggaaactagcattgttaatatatactgattaatatttaattattcacagttgtttaattatatatttgtggatttcttttctaaatgttttaggcatatgaaaatattatagtacaacacctgtaatttttaagtagatcaaatattttctgtaagattgctttaaatgctccttataaattcacattgcaaaagtaacttaatatggaattaacacttgtcagataataaaacagccaaacttgt

SEQ ID NO: 75069 - DNA, 864 bp, Artificial Sequence
  derived and/or modified sequence
atggccagtcatccccagaccagaatccaggcctacctggagaaaaataaaattggtccgctgtttgaggaactaatgaccaagttaattacagagacgcccgaccagccaattcctttcctcatcgaccacctccagagtaagcaagggaaccggggacagcttcagcgcaccttgagtgggagcgcggcgctctgggctgaaagcgagaaaagcgaatcgaagggaactcggagagactttcggagttacgacaaaccgtggcaactgaacgcgaaaaaaccaaagaaaagtaagagcgacttggcagtatcgaacatttctcccccttcccctgactctaaatccctcccaaggagcgtggagcacccaaaatggaactggcgcacgaaaccgcagagtcgcgactttgatgaactaaaccacattctgcaggagtctaagaaactggggaaagcactggagaacctgagccggtcaattgctatttctgacgaactcgataaagagacagtaacattcaatagctcacttttgaggcctagggttatcggcgagtggatcggccgcgaagagaatgatgctgacccactcgccgccgaaatgttgcagccaccgattccccgtagcaagaatgaccagtgggaaagtgaggactccggtagtagtcctgcgggatctctaaagatggagcctaagaacaagggtctcaaacagcagcagcaacagcacaagaaactgctggccgctatgctgagccaggatagctttgaatcaatccactctcccacccccagcgtaacagaggaagacattgacaacgaggatgatgccatggagttgctaggcaatttcaaaaattag

SEQ ID NO: 75070 - DNA, 864 bp, Artificial Sequence
  derived and/or modified sequence
atggccagccacccccagacccgcatccaggcctacctggagaagaacaagattggccccctgtttgaggagctgatgaccaagctgatcacagagaccccagaccagcccatccccttcctgattgaccacctgcagagcaagcagggcaacagaggccagctgcagaggaccctgagcggcagcgctgccctgtgggccgagagcgagaagtctgagagcaagggcacccggcgggacttccgctcctatgacaagccctggcagctgaatgccaagaagcccaagaagagcaagagtgacctggccgtgagcaacatcagcccccccagcccagacagcaagagcctgcccaggtctgtggagcaccccaagtggaactggaggaccaagccccagagccgggactttgatgagctgaaccacatcctgcaggagagcaagaagctgggcaaggccctggagaacctgagccgcagcatcgccatcagtgatgagctggacaaggagaccgtgaccttcaacagcagcctgctgcggcccagggtcatcggggagtggattggccgggaggagaatgatgctgaccccctggccgctgagatgctgcagccccccatccccaggagcaagaatgaccagtgggagagcgaggacagcggcagcagccctgctggcagcctgaagatggagcccaagaacaagggcctgaagcagcagcagcagcagcacaagaagctgctggccgccatgctgagccaggacagctttgagagcatccacagccccacccccagcgtgacagaggaggacatcgacaatgaagatgatgccatggagctgctgggcaacttcaagaactag

SEQ ID NO: 75071 - DNA, 864 bp, Artificial Sequence
  derived and/or modified sequence
atggccagccacccccagacccggatccaggcctacctggagaagaataagataggcccactgttcgaagagctcatgacaaaactcatcacggagacacctgaccaacccatcccattcctgattgatcaccttcagagcaagcagggaaatcggggtcagttgcaaagaactttgtccgggtcagccgcgttgtgggccgaatccgaaaaaagcgagtcaaaggggacgagacgggatttcaggtcctacgataagccttggcaactgaatgccaagaagcccaaaaagtcaaagagcgacctcgctgtctcaaatatctctcctccctcacctgatagcaagtctctgcctaggtcagtggagcaccctaagtggaactggcgaacaaaacctcagtccagagattttgacgaactgaaccacatcttgcaggagtctaagaaactgggcaaggcactggaaaacctgagccgcagtatcgcaatcagtgacgagctcgacaaagagaccgttacctttaatagctcactgcttcgtccacgagtgataggcgagtggataggccgggaggaaaacgacgcggatcctttggcagcagagatgttgcagccacccatccccagatcaaaaaatgatcaatgggagagcgaggacagcggtagttcaccagcgggcagcctgaagatggaacccaaaaataagggcttgaagcaacagcagcagcagcacaagaaattgctcgcagccatgttgagtcaggactccttcgaatccatacacagtccgacaccatccgtcactgaggaggatatagacaacgaggacgatgctatggaactgctgggaaatttcaaaaactag

SEQ ID NO: 75072 - DNA, 864 bp, Artificial Sequence
  derived and/or modified sequence
atggcatcacatccgcagactcgaattcaggcgtacttagaaaagaacaaaattggacccctgtttgaggagctcatgacaaaactgatcacggagactcccgatcagcctatcccattcctgattgatcatttacagtctaagcagggaaacagaggccagttgcagcggacattatccggcagtgctgcgttgtgggccgaatccgaaaaatccgagtctaagggaacccgaagagatttcagaagttacgataagccttggcaactcaacgcaaaaaagcccaagaaatctaagagcgatctggccgtgtctaatatctccccacctagcccagacagcaaaagcttgccccgtagcgtggagcatcccaaatggaattggcggacaaaaccccaatccagggacttcgatgagcttaatcacatcctccaggagtcaaaaaagctggggaaggccttagaaaacctaagtagaagcatcgccatatctgatgaactggataaggagacggtgacctttaatagttcactgctccgcccaagagttattggcgagtggatcggacgggaggaaaacgacgctgatcccctggcagctgagatgctacagcccccaatacccaggtccaagaatgaccagtgggagagtgaggattcaggctcctctccagccggatcccttaagatggaaccaaaaaacaaagggctgaaacagcaacagcagcaacacaagaagttgctcgccgctatgcttagtcaggactcttttgaatccattcacagtcccacgccctctgtgacagaagaagacatagataatgaggacgatgcgatggagctgttggggaacttcaagaactag

SEQ ID NO: 75073 - protein, 187 aa, Artificial Sequence
  derived and/or modified sequence
MFLLLNCIVAVSQNMGIGKNGDLPRPPLRNEFRYFQRMTTTSSVEGKQNLVIMGRKTWFSIPEKNRPLKDRINLVLSRELKEPPQGAHFLARSLDDALKLTERPELANKVDMIWIVGGSSVYKEAMNHLGHLKLFVTRIMQDFESDTFFSEIDLEKYKLLPEYPGVLSDVQEGKHIKYKFEVCEKDD

SEQ ID NO: 75074 - protein, 114 aa, Artificial Sequence
  derived and/or modified sequence
MFLLLNCIVAVSQNMGIGKNGDLPRPPLRNEFRYFQRMTTTSSVEGKQNLVIMGRKTWFSIPEKNRPLKDRINLVLSRELKEPPQGAHFLARSLDDALKLTERPELANKVDMIW

SEQ ID NO: 75075 - DNA, 564 bp, Artificial Sequence
  derived and/or modified sequence
atgttcctgctgctgaactgcatcgtggccgtgagccagaacatgggcatcggcaagaacggcgacctgcccagaccccccctgagaaacgagttcagatacttccagagaatgaccaccaccagcagcgtggagggcaagcagaacctggtgatcatgggcagaaagacctggttcagcatccccgagaagaacagacccctgaaggacagaatcaacctggtgctgagcagagagctgaaggagcccccccagggcgcccacttcctggccagaagcctggacgacgccctgaagctgaccgagagacccgagctggccaacaaggtggacatgatctggatcgtgggcggcagcagcgtgtacaaggaggccatgaaccacctgggccacctgaagctgttcgtgaccagaatcatgcaggacttcgagagcgacaccttcttcagcgagatcgacctggagaagtacaagctgctgcccgagtaccccggcgtgctgagcgacgtgcaggagggcaagcacatcaagtacaagttcgaggtgtgcgagaaggacgactag

SEQ ID NO: 75076 - DNA, 345 bp, Artificial Sequence
  derived and/or modified sequence
atgttcctgctgctgaactgcatcgtggccgtgagccagaacatgggcatcggcaagaacggcgacctgcccagaccccccctgagaaacgagttcagatacttccagagaatgaccaccaccagcagcgtggagggcaagcagaacctggtgatcatgggcagaaagacctggttcagcatccccgagaagaacagacccctgaaggacagaatcaacctggtgctgagcagagagctgaaggagcccccccagggcgcccacttcctggccagaagcctggacgacgccctgaagctgaccgagagacccgagctggccaacaaggtggacatgatctggtag

SEQ ID NO: 75077 - DNA, 3927 bp, Artificial Sequence
  derived and/or modified sequence
gagatactgatttgctcgcgctatagaattcttgtcgaagaggcttagctcccgcgggagatttcgtgcgcagttacttccggtagctggtaaaggctgatacttcccaggacgcggaggtaacgggccagggccaaagcgactttcgctacttggattggtcggcgtagctttgggcggccggaccttagaaagtcacacatctgcgcgcctgtgcggcccctgcttctgcggatgctgaggcacgtaaaaaaatttgaagaagggaatttcgcggcattcttggcctggcttcctggcgtagccagcaagttcggaggtgttaaccgctgctgtcatgtttcttttgctaaactgcatcgtcgctgtgtcccaaaacatgggcatcggcaagaacggggacctgcccaggccgccgctcaggaatgaattcaggtatttccagagaatgaccacaacttcttcagtagagggtaaacagaatctggtgattatgggtaggaagacctggttctccattcctgagaagaatcgacctttaaaggatagaattaatttagttctcagcagagaactcaaggaacctccacaaggagctcattttcttgccagaagtttggatgatgccttaaaacttactgaacgaccagaattagcaaataaagtagacatgatttggatagttggtggcagttctgtttataaggaagccatgaatcacctaggccatcttaaactatttgtgacaaggatcatgcaggactttgaaagtgacacgtttttttcagaaattgacttggagaaatataaacttctgcctgaatacccaggtgttctctctgatgtccaggaggggaaacacatcaagtacaaatttgaagtatgtgagaaggatgattaatatgaaggtgttttctggtttaagttgttccccctccctctgagaaaagtatgcatttttacattagaaaagggacttttgttgacttcagatctatggataattatttctaagcaacgtgtttttattcctcactaatcttggctatatcagataccatttatgaaacattcttgctataactgtctctccaagaccccgactgagtccccagcacctgctacagtgagctgccattccacacccatcacatgtggcactcttgccactccttgacattgtcaggcttttctaatgttggtagtatttattaaagatgaagatgcacatacccttcagctgagcagtttcactagtaggaaataccaaaagcttcgtacatgtatatccagaggtttgtagacaaatgttgcagccttttttgtaacagtgaaaaactgaaaacaacctggaagtccagtgatgggaaaatgaatatatttctgtcttagattggggaacccaaagcagattccaagactgaaatttaagtgaaagcagtttatttgctaggtcataccagaagtcatcaatcgaagtatggagaaatggaactgagaaggtaaaaaccagttcaaaatcagtgaggaggttctcaatggtaacgagctccatactgctgagatacagggaaacggaggggagaaagctagagtatttaacccccactccttggttgtcagctccctgtcctgtgtgtgggcagaacgtactccacctactcaatagcaagttccaggtgtttgctgaaagaagctgctgtaatgtacgggaacggtgaatgccaaacacttaaagcaattccatgtttaagtatgtaaactcttcatacttttttttttttttctttttaagacagaatttcactcttgttgcccaggcggagtgcaatggaacaaccttggctcacggcaacttcagccttcccaggttcaagcaattctcctgcctcaggctcctgggtggctgggactacaggcgcgtgccaccacgccaggctaattttgtatttttggtggggacattccatgttggtcaggctagtctcgaactcctgacctcaggtgatcctcctgcctcggccttcaggggtgctgggattacaggcatcagccactgcacttggcagatcttcattcttttagtaaaaagtataaagccacacatggtttatttgaaatattttataatttaaaaaagtacagaagcaggaaaaccaattctaggttcaagtgagggatgatggtagtttgaaccaaaggattgcatgtggtaagaaattgtgatttaagatatattttaaagttggaagtagcaggatattctgatggagtttgactttggttttgggcccactgagtttgagatgcctttgagaaatgaaagaagtagagagagaattaaaaactggccaggagtggtggctcacgcctgtggtcccagcactttggggggctgaggtgggtggatcacctgagaccagcttgggcaacatggtggagccctgtctctacagaagatacaaaaattggctgggcattgtggcacacacctgtagtctcgtctactcacggggctgagatggaggattcaattgagcccatgagttcaaggctgcagtgagtcgtgattttgccactgcactcctgcctgggtgacagaagagaccctgtctcaaaaaagaatctgaaaacaacggaaccatgccttcagaattctataaagttattttcaactgataaatctatattcaggcaaagaatcaagggtgaaggtaaaataatacatttttagacaagcaaagactcaggggttacatgtaccctttcttgggaagctatcggagaaaatactccagcaaaatgaaggcgtacacaaaccagagaatgacgtggatccagcaaatagtatccaacacaggcaatattccagctatggagctagctttaaaaagaaacagtaaaaatactaatagattagctgggtgggatggcccatgcttgtagtcccagctactcaggaggctaagcaaaaggatggcttgagcccaagagttcagagcagcctggccaccatagtgagatcccttctcttaaaaataataggttattgccagatttggggcatttggaaagaagtgcattgaagataaagcaaaagtaaaaaaaaaaaaaaacaaaaaaaaacaagggggaagggttggttaggcaataattaattctagggcaggaagaagtacaggataggaagtaagagcatcatacgctgtttttctcaacaatgggcaatatgtacatagtcataatgatgtggtgactgactgcttagcccctaaatctggtaactactttgggacaatatggggggaaaagtgaagatagtgatggtgtaagagctaaatcctcatctgtcatatcaagaaatcactatataatgtataacataatcaagaaatgactaagtagttatgtgaagaaaagaatggaacattgctagaagagttagaagtcattgctccagagaattaggagggatggggcaggggactgttaggatgcattataaactgaagaggcttttaaagattacatgtattaatatatgtattcacttgaaaaactaaaaaaatagtaattttttaaaacccatggaggtaactaccagaaggaaaaactaagagaatgaaaagtgctttcctctggaaagaacaagtcgcaggactgttttcattgtaagacttttggagccatttgattttacttaaccattttcatatatttctttaataaaaataattctatcttaataaaaagttacactcattcattaaaaaaagaattttaagactgtaataagaatcatagtttatttctgttagagaaaggcaatgtgttatacttggaaagaggtcatattaattttatcacatttttgggactcagcatctttatattttctgattttaaataaacaactttgcttatgaa

SEQ ID NO: 75078 - DNA, 4038 bp, Artificial Sequence
  derived and/or modified sequence
atcccagcaccctccctcgccacctcggccgcgtccagaagcgtctcattcagatagaggtacccagccgggccccaggtctcacctgggtcagcattgtcccgctgagagctttcaaacaacaggtgtacgcgaatcagtatcaaaaagcctccagggaactgaaaaaaacagtctgacttccgggattcgcgggcatccactttcattctcacgtttcctcttcaatttctcgcgagatactgatttgctcgcgctatagaattcttgtcgaagaggcttagctcccgcgggagatttcgtgcgcagttacttccggtagctggtaaaggctgatacttcccaggacgcggaggcacgtaaaaaaatttgaagaagggaatttcgcggcattcttggcctggcttcctggcgtagccagcaagttcggaggtgttaaccgctgctgtcatgtttcttttgctaaactgcatcgtcgctgtgtcccaaaacatgggcatcggcaagaacggggacctgcccaggccgccgctcaggaatgaattcaggtatttccagagaatgaccacaacttcttcagtagagggtaaacagaatctggtgattatgggtaggaagacctggttctccattcctgagaagaatcgacctttaaaggatagaattaatttagttctcagcagagaactcaaggaacctccacaaggagctcattttcttgccagaagtttggatgatgccttaaaacttactgaacgaccagaattagcaaataaagtagacatgatttggatagttggtggcagttctgtttataaggaagccatgaatcacctaggccatcttaaactatttgtgacaaggatcatgcaggactttgaaagtgacacgtttttttcagaaattgacttggagaaatataaacttctgcctgaatacccaggtgttctctctgatgtccaggaggggaaacacatcaagtacaaatttgaagtatgtgagaaggatgattaatatgaaggtgttttctggtttaagttgttccccctccctctgagaaaagtatgcatttttacattagaaaagggacttttgttgacttcagatctatggataattatttctaagcaacgtgtttttattcctcactaatcttggctatatcagataccatttatgaaacattcttgctataactgtctctccaagaccccgactgagtccccagcacctgctacagtgagctgccattccacacccatcacatgtggcactcttgccactccttgacattgtcaggcttttctaatgttggtagtatttattaaagatgaagatgcacatacccttcagctgagcagtttcactagtaggaaataccaaaagcttcgtacatgtatatccagaggtttgtagacaaatgttgcagccttttttgtaacagtgaaaaactgaaaacaacctggaagtccagtgatgggaaaatgaatatatttctgtcttagattggggaacccaaagcagattccaagactgaaatttaagtgaaagcagtttatttgctaggtcataccagaagtcatcaatcgaagtatggagaaatggaactgagaaggtaaaaaccagttcaaaatcagtgaggaggttctcaatggtaacgagctccatactgctgagatacagggaaacggaggggagaaagctagagtatttaacccccactccttggttgtcagctccctgtcctgtgtgtgggcagaacgtactccacctactcaatagcaagttccaggtgtttgctgaaagaagctgctgtaatgtacgggaacggtgaatgccaaacacttaaagcaattccatgtttaagtatgtaaactcttcatacttttttttttttttctttttaagacagaatttcactcttgttgcccaggcggagtgcaatggaacaaccttggctcacggcaacttcagccttcccaggttcaagcaattctcctgcctcaggctcctgggtggctgggactacaggcgcgtgccaccacgccaggctaattttgtatttttggtggggacattccatgttggtcaggctagtctcgaactcctgacctcaggtgatcctcctgcctcggccttcaggggtgctgggattacaggcatcagccactgcacttggcagatcttcattcttttagtaaaaagtataaagccacacatggtttatttgaaatattttataatttaaaaaagtacagaagcaggaaaaccaattctaggttcaagtgagggatgatggtagtttgaaccaaaggattgcatgtggtaagaaattgtgatttaagatatattttaaagttggaagtagcaggatattctgatggagtttgactttggttttgggcccactgagtttgagatgcctttgagaaatgaaagaagtagagagagaattaaaaactggccaggagtggtggctcacgcctgtggtcccagcactttggggggctgaggtgggtggatcacctgagaccagcttgggcaacatggtggagccctgtctctacagaagatacaaaaattggctgggcattgtggcacacacctgtagtctcgtctactcacggggctgagatggaggattcaattgagcccatgagttcaaggctgcagtgagtcgtgattttgccactgcactcctgcctgggtgacagaagagaccctgtctcaaaaaagaatctgaaaacaacggaaccatgccttcagaattctataaagttattttcaactgataaatctatattcaggcaaagaatcaagggtgaaggtaaaataatacatttttagacaagcaaagactcaggggttacatgtaccctttcttgggaagctatcggagaaaatactccagcaaaatgaaggcgtacacaaaccagagaatgacgtggatccagcaaatagtatccaacacaggcaatattccagctatggagctagctttaaaaagaaacagtaaaaatactaatagattagctgggtgggatggcccatgcttgtagtcccagctactcaggaggctaagcaaaaggatggcttgagcccaagagttcagagcagcctggccaccatagtgagatcccttctcttaaaaataataggttattgccagatttggggcatttggaaagaagtgcattgaagataaagcaaaagtaaaaaaaaaaaaaaacaaaaaaaaacaagggggaagggttggttaggcaataattaattctagggcaggaagaagtacaggataggaagtaagagcatcatacgctgtttttctcaacaatgggcaatatgtacatagtcataatgatgtggtgactgactgcttagcccctaaatctggtaactactttgggacaatatggggggaaaagtgaagatagtgatggtgtaagagctaaatcctcatctgtcatatcaagaaatcactatataatgtataacataatcaagaaatgactaagtagttatgtgaagaaaagaatggaacattgctagaagagttagaagtcattgctccagagaattaggagggatggggcaggggactgttaggatgcattataaactgaagaggcttttaaagattacatgtattaatatatgtattcacttgaaaaactaaaaaaatagtaattttttaaaacccatggaggtaactaccagaaggaaaaactaagagaatgaaaagtgctttcctctggaaagaacaagtcgcaggactgttttcattgtaagacttttggagccatttgattttacttaaccattttcatatatttctttaataaaaataattctatcttaataaaaagttacactcattcattaaaaaaagaattttaagactgtaataagaatcatagtttatttctgttagagaaaggcaatgtgttatacttggaaagaggtcatattaattttatcacatttttgggactcagcatctttatattttctgattttaaataaacaactttgcttatg

SEQ ID NO: 75079 - DNA, 1831 bp, Artificial Sequence
  derived and/or modified sequence
ggtaaaggctgatacttcccaggacgcggaggcacgtaaaaaaatttgaagaagggaatttcgcggcattcttggcctggcttcctggcgtagccagcaagttcggaggtgttaaccgctgctgtcatgtttcttttgctaaactgcatcgtcgctgtgtcccaaaacatgggcatcggcaagaacggggacctgcccaggccgccgctcaggaatgaattcaggtatttccagagaatgaccacaacttcttcagtagagggtaaacagaatctggtgattatgggtaggaagacctggttctccattcctgagaagaatcgacctttaaaggatagaattaatttagttctcagcagagaactcaaggaacctccacaaggagctcattttcttgccagaagtttggatgatgccttaaaacttactgaacgaccagaattagcaaataaagtagacatgatttggatagttggtggcagttctgtttataaggaagccatgaatcacctaggccatcttaaactatttgtgacaaggatcatgcaggactttgaaagtgacacgtttttttcagaaattgacttggagaaatataaacttctgcctgaatacccaggtgttctctctgatgtccaggaggggaaacacatcaagtacaaatttgaagtatgtgagaaggatgattaatatgaaggtgttttctggtttaagttgttccccctccctctgagaaaagtatgcatttttacattagaaaagggacttttgttgacttcagatctatggataattatttctaagcaacgtgtttttattcctcactaatcttggctatatcagataccatttatgaaacattcttgctataactgtctctccaagaccccgactgagtccccagcacctgctacagtgagctgccattccacacccatcacatgtggcactcttgccactccttgacattgtcaggcttttctaatgttggtagtatttattaaagatgaagatgcacatacccttcagctgagcagtttcactagtaggaaataccaaaagcttcgtacatgtatatccagaggtttgtagacaaatgttgcagccttttttgtaacagtgaaaaactgaaaacaacctggaagtccagtgatgggaaaatgaatatatttctgtcttagattggggaacccaaagcagattccaagactgaaatttaagtgaaagcagtttatttgctaggtcataccagaagtcatcaatcgaagtatggagaaatggaactgagaaggtaaaaaccagttcaaaatcagtgaggaggttctcaatggtaacgagctccatactgctgagatacagggaaacggaggggagaaagctagagtatttaacccccactccttggttgtcagctccctgtcctgtgtgtgggcagaacgtactccacctactcaatagcaagttccaggtgtttgctgaaagaagctgctgtaatgtacgggaacggtgaatgccaaacacttaaagcaattccatgtttaagtatgtaaactcttcatacttttttttttttttctttttaagacagaatttcactcttgttgcccaggcggagtgcaatggaacaaccttggctcacggcaacttcagccttcccagctactcaggaggctaagcaaaaggatggcttgagcccaagagttcagagcagcctggccaccatagtgagatcccttctcttaaaaataataggttattgccagatttggggcatttggaaagaagtgcattgaagataaagcaaaagtaaaaaaaaaaaaaaacaaaaaaa

SEQ ID NO: 75080 - DNA, 591 bp, Artificial Sequence
  derived and/or modified sequence
aaaacaaatctcagccctccaagagctggagggagtgggtactagaagtctgcgagctggacggaagggactcagcattacagcactcagcattatttcagggcttgacagtaaagccaaagaaacgctgatctcgcgaggggacgaacaaaggcacgtaaaaaaatttgaagaagggaatttcgcggcattcttggcctggcttcctggcgtagccagcaagttcggaggtgttaaccgctgctgtcatgtttcttttgctaaactgcatcgtcgctgtgtcccaaaacatgggcatcggcaagaacggggacctgcccaggccgccgctcaggaatgaattcaggtatttccagagaatgaccacaacttcttcagtagagggtaaacagaatctggtgattatgggtaggaagacctggttctccattcctgagaagaatcgacctttaaaggatagaattaatttagttctcagcagagaactcaaggaacctccacaaggagctcattttcttgccagaagtttggatgatgccttaaaacttactgaacgaccagaattagcaaataaagtagacatgatttgga

SEQ ID NO: 75081 - DNA, 564 bp, Artificial Sequence
  derived and/or modified sequence
atgtttctcctgctaaattgcatcgtggctgtttctcagaacatgggtattggaaagaacggggatctgcctcggcctcctctacggaatgaattcaggtacttccagcgcatgacgaccacatcttcggtggagggaaaacaaaatcttgtaatcatgggaagaaagacttggtttagcattcccgagaaaaatcgtcctctcaaagatcgaatcaatctggtgttatctagagaactcaaagagcctccgcagggcgcccatttcctggcacggtccctggacgatgccctgaagctcactgaacgacccgagctcgccaacaaggtggatatgatttggattgttggtgggtcctctgtctacaaagaggcgatgaaccacctaggtcaccttaaactctttgtcaccaggataatgcaggacttcgagagcgatacgttctttagcgaaatagatcttgagaagtacaaattgttgccagagtaccccggggttctgagtgacgtgcaagaggggaaacatattaaatacaagtttgaggtttgtgagaaagacgattag

SEQ ID NO: 75082 - DNA, 564 bp, Artificial Sequence
  derived and/or modified sequence
atgttcctcctgttgaactgcatagtcgccgttagccaaaacatgggcattggaaagaacggagatttgcccaggccaccactgagaaatgaatttcgttacttccaaaggatgacgacaaccagctctgtggaaggtaagcagaatcttgttattatgggacgcaaaacatggttctccattccggagaaaaataggcctttgaaggatcgaattaacctggtgctgagtcgggagctgaaagaaccaccacagggggcgcacttcctagcccgctcccttgatgatgcactgaaactcaccgaaaggcccgagctggcgaacaaggtggacatgatttggattgtcggtggttcaagcgtctataaggaggctatgaatcacctcggtcatcttaagctctttgtgaccaggatcatgcaggattttgaaagcgatacattcttttctgagattgatctcgaaaagtataagctgctgccggagtaccctggcgtcctgagtgacgtccaggaagggaagcacattaaatataagtttgaagtctgtgagaaggatgactag

SEQ ID NO: 75083 - DNA, 564 bp, Artificial Sequence
  derived and/or modified sequence
atgtttttactgttaaattgcatagtcgccgtgtcacagaacatgggaattggaaagaacggtgacctaccccgcccccccctgaggaacgaattccggtacttccagagaatgaccaccacatcttcagtcgaagggaagcaaaaccttgtgatcatgggacgaaagacatggttttccattccagaaaagaatcgaccactcaaggaccggatcaatctggttctgtcccgggaactgaaagaacccccacaaggagctcactttctggcacgatctctggacgatgcactgaagctaaccgaaagacccgaactggcaaacaaagtggacatgatctggatagtgggcggctctagcgtgtataaggaagccatgaatcatctcggccacctgaagctgttcgttacaagaatcatgcaggattttgaatccgacacttttttctccgagatcgacttggagaaatacaagcttctgcctgaatatcctggggtcttaagcgatgtgcaggagggaaagcacataaaatataagtttgaagtgtgcgagaaggacgattag

SEQ ID NO: 75084 - DNA, 345 bp, Artificial Sequence
  derived and/or modified sequence
atgtttctcttgttgaactgtattgtcgcagtttctcagaatatgggaattggtaagaacggcgatctgccacggccacctctgcggaacgagttccggtattttcagaggatgactactacatccagtgtggaagggaaacagaatttggtcataatggggcgaaagacttggttctccattcccgagaagaacaggcctttaaaagacagaattaaccttgtgctgtctcgggagcttaaggaaccaccacagggggctcattttctggcccgctctcttgacgacgccctgaaactaacggaaagaccggagctggcaaataaggtggatatgatctggtag

SEQ ID NO: 75085 - DNA, 564 bp, Artificial Sequence
  derived and/or modified sequence
atgttcctgctgctgaactgcatcgtggccgtgtcccagaacatgggcatcggcaagaatggagacctgccccggccccccctgagaaatgagttccgctacttccagaggatgaccaccaccagctctgtggagggcaagcagaacctggtgatcatgggcaggaagacctggttcagcatccctgagaagaaccggcccctgaaggaccgcatcaacctggtgctgagccgggagctgaaggagcccccccagggcgcccacttcctggcccggagcctggatgatgccctgaagctgacagagaggcctgagctggccaacaaggtggacatgatctggatcgtgggcggcagctctgtgtacaaggaggccatgaaccacctgggccacctgaagctgtttgtgacccgcatcatgcaggactttgaaagtgacaccttcttcagcgagattgacctggagaagtacaagctgctgcctgagtacccaggagtgctgagtgatgtgcaggagggcaagcacatcaagtacaagtttgaggtgtgtgagaaggatgactag

SEQ ID NO: 75086 - DNA, 345 bp, Artificial Sequence
  derived and/or modified sequence
atgttcctgctgctgaactgcatcgtggccgtgtcccagaacatgggcatcggcaagaatggagacctgccccggccccccctgagaaatgagttccgctacttccagaggatgaccaccaccagctctgtggagggcaagcagaacctggtgatcatgggcaggaagacctggttcagcatccctgagaagaaccggcccctgaaggaccgcatcaacctggtgctgagccgggagctgaaggagcccccccagggcgcccacttcctggcccggagcctggatgatgccctgaagctgacagagaggcctgagctggccaacaaggtggacatgatctggtag

SEQ ID NO: 75087 - DNA, 564 bp, Artificial Sequence
  derived and/or modified sequence
atgttcctgctgctgaactgcatcgtggccgtgagccagaacatgggaatcgggaagaacggcgacctgccccggccccctttgcgaaatgagttccggtatttccaacggatgaccacaacttcatctgtggaagggaagcagaaccttgtgataatgggccgtaagacttggttcagcatccccgaaaagaacagacctttgaaggacagaatcaatctcgtcttgagtcgcgaactgaaggagccaccccaaggggcccactttctggcccggagcttggacgatgccctaaagctgaccgaacgaccagaactggctaacaaggtggacatgatctggatcgttggcggctcctcagtgtataaggaggctatgaaccacctcggacatttgaagcttttcgttacaaggataatgcaggacttcgagtctgacacatttttttccgaaatcgacctcgagaagtataaactgctacccgagtatcccggtgtgctgtccgacgtgcaggaagggaagcacattaaatacaaatttgaggtctgcgaaaaagatgattag

SEQ ID NO: 75088 - DNA, 564 bp, Artificial Sequence
  derived and/or modified sequence
atgttcctgctgctgaactgcatcgtggccgtgagccagaacatggggatcggaaaaaatggggacctgcctcgacccccactacgcaacgagttcaggtactttcagagaatgaccactacctctagcgtcgagggcaaacagaacttagtgattatggggaggaagacttggtttagtatccctgagaaaaaccgtcctttgaaagatcgcattaatctggttttgtccagagagctcaaggagccccctcaaggcgcgcacttcctggcccggagcctggacgacgcattaaagttaacggaaaggcccgagctcgcaaacaaggtggatatgatttggatcgtcgggggttccagcgtttacaaggaagctatgaaccatctgggacacctgaaactctttgttaccaggataatgcaggacttcgagagcgacactttcttttccgaaatcgatttggagaagtacaagctcctcccagagtaccccggcgtgctgtctgatgtccaggagggcaaacatattaagtacaaatttgaagtctgcgagaaagatgactag

SEQ ID NO: 75089 - DNA, 564 bp, Artificial Sequence
  derived and/or modified sequence
atgttcctgctgctgaactgcatcgtggccgtgagccagaacatgggaattggcaagaatggggatttgcctaggccgccactcaggaatgagttcagatatttccagaggatgacaaccactagcagcgtggagggaaagcagaacttagtcatcatgggtcgcaagacgtggttctcaattcctgagaaaaaccgtcccctgaaggaccgcatcaacctcgtgctgtctagggagctgaaggagcctccacaaggagcgcactttctagccagatcactggacgatgctttgaagcttacagaacggccagagttggccaacaaggtggatatgatttggattgttggcggatcgagcgtatacaaagaagccatgaaccaccttggtcacctgaagctctttgtgacgaggatcatgcaggactttgagtccgacacctttttctcagagattgaccttgaaaaatataaattgttgcctgaatatccaggcgtactctccgacgtgcaggaggggaaacatatcaagtataaatttgaagtgtgcgagaaagacgattag

SEQ ID NO: 75090 - DNA, 345 bp, Artificial Sequence
  derived and/or modified sequence
atgttcctgctgctgaactgcatcgtggccgtgagccagaacatgggtatcgggaagaatggagatttgcctagaccaccacttcggaacgagtttaggtatttccagcggatgacaacgacctcttccgtcgaaggtaaacaaaacctcgtgatcatgggccggaaaacatggttcagtatacctgaaaagaatcgacccctgaaagatcgaattaatctcgtgttgtccagagagctgaaggagcccccgcagggtgcgcacttcctggcaagaagcttagacgatgctctaaagctcacagaacgacccgagctggctaacaaagttgacatgatttggtag

SEQ ID NO: 75091 - DNA, 564 bp, Artificial Sequence
  derived and/or modified sequence
atgtttctgctcctgaattgcattgtggcagtctcgcagaatatggggatcggaaaaaatggcgacctccccagaccccctcttaggaatgaattccgctatttccagcgcatgacaacaacctcctctgtggaaggcaaacagaaccttgttataatgggcagaaaaacttggttcagcattccagaaaagaatcggccactaaaagacaggatcaatctggtgctctcacgggaattgaaagaaccaccccagggggcacactttctagcccgtagcttggatgacgccctaaagctgaccgagcggccagagctcgctaataaggtggacatgatttggatcgtgggtggatcttcagtctataaagaagccatgaatcatcttggtcatcttaagctgtttgttacccgaataatgcaggatttcgagtccgatacatttttcagtgaaattgatctggagaaatacaaactgttgcccgagtatcctggagtccttagcgatgtgcaggaaggtaaacacattaagtacaaattcgaggtgtgcgagaaggacgactag

SEQ ID NO: 75092 - DNA, 564 bp, Artificial Sequence
  derived and/or modified sequence
atgtttttacttctcaactgcatcgtagcagtgtcccagaacatgggcatcgggaagaacggagatctccccagacctcctctgagaaatgaatttcgctattttcagcgcatgaccacaaccagctccgtggagggcaagcagaacctagtgattatgggaagaaaaacttggttttccataccagaaaagaatcgccctcttaaggatcggataaacctggtcctcagccgtgaacttaaggaaccgcctcaaggcgcacacttcctggcacggagtctggacgacgctctcaaacttaccgaacgccctgagctagccaacaaagtcgacatgatctggatcgtgggagggagttccgtgtataaggaagcaatgaaccatttggggcaccttaaactcttcgtgacacgaataatgcaggactttgaaagcgacacctttttttcagagatcgacctggagaaatacaagctgttgcccgagtacccaggggttctcagcgacgtacaggaaggaaagcacatcaagtataaatttgaggtgtgcgaaaaggacgactag

SEQ ID NO: 75093 - DNA, 564 bp, Artificial Sequence
  derived and/or modified sequence
atgttccttttactgaactgcatagtggcggtctcccagaatatgggaataggcaaaaatggtgacttgccacgcccaccgttgaggaacgaattccggtattttcagcgcatgactactacaagttctgtagaaggtaaacaaaaccttgttatcatggggagaaagacctggttcagcattccagaaaagaatcggccattgaaggaccgcatcaatcttgtgctgtctcgtgagttgaaagagccacctcagggcgctcattttttggctcgtagccttgacgatgcactcaaactgacggagcggccagagcttgctaataaagtggacatgatctggatcgtggggggttcttccgtatataaggaggccatgaatcatttaggccacctgaaattgtttgtcaccagaattatgcaggatttcgaatccgacactttcttcagtgaaattgatctcgagaagtacaaactcctccctgaataccccggagtgttgagcgatgtacaggaggggaaacacattaaatacaaattcgaggtgtgcgaaaaggacgattag

SEQ ID NO: 75094 - DNA, 345 bp, Artificial Sequence
  derived and/or modified sequence
atgttcctgcttctgaattgcatcgtagccgtcagccagaatatgggcatcggaaagaatggcgatctcccgaggcctccactgcggaacgagtttcgctactttcaacgaatgaccaccactagcagtgtggagggtaaacaaaacttagtcattatgggtcgcaagacttggtttagcatccccgaaaagaataggcccctgaaggacagaattaacttggtactgtcccgcgagttgaaggagccacctcaaggtgcccactttttagcccgttcactggacgacgccctgaaactgaccgaaagaccagaactggctaataaagtggacatgatttggtag

SEQ ID NO: 75095 - protein, 502 aa, Artificial Sequence
  derived and/or modified sequence
MDEESLESALQTYRAQLQQVELALGAGLDSSEQADLRQLQGDLKELIELTEASLVSVRKSSLLAALDEERPGRQEDAEYQAFREAITEAVEAPAAARGSGSETVPKAEAGPESAAGGQEEEEGEDEEELSGTKVSAPYYSSWGTLEYHNAMVVGTEEAEDGSAGVRVLYLYPTHKSLKPCPFFLEGKCRFKENCRFSHGQVVSLDELRPFQDPDLSSLQAGSACLAKHQDGLWHAARITDVDNGYYTVKFDSLLLREAVVEGDGILPPLRTEATESDSDSDVVGSDAVDSGTCSSAFAGWEVHTRGIGSRLLTKMGYEFGKGLGRHAEGRVEPIHAVVLPRGKSLDQCVETLQKQTRVGKAGTNKPPRCRGRGARPGGRPAPRNVFDFLNEKLQGQAPGALEAGAAPAGRRSKDMYHASKSAKRALSLRLFQTEEKIERTQRDIRSIQEALARNAGRHSVASAQLQEKLAGAQRQLGQLRAQEAGLQQEQRKADTHKKMTEF

SEQ ID NO: 75096 - DNA, 1509 bp, Artificial Sequence
  derived and/or modified sequence
atggacgaggagagcctggagagcgccctgcagacctacagagcccagctgcagcaggtggagctggccctgggcgccggcctggacagcagcgagcaggccgacctgagacagctgcagggcgacctgaaggagctgatcgagctgaccgaggccagcctggtgagcgtgagaaagagcagcctgctggccgccctggacgaggagagacccggcagacaggaggacgccgagtaccaggccttcagagaggccatcaccgaggccgtggaggcccccgccgccgccagaggcagcggcagcgagaccgtgcccaaggccgaggccggccccgagagcgccgccggcggccaggaggaggaggagggcgaggacgaggaggagctgagcggcaccaaggtgagcgccccctactacagcagctggggcaccctggagtaccacaacgccatggtggtgggcaccgaggaggccgaggacggcagcgccggcgtgagagtgctgtacctgtaccccacccacaagagcctgaagccctgccccttcttcctggagggcaagtgcagattcaaggagaactgcagattcagccacggccaggtggtgagcctggacgagctgagacccttccaggaccccgacctgagcagcctgcaggccggcagcgcctgcctggccaagcaccaggacggcctgtggcacgccgccagaatcaccgacgtggacaacggctactacaccgtgaagttcgacagcctgctgctgagagaggccgtggtggagggcgacggcatcctgccccccctgagaaccgaggccaccgagagcgacagcgacagcgacgtggtgggcagcgacgccgtggacagcggcacctgcagcagcgccttcgccggctgggaggtgcacaccagaggcatcggcagcagactgctgaccaagatgggctacgagttcggcaagggcctgggcagacacgccgagggcagagtggagcccatccacgccgtggtgctgcccagaggcaagagcctggaccagtgcgtggagaccctgcagaagcagaccagagtgggcaaggccggcaccaacaagccccccagatgcagaggcagaggcgccagacccggcggcagacccgcccccagaaacgtgttcgacttcctgaacgagaagctgcagggccaggcccccggcgccctggaggccggcgccgcccccgccggcagaagaagcaaggacatgtaccacgccagcaagagcgccaagagagccctgagcctgagactgttccagaccgaggagaagatcgagagaacccagagagacatcagaagcatccaggaggccctggccagaaacgccggcagacacagcgtggccagcgcccagctgcaggagaagctggccggcgcccagagacagctgggccagctgagagcccaggaggccggcctgcagcaggagcagagaaaggccgacacccacaagaagatgaccgagttctag

SEQ ID NO: 75097 - DNA, 294 bp, Artificial Sequence
  derived and/or modified sequence
atggacgaggagagcctggagagcgccctgcagacctacagagcccagctgcagcaggtggagctggccctgggcgccggcctggacagcagcgagcaggccgacctgagacagctgcagggcgacctgaaggagctgatcgagctgaccgaggccagcctggtgagcgtgagaaagagcagcctgctggccgccctggacgaggagagacccggcagacaggaggacgccgagtaccaggccttcagagaggccatcaccgaggccgtggaggcccccgccgccgccagatag

SEQ ID NO: 75098 - DNA, 1509 bp, Artificial Sequence
  derived and/or modified sequence
atggatgaggagagtttagagtcagccctccaaacttatagagcccagttgcaacaggtcgagctggctctgggcgcaggcctggattcatctgaacaggccgaccttcggcagctccaaggagatcttaaggaactgatcgaattgactgaggcctctctcgtgtctgtcagaaagtcctctctcctcgcagcactggatgaagagcgccctgggcgacaggaggacgccgaatatcaagcattccgcgaggctatcaccgaagcagtggaagctcctgccgcagcgcgcgggtcagggtccgagaccgtgccaaaagcagaagccggcccagagagtgccgcaggcggccaggaggaggaggagggtgaggacgaagaagagctaagtgggaccaaggtctcagctccatactattcctcctggggcaccttagaataccataatgccatggttgtcggcaccgaagaggcagaagatggatcagccggcgtccgagtcctgtatctgtaccctacacataagtctctcaaaccctgtccgttttttctcgagggaaaatgcaggtttaaagaaaattgcaggtttagtcatgggcaggtggtctctcttgacgagctgcgcccatttcaggatcctgatttgtcaagcctccaggcaggctccgcatgcctggccaaacatcaagacggactatggcacgcagccaggattaccgatgtggacaatggatattacactgttaagtttgactccctgctccttagggaggcagtcgttgagggcgacggcatcctcccacccctgaggaccgaagcgaccgaatccgacagcgactctgacgtcgtgggcagcgatgcggttgactctgggacttgctcttccgccttcgctgggtgggaagtgcatacccgaggcattgggagtcgattgctcacaaagatgggctacgagtttggtaagggcttggggcggcacgctgaagggcgtgttgaacctatccacgcggtagtgttgcctcgtggcaagtcccttgaccagtgcgtcgaaactctgcaaaagcagacgcgggtagggaaagctggcactaacaaaccaccaaggtgccggggaaggggggcccgacccggcgggcggccagcacctagaaacgtgttcgattttctcaacgagaaattgcaagggcaggcccctggtgctttagaggctggcgcagcaccagccggccgccgatccaaggacatgtaccacgctagcaagagtgccaaaagggctctctccttgaggctctttcagactgaagagaaaatcgagcggacacagcgcgatatccgtagtatccaggaggctcttgctagaaatgccgggcgccactcggtggcatccgcccagctgcaggaaaaactagcaggcgctcaacgccagctagggcagctgcgcgctcaggaggccggtctgcagcaggaacagagaaaagccgacacccataagaagatgaccgaattttag

SEQ ID NO: 75099 - DNA, 294 bp, Artificial Sequence
  derived and/or modified sequence
atggacgaggaaagcctggaatctgccctccaaacgtaccgtgcgcagctgcagcaggtcgagctcgccttaggagccggtctcgactcctcagaacaagcagatttgaggcagctgcagggcgaccttaaggagctgatcgaactgactgaggcgtcgctggtatcagtccgaaaatcttcacttctagctgctctggatgaggagagaccaggaaggcaggaggacgcagaataccaggctttccgggaagctatcactgaagctgttgaggccccagctgcagcacgatag

SEQ ID NO: 75100 - DNA, 1509 bp, Artificial Sequence
  derived and/or modified sequence
atggatgaggagagcctggagagcgccctgcagacctaccgggcccagctgcagcaggtggagctggccctgggcgccggcctggacagcagcgagcaggccgacctgcggcagctgcagggcgacctgaaggagctgattgagctgacagaggccagcctggtgtctgtgaggaagagcagcctgctggccgccctggatgaggagaggcctggccggcaggaggatgctgagtaccaggccttccgggaggccatcacagaagctgtggaggccccagctgctgcccggggcagcggcagcgagaccgtgcccaaggccgaggccggccctgagagcgctgctgggggccaggaggaggaggagggggaggatgaggaggagctgagcggcaccaaggtgtctgccccctactacagctcctggggcaccctggagtaccacaatgccatggtggtgggcacagaggaggctgaagatggcagcgctggggtgcgggtgctgtacctgtaccccacccacaagagcctgaagccctgccccttcttcctggagggcaaatgtcgcttcaaggagaactgccgcttcagccacggccaggtggtgtccctggatgagctgcggcccttccaggaccctgacctgagcagcctgcaggccggcagcgcctgcctggccaagcaccaggacggcctgtggcatgctgcccgcatcacagatgtggacaatggctactacacagtgaagtttgacagcctgctgctgcgggaggccgtggtggagggagatggcatcctgccccccctgaggacagaggccacagaaagtgacagcgacagtgatgtggtgggcagtgatgctgtggacagcggcacctgcagcagcgcctttgctggctgggaggtgcacacccggggcatcggcagccggctgctgaccaagatgggctatgaatttgggaagggcctgggcagacatgctgagggccgggtggagcccatccatgctgtggtgctgccccggggcaagagcctggaccagtgtgtggagaccctgcagaagcagaccagggtgggcaaggccggcaccaacaagccaccccgctgccggggccgcggggcccggcctgggggccggcctgcccccagaaatgtgtttgacttcctgaatgagaagctgcagggccaggcccctggggccctggaggccggggccgccccagctggccgccgcagcaaggacatgtaccacgccagcaagagcgccaagagggccctgagcctgcggctcttccagacagaggagaagattgaaagaacccagagggacatccgcagcatccaggaggccctggccagaaatgccggccgccacagcgtggccagcgcccagctgcaggagaagctggccggggcccagaggcagctgggccagctgcgggcccaggaggccggcctgcagcaggagcagaggaaggctgacacccacaagaagatgacagagttctag

SEQ ID NO: 75101 - DNA, 294 bp, Artificial Sequence
  derived and/or modified sequence
atggatgaggagagcctggagagcgccctgcagacctaccgggcccagctgcagcaggtggagctggccctgggcgccggcctggacagcagcgagcaggccgacctgcggcagctgcagggcgacctgaaggagctgattgagctgacagaggccagcctggtgtctgtgaggaagagcagcctgctggccgccctggatgaggagaggcctggccggcaggaggatgctgagtaccaggccttccgggaggccatcacagaagctgtggaggccccagctgctgccaggtag

SEQ ID NO: 75102 - DNA, 1509 bp, Artificial Sequence
  derived and/or modified sequence
atggacgaggagagcctggagagcgccctgcagacctaccgggcccaactgcagcaggtcgaacttgccctgggcgctggcctggatagttcggaacaagccgatctacgccagcttcagggtgacctgaaggagctgattgagttaaccgaggccagccttgtcagcgtgcgcaaatcctctctgctggcagcattagacgaagagagacctgggcgccaagaagatgcagagtaccaagcctttagggaggcaatcacagaggccgtcgaggcaccagccgcagctcgagggtctgggtcagaaactgttcctaaagctgaagccggtccggaatccgccgcaggcgggcaggaggaggaagaaggcgaggatgaggaggagttgtctggtactaaagtgagcgcaccatattattccagttggggaacgctggaataccacaatgcaatggttgtgggaactgaggaagcggaggatggttcagcaggtgtccgcgtactgtacctgtatcctacgcataaaagcttaaagccttgccccttttttctcgaagggaagtgccggttcaaggagaattgtcggttcagccatggccaggtggtttccctggatgagctgcgcccctttcaggaccctgatctctcatcactgcaggccggcagcgcgtgtctcgcaaaacaccaggatgggttatggcatgccgcgaggattaccgacgtggataacggatactatacagtcaaattcgactcattattactgagggaggcagttgtggagggtgacggaattcttcccccgctgcggaccgaggccaccgagtccgattctgacagcgatgtggtggggagcgacgctgttgacagcggcacttgctcctctgcatttgcaggctgggaggtgcataccagaggcatcggttccagacttcttacaaaaatggggtacgagttcggaaaaggcttaggtcgacatgctgagggcagagttgagcccatccatgccgtcgtcctgccacgcggtaagagtcttgaccagtgcgttgaaacattgcagaagcaaacacgagtcggcaaagcgggcactaacaagcctccccgttgtaggggcagaggagccaggccaggcgggcggccggcgcctaggaacgtctttgacttccttaatgaaaagttacagggccaggccccgggggcacttgaggctggcgcagctccagcagggagacggtccaaagatatgtatcacgccagcaaatcagcaaagagggctctgtccttacgcctgtttcagacagaggaaaaaattgagcggacacagcgagacatccgcagcatccaggaggcactggcccggaatgcgggacgccattccgtggcctcagctcagctgcaagagaaactcgccggcgctcagcgccagctcggccagctccgggcgcaagaggccggtttacaacaggagcagcggaaagccgacacccacaagaaaatgacggaattttag

SEQ ID NO: 75103 - DNA, 294 bp, Artificial Sequence
  derived and/or modified sequence
atggacgaggagagcctggagagcgccctgcagacctaccgggcccaactgcagcaagtggagctcgctctgggagccggcctggattcgtccgagcaagcggatttaagacaactacaaggggatctgaaagaattaatcgagctgactgaagcttcactcgtctctgtgaggaagagctctttattggctgccctggacgaagagcgcccggggcggcaggaagacgccgaataccaggcttttagggaggctatcacagaggccgtggaagctccggccgccgctcgttag

SEQ ID NO: 75104 - DNA, 1509 bp, Artificial Sequence
  derived and/or modified sequence
atggatgaggaatccctggagtctgctctccaaacctaccgcgcacagctccagcaggtggagctagctctgggcgcagggcttgacagctccgaacaggccgatttaaggcagctgcagggagacctgaaggagctcattgagctgaccgaggcctctctggtgagcgtaagaaagagctcactcctggcagcacttgacgaggagcgcccaggtcgccaggaggatgcagagtatcaagccttcagagaggccatcactgaagcagtcgaggcgcctgctgctgcgagaggaagcggctccgagacagtgcctaaggccgaagctgggcctgagtccgctgccggaggccaggaggaggaggagggtgaggatgaggaggaactatctggaaccaaggtctccgccccatattattcatcctgggggactctagaataccataatgctatggtggttggtactgaggaggctgaagacggcagcgcgggagttcgagtgctttacctgtaccccactcataaatcactgaagccctgccccttctttctggagggcaaatgtagattcaaagagaactgcagattttcccacgggcaggtcgtgagcctggatgagttacgaccctttcaggatcctgatctgtccagcttacaagccggaagtgcctgcctggcgaagcatcaggatggcttatggcacgccgcaaggattacggacgtggataacggatattacaccgtgaaattcgattcacttctgttacgtgaagccgttgtggagggcgatggcatactccctcctctgcggactgaagctacagaaagcgactccgactccgacgttgtgggctcagacgccgtggattcagggacctgttctagcgcatttgctggatgggaagtccacacccgcggtattgggagccgtctcctcacgaagatgggatacgagttcggtaagggcctgggcaggcacgcagaggggagggtcgaacctatacacgcagttgtgctccccaggggcaagagtctggatcagtgtgtagaaactcttcaaaaacaaaccagagtcggaaaggctggaacaaataaaccgcctaggtgccgcggtcgcggtgctaggcctgggggtagacctgcaccccgtaatgtatttgacttcttgaacgagaaactacaggggcaggcaccaggagcccttgaggctggggctgctcccgcaggtaggcgctccaaagatatgtatcacgcgagcaaatcggcgaaacgcgctttatctttaagactcttccagacagaggaaaaaattgagcggacccagcgagatatccgtagcatacaagaagcgctcgcgaggaacgccggtagacattcagtcgccagcgcacagcttcaggagaagctcgcgggagcccagcgccagcttgggcagctcagggcacaagaggccggactacagcaggagcaacgcaaggcagatacgcataaaaagatgaccgagttttag

SEQ ID NO: 75105 - DNA, 294 bp, Artificial Sequence
  derived and/or modified sequence
atggacgaagagagcctagagtctgctctacagacgtacagagcccagttgcagcaagtcgagctggcactcggagcgggattggatagctctgagcaagcagatctacggcagcttcaaggtgacttgaaagagctgatcgagctcacagaagcttccttagtgtctgtacggaagagcagtctcctggccgcactcgacgaggagcgacccggacggcaggaggacgccgaatatcaggctttccgcgaggcaatcaccgaggctgtcgaggctcctgcggcagccaggtag

SEQ ID NO: 75106 - DNA, 1896 bp, Artificial Sequence
  derived and/or modified sequence
cggcgctcgggaggaagtgccgatcggctgctggggcgaaaagggggcgccgggccgctctagccggtgaggccggcgggctctctgtggctgcggctgggaaaccgcgcggaggaggtgcccggccggggaccagccctggtccagcgcctccctctctcagcatggacgaggagagcctggagtcggccttgcagacctaccgtgcgcagctgcagcaggtggagctggccttgggcgccggcctggattcgtctgagcaggctgacctgcgccagctgcagggggacctgaaggagctcatcgagctcaccgaggccagcctggtgtctgtcaggaagagcagcttgttggccgcgctggacgaagagcgcccgggccgccaggaagatgctgagtaccaggctttccgggaggccatcactgaggcggtggaggcaccagcagcggcccgtgggtccggatcagagaccgttcctaaagcagaggcggggccagaatctgcggcaggtgggcaggaggaggaagagggagaggacgaggaagagctgagtgggacaaaggtgagcgcgccctactacagctcctggggcactctggagtatcacaacgccatggtggtgggaacggaagaggcggaggatggctcggcgggtgtccgtgtgctttacctgtaccccactcacaagtctctgaagccgtgcccgttcttcctggagggaaagtgccgctttaaggagaactgcaggttctcccatgggcaggtggtctctctggatgagctgcgccccttccaggacccagacctgagctccctgcaggccggctctgcgtgtctggccaagcaccaggatggcctctggcacgcagcacgcatcaccgatgtggacaacggctactacacagtcaagtttgactcgctgctgctgagggaggccgtggtggagggggacggcatcctgcccccactgcgcacagaggccacagagtccgactcagacagcgacgtggtggggtcagatgctgtggactctgggacctgcagctctgcctttgctggctgggaggtgcacacgcgaggtataggctccagactcctcaccaagatgggctatgagtttggcaagggtttgggccgacacgcggaaggccgggtggagcccatccatgctgtggtgttgcctcgagggaagtcgctggaccagtgtgtggagaccctgcagaagcagaccagggttggcaaggctggcaccaacaagccccccaggtgccggggaagaggggccaggcctgggggccgcccagctcctcggaatgtgtttgacttcctcaatgaaaagctgcaaggtcaggctcctggggccctagaagccggggcggccccagcggggaggaggagcaaggacatgtaccatgccagcaagagtgccaagcgggccctgagcctgcggctcttccagactgaggagaagatcgagcgaacccagcgggacatcaggagcatccaggaggctctcgcccgcaacgctggccggcatagcgtggcgtcagcccagctgcaggagaagctggcaggagcccagcgccagctggggcagctccgggctcaggaagccggcctgcagcaggagcagaggaaggcagacacccacaagaagatgactgagttctagagaccccacaagcactatggacgaagcgtgggaccccagcacgggctgccctcaggaagaccagtgttgcccgaggaggggccggcctgctggcctggggcgtgcagacactgctgagtggagacagagctgcggggtcccatctggacacttacttgcccacctgccagtgtcttgggcatttccttggcaaggacattaaagtgatttcatcacagtgtca

SEQ ID NO: 75107 - DNA, 427 bp, Artificial Sequence
  derived and/or modified sequence
ggaggaagtgccgatcggctgctggggcgaaaagggggcgccgggccgctctagccggtgaggccggcgggctctctgtggctgcggctgggaaaccgcgcggaggagccctggtccagcgcctccctctctcagcatggacgaggagagcctggagtcggccttgcagacctaccgtgcgcagctgcagcaggtggagctggccttgggcgccggcctggattcgtctgagcaggctgacctgcgccagctgcagggggacctgaaggagctcatcgagctcaccgaggccagcctggtgtctgtcaggaagagcagcttgttggccgcgctggacgaagagcgcccgggccgccaggaagatgctgagtaccaggctttccgggaggccatcactgaggcggtggaggcaccagcagcggcccgt

SEQ ID NO: 75108 - protein, 99 aa, Artificial Sequence
  derived and/or modified sequence
MAKVEQVLSLEPQHELKFRGPFTDVVTTNLKLGNPTDRNVCFKVKTTAPRRYCVRPNSGIIDAGASINVSGRRWTADEEDSAEQQPHFSISPNWEGRRP

SEQ ID NO: 75109 - DNA, 300 bp, Artificial Sequence
  derived and/or modified sequence
atggccaaggtggagcaggtgctgagcctggagccccagcacgagctgaagttcagaggccccttcaccgacgtggtgaccaccaacctgaagctgggcaaccccaccgacagaaacgtgtgcttcaaggtgaagaccaccgcccccagaagatactgcgtgagacccaacagcggcatcatcgacgccggcgccagcatcaacgtgagcggcagaagatggaccgccgacgaggaggacagcgccgagcagcagccccacttcagcatcagccccaactgggagggcagaagaccctag

SEQ ID NO: 75110 - DNA, 300 bp, Artificial Sequence
  derived and/or modified sequence
atggcaaaggtggagcaggtgctctcgcttgagccacagcacgagctgaagtttcggggcccatttaccgatgttgtgaccaccaacctgaaattagggaatcccactgatcgaaatgtctgcttcaaggtgaagactactgcaccccggcggtattgcgtacggcccaattcgggaataattgatgcgggggcaagtataaatgtctctggaagacgctggacagccgacgaggaggactctgccgaacagcagcctcatttttccatctcacctaactgggagggacgccgcccttag

SEQ ID NO: 75111 - DNA, 300 bp, Artificial Sequence
  derived and/or modified sequence
atggccaaggtggagcaggtgctgagcctggagccccagcacgagctgaagttccggggccccttcacagatgtggtgaccaccaacctgaagctgggcaaccccacagacagaaatgtgtgcttcaaggtgaagaccacagccccccggcgctactgtgtgcggcccaacagcggcatcattgatgctggggccagcatcaacgtgtctggccgccgctggacagcagatgaagaagattctgctgagcagcagccccacttcagcatcagccccaactgggagggcagaagaccctag

SEQ ID NO: 75112 - DNA, 300 bp, Artificial Sequence
  derived and/or modified sequence
atggccaaggtggagcaggtgctgagcctggagccccagcacgagctcaaattccgagggcccttcaccgatgtggttaccaccaacttaaagctgggaaaccctaccgatagaaacgtgtgcttcaaggtgaagaccacagccccaaggcggtactgcgtgcggcctaattccggtatcatcgatgcgggtgcctccattaacgtgagtggccggcggtggactgctgatgaagaagacagcgctgaacagcagcctcattttagcatctcccccaattgggaagggaggcgaccttag

SEQ ID NO: 75113 - DNA, 300 bp, Artificial Sequence
  derived and/or modified sequence
atggccaaggtagaacaggttctgtccttagagcctcagcatgagctcaagttcaggggaccttttacggacgttgtcacgacaaatctgaagctgggaaatcctaccgatagaaacgtttgcttcaaggtgaagactactgcccctaggcgttattgcgtgcgtcccaactctggtatcatcgacgctggcgcaagcatcaacgtgtcaggacgacggtggactgcggacgaagaggactcggccgaacaacagccacatttctcgatctctccgaattgggaagggaggcgcccttag

SEQ ID NO: 75114 - DNA, 1834 bp, Artificial Sequence
  derived and/or modified sequence
gcgcgcccacccggtagaggacccccgcccgtgccccgaccggtccccgcctttttgtaaaacttaaagcgggcgcagcattaacgcttcccgccccggtgacctctcaggggtctccccgccaaaggtgctccgccgctaaggaacatggcgaaggtggagcaggtcctgagcctcgagccgcagcacgagctcaaattccgaggtcccttcaccgatgttgtcaccaccaacctaaagcttggcaacccgacagaccgaaatgtgtgttttaaggtgaagactacagcaccacgtaggtactgtgtgaggcccaacagcggaatcatcgatgcaggggcctcaattaatgtatctggaagaagatggactgcggatgaggaagacagtgcagagcaacagccccatttcagcattagccccaactgggaaggaagaaggccttagcacccggctcttggctctggtggttttgttctttatcgttggtgtaattattgggaagattgccttgtagaggtagcatgcacaggatggtaaattggattggtggatccaccatatcatgggatttaaatttatcataaccatgtgtaaaaagaaattaatgtatgatgacatctcacaggtcttgcctttaaattacccctccctgcacacacatacacagatacacacacacaaatataatgtaacgatcttttagaaagttaaaaatgtatagtaactgattgagggggaaaagaatgatctttattaatgacaagggaaaccatgagtaatgccacaatggcatattgtaaatgtcattttaaacattggtaggccttggtacatgatgctggattacctctcttaaaatgacacccttcctcgcctgttggtgctggcccttggggagctggagcccagcatgctggggagtgcggtcagctccacacagtagtccccacgtggcccactcccggcccaggctgctttccgtgtcttcagttctgtccaagccatcagctccttgggactgatgaacagagtcagaagcccaaaggaattgcactgtggcagcatcagacgtactcgtcataagtgagaggcgtgtgttgactgattgacccagcgctttggaaataaatggcagtgctttgttcacttaaagggaccaagctaaatttgtattggttcatgtagtgaagtcaaactgttattcagagatgtttaatgcatatttaacttatttaatgtatttcatctcatgttttcttattgtcacaagagtacagttaatgctgcgtgctgctgaactctgttgggtgaactggtattgctgctggagggctgtgggctcctctgtctctggagagtctggtcatgtggaggtggggtttattgggatgctggagaagagctgccaggaagtgttttttctgggtcagtaaataacaactgtcatagggagggaaattctcagtagtgacagtcaactctaggttaccttttttaatgaagagtagtcagtcttctagattgttcttataccacctctcaaccattactcacacttccagcgcccaggtccaagtctgagcctgacctccccttggggacctagcctggagtcaggacaaatggatcgggctgcagagggttagaagcgagggcaccagcagttgtgggtggggagcaagggaagagagaaactcttcagcgaatccttctagtactagttgagagtttgactgtgaattaattttatgccataaaagaccaacccagttctgtttgactatgtagcatcttgaaaagaaaaattataataaagccccaaaattaagaa

SEQ ID NO: 75115 - protein, 171 aa, Artificial Sequence
  derived and/or modified sequence
MEPGPALAWLLLLSLLADCLKAAQSRDFTVKDIIYLHPSTTPYPGGFKCFTCEKAADNYECNRWAPDIYCPRETRYCYTQHTMEVTGNSISVTKRCVPLEECLSTGCRDSEHEGHKVCTSCCEGNICNLPLPRNETDATFATTSPINQTNGHPRCMSVIVSCLWLWLGLML

SEQ ID NO: 75116 - protein, 53 aa, Artificial Sequence
  derived and/or modified sequence
MEPGPALAWLLLLSLLADCLKAAQSRDFTVKDIIYLHPSTTPYPGGFKCFTCE

SEQ ID NO: 75117 - DNA, 516 bp, Artificial Sequence
  derived and/or modified sequence
atggaacctgggccagccctggcctggctgctgctactgtcactgctggctgactgcttgaaagccgctcagagccgcgatttcacagtgaaggacattatctacttacacccctctacgactccctacccaggggggttcaagtgctttacttgcgagaaagctgctgataattacgaatgcaataggtgggcccccgatatttactgcccccgagagaccaggtactgctacacccagcacactatggaggtgactgggaacagcatttcagtgaccaaaagatgcgtcccgctggaagagtgtctgtccacgggttgtagggattccgagcatgagggccataaggtttgcacgtcatgttgtgaaggcaatatttgtaatctgccgctgccaaggaacgagacggacgcgacctttgctacaacaagtcccattaaccaaacaaatggtcaccctcggtgcatgtccgtcatcgtgtcttgtctgtggctttggctgggcctgatgctgtag

SEQ ID NO: 75118 - DNA, 516 bp, Artificial Sequence
  derived and/or modified sequence
atggagcctggccccgctttggcctggctgctcctgcttagcctgctagctgattgccttaaggcagctcaatcacgggattttaccgtcaaggatatcatctacctgcacccttcaacgactccctatcctggggggtttaagtgtttcacatgtgagaaggccgctgacaactacgaatgtaaccgatgggccccagatatctattgtcccagggaaacgcgctattgttacactcagcatactatggaagttacaggcaatagcatttccgtaactaagcgctgcgtcccactcgaggaatgtctgagtaccggatgccgagactctgagcatgaaggacacaaggtgtgcacttcgtgttgtgaggggaatatctgcaacctgccgttaccaaggaacgagaccgatgcaactttcgctaccacgtcacccattaaccaaacaaatgggcatcctcgctgcatgagcgtgatcgtgagctgcctctggctgtggctcggtttaatgctgtag

SEQ ID NO: 75119 - DNA, 162 bp, Artificial Sequence
  derived and/or modified sequence
atggaacctggccctgctctcgcatggttgctgttgctgagtctcctcgccgactgcctgaaagccgcacaatccagggatttcaccgtgaaggatatcatatatttgcacccttctaccactccttaccccggagggttcaaatgcttcacatgtgagtag

SEQ ID NO: 75120 - DNA, 516 bp, Artificial Sequence
  derived and/or modified sequence
atggagcccggccctgccctggcctggctgctgctgctgagcctgctggccgactgcctgaaggccgcccagagccgggacttcaccgtgaaggacatcatctacctgcaccccagcaccaccccctacccaggcggcttcaagtgcttcacctgtgagaaggctgctgacaactatgagtgcaaccgctgggccccagacatctactgcccccgggagacccgctactgctacacccagcacaccatggaggtgacaggcaacagcatctctgtgaccaagagatgtgtgcccctggaggagtgcctgagcacaggctgccgggacagcgagcacgagggccacaaggtgtgcaccagctgctgtgagggcaacatctgcaacctgcccctgcccagaaatgaaacagatgccacctttgccaccaccagccccatcaaccagaccaacggccacccccgctgcatgtctgtgattgtgtcctgcctgtggctgtggctgggcctgatgctgtag

SEQ ID NO: 75121 - DNA, 162 bp, Artificial Sequence
  derived and/or modified sequence
atggagcccggccctgccctggcctggctgctgctgctgagcctgctggccgactgcctgaaggccgcccagagccgggacttcaccgtgaaggacatcatctacctgcaccccagcaccaccccctacccaggcggcttcaagtgcttcacctgtgagtag

SEQ ID NO: 75122 - DNA, 4071 bp, Artificial Sequence
  derived and/or modified sequence
gagtggcgcgcgcgcccctagccgccccccgcctctccccgctgcgctccctcgctccttccctgagctcccgggctccggcagcgggctggcggggcgccgcattgcacactctgggggcgccgcagtgttcgtgggatggggcagcgggctgcagctggcggccggaatccgcgcgcagcccgggtgcaagttctctcctgttgccctgagtgcccactcccaggccctctgtatgagtgacacttcagtctgccatggaacctggccctgctctggcctggctcctgctcctgagcctgctggcggattgtctgaaagctgctcagtcccgagacttcacagtgaaagacattatctacctccatccttcaaccacaccatatcctggtggatttaaatgtttcacctgtgaaaaggcagcagacaattatgagtgcaaccgatgggctccagacatctactgccctcgagagaccagatactgctacactcagcacacaatggaagtcacaggaaacagtatctcagtcaccaaacgctgtgtcccactggaagagtgcttatccactggctgcagagactccgagcatgaaggccacaaggtctgcacttcttgttgtgaaggaaatatctgtaacttgccactgccccgaaatgaaactgatgccacatttgccacgacgtcacctataaatcagacaaatgggcacccacgctgtatgtcagtgatagtgtcctgcttgtggttgtggttagggctcatgttatagtggctcagtggctccatgtgttaatagcgatccatggggatctcgatggtccacagacctgcatgagtcattggcctgacagtaattacacatgtgagacacaacactcttggaggtcatcacagccaagcattgccacttaccatgaggaataaatgttgcttcattgtagccattttgagtctaaccgagactcatcaaagccttctgtcagtacagcccaagttccataccataaacgtttgttttcattccaagaagtagttctgcatttatcgagatctggggttcttaatttggaagaatacatgcatgagatgcagtaggtcctgagactgtaagatattaggagtatgttataggggcatgtatagatgtgggcttttcaggagaaaagtaaccattggtttaaatataatcatgagttcatttgtagctttagaattttaaaacattgactccaaactgaatggactatttccttggaaattctgactgagtccctggaagagtagtaattccaacaattccagccatttgttcaattaattttcccaacattcttctcccagtgctgggaatcacatttcctctgttctgtgcagaagacaaaaaggcaatcataaaagtttgttatatttgtgggggtgcctggaggaggattttcctcaacttaatggagccactgtccataaagtggctgttatcccttcatataattggtgagatcagccttctccttgacttggcacctaattatgcttcatgagatcctagattccacctgagtcaattgtgtccagagccccaaaccaggatggagttgttttccccagatatggggttctattcagccatagataatctagacagaggatttcagaatgaaaggaaaaatgtgtggagattagtcctagttcattctgagggccgactaagtggctcagccagcttcttactccatctgcagttcatactgccaaagagctcccacttccaaatccccagtgactttatggagaagattctgcattaaattgtctttcgaatgatggggaagcaaggcataatatgcgatgatgaggagaaagtagaccagtgaggtgattgcaagactaacaaggagactcaatgggaagtttttctttcttttagatattgcttttgaagtagatggtaaaatttttgtcatccttcttgtattttttgtaccccaagttacaatttttcttcttccttgtaaataatttaaacagtatttatttttgtaaggcataactagaaactaaaatatattctaaaaaattcattattctgaacaaagtgatcaaattagaatacatatttttcaacagtggtagagcttttaatatatgtttattgaaagttatctataatacttgcaccagtgttgaaaaaagttaacatgtaggcaagagcaatatgtttgtctcaaggatttttccatggtttcctcagtgatggtgtcctggaattattcaggtggtgaccatcactggtctaagtttgtgtgcagggttttcagatgtgtttttgtgaaacttggtagaaccatggctaataaagaggacagtgttgtcagggtccatctgccctccatagaaaaatgtctctggctcataaaatgagactccctcagggactaaatatgaactgacagcagtaactctgatacagaataatctaaattgcatcaaatggccttaattcagagtttgttaggcttatcagtatgttgcttttaattggggtgggaaagtagagggagagaaagcaagacatttattaagcacctcgtatgtgccaggcactatgctaagcactttacataagttaggattaatccctgcaagaatcctataaagaatgttactagcatttacacttcccaaatgaaggtaccaaagctcaaacgcaatgttgtgaagctgtttccttcagatttaggttatgtgggatgatgtgggattgaagaggaaagaaaggtgggattatccccctaggaagactttcaggcctgacttcataggaattcatccatcttatcatgtggagtttatctcaccctgctgttgcaggatgctatttgcatgtgtccccaggtgatgttttttctttggggagtaggggtttggcttcctcattcatccctcttgctaaaagaggagatagttgatgttgcatctaaagatgctataagacaatgaaagtttgatgttgtacatacctacaagtaccatttttgtgcatgattacactccactgacatcttccaagtactgcatgtgattgaataagaaacaagaaagtgaccacaccaaagcctccctggctggtgtagagggatcaggtccacagtggtgcagattcaaccaccacccagggagtgcttgcagactctgcatagatgttgctgcatgtgtcccatgtgcctgtcagaatggcagtgtttaattctcttgaaagaaagttatttgctcactatccccagcctcaaggagccaaggaagagtcattcacatggaaggtccgggactggtcagccactctgacttttctaccacattaaattctccattacatctcaatattggtaatggcttaagtgtaaagagccatgatgtgtatattaagctatgtgccacatatttatttttagactctccacagcattcatgtcaatatgggattaatgcctaaactttgtaaatattgtacagtttgtaaatcaatgaataaaggttttgagtgtatcttaccaggctcctccctgcaaatgcacatgtcaatcaatgattaatgcacccaggttatgtacaaggcactgggcttagcaccacagggaacttccttccagaggcttgctttctagttgtgtagacaagaatacatgcatgagaagatacaagacaattcacccatgccaaatgattcatacaggctgtttaagtactgcagaaaataaaagaaggaaaggctaccagacttttcaataaggtctacagcttcccaagagcatgtctttgttaaatcaggaaatataaaaattatgtgtgtatgtgtatgtatatatatataccaccctattaactattttaaaatcgtattctattttgggggttgtgttaatgatgatgaaccagaaaagattttctcttgatggtttcttcaacaggaaacagatattggaatagtgtacatgtcatttttatctatacaatgaatttattatatttttcttagtaaagtgatagacattgaaagcaagcttgaaaaa

SEQ ID NO: 75123 - DNA, 3578 bp, Artificial Sequence
  derived and/or modified sequence
actgcaaacgtcaagtggtctccgccttccctgggttcggagcttcacttgctcttgagctctgcggtccggcggatttcgcggggcccaggggatggcggggagtgagatttggccagggtcatttcacactgccgggcctgcagccacgcacgcagctgctggcccggctgaggctggcggctagggagaggcgccagggggtcgcgcacaggaaggtgcaagttctctcctgttgccctgagtgcccactcccaggccctctgtatgagtgacacttcagtctgccatggaacctggccctgctctggcctggctcctgctcctgagcctgctggcggattgtctgaaagctgctcagtcccgagacttcacagtgaaagacattatctacctccatccttcaaccacaccatatcctggtggatttaaatgtttcacctgtgaaaaggcagcagacaattatgagtgcaaccgatgggctccagacatctactgccctcgagagaccagatactgctacactcagcacacaatggaagtcacaggaaacagtatctcagtcaccaaacgctgtgtcccactggaagagtgcttatccactggctgcagagactccgagcatgaaggccacaaggtctgcacttcttgttgtgaaggaaatatctgtaacttgccactgccccgaaatgaaactgatgccacatttgccacgacgtcacctataaatcagacaaatgggcacccacgctgtatgtcagtgatagtgtcctgcttgtggttgtggttagggctcatgttatagtggctcagtggctccatgtgttaatagcgatccatggggatctcgatggtccacagacctgcatgagtcattggcctgacagtaattacacatgtgagacacaacactcttggaggtcatcacagccaagcattgccacttaccatgaggaataaatgttgcttcattgtagccattttgagtctaaccgagactcatcaaagccttctgtcagtacagcccaagttccataccataaacgtttgttttcattccaagaagtagttctgcatttatcgagatctggggttcttaatttggaagaatacatgcatgagatgcagtaggtcctgagactgtaagatattaggagtatgttataggggcatgtatagatgtgggcttttcaggagaaaagtaaccattggtttaaatataatcatgagttcatttgtagctttagaattttaaaacattgactccaaactgaatggactatttccttggaaattctgactgagtccctggaagagtagtaattccaacaattccagccatttgttcaattaattttcccaacattcttctcccagtgctgggaatcacatttcctctgttctgtgcagaagacaaaaaggcaatcataaaagtttgttatatttgtgggggtgcctggaggaggattttcctcaacttaatggagccactgtccataaagtggctgttatcccttcatataattggtgagatcagccttctccttgacttggcacctaattatgcttcatgagatcctagattccacctgagtcaattgtgtccagagccccaaaccaggatggagttgttttccccagatatggggttctattcagccatagataatctagacagaggatttcagaatgaaaggaaaaatgtgtggagattagtcctagttcattctgagggccgactaagtggctcagccagcttcttactccatctgcagttcatactgccaaagagctcccacttccaaatccccagtgactttatggagaagattctgcattaaattgtctttcgaatgatggggaagcaaggcataatatgcgatgatgaggagaaagtagaccagtgaggtgattgcaagactaacaaggagactcaatgggaagtttttctttcttttagatattgcttttgaagtagatggtaaaatttttgtcatccttcttgtattttttgtaccccaagttacaatttttcttcttccttgtaaataatttaaacagtatttatttttgtaaggcataactagaaactaaaatatattctaaaaaattcattattctgaacaaagtgatcaaattagaatacatatttttcaacagtggtagagcttttaatatatgtttattgaaagttatctataatacttgcaccagtgttgaaaaaagttaacatgtaggcaagagcaatatgtttgtctcaaggatttttccatggtttcctcagtgatggtgtcctggaattattcaggtggtgaccatcactggtctaagtttgtgtgcagggttttcagatgtgtttttgtgaaacttggtagaaccatggctaataaagaggacagtgttgtcagggtccatctgccctccatagaaaaatgtctctggctcataaaatgagactccctcagggactaaatatgaactgacagcagtaactctgatacagaataatctaaattgcatcaaatggccttaattcagagtttgttaggcttatcagtatgttgcttttaattggggtgggaaagtagagggagagaaagcaagacatttattaagcacctcgtatgtgccaggcactatgctaagcactttacataagttaggattaatccctgcaagaatcctataaagaatgttactagcatttacacttcccaaatgaaggtaccaaagctcaaacgcaatgttgtgaagctgtttccttcagatttaggttatgtgggatgatgtgggattgaagaggaaagaaaggtgggattatccccctaggaagactttcaggcctgacttcataggaattcatccatcttatcatgtggagtttatctcaccctgctgttgcaggatgctatttgcatgtgtccccaggtgatgttttttctttggggagtaggggtttggcttcctcattcatccctcttgctaaaagaggagatagttgatgttgcatctaaagatgctataagacaatgaaagtttgatgttgtacatacctacaagtaccatttttgtgcatgattacactccactgacatcttccaagtactgcatgtgattgaataagaaacaagaaagtgaccacaccaaagcctccctggctggtgtagagggatcaggtccacagtggtgcagattcaaccaccacccagggagtgcttgcagactctgcatagatgttgctgcatgtgtcccatgtgcctgtcagaatggcagtgtttaattctcttgaaagaaagttatttgctcactatccccagcctcaaggagccaaggaagagtcattcacatggaaggtccgggactggtcagccactctgacttttctaccacattaaattctccattacatctcaatattggtaatggcttaagtgtaaagagccatgatgtgtatattaagctatgtgccacatatttatttttagactctccacagcattcatgtcaatatgggattaatgcctaaactttgtaaatattgtacagtttgtaaatcaatgaataaaggttttgagtgt

SEQ ID NO: 75124 - DNA, 565 bp, Artificial Sequence
  derived and/or modified sequence
agcactgtgcagggcatgaaagaccaaccactctgtaaatgcacataaagaacaacctccttgagcaatctcaagcaagagaaagaagaggcttccgagctccagcaaaacaatgggaaaaaacatacccttatcttttccttctcattttcaaaggtaccgtgaatataagtagaagaaagacaccgtctcttcctttaaggaacttacagtcttatggaagagacacagatggaagtgcacaattaccgaatatcatcaaaaagcctgagaaaaagttatgcaaaagctactgtgtgagcacagaggctgtaaacctaatcctaagttgcaggtgcaagttctctcctgttgccctgagtgcccactcccaggccctctgtatgagtgacacttcagtctgccatggaacctggccctgctctggcctggctcctgctcctgagcctgctggcggattgtctgaaagctgctcagtcccgagacttcacagtgaaagacattatctacctccatccttcaaccacaccatatcctggtggatttaaatgtttcacctgtgaaa

SEQ ID NO: 75125 - DNA, 516 bp, Artificial Sequence
  derived and/or modified sequence
atggagcccggccccgccctggcctggctgctgctgctgagcctgctggctgactgcctgaaggccgcccagtcaagggatttcacggtgaaagatattatctacttacacccatcaactacaccttatcccggaggcttcaagtgtttcacttgcgagaaggccgcagataactatgaatgcaaccgctgggcaccagatatctactgcccccgggagaccagatactgttacacccagcacacaatggaagtgacaggaaatagcatcagtgtcactaaaaggtgcgtgccccttgaagaatgcttatccactgggtgccgggactccgagcatgaggggcacaaagtgtgtacctcctgttgcgaggggaacatctgtaatttgcctctgcctcgaaatgagactgacgcaacattcgcaacaacatccccaatcaaccagactaacgggcatccccggtgtatgtctgttatcgtgtcctgcctctggctgtggctggggctgatgctgtag

SEQ ID NO: 75126 - DNA, 516 bp, Artificial Sequence
  derived and/or modified sequence
atggagcccggccccgccctggcctggctgctgctgctgagcctgctcgccgattgtctcaaagccgcacaatcacgagatttcacagtcaaggatataatttatctccacccatctactacaccataccccgggggctttaagtgcttcacatgtgagaaggccgcagataattacgaatgcaatcgatgggcacctgacatctactgccctagggaaacccgctattgctatactcagcacactatggaagttaccggcaatagcatctccgtcacaaagaggtgtgtgcccttggaagagtgcctgtctacaggctgccgcgactcagaacatgaaggccacaaagtgtgcacatcctgttgtgagggcaacatctgcaaccttcctctccctcggaacgagacagacgccactttcgccacaacatctcccatcaaccaaacaaacggacaccccagatgcatgtcagttatcgtctcttgtctttggctgtggctgggccttatgctgtag

SEQ ID NO: 75127 - DNA, 162 bp, Artificial Sequence
  derived and/or modified sequence
atggagcccggccccgccctggcctggctgctgctgctgagcctgcttgcagactgcctgaaggctgctcaatcaagagactttaccgtgaaagacatcatctatttgcacccaagcacaacaccatacccggggggtttcaaatgcttcacctgtgaatag

SEQ ID NO: 75128 - DNA, 516 bp, Artificial Sequence
  derived and/or modified sequence
atggagccagggccagcactagcctggttactgttgcttagcctgctcgctgactgcctgaaggccgcacagagccgcgacttcacagtgaaagatatcatctatttacatccatccaccacaccatatcctggaggattcaagtgttttacctgtgagaaggcggctgacaattatgagtgtaacagatgggccccagacatctactgtcctagagagacccggtattgttatacacagcatacgatggaggttaccggcaatagcatatcagttactaaaaggtgcgtcccgctggaagaatgtctctcaacagggtgtagagacagcgaacatgagggtcataaagtgtgcacgagctgctgtgaagggaacatctgcaacttaccacttccccgaaatgagacagatgccacatttgccactacctccccaatcaatcaaacgaatgggcaccctcggtgcatgtcagtgatcgtcagctgcctctggctatggctgggcctgatgctctag

SEQ ID NO: 75129 - DNA, 516 bp, Artificial Sequence
  derived and/or modified sequence
atggagccaggacccgcacttgcctggcttctgctcctcagcctcctcgcggactgcctaaaagctgcacagtcccgtgatttcacagttaaagatattatttatcttcacccgtccactactccatatcccggtggcttcaaatgttttacatgcgaaaaagcggctgataactatgaatgtaatcgttgggccccagatatttactgccctagagagaccaggtactgttatacgcagcataccatggaggtaacaggcaattctatttcagttacaaagcggtgcgtccccttggaggagtgcctgagtactgggtgccgagattccgagcacgaggggcacaaggtgtgcacctcctgctgtgagggcaacatctgtaatctgccactcccgagaaatgaaacagatgcaacctttgccacaactagtccaatcaatcagactaacggacatccccgttgcatgtccgtgattgttagttgcctttggctatggctgggtcttatgctttag

SEQ ID NO: 75130 - DNA, 162 bp, Artificial Sequence
  derived and/or modified sequence
atggagcctggcccagccctggcgtggctgttgcttctgtctttgctagcagactgtctaaaggccgctcagtccagagactttacggtgaaggatataatttatctgcatccttcgaccacaccttatcccggaggatttaaatgtttcacctgcgaatag

SEQ ID NO: 75131 - DNA, 516 bp, Artificial Sequence
  derived and/or modified sequence
atggagcccggccccgccctggcctggctgctgctgctgagcctgctggccgactgcctgaaggccgcccagagcagagacttcaccgtgaaggacatcatctacctgcaccccagcaccaccccctaccccggcggcttcaagtgcttcacctgcgagaaggccgccgacaactacgagtgcaacagatgggcccccgacatctactgccccagagagaccagatactgctacacccagcacaccatggaggtgaccggcaacagcatcagcgtgaccaagagatgcgtgcccctggaggagtgcctgagcaccggctgcagagacagcgagcacgagggccacaaggtgtgcaccagctgctgcgagggcaacatctgcaacctgcccctgcccagaaacgagaccgacgccaccttcgccaccaccagccccatcaaccagaccaacggccaccccagatgcatgagcgtgatcgtgagctgcctgtggctgtggctgggcctgatgctgtag

SEQ ID NO: 75132 - DNA, 162 bp, Artificial Sequence
  derived and/or modified sequence
atggagcccggccccgccctggcctggctgctgctgctgagcctgctggccgactgcctgaaggccgcccagagcagagacttcaccgtgaaggacatcatctacctgcaccccagcaccaccccctaccccggcggcttcaagtgcttcacctgcgagtag

SEQ ID NO: 75133 - DNA, 1698 bp, Artificial Sequence
  derived and/or modified sequence
atgcccaaacaagttgaagttagaatgcatgatagccatttagggagtgaagagccaaagcatcgccatctgggccttcggctctgtgacaagcttgggaaaaacttgttactaactctgaccgtgtttggggtgatcctcggcgccgtttgtggaggactgctgaggctcgccagtcctattcaccctgacgtcgtcatgctgattgctttccccggggacatccttatgcggatgctgaagatgcttattctccctctgattatctcctcacttattacaggcctgagtggactggatgctaaagctagtggaagactcgggacccgtgccatggtctactacatgtctactaccatcattgcagccgtcctcggcgtgattctggttctggcaattcacccagggaaccccaaactgaagaagcagcttgggccaggcaaaaaaaatgacgaagtaagctctctggacgcctttctggacctcattcggaacctgtttccagagaacctggtgcaggcgtgtttccaacaaattcagacagtcaccaagaaagtgcttgtcgccccaccacccgacgaagaggcaaacgccacttccgcggttgtttctctgcttaatgaaaccgtaacagaagtgccagaagagaccaaaatggtcattaaaaaagggctagagttcaaggatggaatgaacgtgctgggactcatcggtttctttatagcgttcggcatagccatgggcaagatgggcgaccaggcaaagctgatggtcgacttcttcaacatcctcaatgagatcgttatgaaactggtgattatgattatgtggtacagccccttgggtattgcgtgtttgatctgcggtaagataatcgctattaaggatctcgaggttgtggcgaggcagttaggcatgtacatggtaacagttatcatcgggttgataatacacggtggaatctttcttccgttgatctatttcgtagtgacacggaagaaccctttctcatttttcgctggaattttccaggcttggatcaccgctctcggcactgctagctcagcaggtactctacccgtgacctttcgctgtctagaagaaaacctgggcatcgataagcgagtcaccaggttcgtcctcccagtgggcgcaactatcaatatggacggtaccgctctgtacgaggcagtagccgctatttttatcgcgcaaatgaatggagttgtcctagatggaggccagatcgttaccgtgtccttaacagccacattggcttccgttggcgcagcttcaatcccctcggccggcctagtcacaatgctcctaatcttgactgcggttggactgccaacggaggatattagtctgctcgttgcagtggactggctgctggacaggatgcggactagcgttaatgttgtcggcgactcttttggcgcaggcatagtctaccacctgagtaaatccgagctagatacaatcgattctcaacaccgggtccacgaagacattgagatgacaaaaactcagtccatctacgacgacatgaaaaatcatcgggaatccaatagcaaccaatgcgtgtacgcagcccacaactctgtgattgtcgacgaatgtaaagtgaccctagctgcaaacggcaagagcgccgattgctccgttgaggaggagccctggaagagagagaaatag

SEQ ID NO: 75134 - DNA, 1698 bp, Artificial Sequence
  derived and/or modified sequence
atgcccaaacaggtggaagttcggatgcatgacagtcacctcggctctgaagaaccgaagcatagacacctcggcctacgcctgtgcgataaactcggaaaaaatctactacttactttaacagtgttcggggttatccttggcgctgtttgcggcgggctgctcaggctcgcttctcctatccatccggacgttgtcatgctgattgctttccctggcgatatcctaatgcggatgctgaaaatgttaatcttgcccctgatcattagcagtttgattacagggttgagcggccttgacgctaaggcaagtggccggctcggtacgagagccatggtttactacatgtccactaccatcattgccgcagtgctgggcgtcattcttgtgttagccattcatcccggaaaccctaagctcaaaaaacagctaggacctgggaaaaaaaatgacgaagtcagttcactggatgcatttctggacctgattcggaatcttttccccgaaaaccttgtacaggcatgcttccagcaaatccagactgttactaagaaggtgttggtggcaccgcccccggatgaggaggctaacgccacttcggcagttgtgtcactcttaaatgagaccgttaccgaagtgccggaggaaaccaagatggtgattaagaagggcttagaatttaaggacggcatgaacgttctgggtctgatagggtttttcattgcctttggaatagcgatgggcaaaatgggggaccaagcaaagcttatggttgacttttttaatatcctgaatgaaatcgtcatgaaactggtgatcatgattatgtggtattcgcccctggggatcgcatgccttatctgtggtaaaataatcgctataaaggatctggaggtcgttgctaggcagctgggtatgtatatggttactgtcatcataggtttgattatccatggcggcatatttctgcctctgatttactttgttgtcacccggaaaaatccgttcagtttctttgccggaatattccaggcctggataacagctctgggcaccgccagtagtgctggtacccttccggtgacattccggtgcctcgaagagaaccttggcatcgacaagcgtgttacccgttttgttttgcccgtcggggcaactatcaatatggacggaaccgccctgtatgaggcggtggccgccatattcatagcacagatgaatggagtggtccttgatggcggacaaatcgttacagtttccctgactgcgaccttggccagtgtcggtgcagcaagtattccatcagctggcctggtgactatgttgcttattctgactgccgtgggcctgccaactgaagatatctcattgctggtggccgtcgactggctgctggatcgtatgcggacctcagttaatgtcgtgggagactctttcggagccggtatagtgtatcatctgtctaagtcagagctggacacaatcgacagccagcacagggtgcacgaagatatcgagatgactaaaacgcagtctatctacgacgacatgaaaaaccaccgggagagcaactccaaccagtgcgtgtacgctgcccacaattctgtgattgttgacgaatgcaaggttacacttgccgcgaacgggaagagcgcagattgttctgtggaagaggaaccttggaaacgagaaaagtag

SEQ ID NO: 75135 - DNA, 1698 bp, Artificial Sequence
  derived and/or modified sequence
atgcccaagcaggtggaggtgaggatgcatgacagccacctgggcagcgaggagcccaagcaccgccacctgggcctgcggctgtgtgacaagctgggcaagaacctgctgctgaccctgactgtgtttggagtcatcctgggcgctgtgtgtggcggcctgctgcggctggccagccccatccacccagatgtggtgatgctgattgccttccctggggacatcctgatgaggatgctgaagatgctgatcctgcccctcatcatcagcagcctcatcaccggcctgagcggcctggatgccaaggccagcggccgcctgggcacccgggccatggtgtactacatgagcaccaccatcatcgctgctgtgctgggcgtcatcctggtgctggccatccaccctggcaaccccaagctgaagaagcagctgggccctgggaagaagaatgatgaggtgagcagcctggatgccttcctggacctgatccggaacctcttccctgagaacctggtgcaggcctgcttccagcagatccagacagtgaccaagaaggtgctggtggcccctcctccagatgaggaggccaatgccaccagcgctgtggtgtccctgctgaatgaaacagtgacagaggtgcctgaggagaccaagatggtgatcaagaagggcctggagttcaaggatggcatgaatgtgctgggcctgattggcttcttcatcgcctttggaattgccatgggcaagatgggagaccaggccaagctgatggtggacttcttcaacatcctgaatgaaattgtgatgaagctggtgatcatgatcatgtggtacagccccctgggcatcgcctgcctgatctgtgggaagatcatcgccatcaaggacctggaggtggtggcccggcagctgggcatgtacatggtgaccgtcatcatcggcctcatcatccacggcggcatcttcctgcccctcatctactttgtggtgaccaggaagaaccccttctccttctttgctggcatcttccaggcctggatcacagccctgggcacagccagcagcgctggcaccctgcctgtgaccttccgctgcctggaggagaacctgggcatcgacaagagggtgaccaggtttgtgctgcctgtgggcgccaccatcaacatggatggaacagccctgtatgaagctgtggccgccatcttcatcgcccagatgaatggagtggtgctggatggcggccagatcgtgacagtgtccctgacagccaccctggcctctgtgggcgccgccagcatccccagcgctggcctggtgaccatgctgctgatcctgacagctgtgggcctgcccacagaggacatcagcctgctggtggccgtggactggctgctggacaggatgaggacctctgtgaatgtggtgggggacagctttggagctggcatcgtgtaccacctgagcaagtctgagctggacaccatcgacagccagcaccgggtgcatgaagatattgagatgaccaagacccagagcatctatgatgacatgaagaaccaccgggagagcaacagcaaccagtgtgtgtatgctgcccacaacagcgtgattgtggatgagtgcaaggtgaccctggccgccaacgggaagtctgctgactgcagcgtggaggaggagccctggaagcgggagaagtag

SEQ ID NO: 75136 - DNA, 1698 bp, Artificial Sequence
  derived and/or modified sequence
atgcccaagcaggtggaggtgcggatgcacgacagccacctgggctccgaagagccaaagcatcgacatctgggtctccgcctttgcgacaaattaggaaagaatctcctgctcaccctaaccgtgtttggagtgattttgggagctgtatgtggcggtttattgcgcttagccagtcctatacatccagatgttgttatgctgattgcctttcctggcgacatcttgatgagaatgctgaagatgctgatcctgcctctcataatctcctccctgatcacagggctctctgggctcgacgcaaaggcgagcggaagacttgggacccgggccatggtgtactacatgagcacaactataatagcagccgtcctgggagtcatcctggtcctcgcaattcacccaggtaatccgaaactgaaaaagcagcttggccctgggaagaaaaatgacgaagtgagctcactcgacgccttcctggatctcatcaggaatcttttcccagaaaatttagtgcaagcttgcttccaacagattcagacggtgactaagaaagtcttagtggcccctccgccagacgaggaggccaacgcaaccagtgccgtagtttccttgctgaatgaaactgtgacagaggtccccgaggagactaagatggtcataaaaaagggactcgagttcaaggacgggatgaacgtattggggttgataggtttcttcattgcttttggaatagcgatgggcaaaatgggcgaccaggccaaactgatggtggatttctttaacattctgaatgaaattgtgatgaagcttgtgatcatgatcatgtggtacagccccttgggaatcgcctgcctcatctgcggcaaaatcatcgccatcaaagatcttgaggtcgttgcacgtcagctgggaatgtacatggttactgtgatcatcggccttatcatccacgggggcatctttctgcccctgatctacttcgtcgtgacgcgaaaaaaccccttctctttctttgccggcatctttcaagcatggattaccgcactgggcacggcctcgagcgccgggacacttcctgtgacattcaggtgcctggaggaaaatctcgggattgataagagggttaccagattcgttctgcctgttggcgcgactattaatatggatggcactgccctgtatgaggctgtggcggctatttttatagcgcaaatgaacggggttgtgttggatggcggccagattgtgactgtgtcactgactgctactctagcaagcgtaggagccgcctccataccatctgctggcctggttacaatgctcctgatccttactgccgttggcctgcctacagaggatatcagcttactggtggccgtcgactggctgctggaccgtatgcgcacatctgtcaacgtggtaggggactctttcggagctggaattgtttaccatctcagcaaatctgagcttgacaccatagactctcagcaccgcgttcatgaggatattgagatgacgaaaacacagagcatttacgatgatatgaagaatcacagggaaagcaactctaaccaatgcgtctacgctgctcataacagtgtgattgtggatgaatgcaaggtaacgctggccgcgaacggcaagagtgccgactgttccgtggaggaggaaccgtggaaacgagagaaatag

SEQ ID NO: 75137 - DNA, 1698 bp, Artificial Sequence
  derived and/or modified sequence
atgcccaagcaggtggaggtgcggatgcacgacagccacctgggctctgaagagccaaagcaccgccatttaggtttacggctctgcgataagctgggcaaaaatctgctgctgactctaactgtgttcggggtaatacttggagccgtgtgcggaggccttctccggttggcatcccctatacacccagacgtagttatgctaatcgcttttccaggggatattttgatgcgtatgctcaaaatgctgatcctgccactgataatttcatcactcatcacaggcctgtctggactggacgcaaaggcctctggaaggctcgggactcgcgccatggtgtactatatgagcacgaccattattgccgccgttctcggggtgatcttggtactggccatccatcctggaaaccccaaattgaaaaaacagctgggaccgggcaagaagaatgatgaggtgagctcactggacgcctttcttgatctgatccgaaacctgttcccagaaaacctggtccaggcatgcttccagcaaatccagaccgtgaccaaaaaagtgctcgtggcgcctcctccagacgaggaagcaaatgcaacttccgcagtggtctcactactgaacgaaaccgttactgaggtgccagaggaaacgaaaatggttatcaagaaaggactcgaatttaaggacggcatgaacgtcctaggtctgattggttttttcattgcttttgggatcgccatgggcaaaatgggggatcaggcgaagctgatggtcgactttttcaacattctaaacgaaattgtgatgaagttggtaataatgatcatgtggtattcccccctcggcattgcttgcctgatttgcggtaagataattgccatcaaggatcttgaagtagtggctaggcagttggggatgtacatggttaccgtcattatcggtctgattatccatggagggatcttcctgcctttgatctatttcgtggtcactagaaagaaccccttctctttttttgccggaattttccaggcttggatcacggcgcttggtaccgcgagctccgccgggacacttcccgtaacgttccggtgcctggaagaaaatctagggattgataagcgcgtgactaggttcgttctgccagtcggagcgacaatcaacatggatggaaccgctttatatgaggccgttgcagctattttcatagctcagatgaatggggttgtgctggacggtgggcagattgttaccgtctcactgacagcaacactcgcgtctgtaggggctgcatccatccctagtgcaggcctggtgacaatgttgctcatactaacagcggtaggactcccaactgaggatatttctctcctggtggccgtagattggttactggatagaatgcgcacttcagtcaacgttgtaggcgactcttttggcgctgggatagtctaccatttgagcaaaagcgagctcgacactatcgatagccaacatagagttcatgaagatatcgagatgacaaagacgcagtctatttacgatgatatgaaaaatcatcgagagagcaatagcaaccagtgcgtgtatgccgcccacaattctgttattgtagacgagtgcaaagtgactttagctgcaaatgggaagtccgccgactgttcagtggaagaagagccttggaaacgcgaaaaatag

SEQ ID NO: 75138 - DNA, 1698 bp, Artificial Sequence
  derived and/or modified sequence
atgcccaaacaggtggaagtgaggatgcacgactcacatctgggatctgaggagcccaagcaccgccatttagggttacgactgtgtgataagttgggcaagaacctattattaactctgacagtgtttggtgtgatacttggggcagtttgtgggggactcctgcgccttgccagcccgatccacccagatgtggtcatgttgatcgcatttcctggggacattctgatgaggatgcttaagatgctgatccttccactcataatatctagccttataaccggtctctcagggctagatgccaaagcatctgggagattgggaacaagggcaatggtctattacatgagcaccacaataattgccgctgtgttgggtgtgatcctagtgttggcgattcatcctggtaaccccaagttgaaaaaacagctggggccaggaaaaaagaatgatgaagtgtcctctttggacgcgtttctagacctgatccggaacctgttcccagagaatctggtgcaagcatgctttcagcaaatccagacagtcacgaaaaaagtcctggtggcacctcctccagacgaggaagcaaatgcaacttccgctgtagtctccttgctgaacgaaacggtgacagaggtgcctgaagaaaccaaaatggttatcaaaaaaggcctggagtttaaggatggaatgaacgtgctgggcctcatcggcttctttatagccttcggaatagctatgggtaagatgggtgaccaggccaagctgatggtcgacttctttaacattctgaatgagatcgttatgaagctagtcatcatgataatgtggtactcgcccttgggtatcgcctgcctcatctgcgggaagatcatagcaataaaggacttggaggtcgtggccagacagctgggcatgtacatggtcacagtgatcattgggttgattattcatgggggaatattcctccctctgatttactttgtggtcactagaaagaatccattctcatttttcgccggaattttccaagcatggataactgccttgggcactgcctcgagcgctggaactcttccagtgaccttccggtgccttgaggagaatctgggtattgataagagggtcacccggtttgtcctcccggtgggcgcaacgatcaacatggatgggactgccctttatgaagccgtcgcagccattttcatagcgcaaatgaacggagtggttttggatgggggtcaaatcgtgaccgtgtctctgacagccactttggcctcggtaggggctgcctctataccctctgccggactagtgactatgctccttattttgaccgcagttgggctccctactgaggacatttccttgctagtggctgttgattggcttttagacaggatgaggacctctgtcaatgtggtgggtgactcgtttggcgctggaatcgtgtaccacttatcgaagtctgaactggacaccatcgactcccagcatagagttcacgaagacatcgagatgacaaaaacacaaagcatctacgacgatatgaaaaaccatagagagagcaatagtaatcagtgtgtgtacgccgcacacaattccgtcatcgtggacgagtgtaaagtcaccctggcagccaacggcaagtcggcggactgtagcgtggaggaagagccctggaaaagagaaaaatag

SEQ ID NO: 75139 - DNA, 1698 bp, Artificial Sequence
  derived and/or modified sequence
atgcctaaacaggtggaagtgcgaatgcatgatagtcacctcggtagcgaggaacctaagcatcggcacttaggtctcaggctgtgcgacaaactgggaaagaatttactcctgacactcaccgtgtttggggtgattctcggggcagtgtgtggagggctccttaggctggcctctccaattcatcccgacgtcgtaatgttgattgccttcccaggcgatattctaatgcgcatgctgaaaatgttaatcctaccactcattatctcaagcctgataaccgggctctcgggtctcgatgctaaagccagcgggaggctgggaaccagagcaatggtgtactatatgtctaccacgatcatcgccgctgtcttaggtgtaattctcgtcttagctattcatcctggcaaccccaagcttaaaaagcaactcgggcctggaaagaaaaatgatgaagtgagttccctggacgctttcctcgacttgatacgcaacctgtttcccgagaacctcgtccaggcctgtttccagcagattcagactgtgactaaaaaggtgctggtggcccctccacccgacgaggaggccaatgccacatcagccgtggtgtctttgctgaatgaaaccgtgaccgaagtgccagaggagactaaaatggtgattaagaaagggttagagttcaaggacgggatgaacgtgctggggctgatcggcttctttatcgcatttggcattgctatgggaaagatgggcgatcaggccaagcttatggtggacttcttcaatattcttaatgagatcgtgatgaagctggtgatcatgattatgtggtactcacctttaggaattgcttgccttatttgtggtaaaatcatagctatcaaggatttggaggtggtagcaagacaactgggaatgtacatggtgacagtgataattggcctcatcatccatggcggtattttcctgcccctcatctatttcgtcgtaacccggaagaatcctttctcttttttcgccggaatcttccaggcctggattaccgccttgggaactgcaagctctgcaggcacactgccggtgacattccggtgcctggaggagaatctgggcatagataagcgcgtcactcgattcgtcctcccagtgggggcaacgatcaacatggacggcacagctctctacgaggcagtagccgctattttcatcgcccagatgaacggggtggtgctggacgggggacagattgtgactgtctccctgactgctacactggctagtgtcggggcagcaagcatccctagcgctgggctcgttaccatgcttttgattttgaccgctgtggggctcccaactgaagatatctctctattggttgcagttgactggctgctggacagaatgcggacgagcgtgaacgttgtgggggactctttcggagccggtattgtataccatctgagcaagtccgagctggacaccatcgactctcaacaccgcgtccacgaagacatcgaaatgaccaaaacacagtcgatttacgatgacatgaagaaccatagggagtccaatagtaatcaatgtgtatacgctgcacacaattccgtgattgtggacgaatgcaaggtgaccctggccgcaaacgggaaatctgccgactgctccgttgaagaggaaccctggaagcgtgagaagtag

SEQ ID NO: 75140 - DNA, 1698 bp, Artificial Sequence
  derived and/or modified sequence
atgcccaagcaggtggaggtgagaatgcacgacagccacctgggcagcgaggagcccaagcacagacacctgggcctgagactgtgcgacaagctgggcaagaacctgctgctgaccctgaccgtgttcggcgtgatcctgggcgccgtgtgcggcggcctgctgagactggccagccccatccaccccgacgtggtgatgctgatcgccttccccggcgacatcctgatgagaatgctgaagatgctgatcctgcccctgatcatcagcagcctgatcaccggcctgagcggcctggacgccaaggccagcggcagactgggcaccagagccatggtgtactacatgagcaccaccatcatcgccgccgtgctgggcgtgatcctggtgctggccatccaccccggcaaccccaagctgaagaagcagctgggccccggcaagaagaacgacgaggtgagcagcctggacgccttcctggacctgatcagaaacctgttccccgagaacctggtgcaggcctgcttccagcagatccagaccgtgaccaagaaggtgctggtggcccccccccccgacgaggaggccaacgccaccagcgccgtggtgagcctgctgaacgagaccgtgaccgaggtgcccgaggagaccaagatggtgatcaagaagggcctggagttcaaggacggcatgaacgtgctgggcctgatcggcttcttcatcgccttcggcatcgccatgggcaagatgggcgaccaggccaagctgatggtggacttcttcaacatcctgaacgagatcgtgatgaagctggtgatcatgatcatgtggtacagccccctgggcatcgcctgcctgatctgcggcaagatcatcgccatcaaggacctggaggtggtggccagacagctgggcatgtacatggtgaccgtgatcatcggcctgatcatccacggcggcatcttcctgcccctgatctacttcgtggtgaccagaaagaaccccttcagcttcttcgccggcatcttccaggcctggatcaccgccctgggcaccgccagcagcgccggcaccctgcccgtgaccttcagatgcctggaggagaacctgggcatcgacaagagagtgaccagattcgtgctgcccgtgggcgccaccatcaacatggacggcaccgccctgtacgaggccgtggccgccatcttcatcgcccagatgaacggcgtggtgctggacggcggccagatcgtgaccgtgagcctgaccgccaccctggccagcgtgggcgccgccagcatccccagcgccggcctggtgaccatgctgctgatcctgaccgccgtgggcctgcccaccgaggacatcagcctgctggtggccgtggactggctgctggacagaatgagaaccagcgtgaacgtggtgggcgacagcttcggcgccggcatcgtgtaccacctgagcaagagcgagctggacaccatcgacagccagcacagagtgcacgaggacatcgagatgaccaagacccagagcatctacgacgacatgaagaaccacagagagagcaacagcaaccagtgcgtgtacgccgcccacaacagcgtgatcgtggacgagtgcaaggtgaccctggccgccaacggcaagagcgccgactgcagcgtggaggaggagccctggaagagagagaagtag

SEQ ID NO: 75141 - protein, 640 aa, Artificial Sequence
  derived and/or modified sequence
MELEVPDEAESAEAGAVPSEAAWAAESGAAAGLAQKKAAPTEVLSMTAQPGPGHGKKLGHRGVDASGETTYKKTTSSTLKGAIQLGIGYTVGHLSSKPERDVLMQDFYVVESIFFPSEGSNLTPAHHFQDFRFKTYAPVAFRYFRELFGIRPDDYLYSLCNEPLIELSNPGASGSLFYVTSDDEFIIKTVMHKEAEFLQKLLPGYYMNLNQNPRTLLPKFYGLYCVQSGGKNIRVVVMNNILPRVVKMHLKFDLKGSTYKRRASKKEKEKSFPTYKDLDFMQDMPEGLLLDADTFSALVKTLQRDCLVLESFKIMDYSLLLGVHNIDQHERERQAQGAQSTSDEKRPVGQKALYSTAMESIQGGAARGEAIESDDTMGGIPAVNGRGERLLLHIGIIDILQSYRFIKKLEHTWKALVHDGDTVSVHRPSFYAERFFKFMSNTVFRKNSSLKSSPSKKGRGGALLAVKPLGPTAAFSASQIPSEREEAQYDLRGARSYPTLEDEGRPDLLPCTPPSFEEATTASIATTLSSTSLSIPERSPSETSEQPRYRRRTQSSGQDGRPQEEPPAEEDLQQITVQVEPACSVEIVVPKEEDAGVEASPAGASAAVEVETASQASDEEGAPASQASDEEDAPATDIYF

SEQ ID NO: 75142 - DNA, 1923 bp, Artificial Sequence
  derived and/or modified sequence
atggaactggaagttccggacgaagcagaaagtgctgaagcaggagccgtccccagcgaagcggcttgggcggccgagtcaggcgccgccgccggtctggctcagaagaaggcagccccaaccgaggtactctctatgactgcgcagcctgggcccggccatggcaagaagctaggacaccggggcgttgacgcatcaggagagaccacctacaaaaaaacgacaagttcaacgctcaagggtgccattcaactcgggatagggtacaccgtcggccatctctcaagcaagccagaacgtgatgtcttgatgcaggatttctacgttgtagagtccatcttcttccctagcgagggttctaacctgacccctgcacaccacttccaagacttccgcttcaagacatatgcaccagtcgctttcagatatttccgcgagttgttcgggattcgccccgatgactacttgtatagcctgtgtaatgagccgctaattgaactaagtaatcccggggcgtcaggaagcttattctacgtgacatccgacgatgagtttataattaaaaccgttatgcacaaggaagcggaattcctccaaaaactgctccccgggtattacatgaatctcaatcagaatcctcgcacgttgctaccaaaattctatgggctttactgtgtgcagtctgggggaaagaatattagggtggtggttatgaacaatatattgccacgagtggtgaagatgcaccttaagtttgacctaaagggatccacctacaagaggagagctagcaaaaaagaaaaggagaagtcgttccccacatacaaggatctcgactttatgcaggacatgcctgagggattgctgctcgatgctgataccttctctgcactggtgaagactctgcaaagagattgtttagtactcgaatcgtttaaaatcatggattattccctcttgttgggcgtccataacatcgatcaacacgagagggaacgacaagctcagggggcgcagtcaacctcggatgagaagcgtcccgtgggacaaaaagcactatattccactgctatggagtctatccaaggaggcgctgcaagaggcgaagcgattgagtcagacgacacgatggggggtattcctgcagttaatggacgcggtgagagacttctgctgcacatcgggataatcgacatactgcaatcttacaggttcatcaaaaagctggaacacacttggaaggctttagtgcacgatggagacaccgtatcagtccacaggccttcattttacgccgaacgctttttcaaattcatgtctaatactgtgttcagaaaaaatagttcactgaaatcatccccttcaaagaaggggcggggcggcgccctgctggctgtaaaaccacttggtccgactgcggcctttagcgcatcgcagattccttcagaaagagaagaagcccagtacgacttacgaggcgctagatcatatcctacactagaggatgagggccggcctgacctgctgccatgtactccgccgagcttcgaggaggctacgactgcatccatcgccaccactctgtcgagtacgtccctgtccatcccggagcgttccccctcggagacgagtgaacagccccgctacagacgcaggactcagtccagtgggcaggatgggcggccccaggaagagccgcccgctgaagaggacctgcagcagatcactgtccaagtggagccagcatgtagcgtggagatagtggtgccgaaggaggaagacgccggggtggaggcatctcctgccggtgcatcagcagccgtcgaggttgagactgcttctcaggcctccgatgaggaaggcgctccagcgtctcaagcatccgacgaagaagatgcaccggctaccgatatatatttttag

SEQ ID NO: 75143 - DNA, 1923 bp, Artificial Sequence
  derived and/or modified sequence
atggagctggaggtgcctgatgaagctgagagcgctgaggccggggctgtgcccagcgaggccgcctgggccgctgagagcggggctgctgctggcctggcccagaagaaggccgcccccacagaggtgctgtccatgacagcccagcccggccctggccacggcaagaagctgggccaccggggcgtggatgccagcggggagaccacctacaagaagaccaccagcagcaccctgaagggggccatccagctgggcatcggctacacagtgggccacctgagcagcaagccagagagagatgtgctgatgcaggacttctacgtggtggagagcatcttcttccccagcgagggcagcaacctgaccccagcccaccacttccaggacttccgcttcaagacctacgcccctgtggccttccgctacttccgggagctgtttggcatccggccagatgactacctgtacagcctgtgcaatgagcccctgattgagctgagcaaccctggggccagcggcagcctcttctacgtgaccagtgatgatgagttcatcatcaagacagtgatgcacaaggaggccgagttcctgcagaagctgctgcccggctactacatgaacctgaaccagaaccccaggaccctgctgcccaagttctacggcctgtactgtgtgcagagcggcggcaagaacatccgggtggtggtgatgaacaacatcctgccccgggtggtgaagatgcacctgaagtttgacctgaagggcagcacctacaagagaagagccagcaagaaggagaaggagaagagcttccccacctacaaggacctggacttcatgcaggacatgcctgagggcctgctgctggatgctgacaccttcagcgccctggtgaagaccctgcagagggactgcctggtgctggagagcttcaagatcatggactacagcctgctgctgggcgtgcacaacatcgaccagcacgagcgggagcggcaggcccagggcgcccagagcaccagtgatgagaagaggcctgtgggccagaaggccctgtacagcacagccatggagagcatccagggcggggccgcccggggggaggccattgaaagtgatgacaccatgggcggcatcccagctgtgaatggccgcggggagcggctgctgctgcacatcggcatcatcgacatcctgcagagctaccgcttcatcaagaagctggagcacacctggaaggccctggtgcatgatggagacacagtgtctgtgcaccggcccagcttctacgccgagcgcttcttcaagttcatgagcaacacagtgttcaggaagaacagcagcctgaagagcagccccagcaagaagggccggggcggggccctgctggccgtgaagcccctgggccccacagctgccttcagcgccagccagatccccagcgagcgggaggaggcccagtatgacctgcggggggcccggagctaccccaccctggaggatgagggccgcccagacctgctgccctgcaccccacccagctttgaggaggccaccacagccagcatcgccaccaccctgagcagcaccagcctgagcatccctgagaggagccccagcgagaccagcgagcagccccgctacagaagaaggacccagagcagcggccaggacggccggccccaggaggagcccccagctgaggaggacctgcagcagatcaccgtgcaggtggagcccgcctgcagcgtggagatcgtggtgcccaaggaggaggatgctggggtggaggccagccctgctggggccagcgctgctgtggaggtggagacagccagccaggccagtgatgaggagggcgccccagccagccaggccagtgatgaagaagatgccccagccacagacatctacttctag

SEQ ID NO: 75144 - DNA, 1923 bp, Artificial Sequence
  derived and/or modified sequence
atggagctggaggtgcccgacgaggccgagagcgccgaggccggcgccgtcccctccgaggcagcttgggcagccgagtcaggcgccgcagctggccttgcccagaaaaaggccgctccaactgaggttttgtcgatgacggcccagcccgggccaggacacggcaagaagttggggcacagaggcgtggacgcttcaggagagacgacctacaaaaaaactaccagttcaacgctcaaaggtgccattcagttaggcattggttataccgtgggacatctttcaagcaagccagagcgagacgtgcttatgcaggacttctacgttgttgagtccattttctttcccagcgaaggtagcaacctgacaccagcccaccattttcaggattttcgtttcaagacctacgcccctgtcgccttccggtacttcagagagctcttcggaattcgccccgatgattacctttactctctgtgcaacgaacccctgatcgaactaagtaaccctggggctagcggatctcttttctatgtcacatctgacgatgaatttatcatcaagaccgtcatgcacaaagaggctgagtttctgcagaaactactcccaggatattatatgaacctgaatcagaatccaaggacattgctgcctaaattctacgggctgtattgtgtgcagagcggaggcaaaaatattagggttgtcgtcatgaacaacattctgccgcgagtggtgaaaatgcacttgaagtttgacttaaagggttctacgtacaagaggagagccagcaaaaaggagaaagaaaaatccttcccaacctacaaagatctggactttatgcaagacatgccagaaggacttctgctcgacgcagacacctttagcgcccttgtgaagacccttcaacgggactgtctggtactcgaaagttttaaaattatggattactccctgctgctcggcgtgcacaatatcgatcagcacgaaagagaaaggcaagcacagggggctcagagcacaagcgatgaaaagcggcccgtggggcagaaagctctgtactctactgcgatggagtccatccaggggggggccgccagaggcgaagccatcgaaagtgatgacacaatgggaggaatccctgcggtgaacggccgcggggaaaggcttctgctgcatattgggattatcgacatcctccaatcatacagattcataaaaaaattagaacatacctggaaggctctagtccatgacggagataccgtgtctgtccatcggccatccttttacgccgaacgcttcttcaaattcatgtcaaataccgtgttcaggaagaactcgtcccttaagtcctctccttctaagaaaggccgcggaggagccctactggccgtgaaacctctgggccctactgctgctttcagcgcttcacagatacctagcgaaagggaagaagcccaatacgatcttaggggagccaggagttaccccacactcgaggatgagggaaggcccgacttgttaccctgcactccaccctcctttgaggaagccacaaccgctagcatcgctacaactcttagctccaccagcctctctatacctgaacgttccccttccgagaccagtgagcagcccagatatcgccgccgtacccagtcctctggacaggacggacgcccccaagaagaacctcccgcggaggaggacctacagcaaatcaccgttcaggtggagcccgcttgtagtgttgagatagtggttcctaaggaggaggacgccggggttgaagcctccccggctggcgcaagcgccgccgtcgaggtggagaccgcctcacaggcttccgacgaggagggcgctcctgcttcccaagctagtgacgaggaggacgccccagccaccgacatttatttttag

SEQ ID NO: 75145 - DNA, 1923 bp, Artificial Sequence
  derived and/or modified sequence
atggaactcgaagttcccgatgaggccgaaagcgcagaagccggtgccgtgccatctgaagcagcttgggccgctgaatcgggcgcagcggctgggctggctcagaagaaggccgctcccactgaggtgctgtctatgacagcacagcctggacctggacacggtaagaagttggggcatcgcggtgtggacgcctccggcgaaactacatacaagaagacaacgtcctcaacattgaagggtgctattcagctcggcatcggttacactgtcggacatttgagtagtaagcctgaacgtgacgtcctgatgcaggatttttacgtggtcgaaagcatattcttcccgagcgagggaagcaacctgactcccgctcaccactttcaggatttccgttttaagacctatgcccctgtggctttcagatacttccgcgagctatttggaattcgcccagatgattacttatacagcctgtgtaatgaacccttgatcgagctgtctaatcctggtgcatccggtagccttttctacgtgacctcagacgacgaattcatcatcaagactgtgatgcacaaggaggcagagttcctgcagaagttactccctggctattatatgaacttgaaccagaaccccaggacccttctgccaaaattttacggcctttattgtgtccagtctgggggaaagaatatcagggtggtggtgatgaataacatactgcccagggtcgtgaaaatgcacctgaagtttgacctaaagggctccacttataaaaggagggcatctaagaaggaaaaagagaagtccttcccaacgtataaagacctggactttatgcaggatatgcctgaggggctgctcttggatgcagatactttttcagcactcgtgaaaacccttcagagggactgcctggtgctggagtcattcaaaatcatggactacagtcttctgttgggggtgcacaacatcgatcagcatgagcgggagaggcaagcacaaggagcccaatccaccagcgacgagaagcggccagtcgggcagaaagctctatacagcactgccatggaaagtattcaggggggtgcagcccgaggagaagctattgagtccgatgacacaatgggcggaatcccagccgtaaacggaagaggcgagagactactactgcatatcggaatcatagatatcctgcaaagctatcggtttataaagaaacttgagcacacctggaaagccctggtacacgatggcgacactgtcagcgtccaccgcccaagcttctatgccgaacggtttttcaaattcatgtctaatactgtgttccgtaaaaacagctccctcaaatcaagtccatccaagaagggcaggggaggtgcgcttctggcagttaaacccttaggacccaccgccgctttttccgcttcacagattccatctgaaagggaggaagcccagtacgatctgagaggtgccagatcctatcctactctcgaggacgagggcagacccgacctcctgccttgcacaccaccatcattcgaggaagccactaccgccagtattgctacgactctgtcatctacttccctgagtatcccggaacggtctccctcagaaacctctgagcaacccagatatcgacgccgtacacagtcctctgggcaagacggccgacctcaggaggagccaccggctgaggaagacttgcagcagattaccgttcaggttgagccagcctgctcagtcgaaatcgtggtgccaaaagaggaggacgccggtgtcgaggcgagtccagcaggcgctagcgcagccgtggaagtcgaaacagctagccaggcttcagatgaggaaggcgcaccggcaagccaagcctccgatgaggaagacgctcctgctaccgatatctacttttag

SEQ ID NO: 75146 - DNA, 1923 bp, Artificial Sequence
  derived and/or modified sequence
atggagctggaggtgcccgacgaggccgagagcgccgaggccggcgccgtgcccagcgaggccgcctgggccgccgagagcggcgccgccgccggcctggcccagaagaaggccgcccccaccgaggtgctgagcatgaccgcccagcccggccccggccacggcaagaagctgggccacagaggcgtggacgccagcggcgagaccacctacaagaagaccaccagcagcaccctgaagggcgccatccagctgggcatcggctacaccgtgggccacctgagcagcaagcccgagagagacgtgctgatgcaggacttctacgtggtggagagcatcttcttccccagcgagggcagcaacctgacccccgcccaccacttccaggacttcagattcaagacctacgcccccgtggccttcagatacttcagagagctgttcggcatcagacccgacgactacctgtacagcctgtgcaacgagcccctgatcgagctgagcaaccccggcgccagcggcagcctgttctacgtgaccagcgacgacgagttcatcatcaagaccgtgatgcacaaggaggccgagttcctgcagaagctgctgcccggctactacatgaacctgaaccagaaccccagaaccctgctgcccaagttctacggcctgtactgcgtgcagagcggcggcaagaacatcagagtggtggtgatgaacaacatcctgcccagagtggtgaagatgcacctgaagttcgacctgaagggcagcacctacaagagaagagccagcaagaaggagaaggagaagagcttccccacctacaaggacctggacttcatgcaggacatgcccgagggcctgctgctggacgccgacaccttcagcgccctggtgaagaccctgcagagagactgcctggtgctggagagcttcaagatcatggactacagcctgctgctgggcgtgcacaacatcgaccagcacgagagagagagacaggcccagggcgcccagagcaccagcgacgagaagagacccgtgggccagaaggccctgtacagcaccgccatggagagcatccagggcggcgccgccagaggcgaggccatcgagagcgacgacaccatgggcggcatccccgccgtgaacggcagaggcgagagactgctgctgcacatcggcatcatcgacatcctgcagagctacagattcatcaagaagctggagcacacctggaaggccctggtgcacgacggcgacaccgtgagcgtgcacagacccagcttctacgccgagagattcttcaagttcatgagcaacaccgtgttcagaaagaacagcagcctgaagagcagccccagcaagaagggcagaggcggcgccctgctggccgtgaagcccctgggccccaccgccgccttcagcgccagccagatccccagcgagagagaggaggcccagtacgacctgagaggcgccagaagctaccccaccctggaggacgagggcagacccgacctgctgccctgcaccccccccagcttcgaggaggccaccaccgccagcatcgccaccaccctgagcagcaccagcctgagcatccccgagagaagccccagcgagaccagcgagcagcccagatacagaagaagaacccagagcagcggccaggacggcagaccccaggaggagccccccgccgaggaggacctgcagcagatcaccgtgcaggtggagcccgcctgcagcgtggagatcgtggtgcccaaggaggaggacgccggcgtggaggccagccccgccggcgccagcgccgccgtggaggtggagaccgccagccaggccagcgacgaggagggcgcccccgccagccaggccagcgacgaggaggacgcccccgccaccgacatctacttctag

SEQ ID NO: 75147 - protein, 361 aa, Artificial Sequence [sequence omitted]

SEQ ID NO: 75148 - DNA, 1086 bp, Artificial Sequence
  derived and/or modified sequence
atgagccccgagtgcgccagagccgccggcgacgcccccctgagaagcctggagcaggccaacagaaccagattccccttcttcagcgacgtgaagggcgaccacagactggtgctggccgccgtggagaccaccgtgctggtgctgatcttcgccgtgagcctgctgggcaacgtgtgcgccctggtgctggtggccagaagaagaagaagaggcgccaccgcctgcctggtgctgaacctgttctgcgccgacctgctgttcatcagcgccatccccctggtgctggccgtgagatggaccgaggcctggctgctgggccccgtggcctgccacctgctgttctacgtgatgaccctgagcggcagcgtgaccatcctgaccctggccgccgtgagcctggagagaatggtgtgcatcgtgcacctgcagagaggcgtgagaggccccggcagaagagccagagccgtgctgctggccctgatctggggctacagcgccgtggccgccctgcccctgtgcgtgttcttcagagtggtgccccagagactgcccggcgccgaccaggagatcagcatctgcaccctgatctggcccaccatccccggcgagatcagctgggacgtgagcttcgtgaccctgaacttcctggtgcccggcctggtgatcgtgatcagctacagcaagatcctgcagatcaccaaggccagcagaaagagactgaccgtgagcctggcctacagcgagagccaccagatcagagtgagccagcaggacttcagactgttcagaaccctgttcctgctgatggtgagcttcttcatcatgtggagccccatcatcatcaccatcctgctgatcctgatccagaacttcaagcaggacctggtgatctggcccagcctgttcttctgggtggtggccttcaccttcgccaacagcgccctgaaccccatcctgtacaacatgaccctgtgcagaaacgagtggaagaagatcttctgctgcttctggttccccgagaagggcgccatcctgaccgacaccagcgtgaagagaaacgacctgagcatcatcagcggctag

SEQ ID NO: 75149 - DNA, 1086 bp, Artificial Sequence
  derived and/or modified sequence
atgagtcctgagtgtgcacgtgccgccggcgacgcgccactccgctcactggaacaagcaaatcgcactcgcttcccctttttctccgatgttaagggcgatcacaggctcgtcctagccgccgtggagaccactgtccttgttctcatattcgctgtgagtctcctgggcaatgtgtgtgcactggttctggtagccaggcgcagacggagaggtgcaaccgcttgtttggtgcttaacctcttctgcgccgaccttttgttcatatcggccatcccactggtgctggcagtgcgctggacagaagcctggcttttgggtcctgttgcgtgtcacctgctattttacgtaatgacactctcaggatctgtgactatcctcacccttgcagccgtgagtcttgaacgaatggtatgtattgtgcatctccagaggggcgtgcggggtcctgggcggagagctcgagccgtattgttagcactgatatggggctattcagccgtggccgctctgcctctctgtgtattcttcagagtggtgccccaacgcctccctggcgcagatcaggaaatatcaatttgtaccctcatctggcccactatcccaggcgaaatttcctgggatgtgtcttttgtgactctgaatttcctcgttcccggactggttatcgtgatttcctattcaaaaattctgcagatcaccaaggctagccgcaaaagactcacggtgtcactcgcctactctgagagccaccaaatcagagtgtcgcagcaggactttcgcctgtttcgaactctctttttactgatggtaagcttctttattatgtggtcacctatcatcatcacaatcttactaattcttatccagaactttaagcaggacctggttatatggccgagtctttttttttgggtagtggcattcacctttgctaattccgccctcaaccccattctgtacaacatgactctttgtagaaacgaatggaaaaagatcttctgttgtttctggttccccgaaaagggcgccatcctgaccgacacgtccgtgaagaggaacgatttgtctataatctccggctag

SEQ ID NO: 75150 - DNA, 1086 bp, Artificial Sequence
  derived and/or modified sequence
atgagcccagaatgtgcccgggctgctggagatgcccccctgcggagcctggagcaggccaacagaacccgcttccccttcttcagtgatgtgaagggggaccaccggctggtgctggccgctgtggagaccaccgtgctggtgctgatctttgctgtgtccctgctgggcaatgtgtgtgccctggtgctggtggccaggagaagaagaagaggagccacagcctgcctggtgctgaacctcttctgtgccgacctgctcttcatcagcgccatccccctggtgctggccgtgcgctggacagaggcctggctgctgggccctgtggcctgccacctgctcttctacgtgatgaccctgagcggctctgtgaccatcctgaccctggccgctgtgtccctggagaggatggtgtgcatcgtgcacctgcagaggggcgtgcggggccctggccggcgggcccgggctgtgctgctggccctgatctggggctacagcgctgtggccgccctgcccctgtgtgtgttcttccgggtggtgccccagaggctgcctggagctgaccaggagatcagcatctgcaccctcatctggcccaccatccctggagagatctcctgggatgtgtcctttgtgaccctgaacttcctggtgcccggcctggtgattgtcatctcctacagcaagatcctgcagatcaccaaggccagcaggaagaggctgactgtgtccctggcctacagcgagagccaccagatccgggtgtcccagcaggacttccgcctcttccgcaccctcttcctgctgatggtgtccttcttcatcatgtggagccccatcatcatcaccatcctgctgatcctgatccagaacttcaagcaggacctggtgatctggcccagcctcttcttctgggtggtggccttcacctttgccaacagcgccctgaaccccatcctgtacaacatgaccctgtgcagaaatgagtggaagaagatcttctgctgcttctggttccctgagaagggggccatcctgacagacacctctgtgaagagaaatgacctgagcatcatcagcggctag

SEQ ID NO: 75151 - DNA, 1086 bp, Artificial Sequence
  derived and/or modified sequence
atgagccccgagtgcgcccgggccgccggcgacgcccccctgcggtctctggagcaggccaacagaactaggtttccattttttagcgatgttaagggagaccaccggctggtcctggccgccgtggagaccactgtcttggtgttaattttcgctgtgtcgctgctgggtaacgtctgcgcccttgtattagtggcacgccggaggcggcggggggctaccgcctgtttggtgctgaatctgttctgtgccgacctgcttttcataagcgctatacccctggtgttggctgttcggtggacggaggcttggctgcttggtccagtcgcctgtcacctcctgttctacgttatgacactcagcggatcagtgactattctaaccttagcggccgtttcgcttgagcggatggtctgtatcgtgcatcttcagagaggcgtgaggggtcccggcagacgtgcacgtgccgttttgctggcactgatctggggatacagtgccgttgctgcactgcctctgtgcgtattttttagggtggtgccacagcggctacctggtgccgatcaagagatatcaatatgcacattgatttggcccactatacccggtgaaatctcttgggacgtgtcgttcgtcactctgaactttctggttcccggtctcgtgatcgtcataagttattccaagattcttcaaatcactaaggccagccgtaagagacttacagtgagcctggcgtatagcgagtcccatcagattcgcgtgtcgcagcaagactttcggctgttcaggaccctgtttctgctgatggtctcattttttatcatgtggtctccgataatcattacaattctcttgattctgatacagaatttcaaacaggacctggtcatctggccgtcgctgtttttctgggtggtggcgtttacttttgcaaatagcgccctcaacccgatcctctataatatgaccctgtgccgcaacgagtggaagaagatcttttgttgcttctggtttccggagaagggcgctatcctgaccgatacctccgtgaagcggaacgacctgtcaatcatttcgggctag

SEQ ID NO: 75152 - DNA, 3605 bp, Artificial Sequence
  derived and/or modified sequence
agtcgcctcccagatgagcactctctcagaccgctgcgggccgccaggcgccgggaatgtcccctgaatgcgcgcgggcagcgggcgacgcgcccttgcgcagcctggagcaagccaaccgcacccgctttcccttcttctccgacgtcaagggcgaccaccggctggtgctggccgcggtggagacaaccgtgctggtgctcatctttgcagtgtcgctgctgggcaacgtgtgcgccctggtgctggtggcgcgccgacgacgccgcggcgcgactgcctgcctggtactcaacctcttctgcgcggacctgctcttcatcagcgctatccctctggtgctggccgtgcgctggactgaggcctggctgctgggccccgttgcctgccacctgctcttctacgtgatgaccctgagcggcagcgtcaccatcctcacgctggccgcggtcagcctggagcgcatggtgtgcatcgtgcacctgcagcgcggcgtgcggggtcctgggcggcgggcgcgggcagtgctgctggcgctcatctggggctattcggcggtcgccgctctgcctctctgcgtcttcttccgagtcgtcccgcaacggctccccggcgccgaccaggaaatttcgatttgcacactgatttggcccaccattcctggagagatctcgtgggatgtctcttttgttactttgaacttcttggtgccaggactggtcattgtgatcagttactccaaaattttacagatcacaaaggcatcaaggaagaggctcacggtaagcctggcctactcggagagccaccagatccgcgtgtcccagcaggacttccggctcttccgcaccctcttcctcctcatggtctccttcttcatcatgtggagccccatcatcatcaccatcctcctcatcctgatccagaacttcaagcaagacctggtcatctggccgtccctcttcttctgggtggtggccttcacatttgctaattcagccctaaaccccatcctctacaacatgacactgtgcaggaatgagtggaagaaaattttttgctgcttctggttcccagaaaagggagccattttaacagacacatctgtcaaaagaaatgacttgtcgattatttctggctaatttttctttatagccgagtttctcacacctggcgagctgtggcatgcttttaaacagagttcatttccagtaccctccatcagtgcaccctgctttaagaaaatgaacctatgcaaatagacatccacagcgtcggtaaattaaggggtgatcaccaagtttcataatattttccctttataaaaggatttgttggccaggtgcagtggttcatgcctgtaatcccagcagtttgggaggctgaggtgggtggatcacctgaggtcaggagttcgagaccaacctgaccaacatggtgagacccccgtctctactaaaaataaaaaaaaaaattagctgggagtggtggtgggcacctgtaatcctagctacttgggaggctgaaccaggagaatctcttgaacctgggaggcagaggttgcagtgagccgagatcgtgccattgcactccaaccagggcaacaagagtgaaactccatcttaaaaaaaaaaaaaaaaagatttgttatgggttccttttaaatgtgaacttttttagtgtgtttgtaatatgatcaaatttaataaatatttatttatgactgttcagcaatcacatctcctacatataaagccacaccatagtggtttctgaagtgagtcttagaaccgattcaggacgcagatttctcctctgaagggtcacagccaccctgtgccctaccttggactcgcaagggtttaggatcattcgttgatgtcaagagcaattgaagaatttctaaggaacagttaaagatgacttacttttttttttttttcatttataaaaatgctatggacccttttaagagaatcggcatcatgaaatgagagagaaagtaggatggctctgaaatgtttgagagtgagttcaggagtggtttactcctgacgcatccagcagagatgcctcttaagcaccagccatggcagacagtgtcctttgtgctaggaatacagtggtgaaccagacagccatggccctctctcagggaacttaccttcgagtcaggggcagaaaaactaaataaaagtcaataaactatatctatatacagatacctatatatttgagatgagggtcttgctccaatgcccaggctggagtgcaacggcacaatcacggctccctgaagcctcaaatgccttggctcaagcaatcctcccgcctcagcctcccaagtagctgggattacaggcgtgagccgccacgcctggctacaagtcaataaatagtatagcatcacagagcgaataagcactgtgaagaaaatgggacgggggctatggtagtgatgggaatttagatcagatggggaggggcctaaggagacctttctgaggagtgacaaattggatcaaaaggtaagcgacaagaaagggccacctgtgtgaatgggggaagggacacagaagagatgttagtgcaaggaggctgacacgcttgaagggagagtggcgtaagccgactattgatggagcctcctctgcactaggcactgcctttaatgctgagatgaggggtacccggctggggcctgtcagttgaggccagagaaattgcagggttagatcacatagggcctaggagtttattctgttctccaagcccctggaggttggcaactggaggctgacgtgacctgatgaatgtgtgcaaagattaccctggctgctgggcagggaatagactctgaggagcatgagtgaaaatggagaccagttgggcagctgctgaagtgtgacatggggatgggaccttggaggtgagtggcattagggagggattgtgagaaatgacttgtaaatataccttgggaaggtaaaacaaagatgatttattgatgggaaggatggaattgatagaatgtgagggaaagggagaactcaaggggaatactctgattttttagcctgtcattggttggatggtgaagcaggcaacaaaaatgggggggcctgggcaaagattaggggggggggagccaagagtttcatttggagctcatcagtttgaaatctcagtgagacttccaaattgaataggcagttggatgcagagatgtggagcttgggcctggagatgcacattgtttggagatataaatggtgtttatagacctatggttttataatacatcccttggagagatagagagaaaccagagccaaagaccgaacccagggtcactccaccacttggaggctgggccagtggctggaatgcacagcagcacggggcctggtgtatagtaggtgttcaacaaatctttgttgctgaggaaatcagcaccagcagtagtgactgcttatgcagtttctggagcagcttgcttctgaagtcagattcatggatatcacaagctcgaagacaaacgaacagagatgttttgctcactttagttaatagatttgatcaattaaacctgtttttggaagtga

SEQ ID NO: 75153 - DNA, 1086 bp, Artificial Sequence
  derived and/or modified sequence
atgtcccccgagtgcgccagagctgccggtgatgcacccctgcggtctctcgaacaggcgaaccgtacgcgttttcccttcttttctgatgtgaagggggaccaccgcctcgtgctggctgccgtcgaaaccactgtcctcgtgctcatattcgccgtatccctcctgggcaatgtgtgcgccctcgtactagttgcccgtaggcgcagaaggggggcaacagcctgtctcgtactcaacctcttctgtgctgatctgttgttcatctccgctattcccctggtgctcgcagtgcggtggacggaggcctggttgttagggcctgtcgcttgtcatctgctgttttatgtaatgactttgagcggctccgtgaccattctgaccctggccgcagtctcactagaaaggatggtttgcatcgtgcacttgcagcgaggtgtgcgcggaccgggtcgaagggctcgcgcagtgctcctggccttaatctggggatattccgccgttgccgctttgccactttgtgtcttttttagagtcgtgccacagcgactccctggggctgaccaagaaatctccatttgcactcttatttggccaacaatccctggcgagatatcctgggatgtgagctttgtgactctgaatttcctggtgccaggtttggtcatcgtaatttcttactcaaagatcttgcagattacaaaggcctctcggaaacgcctcaccgtgtccctggcttactcggaatctcatcaaataagagtctcacagcaggatttcaggctctttagaactctctttctgctgatggtctcctttttcatcatgtggtctccaatcatcataaccattttgctgatactgattcagaatttcaagcaggatctcgtgatttggccgagcctgttcttctgggtcgtcgcgttcaccttcgccaacagcgccttaaatcctatcctgtacaatatgacgctgtgccgtaacgaatggaaaaaaattttttgctgtttttggtttcctgagaagggcgcaatactgactgacacttcagtgaaacggaatgatctcagtattatctcagggtag

SEQ ID NO: 75154 - protein, 245 aa, Artificial Sequence
  derived and/or modified sequence
MPSQQKKIIFCMAGVFSFACALGVVTALGTPLWIKATVLCKTGALLVNASGQELDKFMGEMQYGLFHGEGVRQCGLGARPFRFSFFPDLLKAIPVSIHVNVILFSAILIVLTMVGTAFFMYNAFGKPFETLHGPLGLYLLSFISVALWLPATRHQAQGSCGCLVMILFASEVKIHHLSEKIANYKEGTYVYKTQSEKYTTSFWVIFFCFFVHFLNGLLIRLAGFQFPFAKSKDAETTNVAADLMY

SEQ ID NO: 75155 - DNA, 738 bp, Artificial Sequence
  derived and/or modified sequence
atgccttcccagcagaaaaagatcattttttgtatggctggtgtgttctccttcgcttgcgctctgggcgtggtgacggcactcggcacaccgctgtggatcaaggccacggttctctgcaaaactggcgcgctcctggttaacgcttccggccaggaattggataaatttatgggagaaatgcagtatggcctgtttcacggagagggtgttcgccaatgtgggctgggcgcgaggccttttcgcttctcctttttcccagatttgctgaaggccattccggtaagcatccatgtcaacgtgatattgttcagcgcaatcttaatcgtgctgactatggtcggaaccgccttctttatgtacaatgcttttggtaagccctttgagactttacacggcccattggggttgtacctgctctcgtttatctcggtggccctgtggcttccagccacgaggcaccaggcccagggaagctgtgggtgcttggtgatgatactattcgcttctgaagtcaaaattcaccaccttagcgaaaagatagccaactacaaggaggggacatatgtatacaagactcagtctgagaagtataccacgtccttctgggttatttttttctgcttttttgtgcacttcctgaatgggctgctgatccgtctggcggggtttcaatttccctttgcgaaatctaaggacgccgagacaactaatgtggcggccgacttaatgtactag

SEQ ID NO: 75156 - DNA, 738 bp, Artificial Sequence
  derived and/or modified sequence
atgcccagccagcagaagaagatcatcttctgcatggccggggtcttctcctttgcctgtgccctgggcgtggtgacagccctgggcacccccctgtggatcaaggccaccgtgctgtgcaagacaggagccctgctggtgaatgccagcggccaggagctggacaagttcatgggagagatgcagtatggcctcttccatggagagggcgtgcggcagtgtggcctgggcgcccggcccttccgcttctccttcttcccagacctgctgaaggccatccctgtgtccatccacgtgaatgtcatcctcttcagcgccatcctgattgtgctgaccatggtgggcacagccttcttcatgtacaatgccttcggcaagccctttgagaccctgcacggccccctgggcctgtacctgctgtccttcatctctgtggccctgtggctgcctgccaccaggcaccaggcccagggcagctgtggctgcctggtgatgatcctgtttgccagcgaggtgaagatccaccacctgtctgagaagatcgccaactacaaggagggcacctacgtgtacaagacccagagcgagaagtacaccaccagcttctgggtgatcttcttctgcttctttgtgcacttcctgaatggcctgctgatccggctggccggcttccagttcccctttgccaagagcaaggatgctgagaccaccaacgtggccgctgacctgatgtactag

SEQ ID NO: 75157 - DNA, 738 bp, Artificial Sequence
  derived and/or modified sequence
atgcccagccagcagaagaagatcatcttctgcatggccggcgtgttctctttcgcatgtgctctcggcgtggttacagccctcggcactcccctgtggattaaagcaacagtcctctgcaaaaccggagccttgctagttaacgccagtggtcaggagttagacaaattcatgggtgaaatgcagtatggcctctttcacggcgaaggggtccgccagtgcggtctaggagcacgccctttcaggttttccttctttcccgacttgttaaaggcaattcctgtgagtattcacgttaatgttattttgttcagcgcaatcctgattgtcctgacaatggtgggcaccgcattcttcatgtataatgcctttgggaaacccttcgagaccctgcacgggcccctcgggctgtatctcctttctttcatatccgttgcactttggctgccggccacacgccaccaggcccagggatcatgtggatgtctcgtcatgattctcttcgcaagcgaagtgaagattcatcacctgagcgagaaaatcgctaattataaggagggaacttacgtctataagacccagagcgagaaatacaccacctcgttttgggtgatctttttttgtttctttgttcactttcttaatgggctcctgattcgcctcgccggatttcagtttccattcgctaagtccaaggatgccgaaacaacaaatgtggcggctgatctgatgtactag

SEQ ID NO: 75158 - DNA, 738 bp, Artificial Sequence
  derived and/or modified sequence
atgccttcccagcagaagaagatcatcttttgtatggccggtgtctttagcttcgcttgcgcgctgggtgtggtgaccgccctcgggactccactctggatcaaagctactgtgttgtgtaaaacaggcgctcttctggtgaatgcctcagggcaggaattagataagttcatgggtgagatgcagtatgggctgttccacggagagggggtccgtcagtgtgggttaggggcacgcccattccggttctctttcttcccagacctccttaaggctatcccggtgagtatacatgttaacgttatcctgttcagtgctatcctcatcgtgttaaccatggtggggactgcgttttttatgtacaatgcctttggaaagccctttgagacactccacggccctttggggctttatctgttgagcttcatctctgtggctctctggcttccagctacgcggcaccaggcccaaggatcctgcggatgcctcgttatgatcctcttcgcctctgaagttaagattcaccacctatccgaaaaaattgccaattacaaagaagggacgtatgtatataagacccagagcgagaagtacaccactagcttttgggtcatcttcttctgcttttttgtccattttctcaacgggctgctgatacggctcgcgggatttcagtttcccttcgcgaaaagtaaggatgcagagacgaccaacgtcgctgctgatttgatgtactag

SEQ ID NO: 75159 - DNA, 738 bp, Artificial Sequence
  derived and/or modified sequence
atgccaagccaacagaagaaaatcattttttgcatggccggagtgttcagttttgcatgtgccctcggagttgtgacagccttggggacaccgttgtggatcaaagccactgtcctctgcaaaacgggagctctgctcgtcaatgcctcagggcaggagctggacaagtttatgggtgaaatgcagtacgggcttttccacggagagggtgtgaggcagtgtgggttgggagcaaggccctttcggttctcattttttccagatttgctcaaagcaatcccagtgagcatccacgtcaatgtcattctcttctctgccatccttattgtgttaaccatggtggggacagccttcttcatgtacaatgcttttggaaaaccttttgaaactctgcatggtcccctagggctgtaccttttgagcttcatttcagttgccctttggctgccagctaccaggcaccaggctcaaggctcctgtggctgtcttgtcatgatattgtttgcctctgaagtgaaaatccatcacctctcagaaaaaattgcaaattataaagaagggacttatgtctacaaaacgcaaagtgaaaaatataccacctcattctgggtcattttcttttgcttttttgttcattttctgaatgggctcctaatacgacttgctggatttcagttcccttttgcaaaatctaaagacgcagaaacaactaatgtagctgcagatctaatgtactga

SEQ ID NO: 75160 - DNA, 738 bp, Artificial Sequence
  derived and/or modified sequence
atgcccagccagcagaagaagatcatcttctgcatggccggcgtgttcagcttcgcctgcgccctgggcgtggtgaccgccctgggcacccccctgtggatcaaggccaccgtgctgtgcaagaccggcgccctgctggtgaacgccagcggccaggagctggacaagttcatgggcgagatgcagtacggcctgttccacggcgagggcgtgagacagtgcggcctgggcgccagacccttcagattcagcttcttccccgacctgctgaaggccatccccgtgagcatccacgtgaacgtgatcctgttcagcgccatcctgatcgtgctgaccatggtgggcaccgccttcttcatgtacaacgccttcggcaagcccttcgagaccctgcacggccccctgggcctgtacctgctgagcttcatcagcgtggccctgtggctgcccgccaccagacaccaggcccagggcagctgcggctgcctggtgatgatcctgttcgccagcgaggtgaagatccaccacctgagcgagaagatcgccaactacaaggagggcacctacgtgtacaagacccagagcgagaagtacaccaccagcttctgggtgatcttcttctgcttcttcgtgcacttcctgaacggcctgctgatcagactggccggcttccagttccccttcgccaagagcaaggacgccgagaccaccaacgtggccgccgacctgatgtactag

SEQ ID NO: 75161 - protein, 130 aa, Artificial Sequence
  derived and/or modified sequence
MLPFLFFSTLFSSIFTEAQKQYWVCNSSDASISYTYCGRDLKQLYFNLYITVNTMNLPKRKEVICRGSDDDYSFCRALKGETVNTTISFSFKGIKFSKGKYKCVVEAISGSPEEMLFCLEFVILHQPNSN

SEQ ID NO: 75162 - DNA, 393 bp, Artificial Sequence
  derived and/or modified sequence
atgctgccctttcttttcttctctaccctcttctcgtctatttttaccgaggcccagaagcagtattgggtgtgtaacagcagcgacgcaagcatctcgtatacttactgcgggagggatctgaagcagctatactttaatctgtatatcacagtgaacacgatgaacttacctaaacgcaaagaggtgatttgtcgtgggtctgacgatgattactccttttgccgggcattaaaaggagaaacagtgaacaccacaatctcttttagtttcaagggaatcaagttctccaaaggtaaatacaagtgtgtggtcgaggctataagcggctctcccgaagagatgcttttttgccttgagtttgttatcttgcaccagcctaactctaactag

SEQ ID NO: 75163 - DNA, 393 bp, Artificial Sequence
  derived and/or modified sequence
atgctgcccttcttgtttttcagcacactcttctcaagcatctttaccgaggcacaaaaacagtactgggtgtgcaattcttccgacgccagtatttcatacacttactgcggacgcgacttaaaacagctgtacttcaatttatatatcaccgtgaacactatgaatctgcccaagagaaaggaggtcatatgtagaggatcagacgacgattacagcttctgtagggcactcaaaggcgaaacagtgaacactactatttctttctcttttaaaggaatcaagttctccaaggggaagtacaagtgcgtggtggaggctatttcaggtagccctgaagagatgcttttctgcctggaatttgtgattttacaccagccgaactccaattag

SEQ ID NO: 75164 - DNA, 393 bp, Artificial Sequence
  derived and/or modified sequence
atgctgcccttcttgtttttcagcacactcttctcaagcatctttaccgaggcacaaaaacagtactgggtgtgcaattcttccgacgccagtatttcatacacttactgcggacgcgacttaaaacagctgtacttcaatttatatatcaccgtgaacactatgaatctgcccaagagaaaggaggtcatatgtagaggatcagacgacgattacagcttctgtagggcactcaaaggcgaaacagtgaacactactatttctttctcttttaaaggaatcaagttctccaaggggaagtataagtgtgtggtcgaggcaatatctggatcccccgaggagatgctgttctgcttagagtttgtcatccttcatcagcccaattctaactag

SEQ ID NO: 75165 - DNA, 430 bp, Artificial Sequence
  derived and/or modified sequence
tttggagatattgaatcatgttaccatttctgtttttttccaccctgttttcttccatatttactgaagctcagaagcagtattgggtctgcaactcatccgatgcaagtatttcatacacctactgtgggagagatttaaagcaattatatttcaatctctatataactgtcaacaccatgaatcttccaaagcgcaaagaagttatttgccgaggatctgatgacgattactctttttgcagagctctgaagggagagactgtgaatacaacaatatcattctccttcaagggaataaaattttctaagggaaaatacaaatgtgttgttgaagctatttctgggagcccagaagaaatgctcttttgcttggagtttgtcatcctacaccaacctaattcaaattagaataaattgagtatttaaaa

SEQ ID NO: 75166 - DNA, 393 bp, Artificial Sequence
  derived and/or modified sequence
atgctgcccttcctgttcttcagcaccctgttcagcagcatcttcaccgaggcccagaagcagtactgggtgtgcaacagcagcgacgccagcatcagctacacctactgcggcagagacctgaagcagctgtacttcaacctgtacatcaccgtgaacaccatgaacctgcccaagagaaaggaggtgatctgcagaggcagcgacgacgactacagcttctgcagagccctgaagggcgagaccgtgaacaccaccatcagcttcagcttcaagggcatcaagttcagcaagggcaagtacaagtgcgtggtggaggccatcagcggcagccccgaggagatgctgttctgcctggagttcgtgatcctgcaccagcccaacagcaactag

SEQ ID NO: 75167 - DNA, 393 bp, Artificial Sequence
  derived and/or modified sequence
atgctcccattcctgtttttctctaccctcttttcttccattttcacagaggcacaaaaacagtactgggtgtgcaactcttccgacgcttccatttcgtatacctactgcggccgagacttaaagcagctctacttcaacctctatatcactgtgaatacgatgaatcttcccaaaaggaaggaagttatatgtaggggctccgatgacgattattctttctgtcgggcattaaagggtgagaccgtaaatacgacaattagcttttcctttaaggggattaagttttctaaagggaaatataagtgcgttgtggaggcaatctccggttcccctgaagagatgttgttctgcctggagtttgttattctgcatcagccgaatagcaattag

SEQ ID NO: 75168 - DNA, 393 bp, Artificial Sequence
  derived and/or modified sequence
atgctgcccttcctgttcttcagcaccctcttcagcagcatcttcacagaggcccagaagcagtactgggtgtgcaacagcagtgatgccagcatctcctacacctactgcggccgggacctgaagcagctgtacttcaacctgtacatcaccgtgaacaccatgaacctgcccaagaggaaggaggtgatctgccggggcagtgatgatgactacagcttctgccgggccctgaagggggagaccgtgaacaccaccatctccttctccttcaagggcatcaagttcagcaagggcaagtacaagtgtgtggtggaggccatcagcggcagccctgaggagatgctgttctgcctggagtttgtgatcctgcaccagcccaacagcaactag

SEQ ID NO: 75169 - DNA, 393 bp, Artificial Sequence
  derived and/or modified sequence
atgctgcccttcctgttcttcagcaccctgttcagcagcatcttcaccgaggctcagaagcaatactgggtgtgcaatagcagtgacgccagtatcagctatacttactgcggacgcgatctcaagcagctgtactttaacttgtatataacagtaaacactatgaacttgccaaagaggaaagaagtgatttgcagggggtccgatgatgactactctttctgtagagcattgaagggcgagaccgttaatacaacaatctcattcagcttcaaggggatcaaattttcaaagggcaaatacaaatgcgtagtggaggccataagtggcagtccagaagagatgttgttctgcctggaatttgtgatcctgcaccagccaaatagcaactag

SEQ ID NO: 75170 - RNA, 393 nt, Artificial Sequence
  derived and/or modified sequence
augcugcccuucuuguuuuucagcacacucuucucaagcaucuuuaccgaggcacaaaaacaguacugggugugcaauucuuccgacgccaguauuucauacacuuacugcggacgcgacuuaaaacagcuguacuucaauuuauauaucaccgugaacacuaugaaucugcccaagagaaaggaggucauauguagaggaucagacgacgauuacagcuucuguagggcacucaaaggcgaaacagugaacacuacuauuucuuucucuuuuaaaggaaucaaguucuccaaggggaaguacaagugcgugguggaggcuauuucagguagcccugaagagaugcuuuucugccuggaauuugugauuuuacaccagccgaacuccaauuag

SEQ ID NO: 75171 - RNA, 393 nt, Artificial Sequence
  derived and/or modified sequence
augcugcccuucuuguuuuucagcacacucuucucaagcaucuuuaccgaggcacaaaaacaguacugggugugcaauucuuccgacgccaguauuucauacacuuacugcggacgcgacuuaaaacagcuguacuucaauuuauauaucaccgugaacacuaugaaucugcccaagagaaaggaggucauauguagaggaucagacgacgauuacagcuucuguagggcacucaaaggcgaaacagugaacacuacuauuucuuucucuuuuaaaggaaucaaguucuccaaggggaaguauaaguguguggucgaggcaauaucuggaucccccgaggagaugcuguucugcuuagaguuugucauccuucaucagcccaauucuaacuag

SEQ ID NO: 75172 - protein, 858 aa, Artificial Sequence
  derived and/or modified sequence
MGPWGWKLRWTVALLLAAAGTAVGDRCERNEFQCQDGKCISYKWVCDGSAECQDGSDESQETCLSVTCKSGDFSCGGRVNRCIPQFWRCDGQVDCDNGSDEQGCPPKTCSQDEFRCHDGKCISRQFVCDSDRDCLDGSDEASCPVLTCGPASFQCNSSTCIPQLWACDNDPDCEDGSDEWPQRCRGLYVFQGDSSPCSAFEFHCLSGECIHSSWRCDGGPDCKDKSDEENCAVATCRPDEFQCSDGNCIHGSRQCDREYDCKDMSDEVGCVNVTLCEGPNKFKCHSGECITLDKVCNMARDCRDWSDEPIKECGTNECLDNNGGCSHVCNDLKIGYECLCPDGFQLVAQRRCEDIDECQDPDTCSQLCVNLEGGYKCQCEEGFQLDPHTKACKAVGSIAYLFFTNRHEVRKMTLDRSEYTSLIPNLRNVVALDTEVASNRIYWSDLSQRMICSTQLDRAHGVSSYDTVISRDIQAPDGLAVDWIHSNIYWTDSVLGTVSVADTKGVKRKTLFRENGSKPRAIVVDPVHGFMYWTDWGTPAKIKKGGLNGVDIYSLVTENIQWPNGITLDLLSGRLYWVDSKLHSISSIDVNGGNRKTILEDEKRLAHPFSLAVFEDKVFWTDIINEAIFSANRLTGSDVNLLAENLLSPEDMVLFHNLTQPRGVNWCERTTLSNGGCQYLCLPAPQINPHSPKFTCACPDGMLLARDMRSCLTEAEAAVATQETSTVRLKVSSTAVRTQHTTTRPVPDTSRLPGATPGLTTVEIVTMSHQALGDVAGRGNEKKPSSVRALSIVLPIVLLVFLCLGVFLLWKNWRLKNINSINFDNPVYQKTTEDEVHICHNQDGYSYPSMVSLEDDVA

SEQ ID NO: 75173 - DNA, 2574 bp, Artificial Sequence
  derived and/or modified sequence
atgggcccctggggctggaagctgcgctggaccgtggccctgctgctggccgccgccggcaccgccgtgggcgaccgctgcgagcgcaacgagttccagtgccaggacggcaagtgcatcagctacaagtgggtgtgcgacggcagcgccgagtgccaggacggcagcgacgagagccaggagacctgcctgagcgtgacctgcaagagcggcgacttcagctgcggcggccgcgtgaaccgctgcatcccccagttctggcgctgcgacggccaggtggactgcgacaacggcagcgacgagcagggctgcccccccaagacctgcagccaggacgagttccgctgccacgacggcaagtgcatcagccgccagttcgtgtgcgacagcgaccgcgactgcctggacggcagcgacgaggccagctgccccgtgctgacctgcggccccgccagcttccagtgcaacagcagcacctgcatcccccagctgtgggcctgcgacaacgaccccgactgcgaggacggcagcgacgagtggccccagcgctgccgcggcctgtacgtgttccagggcgacagcagcccctgcagcgccttcgagttccactgcctgagcggcgagtgcatccacagcagctggcgctgcgacggcggccccgactgcaaggacaagagcgacgaggagaactgcgccgtggccacctgccgccccgacgagttccagtgcagcgacggcaactgcatccacggcagccgccagtgcgaccgcgagtacgactgcaaggacatgagcgacgaggtgggctgcgtgaacgtgaccctgtgcgagggccccaacaagttcaagtgccacagcggcgagtgcatcaccctggacaaggtgtgcaacatggcccgcgactgccgcgactggagcgacgagcccatcaaggagtgcggcaccaacgagtgcctggacaacaacggcggctgcagccacgtgtgcaacgacctgaagatcggctacgagtgcctgtgccccgacggcttccagctggtggcccagcgccgctgcgaggacatcgacgagtgccaggaccccgacacctgcagccagctgtgcgtgaacctggagggcggctacaagtgccagtgcgaggagggcttccagctggacccccacaccaaggcctgcaaggccgtgggcagcatcgcctacctgttcttcaccaaccgccacgaggtgcgcaagatgaccctggaccgcagcgagtacaccagcctgatccccaacctgcgcaacgtggtggccctggacaccgaggtggccagcaaccgcatctactggagcgacctgagccagcgcatgatctgcagcacccagctggaccgcgcccacggcgtgagcagctacgacaccgtgatcagccgcgacatccaggcccccgacggcctggccgtggactggatccacagcaacatctactggaccgacagcgtgctgggcaccgtgagcgtggccgacaccaagggcgtgaagcgcaagaccctgttccgcgagaacggcagcaagccccgcgccatcgtggtggaccccgtgcacggcttcatgtactggaccgactggggcacccccgccaagatcaagaagggcggcctgaacggcgtggacatctacagcctggtgaccgagaacatccagtggcccaacggcatcaccctggacctgctgagcggccgcctgtactgggtggacagcaagctgcacagcatcagcagcatcgacgtgaacggcggcaaccgcaagaccatcctggaggacgagaagcgcctggcccaccccttcagcctggccgtgttcgaggacaaggtgttctggaccgacatcatcaacgaggccatcttcagcgccaaccgcctgaccggcagcgacgtgaacctgctggccgagaacctgctgagccccgaggacatggtgctgttccacaacctgacccagccccgcggcgtgaactggtgcgagcgcaccaccctgagcaacggcggctgccagtacctgtgcctgcccgccccccagatcaacccccacagccccaagttcacctgcgcctgccccgacggcatgctgctggcccgcgacatgcgcagctgcctgaccgaggccgaggccgccgtggccacccaggagaccagcaccgtgcgcctgaaggtgagcagcaccgccgtgcgcacccagcacaccaccacccgccccgtgcccgacaccagccgcctgcccggcgccacccccggcctgaccaccgtggagatcgtgaccatgagccaccaggccctgggcgacgtggccggccgcggcaacgagaagaagcccagcagcgtgcgcgccctgagcatcgtgctgcccatcgtgctgctggtgttcctgtgcctgggcgtgttcctgctgtggaagaactggcgcctgaagaacatcaacagcatcaacttcgacaaccccgtgtaccagaagaccaccgaggacgaggtgcacatctgccacaaccaggacggctacagctaccccagcatggtgagcctggaggacgacgtggcc

SEQ ID NO: 75174 - DNA, 2577 bp, Artificial Sequence
  derived and/or modified sequence
atgggcccctggggctggaagctgagatggaccgtggccctgctgctggccgccgccggcaccgccgtgggcgacagatgcgagagaaacgagttccagtgccaggacggcaagtgcatcagctacaagtgggtgtgcgacggcagcgccgagtgccaggacggcagcgacgagagccaggagacctgcctgagcgtgacctgcaagagcggcgacttcagctgcggcggcagagtgaacagatgcatcccccagttctggagatgcgacggccaggtggactgcgacaacggcagcgacgagcagggctgcccccccaagacctgcagccaggacgagttcagatgccacgacggcaagtgcatcagcagacagttcgtgtgcgacagcgacagagactgcctggacggcagcgacgaggccagctgccccgtgctgacctgcggccccgccagcttccagtgcaacagcagcacctgcatcccccagctgtgggcctgcgacaacgaccccgactgcgaggacggcagcgacgagtggccccagagatgcagaggcctgtacgtgttccagggcgacagcagcccctgcagcgccttcgagttccactgcctgagcggcgagtgcatccacagcagctggagatgcgacggcggccccgactgcaaggacaagagcgacgaggagaactgcgccgtggccacctgcagacccgacgagttccagtgcagcgacggcaactgcatccacggcagcagacagtgcgacagagagtacgactgcaaggacatgagcgacgaggtgggctgcgtgaacgtgaccctgtgcgagggccccaacaagttcaagtgccacagcggcgagtgcatcaccctggacaaggtgtgcaacatggccagagactgcagagactggagcgacgagcccatcaaggagtgcggcaccaacgagtgcctggacaacaacggcggctgcagccacgtgtgcaacgacctgaagatcggctacgagtgcctgtgccccgacggcttccagctggtggcccagagaagatgcgaggacatcgacgagtgccaggaccccgacacctgcagccagctgtgcgtgaacctggagggcggctacaagtgccagtgcgaggagggcttccagctggacccccacaccaaggcctgcaaggccgtgggcagcatcgcctacctgttcttcaccaacagacacgaggtgagaaagatgaccctggacagaagcgagtacaccagcctgatccccaacctgagaaacgtggtggccctggacaccgaggtggccagcaacagaatctactggagcgacctgagccagagaatgatctgcagcacccagctggacagagcccacggcgtgagcagctacgacaccgtgatcagcagagacatccaggcccccgacggcctggccgtggactggatccacagcaacatctactggaccgacagcgtgctgggcaccgtgagcgtggccgacaccaagggcgtgaagagaaagaccctgttcagagagaacggcagcaagcccagagccatcgtggtggaccccgtgcacggcttcatgtactggaccgactggggcacccccgccaagatcaagaagggcggcctgaacggcgtggacatctacagcctggtgaccgagaacatccagtggcccaacggcatcaccctggacctgctgagcggcagactgtactgggtggacagcaagctgcacagcatcagcagcatcgacgtgaacggcggcaacagaaagaccatcctggaggacgagaagagactggcccaccccttcagcctggccgtgttcgaggacaaggtgttctggaccgacatcatcaacgaggccatcttcagcgccaacagactgaccggcagcgacgtgaacctgctggccgagaacctgctgagccccgaggacatggtgctgttccacaacctgacccagcccagaggcgtgaactggtgcgagagaaccaccctgagcaacggcggctgccagtacctgtgcctgcccgccccccagatcaacccccacagccccaagttcacctgcgcctgccccgacggcatgctgctggccagagacatgagaagctgcctgaccgaggccgaggccgccgtggccacccaggagaccagcaccgtgagactgaaggtgagcagcaccgccgtgagaacccagcacaccaccaccagacccgtgcccgacaccagcagactgcccggcgccacccccggcctgaccaccgtggagatcgtgaccatgagccaccaggccctgggcgacgtggccggcagaggcaacgagaagaagcccagcagcgtgagagccctgagcatcgtgctgcccatcgtgctgctggtgttcctgtgcctgggcgtgttcctgctgtggaagaactggagactgaagaacatcaacagcatcaacttcgacaaccccgtgtaccagaagaccaccgaggacgaggtgcacatctgccacaaccaggacggctacagctaccccagcatggtgagcctggaggacgacgtggcctag

SEQ ID NO: 75175 - DNA, 2577 bp, Artificial Sequence
  derived and/or modified sequence
atgggcccctgggggtggaagctgcggtggaccgtggcattgctgctggctgccgcggggactgccgtgggagatagatgcgaaagaaatgaatttcaatgccaggatggaaagtgtattagctataagtgggtctgtgacggctctgccgaatgtcaggacgggagtgatgagagtcaggagacatgcctgtcagtcacctgcaaaagtggtgacttctcatgcggtggcagggtgaaccgatgtattccacagttctggcggtgcgatggtcaagtggactgcgataacgggtctgacgaacagggctgtccgccgaagacatgtagccaagatgagttcagatgtcatgacgggaagtgcatttcaaggcagttcgtgtgtgattctgatcgggattgtctagacggaagtgacgaagcctcatgcccagtcctgacatgcggccctgcttcctttcagtgcaatagctcaacctgcatacctcagctgtgggcttgcgacaatgatcccgattgtgaggatggaagtgatgaatggccccagcgctgtaggggcctgtatgtgtttcagggcgatagttccccctgctctgccttcgaattccattgcttatcaggggaatgcattcatagcagctggagatgtgacggcggtccagattgcaaagataaatccgatgaagagaactgtgccgtggcaacttgcaggcctgacgagttccagtgctcagacgggaattgtattcacgggtcccgccagtgcgatcgggagtacgattgcaaggacatgtcagacgaagtcggttgtgttaatgtgaccctctgtgaaggaccgaataaatttaagtgccattctggtgagtgtataaccctcgacaaagtctgcaatatggcccgggactgtcgggactggagcgacgagccaatcaaggagtgcggaacaaacgagtgcctcgataacaacggaggctgctcccacgtgtgcaatgacctgaagatagggtacgaatgcttatgcccggacgggttccagctcgtggctcaacgccggtgtgaagatatcgacgaatgccaggatcccgatacatgtagccagctgtgtgtgaaccttgagggcggttataagtgtcagtgtgaagagggattccagttagatccccatactaaggcgtgcaaggctgtaggaagcatcgcgtacctctttttcaccaaccgtcacgaggttaggaagatgacactggatcgaagcgagtatacctctctgatccctaacctgaggaatgttgtcgctctagacactgaggtggcttcgaaccgaatctattggtccgacctctcccaacgcatgatctgttctacccagctggacagagcacatggtgtctcgtcatacgacacggtgatttcgagagatatccaggctcctgatggactggccgtagattggatccactccaacatctattggacggactccgtgctgggaactgtctcagtggcagacactaagggagtcaagcgcaagactcttttcagagagaatggttctaaaccccgggccatcgtggttgaccccgtgcacggtttcatgtactggactgattggggcacacctgccaagataaaaaaaggcggccttaacggggttgacatttatagccttgtgacggaaaacattcaatggcccaacgggatcacactcgaccttctgtccggtcggctgtattgggttgatagtaaacttcactccattagcagcatcgacgttaatgggggaaacagaaagaccatactggaagatgagaagcggctcgctcacccattcagcctggcagtattcgaggacaaagtgttctggaccgatataataaatgaggccatcttctctgccaatcgccttaccgggtcagatgtgaatttgctggcggaaaacctactcagccccgaggacatggttctgttccacaacctgactcagcctaggggcgtgaactggtgcgaaagaaccacactcagcaatggggggtgccagtacttatgtcttcccgcaccgcagataaacccccatagcccaaagttcacctgtgcctgcccggatgggatgctactggctcgagacatgagaagttgtctcacggaagccgaggccgccgttgccactcaggaaacttctacagtccgactgaaagtgtcgtctacagcagtgcgtactcagcatactaccacaaggcctgtgcctgatacatctcggctccctggggctacccccggtctgacaactgtggaaattgtgactatgtcacatcaggctctcggtgatgttgccgggagaggcaatgaaaagaagcctagcagtgtgcgggcgttatccattgtactcccgattgtcctgttggttttcctctgtctgggagtgttcctgctgtggaaaaactggaggctcaagaacattaatagcatcaactttgacaaccccgtttaccagaaaaccacagaggacgaagtacacatctgtcacaaccaggatggctattcttatccctcaatggtgtccttggaggacgatgtggcgtag

SEQ ID NO: 75176 - DNA, 2577 bp, Artificial Sequence
  derived and/or modified sequence
atgggcccctggggctggaagctgcgctggacagtggccctgctgctggccgctgctggaacagctgtgggggacagatgtgaaagaaatgagttccagtgccaggacggcaagtgcatctcctacaagtgggtgtgtgatggcagcgctgagtgccaggacggcagtgatgagagccaggagacctgcctgtctgtgacctgcaagagcggggacttcagctgtggcggccgggtgaaccgctgcatcccccagttctggaggtgtgatggccaggtggactgtgacaatggaagtgatgagcagggctgcccccccaagacctgcagccaggatgagttccgctgccatgatggcaagtgcatcagccggcagtttgtgtgtgacagcgaccgggactgcctggatggcagtgatgaggccagctgccctgtgctgacctgtggccctgccagcttccagtgcaacagcagcacctgcatcccccagctgtgggcctgtgacaatgaccctgactgtgaagatggcagtgatgagtggccccagcgctgccggggcctgtatgtgttccagggcgacagcagcccctgcagcgcctttgagttccactgcctgagcggggagtgcatccacagctcctggaggtgtgatggcggccctgactgcaaggacaagagtgatgaggagaactgtgctgtggccacctgcaggccagatgagttccagtgcagtgatggcaactgcatccacggcagccggcagtgtgaccgggagtatgactgcaaggacatgtctgatgaggtgggctgtgtgaatgtgaccctgtgtgagggccccaacaagttcaagtgccacagcggggagtgcatcaccctggacaaggtgtgcaacatggcccgggactgccgggactggagcgatgagcccatcaaggaatgtggcaccaatgaatgtctggacaacaacggcggctgcagccacgtgtgcaatgacctgaagattggctatgaatgtctgtgcccagatggcttccagctggtggcccagaggcgctgtgaagatattgatgagtgccaggaccctgacacctgcagccagctgtgtgtgaacctggagggcggctacaagtgccagtgtgaggagggcttccagctggacccccacaccaaggcctgcaaggctgtgggcagcatcgcctacctgttcttcaccaacagacatgaggtgaggaagatgaccctggacagaagtgagtacaccagcctcatccccaacctgagaaatgtggtggccctggacacagaggtggccagcaaccgcatctactggagcgacctgagccagaggatgatctgcagcacccagctggaccgggcccacggcgtgagcagctatgacaccgtcatcagccgggacatccaggccccagatggcctggccgtggactggatccacagcaacatctactggacagattctgtgctgggcaccgtgtctgtggccgacaccaagggcgtgaagaggaagaccctcttccgggagaatggcagcaagccccgggccatcgtggtggaccctgtgcacggcttcatgtactggacagactggggcaccccagccaagatcaagaagggcggcctgaatggagtggacatctacagcctggtgacagagaacatccagtggcccaacggcatcaccctggacctgctgagcggccgcctgtactgggtggacagcaagctgcacagcatcagcagcattgatgtgaatggaggcaacaggaagaccatcctggaggatgagaagaggctggcccaccccttcagcctggccgtgtttgaggacaaggtgttctggacagacatcatcaatgaggccatcttcagcgccaaccggctgactggaagtgatgtgaacctgctggccgagaacctgctgagccctgaggacatggtgctcttccacaacctgacccagccccggggcgtgaactggtgtgagaggaccaccctgagcaatggaggctgccagtacctgtgcctgcctgccccccagatcaacccccacagccccaagttcacctgtgcctgcccagatggcatgctgctggcccgggacatgaggagctgcctgacagaagctgaggccgctgtggccacccaggagaccagcacagtgcggctgaaggtgagcagcacagctgtgaggacccagcacaccaccaccaggcctgtgcctgacaccagccggctgcccggggccaccccaggcctgaccaccgtggagatcgtgaccatgagccaccaggccctgggagatgtggccggcagaggaaatgagaagaagcccagctctgtgcgggccctgagcatcgtgctgcccatcgtgctgctggtgttcctgtgcctgggcgtcttcctgctgtggaagaactggaggctgaagaacatcaacagcatcaactttgacaaccctgtgtaccagaagaccacagaagatgaggtgcacatctgccacaaccaggacggctacagctaccccagcatggtgtccctggaggatgatgtggcctag

SEQ ID NO: 75177 - DNA, 2577 bp, Artificial Sequence
  derived and/or modified sequence
atgggcccctggggctggaagctgcggtggaccgtggccctgctgctcgctgccgcaggtactgccgtcggcgaccggtgcgaacgaaacgaatttcagtgccaggacggtaaatgcatctcttacaagtgggtgtgcgatgggagcgctgagtgtcaggacggctctgacgaatcgcaggaaacatgtcttagtgtgacatgcaagtccggcgacttcagttgcggaggcagggtcaatcgatgtatacctcaattttggcggtgcgacgggcaggtggattgcgacaacggcagtgatgagcagggatgtccacccaagacttgttctcaggacgagtttcggtgtcatgatgggaagtgcatttcacgccagtttgtgtgcgattccgaccgagactgtctagacggaagcgatgaagccagctgtcctgtcttgacttgtggacccgcttcatttcaatgcaacagctccacatgtatcccccagctgtgggcttgcgacaatgatccggactgtgaagatgggtccgacgaatggcctcagcgctgtaggggactctacgtctttcagggtgattccagcccttgctctgcatttgaatttcactgtctgagcggggaatgtatccacagcagctggaggtgcgatggcggaccagattgcaaagacaagtccgacgaagagaactgtgccgtggccacctgtaggcctgatgagttccagtgtagcgatgggaactgcatccatggttcccggcagtgcgatcgtgagtacgattgtaaggatatgtccgatgaggtagggtgtgtcaatgtgaccctttgtgagggacctaataagtttaagtgtcacagtggggaatgcatcacactcgacaaagtctgtaacatggcaagagattgtagggattggtctgatgagccaatcaaggagtgtggtaccaacgagtgccttgataacaatggtggatgttctcacgtgtgtaatgatttaaagatcggttacgagtgcttgtgccccgacgggtttcagctggtcgcccagcggcggtgtgaggatatcgatgaatgtcaggatccggatacatgcagccagctatgcgtgaatcttgaagggggctataagtgccagtgtgaagaagggttccagctcgacccccacacaaaggcttgcaaggccgtggggagcattgcttacctcttcttcacaaatcgtcatgaggtccgcaaaatgactctggatcgatctgaatacacctcactcatacctaaccttcgcaatgtggtggccctcgacacggaagtggctagcaatcgcatctattggtcagatcttagccagcggatgatctgctctacccagcttgaccgcgctcacggagtgagcagttacgacaccgtgatctcacgcgacatccaggctcccgacggattagcagtcgactggattcactctaacatctactggactgattcggtactgggcactgtatccgtggcagacaccaagggcgttaagcgtaagacacttttccgcgaaaatggatcgaagcctcgcgccattgtcgtcgatcccgtgcatggttttatgtactggacagactggggcaccccggccaagattaagaagggaggcctgaacggcgtggacatatactctctggttacagaaaacatacagtggccgaatggaataacgctggacctcctttcaggaaggttgtattgggtggactctaagctgcacagtatctcaagtattgatgtcaatggggggaaccgtaagaccattttggaagatgagaagagactggcgcacccctttagtctggccgtctttgaggacaaggtcttttggaccgatatcatcaacgaagcaatattttcagcaaatcgtttaacaggtagtgacgtcaatctgctcgccgaaaatctgctctctcccgaagatatggtgctgtttcataacctcactcaaccccgaggggtgaattggtgtgaacggactacactgtccaacgggggctgccagtacttatgcctgcctgccccccaaataaacccacatagtcctaagttcacatgcgcctgcccggacgggatgctgcttgctcgtgacatgcggtcttgcctgactgaagcggaggctgcagtcgccacccaggaaactagcaccgttagactgaaagtgagttcgactgctgtcaggacacaacacacaaccacaaggcctgtccccgacacctctcggctgccgggagcaacccctggcctcacgaccgtggagattgtcactatgagccaccaggccctgggcgatgtagctggaagagggaacgagaagaaaccctctagtgtgcgtgccctgagtatcgtgctccccattgtcctgctcgttttcctgtgtctgggggtgtttctactgtggaagaactggcgactcaagaacattaacagcatcaacttcgataatccagtttaccagaaaacaacagaggacgaggtccacatttgtcataatcaagatggctactcttacccatccatggtaagccttgaggatgatgtggcctag

SEQ ID NO: 75178 - DNA, 2577 bp, Artificial Sequence
  derived and/or modified sequence
atgggaccctgggggtggaaacttagatggactgttgctctcctgctcgccgcagctggaaccgctgttggagacagatgcgaacggaacgaatttcagtgccaggacgggaagtgtatctcttacaagtgggtctgcgatggctccgcagagtgccaggatggatccgatgagagccaggagacctgcttgtcagtcacgtgtaagagcggtgacttctcatgtgggggacgggtaaaccgctgtatacctcagttctggcggtgcgacggccaagtagattgcgacaatggcagtgacgaacaaggctgccccccaaaaacctgcagccaagatgaatttcggtgccatgacggtaagtgcatttcgagacagtttgtgtgtgacagtgacagagactgtctggatggttctgacgaagcctcctgcccggtcctgacatgcggaccggcatcgtttcaatgtaatagttctacatgcataccgcagctatgggcttgcgacaacgatcctgattgcgaagacggttccgacgagtggcctcagcgatgtcgaggactgtacgtattccagggagactctagtccatgttccgcttttgaatttcactgtttgagtggggaatgcattcatagctcttggagatgtgatggaggcccagattgcaaggataagagcgacgaggagaattgtgctgtggctacctgccgacctgatgagttccagtgttcggatggaaattgcattcacggaagcagacaatgcgaccgcgagtatgactgtaaggatatgagcgacgaggtggggtgcgtcaacgtaaccctttgtgagggccctaataaattcaagtgccattccggcgagtgtatcaccctggacaaggtgtgtaacatggcccgagactgcagggattggtctgatgaacctatcaaggagtgcggaaccaacgaatgcctggataacaacggaggctgcagccacgtttgtaacgacctgaagatcggctacgagtgtttgtgccccgacgggttccaactcgttgcccaaagaagatgcgaggatattgatgaatgtcaggatcccgatacctgttctcagctgtgtgtgaatctggagggaggatacaagtgccagtgcgaagaagggtttcaactcgacccccatacaaaggcgtgtaaggcagtcggcagtatcgcctatctttttttcactaataggcatgaagtgcgaaaaatgaccctagaccggagcgagtacacctcgctgatccctaatttacgtaacgtcgttgcccttgacaccgaggtcgcatccaacaggatctattggagcgatcttagccagcgaatgatttgtagcacgcaactggatagggctcacggagtcagtagttacgacactgtgatcagtcgagatattcaggccccagatggccttgccgtggattggattcattccaacatatactggaccgactcagtgttggggactgtgagcgtggctgacactaaaggagtcaagcgcaagacactattcagagaaaacgggtctaagccgagagctatagtggttgatcctgttcatgggttcatgtactggacggactggggcactccggcaaagatcaagaagggaggacttaatggagtggatatatattcactggtaacggagaacatacagtggcccaatggcatcactcttgatttactctccgggcgtctgtactgggtcgatagcaagctgcattccattagtagtatcgacgtgaatggtggcaatagaaagactattttagaagatgaaaagcgcctcgcccatccgtttagcttggctgtgtttgaggacaaggtcttctggacagacattattaacgaggccattttttccgcaaatcgtctcaccggcagcgatgtgaacctcctggccgagaaccttttgagccccgaggatatggtcctgttccataatctgactcagcctcgaggagttaattggtgcgaacgtactacacttagtaacggcggttgccaatatctgtgcctcccagctccacagattaatccacactcacctaaattcacatgcgcctgtccagacggtatgttactagccagagatatgagatcttgccttaccgaggccgaggccgctgttgctacccaagagacctcaaccgtgaggctaaaggtttctagtactgctgtgaggactcagcataccaccacccggccagtcccagacactagtcggctgcccggagcaaccccagggctgacaaccgttgagatcgttaccatgtcccaccaggcacttggagacgttgcgggacgagggaatgagaaaaagccgagtagtgttagggctctcagcattgttctgcccattgtgctcttggtgttcttgtgcctgggcgtattcctgttgtggaaaaactggcgactaaaaaatattaatagcattaactttgacaatccagtctaccagaagactactgaagatgaggtccacatctgccataatcaggatggctattcttatccttccatggtgtccctggaggacgacgtcgcttag

SEQ ID NO: 75179 - DNA, 3144 bp, Artificial Sequence
  derived and/or modified sequence
gccagggtttccagctaggacacagcaggtcgtgatccgggtcgggacactgcctggcagaggctgcgagcatggggccctggggctggaaattgcgctggaccgtcgccttgctcctcgccgcggcggggactgcagtgggcgacagatgcgaaagaaacgagttccagtgccaagacgggaaatgcatctcctacaagtgggtctgcgatggcagcgctgagtgccaggatggctctgatgagtcccaggagacgtgcttgtctgtcacctgcaaatccggggacttcagctgtgggggccgtgtcaaccgctgcattcctcagttctggaggtgcgatggccaagtggactgcgacaacggctcagacgagcaaggctgtccccccaagacgtgctcccaggacgagtttcgctgccacgatgggaagtgcatctctcggcagttcgtctgtgactcagaccgggactgcttggacggctcagacgaggcctcctgcccggtgctcacctgtggtcccgccagcttccagtgcaacagctccacctgcatcccccagctgtgggcctgcgacaacgaccccgactgcgaagatggctcggatgagtggccgcagcgctgtaggggtctttacgtgttccaaggggacagtagcccctgctcggccttcgagttccactgcctaagtggcgagtgcatccactccagctggcgctgtgatggtggccccgactgcaaggacaaatctgacgaggaaaactgcgctgtggccacctgtcgccctgacgaattccagtgctctgatggaaactgcatccatggcagccggcagtgtgaccgggaatatgactgcaaggacatgagcgatgaagttggctgcgttaatgtgacactctgcgagggacccaacaagttcaagtgtcacagcggcgaatgcatcaccctggacaaagtctgcaacatggctagagactgccgggactggtcagatgaacccatcaaagagtgcgggaccaacgaatgcttggacaacaacggcggctgttcccacgtctgcaatgaccttaagatcggctacgagtgcctgtgccccgacggcttccagctggtggcccagcgaagatgcgaagatatcgatgagtgtcaggatcccgacacctgcagccagctctgcgtgaacctggagggtggctacaagtgccagtgtgaggaaggcttccagctggacccccacacgaaggcctgcaaggctgtgggctccatcgcctacctcttcttcaccaaccggcacgaggtcaggaagatgacgctggaccggagcgagtacaccagcctcatccccaacctgaggaacgtggtcgctctggacacggaggtggccagcaatagaatctactggtctgacctgtcccagagaatgatctgcagcacccagcttgacagagcccacggcgtctcttcctatgacaccgtcatcagcagagacatccaggcccccgacgggctggctgtggactggatccacagcaacatctactggaccgactctgtcctgggcactgtctctgttgcggataccaagggcgtgaagaggaaaacgttattcagggagaacggctccaagccaagggccatcgtggtggatcctgttcatggcttcatgtactggactgactggggaactcccgccaagatcaagaaagggggcctgaatggtgtggacatctactcgctggtgactgaaaacattcagtggcccaatggcatcaccctagatctcctcagtggccgcctctactgggttgactccaaacttcactccatctcaagcatcgatgtcaacgggggcaaccggaagaccatcttggaggatgaaaagaggctggcccaccccttctccttggccgtctttgaggacaaagtattttggacagatatcatcaacgaagccattttcagtgccaaccgcctcacaggttccgatgtcaacttgttggctgaaaacctactgtccccagaggatatggttctcttccacaacctcacccagccaagaggagtgaactggtgtgagaggaccaccctgagcaatggcggctgccagtatctgtgcctccctgccccgcagatcaacccccactcgcccaagtttacctgcgcctgcccggacggcatgctgctggccagggacatgaggagctgcctcacagaggctgaggctgcagtggccacccaggagacatccaccgtcaggctaaaggtcagctccacagccgtaaggacacagcacacaaccacccgacctgttcccgacacctcccggctgcctggggccacccctgggctcaccacggtggagatagtgacaatgtctcaccaagctctgggcgacgttgctggcagaggaaatgagaagaagcccagtagcgtgagggctctgtccattgtcctccccatcgtgctcctcgtcttcctttgcctgggggtcttccttctatggaagaactggcggcttaagaacatcaacagcatcaactttgacaaccccgtctatcagaagaccacagaggatgaggtccacatttgccacaaccaggacggctacagctacccctcgatggtcagtctggaggatgacgtggcgtgaacatctgcctggagtcccgtccctgcccagaacccttcctgagacctcgccggccttgttttattcaaagacagagaagaccaaagcattgcctgccagagctttgttttatatatttattcatctgggaggcagaacaggcttcggacagtgcccatgcaatggcttgggttgggattttggtttcttcctttcctcgtgaaggataagagaaacaggcccggggggaccaggatgacacctccatttctctccaggaagttttgagtttctctccaccgtgacacaatcctcaaacatggaagatgaaaggggaggggatgtcaggcccagagaagcaagtggctttcaacacacaacagcagatggcaccaacgggaccccctggccctgcctcatccaccaatctctaagccaaacccctaaactcaggagtcaacgtgtttacctcttctatgcaagccttgctagacagccaggttagcctttgccctgt

SEQ ID NO: 75180 - protein, 819 aa, Artificial Sequence
  derived and/or modified sequence
MGPWGWKLRWTVALLLAAAGTAVGDRCERNEFQCQDGKCISYKWVCDGSAECQDGSDESQETCSPKTCSQDEFRCHDGKCISRQFVCDSDRDCLDGSDEASCPVLTCGPASFQCNSSTCIPQLWACDNDPDCEDGSDEWPQRCRGLYVFQGDSSPCSAFEFHCLSGECIHSSWRCDGGPDCKDKSDEENCAVATCRPDEFQCSDGNCIHGSRQCDREYDCKDMSDEVGCVNVTLCEGPNKFKCHSGECITLDKVCNMARDCRDWSDEPIKECGTNECLDNNGGCSHVCNDLKIGYECLCPDGFQLVAQRRCEDIDECQDPDTCSQLCVNLEGGYKCQCEEGFQLDPHTKACKAVGSIAYLFFTNRHEVRKMTLDRSEYTSLIPNLRNVVALDTEVASNRIYWSDLSQRMICSTQLDRAHGVSSYDTVISRDIQAPDGLAVDWIHSNIYWTDSVLGTVSVADTKGVKRKTLFRENGSKPRAIVVDPVHGFMYWTDWGTPAKIKKGGLNGVDIYSLVTENIQWPNGITLDLLSGRLYWVDSKLHSISSIDVNGGNRKTILEDEKRLAHPFSLAVFEDKVFWTDIINEAIFSANRLTGSDVNLLAENLLSPEDMVLFHNLTQPRGVNWCERTTLSNGGCQYLCLPAPQINPHSPKFTCACPDGMLLARDMRSCLTEAEAAVATQETSTVRLKVSSTAVRTQHTTTRPVPDTSRLPGATPGLTTVEIVTMSHQALGDVAGRGNEKKPSSVRALSIVLPIVLLVFLCLGVFLLWKNWRLKNINSINFDNPVYQKTTEDEVHICHNQDGYSYPSRQMVSLEDDVA

SEQ ID NO: 75181 - protein, 739 aa, Artificial Sequence
  derived and/or modified sequence
MGPWGWKLRWTVALLLAAAGTAVGDRCERNDFQCNSSTCIPQLWACDNDPDCEDGSDEWPQRCRGLYVFQGDSSPCSAFEFHCLSGECIHSSWRCDGGPDCKDKSDEENCAVATCRPDEFQCSDGNCIHGSRQCDREYDCKDMSDEVGCVNVTLCEGPNKFKCHSGECITLDKVCNMARDCRDWSDEPIKECGTNECLDNNGGCSHVCNDLKIGYECLCPDGFQLVAQRRCEDIDECQDPDTCSQLCVNLEGGYKCQCEEGFQLDPHTKACKAVGSIAYLFFTNRHEVRKMTLDRSEYTSLIPNLRNVVALDTEVASNRIYWSDLSQRMICSTQLDRAHGVSSYDTVISRDIQAPDGLAVDWIHSNIYWTDSVLGTVSVADTKGVKRKTLFRENGSKPRAIVVDPVHGFMYWTDWGTPAKIKKGGLNGVDIYSLVTENIQWPNGITLDLLSGRLYWVDSKLHSISSIDVNGGNRKTILEDEKRLAHPFSLAVFEDKVFWTDIINEAIFSANRLTGSDVNLLAENLLSPEDMVLFHNLTQPRGVNWCERTTLSNGGCQYLCLPAPQINPHSPKFTCACPDGMLLARDMRSCLTEAEAAVATQETSTVRLKVSSTAVRTQHTTTRPVPDTSRLPGATPGLTTVEIVTMSHQALGDVAGRGNEKKPSSVRALSIVLPIVLLVFLCLGVFLLWKNWRLKNINSINFDNPVYQKTTEDEVHICHNQDGYSYPSRQMVSLEDDVA

SEQ ID NO: 75182 - DNA, 2457 bp, Artificial Sequence
  derived and/or modified sequence
atgggcccctggggctggaagctgcgctggaccgtggccctgctgctggccgccgccggcaccgccgtgggcgaccgctgcgagcgcaacgagttccagtgccaggacggcaagtgcatcagctacaagtgggtgtgcgacggcagcgccgagtgccaggacggcagcgacgagagccaggagacctgcagccccaagacctgcagccaggacgagttccgctgccacgacggcaagtgcatcagccgccagttcgtgtgcgacagcgaccgcgactgcctggacggcagcgacgaggccagctgccccgtgctgacctgcggccccgccagcttccagtgcaacagcagcacctgcatcccccagctgtgggcctgcgacaacgaccccgactgcgaggacggcagcgacgagtggccccagcgctgccgcggcctgtacgtgttccagggcgacagcagcccctgcagcgccttcgagttccactgcctgagcggcgagtgcatccacagcagctggcgctgcgacggcggccccgactgcaaggacaagagcgacgaggagaactgcgccgtggccacctgccgccccgacgagttccagtgcagcgacggcaactgcatccacggcagccgccagtgcgaccgcgagtacgactgcaaggacatgagcgacgaggtgggctgcgtgaacgtgaccctgtgcgagggccccaacaagttcaagtgccacagcggcgagtgcatcaccctggacaaggtgtgcaacatggcccgcgactgccgcgactggagcgacgagcccatcaaggagtgcggcaccaacgagtgcctggacaacaacggcggctgcagccacgtgtgcaacgacctgaagatcggctacgagtgcctgtgccccgacggcttccagctggtggcccagcgccgctgcgaggacatcgacgagtgccaggaccccgacacctgcagccagctgtgcgtgaacctggagggcggctacaagtgccagtgcgaggagggcttccagctggacccccacaccaaggcctgcaaggccgtgggcagcatcgcctacctgttcttcaccaaccgccacgaggtgcgcaagatgaccctggaccgcagcgagtacaccagcctgatccccaacctgcgcaacgtggtggccctggacaccgaggtggccagcaaccgcatctactggagcgacctgagccagcgcatgatctgcagcacccagctggaccgcgcccacggcgtgagcagctacgacaccgtgatcagccgcgacatccaggcccccgacggcctggccgtggactggatccacagcaacatctactggaccgacagcgtgctgggcaccgtgagcgtggccgacaccaagggcgtgaagcgcaagaccctgttccgcgagaacggcagcaagccccgcgccatcgtggtggaccccgtgcacggcttcatgtactggaccgactggggcacccccgccaagatcaagaagggcggcctgaacggcgtggacatctacagcctggtgaccgagaacatccagtggcccaacggcatcaccctggacctgctgagcggccgcctgtactgggtggacagcaagctgcacagcatcagcagcatcgacgtgaacggcggcaaccgcaagaccatcctggaggacgagaagcgcctggcccaccccttcagcctggccgtgttcgaggacaaggtgttctggaccgacatcatcaacgaggccatcttcagcgccaaccgcctgaccggcagcgacgtgaacctgctggccgagaacctgctgagccccgaggacatggtgctgttccacaacctgacccagccccgcggcgtgaactggtgcgagcgcaccaccctgagcaacggcggctgccagtacctgtgcctgcccgccccccagatcaacccccacagccccaagttcacctgcgcctgccccgacggcatgctgctggcccgcgacatgcgcagctgcctgaccgaggccgaggccgccgtggccacccaggagaccagcaccgtgcgcctgaaggtgagcagcaccgccgtgcgcacccagcacaccaccacccgccccgtgcccgacaccagccgcctgcccggcgccacccccggcctgaccaccgtggagatcgtgaccatgagccaccaggccctgggcgacgtggccggccgcggcaacgagaagaagcccagcagcgtgcgcgccctgagcatcgtgctgcccatcgtgctgctggtgttcctgtgcctgggcgtgttcctgctgtggaagaactggcgcctgaagaacatcaacagcatcaacttcgacaaccccgtgtaccagaagaccaccgaggacgaggtgcacatctgccacaaccaggacggctacagctaccccagccgccagatggtgagcctggaggacgacgtggcc

SEQ ID NO: 75183 - DNA, 2460 bp, Artificial Sequence
  derived and/or modified sequence
atgggcccctggggctggaagctgagatggaccgtggccctgctgctggccgccgccggcaccgccgtgggcgacagatgcgagagaaacgagttccagtgccaggacggcaagtgcatcagctacaagtgggtgtgcgacggcagcgccgagtgccaggacggcagcgacgagagccaggagacctgcagccccaagacctgcagccaggacgagttcagatgccacgacggcaagtgcatcagcagacagttcgtgtgcgacagcgacagagactgcctggacggcagcgacgaggccagctgccccgtgctgacctgcggccccgccagcttccagtgcaacagcagcacctgcatcccccagctgtgggcctgcgacaacgaccccgactgcgaggacggcagcgacgagtggccccagagatgcagaggcctgtacgtgttccagggcgacagcagcccctgcagcgccttcgagttccactgcctgagcggcgagtgcatccacagcagctggagatgcgacggcggccccgactgcaaggacaagagcgacgaggagaactgcgccgtggccacctgcagacccgacgagttccagtgcagcgacggcaactgcatccacggcagcagacagtgcgacagagagtacgactgcaaggacatgagcgacgaggtgggctgcgtgaacgtgaccctgtgcgagggccccaacaagttcaagtgccacagcggcgagtgcatcaccctggacaaggtgtgcaacatggccagagactgcagagactggagcgacgagcccatcaaggagtgcggcaccaacgagtgcctggacaacaacggcggctgcagccacgtgtgcaacgacctgaagatcggctacgagtgcctgtgccccgacggcttccagctggtggcccagagaagatgcgaggacatcgacgagtgccaggaccccgacacctgcagccagctgtgcgtgaacctggagggcggctacaagtgccagtgcgaggagggcttccagctggacccccacaccaaggcctgcaaggccgtgggcagcatcgcctacctgttcttcaccaacagacacgaggtgagaaagatgaccctggacagaagcgagtacaccagcctgatccccaacctgagaaacgtggtggccctggacaccgaggtggccagcaacagaatctactggagcgacctgagccagagaatgatctgcagcacccagctggacagagcccacggcgtgagcagctacgacaccgtgatcagcagagacatccaggcccccgacggcctggccgtggactggatccacagcaacatctactggaccgacagcgtgctgggcaccgtgagcgtggccgacaccaagggcgtgaagagaaagaccctgttcagagagaacggcagcaagcccagagccatcgtggtggaccccgtgcacggcttcatgtactggaccgactggggcacccccgccaagatcaagaagggcggcctgaacggcgtggacatctacagcctggtgaccgagaacatccagtggcccaacggcatcaccctggacctgctgagcggcagactgtactgggtggacagcaagctgcacagcatcagcagcatcgacgtgaacggcggcaacagaaagaccatcctggaggacgagaagagactggcccaccccttcagcctggccgtgttcgaggacaaggtgttctggaccgacatcatcaacgaggccatcttcagcgccaacagactgaccggcagcgacgtgaacctgctggccgagaacctgctgagccccgaggacatggtgctgttccacaacctgacccagcccagaggcgtgaactggtgcgagagaaccaccctgagcaacggcggctgccagtacctgtgcctgcccgccccccagatcaacccccacagccccaagttcacctgcgcctgccccgacggcatgctgctggccagagacatgagaagctgcctgaccgaggccgaggccgccgtggccacccaggagaccagcaccgtgagactgaaggtgagcagcaccgccgtgagaacccagcacaccaccaccagacccgtgcccgacaccagcagactgcccggcgccacccccggcctgaccaccgtggagatcgtgaccatgagccaccaggccctgggcgacgtggccggcagaggcaacgagaagaagcccagcagcgtgagagccctgagcatcgtgctgcccatcgtgctgctggtgttcctgtgcctgggcgtgttcctgctgtggaagaactggagactgaagaacatcaacagcatcaacttcgacaaccccgtgtaccagaagaccaccgaggacgaggtgcacatctgccacaaccaggacggctacagctaccccagcagacagatggtgagcctggaggacgacgtggcctag

SEQ ID NO: 75184 - DNA, 2220 bp, Artificial Sequence
  derived and/or modified sequence
atgggcccctggggctggaagctgagatggaccgtggccctgctgctggccgccgccggcaccgccgtgggcgacagatgcgagagaaacgacttccagtgcaacagcagcacctgcatcccccagctgtgggcctgcgacaacgaccccgactgcgaggacggcagcgacgagtggccccagagatgcagaggcctgtacgtgttccagggcgacagcagcccctgcagcgccttcgagttccactgcctgagcggcgagtgcatccacagcagctggagatgcgacggcggccccgactgcaaggacaagagcgacgaggagaactgcgccgtggccacctgcagacccgacgagttccagtgcagcgacggcaactgcatccacggcagcagacagtgcgacagagagtacgactgcaaggacatgagcgacgaggtgggctgcgtgaacgtgaccctgtgcgagggccccaacaagttcaagtgccacagcggcgagtgcatcaccctggacaaggtgtgcaacatggccagagactgcagagactggagcgacgagcccatcaaggagtgcggcaccaacgagtgcctggacaacaacggcggctgcagccacgtgtgcaacgacctgaagatcggctacgagtgcctgtgccccgacggcttccagctggtggcccagagaagatgcgaggacatcgacgagtgccaggaccccgacacctgcagccagctgtgcgtgaacctggagggcggctacaagtgccagtgcgaggagggcttccagctggacccccacaccaaggcctgcaaggccgtgggcagcatcgcctacctgttcttcaccaacagacacgaggtgagaaagatgaccctggacagaagcgagtacaccagcctgatccccaacctgagaaacgtggtggccctggacaccgaggtggccagcaacagaatctactggagcgacctgagccagagaatgatctgcagcacccagctggacagagcccacggcgtgagcagctacgacaccgtgatcagcagagacatccaggcccccgacggcctggccgtggactggatccacagcaacatctactggaccgacagcgtgctgggcaccgtgagcgtggccgacaccaagggcgtgaagagaaagaccctgttcagagagaacggcagcaagcccagagccatcgtggtggaccccgtgcacggcttcatgtactggaccgactggggcacccccgccaagatcaagaagggcggcctgaacggcgtggacatctacagcctggtgaccgagaacatccagtggcccaacggcatcaccctggacctgctgagcggcagactgtactgggtggacagcaagctgcacagcatcagcagcatcgacgtgaacggcggcaacagaaagaccatcctggaggacgagaagagactggcccaccccttcagcctggccgtgttcgaggacaaggtgttctggaccgacatcatcaacgaggccatcttcagcgccaacagactgaccggcagcgacgtgaacctgctggccgagaacctgctgagccccgaggacatggtgctgttccacaacctgacccagcccagaggcgtgaactggtgcgagagaaccaccctgagcaacggcggctgccagtacctgtgcctgcccgccccccagatcaacccccacagccccaagttcacctgcgcctgccccgacggcatgctgctggccagagacatgagaagctgcctgaccgaggccgaggccgccgtggccacccaggagaccagcaccgtgagactgaaggtgagcagcaccgccgtgagaacccagcacaccaccaccagacccgtgcccgacaccagcagactgcccggcgccacccccggcctgaccaccgtggagatcgtgaccatgagccaccaggccctgggcgacgtggccggcagaggcaacgagaagaagcccagcagcgtgagagccctgagcatcgtgctgcccatcgtgctgctggtgttcctgtgcctgggcgtgttcctgctgtggaagaactggagactgaagaacatcaacagcatcaacttcgacaaccccgtgtaccagaagaccaccgaggacgaggtgcacatctgccacaaccaggacggctacagctaccccagcagacagatggtgagcctggaggacgacgtggcctag

SEQ ID NO: 75185 - DNA, 2460 bp, Artificial Sequence
  derived and/or modified sequence
atggggccctggggttggaagctgcgttggactgtggctttgctgctagctgctgccggaacagccgttggggatcggtgcgagcgcaacgaattccagtgtcaggacgggaaatgtatcagctacaaatgggtctgtgatggctccgctgagtgtcaggatggcagtgatgagtcacaagaaacctgctcaccgaagacgtgttctcaggatgaattcaggtgccacgacggcaagtgtatctcccgccagttcgtgtgcgatagtgaccgggactgcctagacggatccgacgaggcatcctgtccagtccttacttgcggcccagcgtcattccagtgtaactctagcacctgcattcctcagctgtgggcatgtgataatgaccccgactgcgaggatggttctgacgagtggcctcagcggtgcagaggactctatgtgttccagggagattcctctccgtgctctgcctttgaattccactgcctgagtggggaatgtatccactcttcatggcgttgtgacggaggacctgattgcaaggataagtcggacgaggaaaattgtgcggtggctacctgtcgcccagacgagtttcagtgcagtgatggcaactgtatccacgggagcagacagtgtgacagggaatacgattgtaaggacatgtctgatgaggtggggtgcgtcaatgtgaccctgtgtgagggtcccaataaatttaaatgccacagtggtgagtgcatcacgctggacaaggtgtgcaatatggccagggattgtcgggattggtccgatgagccgattaaggaatgtggaaccaatgagtgtctcgataacaacggaggatgcagccatgtgtgcaacgacctgaaaattggatatgaatgcctgtgtcccgacggatttcagctggtagcccagcggaggtgcgaggatattgacgagtgtcaggatccagatacctgcagccagctttgtgtgaatcttgagggcggttataagtgccagtgtgaagaagggttccagcttgacccacacacaaaagcttgcaaggcggttggcagcatcgcgtatctgtttttcacaaacaggcatgaggtgcggaaaatgactctggataggagtgaatacactagccttattcccaacctcagaaacgtggtagcactggataccgaggtggcgtctaaccgaatttactggagcgacttgagccagcggatgatctgcagtactcagcttgatagggcccatggtgttagctcttacgacacagtgatatccagggatatccaagctccagatggcctggcagtggactggattcactctaacatctactggacagatagcgtgctcggaacggtctcagtggctgacaccaaaggtgttaagcgcaagaccctatttagggaaaacggaagcaaaccaagggccatagtcgtggatcccgtccacgggttcatgtactggaccgactggggaactcctgccaaaatcaagaagggcgggctcaacggggttgatatttattctctcgttacagagaatatacaatggcccaatggaatcacccttgacctcctttctgggcgactgtactgggtggactccaagctccacagtatttcgtccatagacgttaatggggggaatcgaaaaacgatcctggaggacgagaagcgactggctcacccgttcagcctagccgtgtttgaggacaaggtgttttggacagacataattaacgaggcaatcttcagtgctaatcgcttaaccggatcagatgtaaatctgctcgccgagaacctcttgtcccctgaggacatggtactcttccacaatctgacgcaaccacgcggtgtgaactggtgcgaacgcaccacgttgagcaatggggggtgccagtacctgtgtctccccgccccccagattaacccgcattccccgaaatttacttgcgcctgcccagacggaatgcttcttgcccgggacatgcgctcttgcctcaccgaagccgaggctgccgtcgctactcaagagacctcgactgtgcgtctcaaggtgtcgtcaaccgccgtccgaactcagcacactacgacccgccctgttcccgataccagtcgtctgccaggggctacgcctgggctgactacggtggagattgtgacaatgagccatcaggctctaggagatgttgccggcaggggaaacgaaaagaagccatcatcagttcgcgcactttcaatcgtattgccaatagtcttgctggtgtttctttgcctcggagtgttcttgctctggaagaattggagattaaagaacataaacagcattaattttgataatccagtctatcagaagacaaccgaggatgaggtgcatatatgccataatcaggacggctattcatacccatcacgtcagatggtgagcctcgaggatgacgtggcgtag

SEQ ID NO: 75186 - DNA, 2220 bp, Artificial Sequence
  derived and/or modified sequence
atgggcccttggggctggaaactgcggtggactgtagctctgctgctcgctgccgccggtactgcagtgggagacaggtgtgagcggaacgatttccaatgcaactcctccacatgcatcccacagctctgggcctgtgacaacgaccccgattgcgaagacggtagcgacgaatggccccagcggtgtagggggctgtacgtgtttcaaggtgatagttcaccgtgttccgcctttgaattccactgcctctctggagagtgcattcattcttcttggaggtgcgatggcggccctgattgtaaggataaaagcgatgaagaaaactgtgccgttgctacatgcaggcccgatgaattccaatgcagcgatggcaactgtattcacggctcaaggcagtgcgaccgggagtatgactgcaaggacatgtcagacgaggttgggtgcgtgaacgtaacactttgcgaaggcccgaacaagttcaagtgccactcaggggagtgtattactctggataaggtgtgtaacatggctcgagattgccgggattggtcagacgagcccatcaaggagtgcgggacaaacgaatgcctagacaacaatgggggttgttcccacgtgtgtaacgatttaaagattggctacgagtgcctctgccccgatgggtttcaactcgtcgcacagcgccggtgcgaggacattgatgaatgtcaggacccggacacatgctcacagttatgtgtaaatctggaagggggctacaagtgccagtgtgaggagggcttccagttggaccctcacacaaaggcctgcaaagcggtcgggtccatcgcttatttgtttttcacaaaccgacacgaagtacgaaaaatgaccctcgacagatcggagtacacgagcttgatacctaacctcaggaacgtggtagcactggatacagaagtcgcttccaataggatttattggagcgacctatctcagaggatgatatgctcaacccagttggatcgtgcccacggagtgagttcttatgatacagtgatctcacgggatatccaggcccctgatggcctggccgtcgattggatccacagcaatatttactggacagactcggttctcggaaccgtttcagtggccgacaccaaaggcgtaaaaaggaagacactgttccgtgagaatggctctaaaccaagagcgattgtggtggaccccgtacatggatttatgtactggaccgactggggcactcccgctaaaatcaaaaaggggggactgaacggagtagatatatacagcctggtgacagagaacattcagtggcctaacggcattactctagacctgctgagcggacgactttactgggtggatagcaagcttcactccatcagctctattgatgtaaacgggggcaacagaaagacaattctggaggacgagaaacgactggcccatccttttagcctcgccgtattcgaggacaaggtgttctggaccgatatcataaacgaagcaatcttttctgccaacaggctgacaggctccgatgtcaatctgctggccgagaacctgttgtccccagaagacatggtgttgtttcacaatttaactcagccccggggagtgaattggtgcgaaagaaccacgctgagcaatggggggtgccagtacctctgcctccctgccccacagatcaacccccactctccgaaattcacttgcgcttgcccagacggaatgttgctggcccgggatatgcgtagttgtctcaccgaagcagaggcggccgtcgctacccaggaaacatccacagtgcggctgaaggtgtcgtctaccgccgtgaggacccagcatactacaacacgacctgtccctgatacttctagactcccaggggccactcccgggctaaccacagtcgaaatcgtgacaatgtcacatcaggccctcggagacgtggccggccggggtaatgagaagaaaccatcttccgttcgggctttgtccatcgtcctccctatcgtcttactggtttttctgtgtctgggggtgtttttactatggaagaactggaggctgaagaacataaactctattaactttgataacccggtgtaccagaagactaccgaggacgaagttcatatctgccacaatcaggacggctacagctacccctctcggcagatggttagcttagaagatgatgtagcctag

SEQ ID NO: 75187 - DNA, 2460 bp, Artificial Sequence
  derived and/or modified sequence
atgggcccctggggctggaagctgcgctggacagtggccctgctgctggccgctgctggaacagctgtgggggacagatgtgaaagaaatgagttccagtgccaggacggcaagtgcatctcctacaagtgggtgtgtgatggcagcgctgagtgccaggacggcagtgatgagagccaggagacctgcagccccaagacctgcagccaggatgagttccgctgccatgatggcaagtgcatcagccggcagtttgtgtgtgacagcgaccgggactgcctggatggcagtgatgaggccagctgccctgtgctgacctgtggccctgccagcttccagtgcaacagcagcacctgcatcccccagctgtgggcctgtgacaatgaccctgactgtgaagatggcagtgatgagtggccccagcgctgccggggcctgtatgtgttccagggcgacagcagcccctgcagcgcctttgagttccactgcctgtctggagagtgcatccacagctcctggaggtgtgatggcggccctgactgcaaggacaagagtgatgaggagaactgtgctgtggccacctgcaggccagatgagttccagtgcagtgatggcaactgcatccacggcagccggcagtgtgaccgggagtatgactgcaaggacatgtctgatgaggtgggctgtgtgaatgtgaccctgtgtgagggccccaacaagttcaagtgccacagcggggagtgcatcaccctggacaaggtgtgcaacatggcccgggactgccgggactggagcgatgagcccatcaaggaatgtggcaccaatgaatgtctggacaacaatggaggctgcagccacgtgtgcaatgacctgaagattggctatgagtgcctgtgcccagatggcttccagctggtggcccagaggcgctgtgaggacattgatgagtgccaggaccctgacacctgcagccagctgtgtgtgaacctggagggcggctacaagtgccagtgtgaggagggcttccagctggacccccacaccaaggcctgcaaggctgtgggcagcatcgcctacctgttcttcaccaacagacatgaggtgaggaagatgaccctggacagaagtgagtacaccagcctcatccccaacctgagaaatgtggtggccctggacacagaggtggccagcaaccgcatctactggagcgacctgagccagaggatgatctgcagcacccagctggaccgggcccatggagtgtcctcctatgacaccgtcatcagccgggacatccaggccccagatggcctggccgtggactggatccacagcaacatctactggacagacagcgtgctgggcaccgtgtctgtggccgacaccaagggcgtgaagaggaagaccctcttcagagaaaatggcagcaagccccgggccatcgtggtggaccctgtgcacggcttcatgtactggacagactggggcaccccagccaagatcaagaagggcggcctgaatggagtggacatctacagcctggtgacagagaacatccagtggcccaacggcatcaccctggacctgctgagcggccgcctgtactgggtggacagcaagctgcacagcatcagcagcattgatgtgaatggaggcaacaggaagaccatcctggaggatgagaagaggctggcccaccccttcagcctggccgtgtttgaggacaaggtgttctggacagacatcatcaatgaggccatcttcagcgccaaccggctgaccggcagtgatgtgaacctgctggccgagaacctgctgagccctgaggacatggtgctcttccacaacctgacccagccccggggcgtgaactggtgtgagaggaccaccctgagcaatggaggctgccagtacctgtgcctgcctgccccccagatcaacccccacagccccaagttcacctgtgcctgcccagatggcatgctgctggcccgggacatgaggagctgcctgacagaggccgaggccgctgtggccacccaggagaccagcacagtgcggctgaaggtgagcagcacagctgtgaggacccagcacaccaccaccaggcctgtgcctgacaccagccggctgcccggggccaccccaggcctgaccaccgtggagatcgtgaccatgagccaccaggccctgggagatgtggccggcagaggaaatgagaagaagcccagctctgtgcgggccctgagcatcgtgctgcccatcgtgctgctggtgttcctgtgcctgggcgtcttcctgctgtggaagaactggaggctgaagaacatcaacagcatcaactttgacaaccctgtgtaccagaagaccacagaagatgaggtgcacatctgccacaaccaggacggctacagctaccccagccggcagatggtgtccctggaggatgatgtggcctag

SEQ ID NO: 75188 - DNA, 2220 bp, Artificial Sequence
  derived and/or modified sequence
atgggcccctggggctggaagctgcgctggacagtggccctgctgctggccgctgctggaacagctgtgggggacagatgtgaaagaaatgacttccagtgcaacagcagcacctgcatcccccagctgtgggcctgtgacaatgaccctgactgtgaagatggcagtgatgagtggccccagcgctgccggggcctgtatgtgttccagggcgacagcagcccctgcagcgcctttgagttccactgcctgtctggagagtgcatccacagctcctggaggtgtgatggcggccctgactgcaaggacaagagtgatgaggagaactgtgctgtggccacctgcaggccagatgagttccagtgcagtgatggcaactgcatccacggcagccggcagtgtgaccgggagtatgactgcaaggacatgtctgatgaggtgggctgtgtgaatgtgaccctgtgtgagggccccaacaagttcaagtgccacagcggggagtgcatcaccctggacaaggtgtgcaacatggcccgggactgccgggactggagcgatgagcccatcaaggaatgtggcaccaatgaatgtctggacaacaatggaggctgcagccacgtgtgcaatgacctgaagattggctatgagtgcctgtgcccagatggcttccagctggtggcccagaggcgctgtgaggacattgatgagtgccaggaccctgacacctgcagccagctgtgtgtgaacctggagggcggctacaagtgccagtgtgaggagggcttccagctggacccccacaccaaggcctgcaaggctgtgggcagcatcgcctacctgttcttcaccaacagacatgaggtgaggaagatgaccctggacagaagtgagtacaccagcctcatccccaacctgagaaatgtggtggccctggacacagaggtggccagcaaccgcatctactggagcgacctgagccagaggatgatctgcagcacccagctggaccgggcccatggagtgtcctcctatgacaccgtcatcagccgggacatccaggccccagatggcctggccgtggactggatccacagcaacatctactggacagacagcgtgctgggcaccgtgtctgtggccgacaccaagggcgtgaagaggaagaccctcttcagagaaaatggcagcaagccccgggccatcgtggtggaccctgtgcacggcttcatgtactggacagactggggcaccccagccaagatcaagaagggcggcctgaatggagtggacatctacagcctggtgacagagaacatccagtggcccaacggcatcaccctggacctgctgagcggccgcctgtactgggtggacagcaagctgcacagcatcagcagcattgatgtgaatggaggcaacaggaagaccatcctggaggatgagaagaggctggcccaccccttcagcctggccgtgtttgaggacaaggtgttctggacagacatcatcaatgaggccatcttcagcgccaaccggctgaccggcagtgatgtgaacctgctggccgagaacctgctgagccctgaggacatggtgctcttccacaacctgacccagccccggggcgtgaactggtgtgagaggaccaccctgagcaatggaggctgccagtacctgtgcctgcctgccccccagatcaacccccacagccccaagttcacctgtgcctgcccagatggcatgctgctggcccgggacatgaggagctgcctgacagaggccgaggccgctgtggccacccaggagaccagcacagtgcggctgaaggtgagcagcacagctgtgaggacccagcacaccaccaccaggcctgtgcctgacaccagccggctgcccggggccaccccaggcctgaccaccgtggagatcgtgaccatgagccaccaggccctgggagatgtggccggcagaggaaatgagaagaagcccagctctgtgcgggccctgagcatcgtgctgcccatcgtgctgctggtgttcctgtgcctgggcgtcttcctgctgtggaagaactggaggctgaagaacatcaacagcatcaactttgacaaccctgtgtaccagaagaccacagaagatgaggtgcacatctgccacaaccaggacggctacagctaccccagccggcagatggtgtccctggaggatgatgtggcctag

SEQ ID NO: 75189 - DNA, 2460 bp, Artificial Sequence
  derived and/or modified sequence
atgggcccctggggctggaagctgcggtggaccgtggccctgctgctggcggcagccgggacggcggtcggagatcgttgtgagaggaacgagttccagtgccaggacggtaaatgtatcagttacaagtgggtctgtgacggaagcgctgaatgtcaggacggatctgacgaatcacaggagacctgctcacccaaaacatgtagccaagacgaatttcggtgtcacgatggcaaatgcatctcccgacagttcgtatgcgacagcgacagagactgcctcgatggctctgatgaggcaagttgcccagtcctgacctgcggcccggcctctttccaatgcaattcttcaacatgcataccacagctctgggcttgcgacaacgatcccgactgtgaggatgggtctgatgaatggcctcagaggtgtagaggattgtatgtgtttcagggcgatagcagtccctgttctgccttcgagtttcattgcctgagtggtgaatgcatccatagtagctggcggtgcgacggcggcccagattgtaaagataagtcagacgaggagaattgtgcagtcgccacctgcagacccgacgagttccagtgctctgacggaaattgcatccatggttcacggcagtgcgaccgagagtatgactgtaaagacatgtctgacgaggtaggttgcgtcaatgtcacactttgcgaggggccaaataaattcaaatgtcactcgggggaatgcatcaccctggacaaggtatgtaacatggccagggactgccgggactggagcgacgagccgataaaggagtgcggtactaacgaatgtctggacaataatggcggctgctcacatgtctgtaacgatctaaaaattgggtatgaatgtttatgccccgacgggttccagctcgtcgctcagcgcagatgcgaagacatcgatgaatgccaggatccagacacctgctcccagttgtgcgtgaatttagagggtggctataaatgtcaatgcgaagaaggattccagctcgatccccacaccaaggcttgcaaggccgtcggatctattgcgtacttgtttttcactaatagacacgaagtcaggaagatgaccctcgataggtcagagtacacatcccttattcctaacctgcgcaacgtcgttgccctcgacacagaggttgccagtaatcggatatattggtcggacctgagccaacggatgatctgttctacccagcttgatcgagcccatggtgtgtcctcttacgatacagttatctctcgggatatccaagcacccgatgggttagctgtcgattggatccacagtaatatttattggacggacagcgtgctgggcaccgtgagtgtcgctgacacaaaaggagtgaagcgaaaaaccctcttcagggagaatggatcgaagccgcgagccattgttgtggatcctgtgcacgggtttatgtactggacggattggggaacccctgctaaaataaagaagggagggctgaatggagtcgatatctattctctcgtcactgagaacatacagtggcccaatggcatcacactggatttgttgtccgggcggttgtactgggttgattccaagctccactcgatatcttcaatcgatgtaaacggaggaaaccggaagacaatcctggaagacgagaaacgcttggcacaccctttcagtctcgccgtgttcgaagacaaggtcttctggaccgacattattaatgaggccatattcagtgctaacagattgactggcagtgatgtgaatctgcttgccgagaatttactctcacccgaagatatggttctttttcacaacttgactcagcctcgtggggtgaattggtgtgaacgaactacactttcaaacggtggctgtcaatacctctgtctgccagcgccccaaatcaaccctcattcccctaagtttacctgtgcatgcccagatggaatgctactggctagagacatgcgaagctgcctgacggaagccgaagcggcagttgctacccaggagacgagcacagtcagactcaaggtgagcagcaccgcagtgagaacacagcacactacaacccggccagttcccgatacaagtagactacccggcgccaccccagggttgaccaccgtcgaaattgtgacgatgtcccatcaggccctgggcgatgttgcaggacggggaaatgagaagaagccctcttccgtgcgggcccttagcatcgttctcccaattgtcctcctggtgttcttatgtctgggagtgttcttattatggaagaattggaggcttaagaatatcaacagtatcaactttgacaaccccgtttaccaaaagaccacagaggacgaggttcacatttgccacaatcaggacggatacagctatccatccaggcagatggtctccctcgaggacgacgtggcctag

SEQ ID NO: 75190 - DNA, 2220 bp, Artificial Sequence
  derived and/or modified sequence
atgggcccctggggctggaagctgcggtggaccgtggccctgctgctcgccgccgccggtactgctgtgggggaccgctgcgaacgcaatgattttcagtgcaactcaagcacctgtatcccacagctatgggcatgcgacaatgaccccgattgtgaggacggaagcgatgagtggcctcaacgatgcaggggactctatgtttttcagggggattctagcccatgttccgcctttgagttccattgcttgagcggtgaatgcattcatagcagctggcgatgtgatggtggaccagactgtaaggacaagtccgacgaagagaactgcgccgttgcaacctgtaggcctgacgaatttcagtgctccgacggaaattgcatccacggcagtaggcagtgcgatagagaatatgattgtaaagacatgtctgacgaagtgggttgcgtgaatgtcacattgtgtgaaggaccgaacaaatttaagtgccactcgggcgaatgcatcaccctggacaaagtgtgtaacatggctagggactgccgcgactggtccgatgaacccatcaaggagtgtggcacaaacgagtgtttagataataacggcgggtgctcccacgtgtgtaatgatctgaaaatcggatacgagtgcctctgcccagatgggtttcagttagtggctcagcgacgatgcgaggatatcgatgagtgccaggatcctgacacatgctctcagctgtgcgttaacctggaagggggttataaatgtcagtgcgaggagggcttccaactggacccacacacaaaagcctgcaaagctgtgggctctatcgcctacctgttcttcactaatcgccatgaagttagaaaaatgacgcttgataggagtgagtacaccagcttgatccccaatttacgaaacgtagtggcgctcgacacagaagtggcttccaataggatttattggtcggatctcagtcagcgaatgatttgctcgacgcagcttgaccgggcccatggagtgtcctcctatgacaccgtaataagcagagacatccaagccccggatggtcttgctgtggactggatccattctaacatctattggactgattccgtgttaggaacagtcagcgtagctgatacaaaaggggtgaagcgaaaaacgctgtttagagagaatggcagtaaaccccgcgctattgtggtcgaccccgttcatggttttatgtactggacagactggggcacacccgcaaagattaagaaaggcgggttaaatggagtcgatatttattccctagtgacggagaacattcagtggcctaatggcataactctggacctcctgtctggaaggctgtattgggtcgactctaaacttcatagcatatcctctattgacgttaacggagggaaccggaaaacaatcctcgaggacgaaaagcgtcttgcacacccgttctccctggctgtgtttgaggacaaagtcttctggactgatataattaatgaagcgatcttctctgcaaataggctcactggcagtgacgtgaacttgctcgcggagaatctgctgtccccagaagatatggtgctcttccacaacttgacacaacctcggggagttaattggtgcgagcggacgaccctctctaacgggggttgccagtacctctgtctgcctgcccctcagataaacccgcactcaccaaagttcacttgcgcttgcccagatggtatgctgctggcacgcgacatgcggagctgtctgacggaagctgaggccgctgttgccacacaggagacctccaccgtcagactcaaagtgtcctcaactgccgtgcgcacacagcacacgaccaccagacccgtccccgacacaagtagactgcccggcgccactcccggattgaccacggttgagattgtcaccatgagccaccaggcccttggagatgtggccggcaggggaaatgagaagaagccaagcagtgtcagagcgctctcgattgtgttgcccatagtcttactggtgtttctgtgtttaggggtgtttctgctttggaagaattggaggttaaagaacattaattccatcaattttgacaacccagtctaccagaaaacaactgaagatgaggtacacatttgtcacaaccaggatggctatagctatccaagccggcagatggtttccttggaggatgatgtggcatag

SEQ ID NO: 75191 - DNA, 2460 bp, Artificial Sequence
  derived and/or modified sequence
atgggaccgtggggctggaaactgaggtggaccgtggctctgcttctggccgcagccggaacagccgtgggcgaccgctgcgagaggaacgagttccagtgccaggacgggaagtgcataagttataaatgggtctgcgacgggagtgcagaatgtcaggatggttcggatgaaagtcaggagacttgttctcccaaaacatgtagccaggacgagtttaggtgccacgatggcaaatgcatctcgaggcagtttgtgtgcgactccgaccgcgattgtttggatgggagtgacgaggcctcttgccctgttctgacttgtgggccagcctccttccagtgcaattctagcacctgcatcccccaactgtgggcctgcgacaatgatccagactgtgaggatggcagtgacgagtggccacaacggtgtcgcggtctgtacgtcttccagggcgactcctcaccctgctcagcgtttgaattccactgtctctctggtgagtgcattcactccagttggagatgcgatgggggacccgattgcaaggataaatccgatgaggagaattgtgccgtggctacttgccggccagacgagttccaatgctcagacggaaactgcatccacggatcccgccagtgcgaccgggagtacgactgtaaagatatgtcggatgaagtgggatgtgtgaacgtgacgctgtgcgagggcccaaataaattcaaatgccattccggtgagtgcatcacattagataaagtgtgcaacatggccagagattgtcgtgattggagcgatgaacccataaaggaatgtgggaccaacgaatgcctagataataatggtggttgttcccacgtctgtaacgatctaaagatcggttacgagtgcctgtgtccagacgggtttcagttagttgcacaacgcagatgtgaggacatcgacgaatgtcaggaccccgatacctgttcacaactctgtgtcaacctggaaggcggatataagtgccagtgtgaggagggttttcagctcgatcctcacactaaggcatgtaaagcagtgggaagcatcgcgtatctttttttcaccaaccgtcatgaggtgaggaagatgacactcgatagatcggaatacacgtccctcattccaaacctaaggaatgtggtggccttagataccgaggtggccagcaatcgtatctattggtctgatctgtcacagcggatgatttgctctacgcaactggacagagcacacggagtgtcctcatacgacaccgttattagtcgcgacattcaggctcctgacggtctggccgtcgactggatacacagcaatatttattggacagactcagttctgggcactgtaagcgtggccgacacaaaaggggtaaaacggaagaccttgtttcgggaaaacggtagtaaaccccgtgctatagtcgttgatcccgtccacggcttcatgtactggactgactgggggactcctgctaagatcaaaaaaggcggattaaatggagtagatatctactctctagtaacagagaacattcaatggcccaacgggatcaccctggacctgttgtcgggtcgtctgtactgggtggattctaagctgcatagcatctccagcattgatgtgaacggaggtaacagaaagaccatcttggaagacgagaagaggctcgctcacccattcagcctggctgtctttgaagataaagtattctggactgacataattaacgaagcgattttcagtgccaacaggcttacgggatctgatgtcaatctgctggccgagaacctgctctcccctgaggacatggtgctgtttcataatctcactcaacctaggggggtgaactggtgtgagaggaccaccttatccaatggcggttgtcaatacttgtgtctgcccgcaccgcagatcaatccgcactcacctaagttcacttgtgcctgccccgacggaatgttgcttgcgagggatatgagatcctgccttaccgaggctgaggccgcagtcgctacacaagaaacatcgacggtaaggttaaaggtgagtagtaccgcagtcaggacccaacacaccacgacgcgccctgttcctgatacctcccgtctgccaggggcaaccccaggcctcaccaccgtcgaaattgtgaccatgtcccaccaagcactcggtgatgtggccggacgaggtaacgaaaagaagccctcaagtgtcagagcactgtcgatcgtgctgcctattgtcctgctcgtgttcctgtgtctgggggtcttcctgctctggaaaaattggagattgaagaacatcaattctatcaacttcgacaatcctgtctaccagaaaacaacagaagacgaggttcacatctgccataatcaagacggttatagttatcctagcagacagatggtcagtcttgaggatgacgtcgcctag

SEQ ID NO: 75192 - DNA, 2220 bp, Artificial Sequence
  derived and/or modified sequence
atgggaccttgggggtggaagctgcggtggactgttgccctcctactggccgctgctgggactgccgtaggtgacagatgcgagcgaaacgactttcagtgcaattcatccacttgtataccccagctttgggcatgcgataatgacccagattgcgaagatgggagtgacgagtggccacaacgatgcaggggcttgtacgtgttccagggagacagcagcccctgctccgccttcgagtttcattgcttgagtggcgagtgcatccactccagctggagatgtgacggaggtccggactgcaaggacaaaagtgacgaagaaaactgtgcagtggccacatgccggccagacgaattccagtgctcggatggtaattgcatccacggaagcagacaatgtgaccgggagtacgactgcaaggatatgtctgatgaagtgggttgcgtgaacgtcactctgtgtgaaggacctaacaagtttaagtgccattcaggggagtgcattacccttgataaggtgtgcaatatggctcgggactgtagagactggtccgacgagccgatcaaggagtgtggcacaaatgagtgcctcgataataacggcggatgcagtcacgtatgcaatgacctgaaaatcgggtacgagtgcctgtgtccagatggcttccagttagtcgcacaacgtcgatgtgaggatatcgacgagtgccaggatccagacacgtgctctcagttatgtgttaatttggagggcggttacaagtgccaatgcgaggagggtttccagctggatccccatacgaaggcatgtaaggcagtggggagcatagcctacctgttctttactaatcggcacgaagtgcggaagatgaccttggacagatcagagtacacatcactgattcccaacctccgcaacgtggtcgcgttggatacagaggtggcatcaaaccgcatatactggtcggacctttcgcagagaatgatctgctccacccagctcgatagagcacacggagtctcttcctacgataccgtaatttccagggacattcaggccccagatggtctggcggtggattggatccactctaatatctactggacagacagcgttctcggaacagtcagcgtggccgatactaagggggtaaagagaaaaactctgtttagggagaatgggtctaaaccaagagccatagtagtggatcctgtacacggtttcatgtactggacagactggggaacacctgccaaaattaaaaagggcggattaaatggtgtcgacatctacagtctggttactgagaacatccagtggcctaatggtattactttggacctactcagcggacgcctgtactgggttgattccaaactccactccatatcttcgatagacgtgaatggagggaatagaaagaccattttggaggatgagaagagacttgcccacccattctcactcgctgtgttcgaagataaagtgttttggacagatatcattaacgaggctattttcagcgcaaatcggttaacagggtctgatgtcaacctgctggcagaaaatctcctttcgccggaagatatggtactctttcacaacctaacacagccaagaggagtaaactggtgcgagcggacgacgcttagcaacggaggttgccagtacttgtgtctccccgctccacagatcaaccctcattctccaaaattcacctgcgcatgtcccgacggcatgctgctggccagagacatgcggagctgtctgacagaagctgaagcggcagtggccacccaagagacctcgactgttaggttgaaagtatcttctacggctgtgaggacacagcacaccaccaccaggcctgtaccagatacttccagactacccggagctactccaggcctaacaaccgttgaaattgttacgatgtcacaccaagcacttggagacgtggctggtcgcggtaacgagaagaaaccatcctctgtgcgagccctgtcaatagtgctccccatcgtcctgctggtgttcctgtgtctgggcgttttcctactgtggaagaattggaggctcaaaaatataaattccatcaactttgacaatcctgtataccagaagactactgaggatgaagtacatatctgtcataatcaggatggatactcctaccctagccgtcagatggtttcactcgaggacgatgttgcttag

SEQ ID NO: 75193 - DNA, 2768 bp, Artificial Sequence
  derived and/or modified sequence
gtgcaatcgcgggaagccagggtttccagctaggacacagcaggtcgtgatccgggtcgggacactgcctggcagaggctgcgagcatggggccctggggctggaaattgcgctggaccgtcgccttgctcctcgccgcggcggggactgcagtgggcgacagatgcgaaagaaacgagttccagtgccaagacgggaaatgcatctcctacaagtgggtctgcgatggcagcgctgagtgccaggatggctctgatgagtcccaggagacgtgctcccccaagacgtgctcccaggacgagtttcgctgccacgatgggaagtgcatctctcggcagttcgtctgtgactcagaccgggactgcttggacggctcagacgaggcctcctgcccggtgctcacctgtggtcccgccagcttccagtgcaacagctccacctgcatcccccagctgtgggcctgcgacaacgaccccgactgcgaagatggctcggatgagtggccgcagcgctgtaggggtctttacgtgttccaaggggacagtagcccctgctcggccttcgagttccactgcctaagtggcgagtgcatccactccagctggcgctgtgatggtggccccgactgcaaggacaaatctgacgaggaaaactgcgctgtggccacctgtcgccctgacgaattccagtgctctgatggaaactgcatccatggcagccggcagtgtgaccgggaatatgactgcaaggacatgagcgatgaagttggctgcgttaatgtgacactctgcgagggacccaacaagttcaagtgtcacagcggcgaatgcatcaccctggacaaagtctgcaacatggctagagactgccgggactggtcagatgaacccatcaaagagtgcgggaccaacgaatgcttggacaacaacggcggctgttcccacgtctgcaatgaccttaagatcggctacgagtgcctgtgccccgacggcttccagctggtggcccagcgaagatgcgaagatatcgatgagtgtcaggatcccgacacctgcagccagctctgcgtgaacctggagggtggctacaagtgccagtgtgaggaaggcttccagctggacccccacacgaaggcctgcaaggctgtgggctccatcgcctacctcttcttcaccaaccggcacgaggtcaggaagatgacgctggaccggagcgagtacaccagcctcatccccaacctgaggaacgtggtcgctctggacacggaggtggccagcaatagaatctactggtctgacctgtcccagagaatgatctgcagcacccagcttgacagagcccacggcgtctcttcctatgacaccgtcatcagcagagacatccaggcccccgacgggctggctgtggactggatccacagcaacatctactggaccgactctgtcctgggcactgtctctgttgcggataccaagggcgtgaagaggaaaacgttattcagggagaacggctccaagccaagggccatcgtggtggatcctgttcatggcttcatgtactggactgactggggaactcccgccaagatcaagaaagggggcctgaatggtgtggacatctactcgctggtgactgaaaacattcagtggcccaatggcatcaccctagatctcctcagtggccgcctctactgggttgactccaaacttcactccatctcaagcatcgatgtcaacgggggcaaccggaagaccatcttggaggatgaaaagaggctggcccaccccttctccttggccgtctttgaggacaaagtattttggacagatatcatcaacgaagccattttcagtgccaaccgcctcacaggttccgatgtcaacttgttggctgaaaacctactgtccccagaggatatggttctcttccacaacctcacccagccaagaggagtgaactggtgtgagaggaccaccctgagcaatggcggctgccagtatctgtgcctccctgccccgcagatcaacccccactcgcccaagtttacctgcgcctgcccggacggcatgctgctggccagggacatgaggagctgcctcacagaggctgaggctgcagtggccacccaggagacatccaccgtcaggctaaaggtcagctccacagccgtaaggacacagcacacaaccacccgacctgttcccgacacctcccggctgcctggggccacccctgggctcaccacggtggagatagtgacaatgtctcaccaagctctgggcgacgttgctggcagaggaaatgagaagaagcccagtagcgtgagggctctgtccattgtcctccccatcgtgctcctcgtcttcctttgcctgggggtcttccttctatggaagaactggcggcttaagaacatcaacagcatcaactttgacaaccccgtctatcagaagaccacagaggatgaggtccacatttgccacaaccaggacggctacagctacccctcgagacagatggtcagtctggaggatgacgtggcgtgaacatctgcctggagtcccgtccctgcccagaacccttcctgagacctcgccggccttgttttattcaaagacagagaagaccaaagcattgcctgccagagctttgttttatatatttattcatctgggaggcagaacaggcttcggacagtgcccatgcaatggcttgggttgggattttggtttcttcctttcctcgtgaaggataagagaaacaggccc

SEQ ID NO: 75194 - DNA, 2656 bp, Artificial Sequence
  derived and/or modified sequence
gtgcaatcgcgggaagccagggtttccagctaggacacagcaggtcgtgatccgggtcgggacactgcctggcagaggctgcgagcatggggccctggggctggaaattgcgctggaccgtcgccttgctcctcgccgcggcggggactgcagtgggcgacagatgcgaaagaaacgacttccagtgcaacagctccacctgcatcccccagctgtgggcctgcgacaacgaccccgactgcgaagatggctcggatgagtggccgcagcgctgtaggggtctttacgtgttccaaggggacagtagcccctgctcggccttcgagttccactgcctaagtggcgagtgcatccactccagctggcgctgtgatggtggccccgactgcaaggacaaatctgacgaggaaaactgcgctgtggccacctgtcgccctgacgaattccagtgctctgatggaaactgcatccatggcagccggcagtgtgaccgggaatatgactgcaaggacatgagcgatgaagttggctgcgttaatgtgacactctgcgagggacccaacaagttcaagtgtcacagcggcgaatgcatcaccctggacaaagtctgcaacatggctagagactgccgggactggtcagatgaacccatcaaagagtgcgggaccaacgaatgcttggacaacaacggcggctgttcccacgtctgcaatgaccttaagatcggctacgagtgcctgtgccccgacggcttccagctggtggcccagcgaagatgcgaagatatcgatgagtgtcaggatcccgacacctgcagccagctctgcgtgaacctggagggtggctacaagtgccagtgtgaggaaggcttccagctggacccccacacgaaggcctgcaaggctgtgggctccatcgcctacctcttcttcaccaaccggcacgaggtcaggaagatgacgctggaccggagcgagtacaccagcctcatccccaacctgaggaacgtggtcgctctggacacggaggtggccagcaatagaatctactggtctgacctgtcccagagaatgatctgcagcacccagcttgacagagcccacggcgtctcttcctatgacaccgtcatcagcagagacatccaggcccccgacgggctggctgtggactggatccacagcaacatctactggaccgactctgtcctgggcactgtctctgttgcggataccaagggcgtgaagaggaaaacgttattcagggagaacggctccaagccaagggccatcgtggtggatcctgttcatggcttcatgtactggactgactggggaactcccgccaagatcaagaaagggggcctgaatggtgtggacatctactcgctggtgactgaaaacattcagtggcccaatggcatcaccctagatctcctcagtggccgcctctactgggttgactccaaacttcactccatctcaagcatcgatgtcaacgggggcaaccggaagaccatcttggaggatgaaaagaggctggcccaccccttctccttggccgtctttgaggacaaagtattttggacagatatcatcaacgaagccattttcagtgccaaccgcctcacaggttccgatgtcaacttgttggctgaaaacctactgtccccagaggatatggttctcttccacaacctcacccagccaagaggagtgaactggtgtgagaggaccaccctgagcaatggcggctgccagtatctgtgcctccctgccccgcagatcaacccccactcgcccaagtttacctgcgcctgcccggacggcatgctgctggccagggacatgaggagctgcctcacagaggctgaggctgcagtggccacccaggagacatccaccgtcaggctaaaggtcagctccacagccgtaaggacacagcacacaaccacccgacctgttcccgacacctcccggctgcctggggccacccctgggctcaccacggtggagatagtgacaatgtctcaccaagctctgggcgacgttgctggcagaggaaatgagaagaagcccagtagcgtgagggctctgtccattgtcctccccatcgtgctcctcgtcttcctttgcctgggggtcttccttctatggaagaactggcggcttaagaacatcaacagcatcaactttgacaaccccgtctatcagaagaccacagaggatgaggtccacatttgccacaaccaggacggctacagctacccctcgagacagatggtcagtctggaggatgacgtggcgtgaacatctgcctggagtcccgtccctgcccagaacccttcctgagacctcgccggccttgttttattcaaagacagagaagaccaaagcattgcctgccagagctttgttttatatatttattcatctgggaggcagaacaggcttcggacagtgcccatgcaatggcttgggttgggattttggtttcttcctttcctcgtgaaggataagagaaacaggcccggggggaccaggatgacacctccatttctctccaggaagttttgagtttctctccaccgtgacacaatcctcaaacatggaagatgaaaggggaggggatgtcaggcccagagaagcaagtggctttc

SEQ ID NO: 75195 - DNA, 2220 bp, Artificial Sequence
  derived and/or modified sequence
atggggccctggggctggaaattgcgctggaccgtcgccttgctcctcgccgcggcggggactgcagtgggcgacagatgcgaaagaaacgacttccagtgcaacagctccacctgcatcccccagctgtgggcctgcgacaacgaccccgactgcgaagatggctcggatgagtggccgcagcgctgtaggggtctttacgtgttccaaggggacagtagcccctgctcggccttcgagttccactgcctaagtggcgagtgcatccactccagctggcgctgtgatggtggccccgactgcaaggacaaatctgacgaggaaaactgcgctgtggccacctgtcgccctgacgaattccagtgctctgatggaaactgcatccatggcagccggcagtgtgaccgggaatatgactgcaaggacatgagcgatgaagttggctgcgttaatgtgacactctgcgagggacccaacaagttcaagtgtcacagcggcgaatgcatcaccctggacaaagtctgcaacatggctagagactgccgggactggtcagatgaacccatcaaagagtgcgggaccaacgaatgcttggacaacaacggcggctgttcccacgtctgcaatgaccttaagatcggctacgagtgcctgtgccccgacggcttccagctggtggcccagcgaagatgcgaagatatcgatgagtgtcaggatcccgacacctgcagccagctctgcgtgaacctggagggtggctacaagtgccagtgtgaggaaggcttccagctggacccccacacgaaggcctgcaaggctgtgggctccatcgcctacctcttcttcaccaaccggcacgaggtcaggaagatgacgctggaccggagcgagtacaccagcctcatccccaacctgaggaacgtggtcgctctggacacggaggtggccagcaatagaatctactggtctgacctgtcccagagaatgatctgcagcacccagcttgacagagcccacggcgtctcttcctatgacaccgtcatcagcagagacatccaggcccccgacgggctggctgtggactggatccacagcaacatctactggaccgactctgtcctgggcactgtctctgttgcggataccaagggcgtgaagaggaaaacgttattcagggagaacggctccaagccaagggccatcgtggtggatcctgttcatggcttcatgtactggactgactggggaactcccgccaagatcaagaaagggggcctgaatggtgtggacatctactcgctggtgactgaaaacattcagtggcccaatggcatcaccctagatctcctcagtggccgcctctactgggttgactccaaacttcactccatctcaagcatcgatgtcaacgggggcaaccggaagaccatcttggaggatgaaaagaggctggcccaccccttctccttggccgtctttgaggacaaagtattttggacagatatcatcaacgaagccattttcagtgccaaccgcctcacaggttccgatgtcaacttgttggctgaaaacctactgtccccagaggatatggttctcttccacaacctcacccagccaagaggagtgaactggtgtgagaggaccaccctgagcaatggcggctgccagtatctgtgcctccctgccccgcagatcaacccccactcgcccaagtttacctgcgcctgcccggacggcatgctgctggccagggacatgaggagctgcctcacagaggctgaggctgcagtggccacccaggagacatccaccgtcaggctaaaggtcagctccacagccgtaaggacacagcacacaaccacccgacctgttcccgacacctcccggctgcctggggccacccctgggctcaccacggtggagatagtgacaatgtctcaccaagctctgggcgacgttgctggcagaggaaatgagaagaagcccagtagcgtgagggctctgtccattgtcctccccatcgtgctcctcgtcttcctttgcctgggggtcttccttctatggaagaactggcggcttaagaacatcaacagcatcaactttgacaaccccgtctatcagaagaccacagaggatgaggtccacatttgccacaaccaggacggctacagctacccctcgagacagatggtcagtctggaggatgacgtggcgtga

SEQ ID NO: 75196 - protein, 692 aa, Artificial Sequence
  derived and/or modified sequence
MGPWGWKLRWTVALLLAAAGTAVGDRCERNEFQCQDGKCISYKWVCDGSAECQDGSDESQETCLSVTCKSGDFSCGGRVNRCIPQFWRCDGQVDCDNGSDEQGCLTLCEGPNKFKCHSGECITLDKVCNMARDCRDWSDEPIKECGTNECLDNNGGCSHVCNDLKIGYECLCPDGFQLVAQRRCEDIDECQDPDTCSQLCVNLEGGYKCQCEEGFQLDPHTKACKAVGSIAYLFFTNRHEVRKMTLDRSEYTSLIPNLRNVVALDTEVASNRIYWSDLSQRMICSTQLDRAHGVSSYDTVISRDIQAPDGLAVDWIHSNIYWTDSVLGTVSVADTKGVKRKTLFRENGSKPRAIVVDPVHGFMYWTDWGTPAKIKKGGLNGVDIYSLVTENIQWPNGITLDLLSGRLYWVDSKLHSISSIDVNGGNRKTILEDEKRLAHPFSLAVFEDKVFWTDIINEAIFSANRLTGSDVNLLAENLLSPEDMVLFHNLTQPRGVNWCERTTLSNGGCQYLCLPAPQINPHSPKFTCACPDGMLLARDMRSCLTEAEAAVATQETSTVRLKVSSTAVRTQHTTTRPVPDTSRLPGATPGLTTVEIVTMSHQALGDVAGRGNEKKPSSVRALSIVLPIVLLVFLCLGVFLLWKNWRLKNINSINFDNPVYQKTTEDEVHICHNQDGYSYPSRQMVSLEDDVA

SEQ ID NO: 75197 - protein, 40 aa, Artificial Sequence
  derived and/or modified sequence
GTNECLDNNGGCSHVCNDLKIGYECLCPDGFQLVAQRRCE

SEQ ID NO: 75198 - protein, 50 aa, Artificial Sequence
  derived and/or modified sequence
KNWRLKNINSINFDNPVYQKTTEDEVHICHNQDGYSYPSRQMVSLEDDVA

SEQ ID NO: 75199 - protein, 40 aa, Artificial Sequence
  derived and/or modified sequence
KTNECLDNNGGCSHICKDLKIGSECLCPSGFRLVDLHRCE

SEQ ID NO: 75200 - protein, 50 aa, Artificial Sequence
  derived and/or modified sequence
RNWRLKNINSINFDNPVYQKTTEDELHICRSQDGYTYPSRQMVSLEDDVA

SEQ ID NO: 75201 - protein, 17 aa, Artificial Sequence
  derived and/or modified sequence
IGAECLCPDGFQLVAQR

SEQ ID NO: 75202 - DNA, 2076 bp, Artificial Sequence
  derived and/or modified sequence
atgggcccctggggctggaagctgcgctggaccgtggccctgctgctggccgccgccggcaccgccgtgggcgaccgctgcgagcgcaacgagttccagtgccaggacggcaagtgcatcagctacaagtgggtgtgcgacggcagcgccgagtgccaggacggcagcgacgagagccaggagacctgcctgagcgtgacctgcaagagcggcgacttcagctgcggcggccgcgtgaaccgctgcatcccccagttctggcgctgcgacggccaggtggactgcgacaacggcagcgacgagcagggctgcctgaccctgtgcgagggccccaacaagttcaagtgccacagcggcgagtgcatcaccctggacaaggtgtgcaacatggcccgcgactgccgcgactggagcgacgagcccatcaaggagtgcggcaccaacgagtgcctggacaacaacggcggctgcagccacgtgtgcaacgacctgaagatcggctacgagtgcctgtgccccgacggcttccagctggtggcccagcgccgctgcgaggacatcgacgagtgccaggaccccgacacctgcagccagctgtgcgtgaacctggagggcggctacaagtgccagtgcgaggagggcttccagctggacccccacaccaaggcctgcaaggccgtgggcagcatcgcctacctgttcttcaccaaccgccacgaggtgcgcaagatgaccctggaccgcagcgagtacaccagcctgatccccaacctgcgcaacgtggtggccctggacaccgaggtggccagcaaccgcatctactggagcgacctgagccagcgcatgatctgcagcacccagctggaccgcgcccacggcgtgagcagctacgacaccgtgatcagccgcgacatccaggcccccgacggcctggccgtggactggatccacagcaacatctactggaccgacagcgtgctgggcaccgtgagcgtggccgacaccaagggcgtgaagcgcaagaccctgttccgcgagaacggcagcaagccccgcgccatcgtggtggaccccgtgcacggcttcatgtactggaccgactggggcacccccgccaagatcaagaagggcggcctgaacggcgtggacatctacagcctggtgaccgagaacatccagtggcccaacggcatcaccctggacctgctgagcggccgcctgtactgggtggacagcaagctgcacagcatcagcagcatcgacgtgaacggcggcaaccgcaagaccatcctggaggacgagaagcgcctggcccaccccttcagcctggccgtgttcgaggacaaggtgttctggaccgacatcatcaacgaggccatcttcagcgccaaccgcctgaccggcagcgacgtgaacctgctggccgagaacctgctgagccccgaggacatggtgctgttccacaacctgacccagccccgcggcgtgaactggtgcgagcgcaccaccctgagcaacggcggctgccagtacctgtgcctgcccgccccccagatcaacccccacagccccaagttcacctgcgcctgccccgacggcatgctgctggcccgcgacatgcgcagctgcctgaccgaggccgaggccgccgtggccacccaggagaccagcaccgtgcgcctgaaggtgagcagcaccgccgtgcgcacccagcacaccaccacccgccccgtgcccgacaccagccgcctgcccggcgccacccccggcctgaccaccgtggagatcgtgaccatgagccaccaggccctgggcgacgtggccggccgcggcaacgagaagaagcccagcagcgtgcgcgccctgagcatcgtgctgcccatcgtgctgctggtgttcctgtgcctgggcgtgttcctgctgtggaagaactggcgcctgaagaacatcaacagcatcaacttcgacaaccccgtgtaccagaagaccaccgaggacgaggtgcacatctgccacaaccaggacggctacagctaccccagccgccagatggtgagcctggaggacgacgtggcc

SEQ ID NO: 75203 - DNA, 2079 bp, Artificial Sequence
  derived and/or modified sequence
atgggcccctggggctggaagctgagatggaccgtggccctgctgctggccgccgccggcaccgccgtgggcgacagatgcgagagaaacgagttccagtgccaggacggcaagtgcatcagctacaagtgggtgtgcgacggcagcgccgagtgccaggacggcagcgacgagagccaggagacctgcctgagcgtgacctgcaagagcggcgacttcagctgcggcggcagagtgaacagatgcatcccccagttctggagatgcgacggccaggtggactgcgacaacggcagcgacgagcagggctgcctgaccctgtgcgagggccccaacaagttcaagtgccacagcggcgagtgcatcaccctggacaaggtgtgcaacatggccagagactgcagagactggagcgacgagcccatcaaggagtgcggcaccaacgagtgcctggacaacaacggcggctgcagccacgtgtgcaacgacctgaagatcggctacgagtgcctgtgccccgacggcttccagctggtggcccagagaagatgcgaggacatcgacgagtgccaggaccccgacacctgcagccagctgtgcgtgaacctggagggcggctacaagtgccagtgcgaggagggcttccagctggacccccacaccaaggcctgcaaggccgtgggcagcatcgcctacctgttcttcaccaacagacacgaggtgagaaagatgaccctggacagaagcgagtacaccagcctgatccccaacctgagaaacgtggtggccctggacaccgaggtggccagcaacagaatctactggagcgacctgagccagagaatgatctgcagcacccagctggacagagcccacggcgtgagcagctacgacaccgtgatcagcagagacatccaggcccccgacggcctggccgtggactggatccacagcaacatctactggaccgacagcgtgctgggcaccgtgagcgtggccgacaccaagggcgtgaagagaaagaccctgttcagagagaacggcagcaagcccagagccatcgtggtggaccccgtgcacggcttcatgtactggaccgactggggcacccccgccaagatcaagaagggcggcctgaacggcgtggacatctacagcctggtgaccgagaacatccagtggcccaacggcatcaccctggacctgctgagcggcagactgtactgggtggacagcaagctgcacagcatcagcagcatcgacgtgaacggcggcaacagaaagaccatcctggaggacgagaagagactggcccaccccttcagcctggccgtgttcgaggacaaggtgttctggaccgacatcatcaacgaggccatcttcagcgccaacagactgaccggcagcgacgtgaacctgctggccgagaacctgctgagccccgaggacatggtgctgttccacaacctgacccagcccagaggcgtgaactggtgcgagagaaccaccctgagcaacggcggctgccagtacctgtgcctgcccgccccccagatcaacccccacagccccaagttcacctgcgcctgccccgacggcatgctgctggccagagacatgagaagctgcctgaccgaggccgaggccgccgtggccacccaggagaccagcaccgtgagactgaaggtgagcagcaccgccgtgagaacccagcacaccaccaccagacccgtgcccgacaccagcagactgcccggcgccacccccggcctgaccaccgtggagatcgtgaccatgagccaccaggccctgggcgacgtggccggcagaggcaacgagaagaagcccagcagcgtgagagccctgagcatcgtgctgcccatcgtgctgctggtgttcctgtgcctgggcgtgttcctgctgtggaagaactggagactgaagaacatcaacagcatcaacttcgacaaccccgtgtaccagaagaccaccgaggacgaggtgcacatctgccacaaccaggacggctacagctaccccagcagacagatggtgagcctggaggacgacgtggcctag

SEQ ID NO: 75204 - DNA, 2079 bp, Artificial Sequence
  derived and/or modified sequence
atggggccatggggctggaagctgcgatggaccgtagccttgctactggctgcggccggcaccgccgtgggcgatcgctgtgagcgcaatgaattccagtgtcaggacggtaaatgcattagctacaaatgggtatgcgacgggagtgccgagtgtcaagatggatcagatgaaagccaggagacgtgcctgagcgtgacgtgtaaatcaggcgacttctcttgcggcggcagagttaatcgctgtatcccacagttttggcggtgcgacggtcaggtggattgcgataacggatccgatgagcagggctgtctgactttatgcgaaggacctaacaaatttaaatgtcattccggcgagtgcattaccctagacaaggtgtgtaatatggccagagattgcagggattggtctgacgaaccaataaaggagtgtggcaccaacgaatgtctggacaataatgggggttgttcacacgtgtgcaatgatctgaaaataggatacgagtgcctctgcccggatggcttccagctcgtggcacagaggagatgtgaggatatagatgagtgtcaggacccggatacctgttcccagctttgtgtcaacctggagggagggtacaagtgccagtgcgaggaggggtttcagctggacccccacacaaaagcgtgcaaagctgttggcagcatagcataccttttctttacaaacaggcacgaggtgagaaagatgacattagaccgcagcgaatacacctcacttatacccaatctaaggaacgtcgtcgccctggacacagaggtggctagtaacagaatttattggtcggatctgtctcaacgcatgatctgttcgacacagctggaccgcgctcatggcgttagctcatacgatactgtgatctcgcgggacattcaggcacctgatggcctcgccgtagactggatccatagtaatatttactggactgattctgtgttaggcaccgtttctgtggctgacaccaagggcgtcaagaggaagactctgtttagggagaatgggagcaaacccagagctattgtggtagatcccgttcatggattcatgtattggactgattgggggacgcccgcaaaaatcaagaagggcggactgaatggagtggatatttacagcctggtgactgagaatatccaatggccaaacggaatcaccctggaccttttgtccgggcgactttactgggtagacagtaaactccacagcatctcttctatcgatgtaaacggagggaatcgtaaaacgattctggaagacgagaagcgattggctcaccccttttcactggcagtcttcgaggacaaggtgttttggacggacatcatcaatgaggctattttcagcgccaatcgccttaccggttccgatgtaaatcttctagccgagaatcttttgtcaccagaagatatggtgctcttccataatttaactcagccaaggggcgtgaactggtgtgagaggaccaccctgtcaaacggcggatgccagtacctgtgcctcccagcccctcagatcaaccctcatagccccaagtttacttgtgcctgtcccgacggaatgctcttagctcgggacatgaggagttgcttgaccgaggcggaggcagccgttgccacccaggaaacttcgaccgtacgtcttaaagtcagttctaccgccgtccggacacagcacacaaccacccggcccgtacccgatactagtcggttgcccggggctacgcctggacttactaccgtggagattgtgaccatgtctcaccaggcgctgggcgacgtggccgggcggggaaatgaaaagaaaccatccagtgtcagggcactgtctatcgtgttaccaatagtgctgttggttttcttgtgtttgggagtgttcttgctttggaagaattggagactcaagaatataaattctataaatttcgataaccccgtctatcagaaaaccaccgaagacgaggtgcatatttgccacaaccaagacggctatagctacccaagccgccagatggtaagcctggaagacgatgtagcttag

SEQ ID NO: 75205 - DNA, 2079 bp, Artificial Sequence
  derived and/or modified sequence
atgggcccctggggctggaagctgcgctggacagtggccctgctgctggccgctgctggaacagctgtgggggacagatgtgaaagaaatgagttccagtgccaggacggcaagtgcatctcctacaagtgggtgtgtgatggcagcgctgagtgccaggacggcagtgatgagagccaggagacctgcctgtctgtgacctgcaagagcggggacttcagctgtggcggccgggtgaaccgctgcatcccccagttctggaggtgtgatggccaggtggactgtgacaatggaagtgatgagcagggctgcctgaccctgtgtgagggccccaacaagttcaagtgccacagcggggagtgcatcaccctggacaaggtgtgcaacatggcccgggactgccgggactggagcgatgagcccatcaaggaatgtggcaccaatgaatgtctggacaacaacggcggctgcagccacgtgtgcaatgacctgaagattggctatgaatgtctgtgcccagatggcttccagctggtggcccagaggcgctgtgaagatattgatgagtgccaggaccctgacacctgcagccagctgtgtgtgaacctggagggcggctacaagtgccagtgtgaggagggcttccagctggacccccacaccaaggcctgcaaggctgtgggcagcatcgcctacctgttcttcaccaacagacatgaggtgaggaagatgaccctggacagaagtgagtacaccagcctcatccccaacctgagaaatgtggtggccctggacacagaggtggccagcaaccgcatctactggagcgacctgagccagaggatgatctgcagcacccagctggaccgggcccacggcgtgagcagctatgacaccgtcatcagccgggacatccaggccccagatggcctggccgtggactggatccacagcaacatctactggacagattctgtgctgggcaccgtgtctgtggccgacaccaagggcgtgaagaggaagaccctcttccgggagaatggcagcaagccccgggccatcgtggtggaccctgtgcacggcttcatgtactggacagactggggcaccccagccaagatcaagaagggcggcctgaatggagtggacatctacagcctggtgacagagaacatccagtggcccaacggcatcaccctggacctgctgagcggccgcctgtactgggtggacagcaagctgcacagcatcagcagcattgatgtgaatggaggcaacaggaagaccatcctggaggatgagaagaggctggcccaccccttcagcctggccgtgtttgaggacaaggtgttctggacagacatcatcaatgaggccatcttcagcgccaaccggctgactggaagtgatgtgaacctgctggccgagaacctgctgagccctgaggacatggtgctcttccacaacctgacccagccccggggcgtgaactggtgtgagaggaccaccctgagcaatggaggctgccagtacctgtgcctgcctgccccccagatcaacccccacagccccaagttcacctgtgcctgcccagatggcatgctgctggcccgggacatgaggagctgcctgacagaagctgaggccgctgtggccacccaggagaccagcacagtgcggctgaaggtgagcagcacagctgtgaggacccagcacaccaccaccaggcctgtgcctgacaccagccggctgcccggggccaccccaggcctgaccaccgtggagatcgtgaccatgagccaccaggccctgggagatgtggccggcagaggaaatgagaagaagcccagctctgtgcgggccctgagcatcgtgctgcccatcgtgctgctggtgttcctgtgcctgggcgtcttcctgctgtggaagaactggaggctgaagaacatcaacagcatcaactttgacaaccctgtgtaccagaagaccacagaagatgaggtgcacatctgccacaaccaggacggctacagctaccccagccggcagatggtgtccctggaggatgatgtggcctag

SEQ ID NO: 75206 - DNA, 2079 bp, Artificial Sequence
  derived and/or modified sequence
atgggcccctggggctggaagctgcggtggaccgtggccctgctgcttgcagctgcgggcactgcagtgggtgatcggtgcgagcggaacgagtttcagtgtcaggatgggaagtgcatctcgtacaaatgggtttgcgacggcagcgccgaatgccaggacggctctgacgagtcccaggaaacatgcctgtcagtaacctgcaagtcaggagatttttcttgcggtgggagggtcaatcgctgcatcccccaattttggcgatgtgacggacaagtggactgcgataacggctctgatgagcagggctgcctcactctttgcgagggcccgaacaaatttaagtgccactcaggcgagtgcatcaccctggacaaagtgtgcaacatggccagggactgtagggactggagtgacgaaccgattaaggagtgcggaaccaatgagtgcctggacaacaacggcggctgttctcacgtgtgtaatgatctgaagattgggtatgaatgcctctgccctgatggtttccagctggtggcccaacggcgatgcgaggacattgatgagtgtcaggatcccgacacgtgttcacagctgtgtgttaatctcgaagggggctataaatgccagtgcgaagagggctttcagctggatcctcataccaaagcttgcaaggctgtggggtctatcgcctacctattcttcacgaaccgccacgaagtcagaaaaatgactctggacaggtccgaatacacttccctgattcctaatctgagaaacgtagtggcgcttgatacagaagtggcgagtaaccgtatctattggagcgacttaagccagaggatgatctgcagcacccagctggacagggcacatggagtgtcatcgtacgatacagtcatttcacgggatatacaggctcccgatggtctcgctgtagactggattcactccaacatatattggacagatagtgtccttggtacagtgtcagtggctgatacaaaaggtgtcaagcggaaaactctgttccgtgaaaacggaagcaagcctagggccattgttgtggacccagtccatggcttcatgtattggaccgattgggggaccccagccaaaataaaaaagggcggcctcaacggagtggacatctacagtttagtgaccgagaacatccaatggcctaatggaattactttggacctcttatccggaaggctatactgggtcgatagcaagttacatagcatctcatcaatcgacgtcaatggcggcaaccgaaagaccattctggaggacgaaaaacgcttggcccatcccttctcactggccgtctttgaggacaaggttttttggactgacataataaacgaagccatcttctccgcaaatcggcttactggatccgacgtcaacttgctggccgaaaatctgctctccccggaggacatggttctcttccacaaccttacacagcctaggggagttaattggtgtgaaagaactaccctgtcgaacggcggatgccagtacctgtgccttccagcccctcaaatcaacccacattcccccaaattcacctgcgcctgtcccgatggcatgctcctcgccagagacatgcggagttgcctgacagaggccgaggccgccgtggctacccaagaaacttcaactgttagactcaaagtgagctctacggccgttcggacccaacataccactaccagaccagttcccgacacatcacgcctgcctggtgctacacccggcctgacaactgtcgagatagtaaccatgagccatcaggctctgggagacgtggcaggaagaggaaatgagaagaagccctcctctgtgcgggcactatcaatcgttctgcctattgtgctgctagttttcctttgtctaggtgtttttctcttatggaagaactggaggctgaaaaacataaacagcatcaattttgataaccccgtctaccagaagaccaccgaagacgaggtgcatatctgccacaaccaggatggctattcttatccttcacgccaaatggtttctcttgaggatgatgtcgcctag

SEQ ID NO: 75207 - DNA, 2079 bp, Artificial Sequence
  derived and/or modified sequence
atgggcccttggggctggaagctcaggtggactgtcgccctcctgctggcagctgccggaaccgctgtgggagatcggtgtgagcgcaacgaattccaatgtcaagatggcaaatgtatcagctacaagtgggtgtgtgatggctcagctgagtgtcaggacggcagcgacgagagccaggagacatgcctgtccgtcacttgcaagagtggagatttttcctgcggcggacgggtgaacaggtgcatccctcagttctggagatgcgatggccaagtggattgcgacaatggaagtgacgagcagggatgtctgaccctgtgcgaaggccctaataagtttaaatgccacagcggggagtgtattaccctggataaagtgtgcaacatggcacgagactgtcgggactggagcgacgaacccataaaggaatgtggcaccaacgaatgcctggacaacaatggtggctgttcccacgtctgtaatgacctaaagattggctacgaatgcctgtgccctgatgggttccagttggtggcccaacgcagatgtgaggatatagacgagtgtcaggaccccgacacctgctcccaactctgcgtcaacttggagggcggatataagtgtcagtgtgaagagggcttccaactcgacccacatacaaaggcttgcaaggccgtgggcagcatcgcctatctctttttcactaatcgacacgaagtgcggaagatgacgttagatcgatcggaatacaccagcttgatacccaaccttcggaacgtggtggccttagatacagaggtggcatccaacagaatctactggtccgatctgagtcagagaatgatctgtagcacgcaactcgatcgcgcacacggcgtgtcatcttatgatactgtcattagtcgcgatatacaggccccagacggccttgccgtcgactggatccactcaaatatctattggaccgacagtgtgcttggcaccgtgagtgtggccgacacaaaaggggtgaagcgaaagaccttatttcgggaaaacgggtctaagccgagggctatcgtcgtcgatcccgtgcacggcttcatgtactggactgattggggcacacctgcaaaaattaagaaaggaggactgaatggcgttgacatttactcactggtgactgaaaacatccagtggcctaacggcataaccctggatctactgagcggcaggttatactgggtcgattcaaagctgcactcaatcagtagtattgatgtaaatggtggaaatcgcaaaaccatcctggaagatgagaagaggcttgcccatccttttagcctggccgtgtttgaggataaggtgttctggacagatataataaacgaggcaatcttctctgccaacaggctgaccgggtccgatgtgaacctcttagcagagaatctcctgtcacccgaggacatggtgctatttcataacttaacacagcccaggggagtcaactggtgtgagcggaccactctcagcaacggaggatgccagtatctctgtctccccgctccgcaaattaatccacattctcctaagttcacatgcgcatgcccggatggaatgctgctggccagggatatgaggtcctgtttgactgaagccgaagctgccgtggcaacccaggagactagcaccgtgcgtctcaaggtttcttccacggcagtacggacgcaacatactaccacgcggcctgtgccggatacgtcacgcctgccaggtgccacgcctgggctcactactgtggaaatcgtcactatgagccatcaggcgttaggggatgtggcgggtcggggaaatgagaagaagccaagctccgtgagagcactttctattgtcttacccattgttctgctagtgttcctgtgcttaggtgtgtttctcctgtggaagaattggcgtctgaaaaacattaactccattaactttgataatcctgtgtatcaaaaaacaacagaggatgaagtgcacatttgccataaccaggatggctacagttatcctagcagacaaatggtatccctggaggacgacgtggcctag

SEQ ID NO: 75208 - DNA, 2333 bp, Artificial Sequence
  derived and/or modified sequence
gtgcaatcgcgggaagccagggtttccagctaggacacagcaggtcgtgatccgggtcgggacactgcctggcagaggctgcgagcatggggccctggggctggaaattgcgctggaccgtcgccttgctcctcgccgcggcggggactgcagtgggcgacagatgcgaaagaaacgagttccagtgccaagacgggaaatgcatctcctacaagtgggtctgcgatggcagcgctgagtgccaggatggctctgatgagtcccaggagacgtgcttgtctgtcacctgcaaatccggggacttcagctgtgggggccgtgtcaaccgctgcattcctcagttctggaggtgcgatggccaagtggactgcgacaacggctcagacgagcaaggctgtctgacactctgcgagggacccaacaagttcaagtgtcacagcggcgaatgcatcaccctggacaaagtctgcaacatggctagagactgccgggactggtcagatgaacccatcaaagagtgcgggaccaacgaatgcttggacaacaacggcggctgttcccacgtctgcaatgaccttaagatcggctacgagtgcctgtgccccgacggcttccagctggtggcccagcgaagatgcgaagatatcgatgagtgtcaggatcccgacacctgcagccagctctgcgtgaacctggagggtggctacaagtgccagtgtgaggaaggcttccagctggacccccacacgaaggcctgcaaggctgtgggctccatcgcctacctcttcttcaccaaccggcacgaggtcaggaagatgacgctggaccggagcgagtacaccagcctcatccccaacctgaggaacgtggtcgctctggacacggaggtggccagcaatagaatctactggtctgacctgtcccagagaatgatctgcagcacccagcttgacagagcccacggcgtctcttcctatgacaccgtcatcagcagagacatccaggcccccgacgggctggctgtggactggatccacagcaacatctactggaccgactctgtcctgggcactgtctctgttgcggataccaagggcgtgaagaggaaaacgttattcagggagaacggctccaagccaagggccatcgtggtggatcctgttcatggcttcatgtactggactgactggggaactcccgccaagatcaagaaagggggcctgaatggtgtggacatctactcgctggtgactgaaaacattcagtggcccaatggcatcaccctagatctcctcagtggccgcctctactgggttgactccaaacttcactccatctcaagcatcgatgtcaacgggggcaaccggaagaccatcttggaggatgaaaagaggctggcccaccccttctccttggccgtctttgaggacaaagtattttggacagatatcatcaacgaagccattttcagtgccaaccgcctcacaggttccgatgtcaacttgttggctgaaaacctactgtccccagaggatatggttctcttccacaacctcacccagccaagaggagtgaactggtgtgagaggaccaccctgagcaatggcggctgccagtatctgtgcctccctgccccgcagatcaacccccactcgcccaagtttacctgcgcctgcccggacggcatgctgctggccagggacatgaggagctgcctcacagaggctgaggctgcagtggccacccaggagacatccaccgtcaggctaaaggtcagctccacagccgtaaggacacagcacacaaccacccgacctgttcccgacacctcccggctgcctggggccacccctgggctcaccacggtggagatagtgacaatgtctcaccaagctctgggcgacgttgctggcagaggaaatgagaagaagcccagtagcgtgagggctctgtccattgtcctccccatcgtgctcctcgtcttcctttgcctgggggtcttccttctatggaagaactggcggcttaagaacatcaacagcatcaactttgacaaccccgtctatcagaagaccacagaggatgaggtccacatttgccacaaccaggacggctacagctacccctcgagacagatggtcagtctggaggatgacgtggcgtgaacatctgcctggagtcccgtccctgcccagaacccttcctgagacctcgccggccttgttttattcaaagacagagaagaccaaagcattgcctgccagagctttgttttatatatttattcatctgggaggcagaacaggcttcggacagtgcccatgcaatggctt

SEQ ID NO: 75209 - protein, 682 aa, Artificial Sequence
  derived and/or modified sequence
MGPWGWKLRWTVALLLAAAGTAVGDRCERNEFQCQDGKCISYKWVCDGSAECQDGSDESQETCLSVTCKSGDFSCGGRVNRCIPQFWRCDGQVDCDNGSDEQGCPVATCRPDEFQCSDGNCIHGSRQCDREYDCKDMSDEVGCVNVTLCEGPNKFKCHSGECITLDKVCNMARDCRDWSDEPIKECGTNECLDNNGGCSHVCNDLKIGYECLCPDGFQLVAQRRCEDIDECQDPDTCSQLCVNLEGGYKCQCEEGFQLDPHTKACKAVGSIAYLFFTNRHEVRKMTLDRSEYTSLIPNLRNVVALDTEVASNRIYWSDLSQRMICSTQLDRAHGVSSYDTVISRDIQAPDGLAVDWIHSNIYWTDSVLGTVSVADTKGVKRKTLFRENGSKPRAIVVDPVHGFMYWTDWGTPAKIKKGGLNGVDIYSLVTENIQWPNGITLDLLSGRLYWVDSKLHSISSIDVNGGNRKTILEDEKRLAHPFSLAVFEDKVFWTDIINEAIFSANRLTGSDVNLLAENLLSPEDMVLFHNLTQPREAEAAVATQETSTVRLKVSSTAVRTQHTTTRPVPDTSRLPGATPGLTTVEIVTMSHQALGDVAGRGNEKKPSSVRALSIVLPIVLLVFLCLGVFLLWKNWRLKNINSINFDNPVYQKTTEDEVHICHNQDGYSYPSRQMVSLEDDVA

SEQ ID NO: 75210 - DNA, 2046 bp, Artificial Sequence
  derived and/or modified sequence
atgggcccctggggctggaagctgcgctggaccgtggccctgctgctggccgccgccggcaccgccgtgggcgaccgctgcgagcgcaacgagttccagtgccaggacggcaagtgcatcagctacaagtgggtgtgcgacggcagcgccgagtgccaggacggcagcgacgagagccaggagacctgcctgagcgtgacctgcaagagcggcgacttcagctgcggcggccgcgtgaaccgctgcatcccccagttctggcgctgcgacggccaggtggactgcgacaacggcagcgacgagcagggctgccccgtggccacctgccgccccgacgagttccagtgcagcgacggcaactgcatccacggcagccgccagtgcgaccgcgagtacgactgcaaggacatgagcgacgaggtgggctgcgtgaacgtgaccctgtgcgagggccccaacaagttcaagtgccacagcggcgagtgcatcaccctggacaaggtgtgcaacatggcccgcgactgccgcgactggagcgacgagcccatcaaggagtgcggcaccaacgagtgcctggacaacaacggcggctgcagccacgtgtgcaacgacctgaagatcggctacgagtgcctgtgccccgacggcttccagctggtggcccagcgccgctgcgaggacatcgacgagtgccaggaccccgacacctgcagccagctgtgcgtgaacctggagggcggctacaagtgccagtgcgaggagggcttccagctggacccccacaccaaggcctgcaaggccgtgggcagcatcgcctacctgttcttcaccaaccgccacgaggtgcgcaagatgaccctggaccgcagcgagtacaccagcctgatccccaacctgcgcaacgtggtggccctggacaccgaggtggccagcaaccgcatctactggagcgacctgagccagcgcatgatctgcagcacccagctggaccgcgcccacggcgtgagcagctacgacaccgtgatcagccgcgacatccaggcccccgacggcctggccgtggactggatccacagcaacatctactggaccgacagcgtgctgggcaccgtgagcgtggccgacaccaagggcgtgaagcgcaagaccctgttccgcgagaacggcagcaagccccgcgccatcgtggtggaccccgtgcacggcttcatgtactggaccgactggggcacccccgccaagatcaagaagggcggcctgaacggcgtggacatctacagcctggtgaccgagaacatccagtggcccaacggcatcaccctggacctgctgagcggccgcctgtactgggtggacagcaagctgcacagcatcagcagcatcgacgtgaacggcggcaaccgcaagaccatcctggaggacgagaagcgcctggcccaccccttcagcctggccgtgttcgaggacaaggtgttctggaccgacatcatcaacgaggccatcttcagcgccaaccgcctgaccggcagcgacgtgaacctgctggccgagaacctgctgagccccgaggacatggtgctgttccacaacctgacccagccccgcgaggccgaggccgccgtggccacccaggagaccagcaccgtgcgcctgaaggtgagcagcaccgccgtgcgcacccagcacaccaccacccgccccgtgcccgacaccagccgcctgcccggcgccacccccggcctgaccaccgtggagatcgtgaccatgagccaccaggccctgggcgacgtggccggccgcggcaacgagaagaagcccagcagcgtgcgcgccctgagcatcgtgctgcccatcgtgctgctggtgttcctgtgcctgggcgtgttcctgctgtggaagaactggcgcctgaagaacatcaacagcatcaacttcgacaaccccgtgtaccagaagaccaccgaggacgaggtgcacatctgccacaaccaggacggctacagctaccccagccgccagatggtgagcctggaggacgacgtggcc

SEQ ID NO: 75211 - DNA, 2049 bp, Artificial Sequence
  derived and/or modified sequence
atgggcccctggggctggaagctgagatggaccgtggccctgctgctggccgccgccggcaccgccgtgggcgacagatgcgagagaaacgagttccagtgccaggacggcaagtgcatcagctacaagtgggtgtgcgacggcagcgccgagtgccaggacggcagcgacgagagccaggagacctgcctgagcgtgacctgcaagagcggcgacttcagctgcggcggcagagtgaacagatgcatcccccagttctggagatgcgacggccaggtggactgcgacaacggcagcgacgagcagggctgccccgtggccacctgcagacccgacgagttccagtgcagcgacggcaactgcatccacggcagcagacagtgcgacagagagtacgactgcaaggacatgagcgacgaggtgggctgcgtgaacgtgaccctgtgcgagggccccaacaagttcaagtgccacagcggcgagtgcatcaccctggacaaggtgtgcaacatggccagagactgcagagactggagcgacgagcccatcaaggagtgcggcaccaacgagtgcctggacaacaacggcggctgcagccacgtgtgcaacgacctgaagatcggctacgagtgcctgtgccccgacggcttccagctggtggcccagagaagatgcgaggacatcgacgagtgccaggaccccgacacctgcagccagctgtgcgtgaacctggagggcggctacaagtgccagtgcgaggagggcttccagctggacccccacaccaaggcctgcaaggccgtgggcagcatcgcctacctgttcttcaccaacagacacgaggtgagaaagatgaccctggacagaagcgagtacaccagcctgatccccaacctgagaaacgtggtggccctggacaccgaggtggccagcaacagaatctactggagcgacctgagccagagaatgatctgcagcacccagctggacagagcccacggcgtgagcagctacgacaccgtgatcagcagagacatccaggcccccgacggcctggccgtggactggatccacagcaacatctactggaccgacagcgtgctgggcaccgtgagcgtggccgacaccaagggcgtgaagagaaagaccctgttcagagagaacggcagcaagcccagagccatcgtggtggaccccgtgcacggcttcatgtactggaccgactggggcacccccgccaagatcaagaagggcggcctgaacggcgtggacatctacagcctggtgaccgagaacatccagtggcccaacggcatcaccctggacctgctgagcggcagactgtactgggtggacagcaagctgcacagcatcagcagcatcgacgtgaacggcggcaacagaaagaccatcctggaggacgagaagagactggcccaccccttcagcctggccgtgttcgaggacaaggtgttctggaccgacatcatcaacgaggccatcttcagcgccaacagactgaccggcagcgacgtgaacctgctggccgagaacctgctgagccccgaggacatggtgctgttccacaacctgacccagcccagagaggccgaggccgccgtggccacccaggagaccagcaccgtgagactgaaggtgagcagcaccgccgtgagaacccagcacaccaccaccagacccgtgcccgacaccagcagactgcccggcgccacccccggcctgaccaccgtggagatcgtgaccatgagccaccaggccctgggcgacgtggccggcagaggcaacgagaagaagcccagcagcgtgagagccctgagcatcgtgctgcccatcgtgctgctggtgttcctgtgcctgggcgtgttcctgctgtggaagaactggagactgaagaacatcaacagcatcaacttcgacaaccccgtgtaccagaagaccaccgaggacgaggtgcacatctgccacaaccaggacggctacagctaccccagcagacagatggtgagcctggaggacgacgtggcctag

SEQ ID NO: 75212 - DNA, 2049 bp, Artificial Sequence
  derived and/or modified sequence
atgggaccgtggggatggaagcttcggtggactgtcgctctactgctggccgccgctggcactgccgtcggtgatagatgtgagaggaatgaattccaatgtcaggatggtaagtgcattagttataagtgggtctgtgatggcagtgcggagtgtcaggatggctctgacgagagccaggaaacttgtctcagcgttacctgcaagagcggcgacttctcgtgcggcggtcgagttaaccgctgcatcccccagttctggcgttgcgatggacaggtcgattgtgacaacgggagcgatgagcagggctgccctgtggcgacgtgtcgacctgacgaattccaatgcagcgacggaaactgtatccatggaagcaggcagtgcgatcgcgagtacgactgtaaagacatgagtgacgaagtgggctgcgtcaacgtgacactttgtgaaggcccaaacaagttcaaatgccactctggcgagtgtataactttggataaagtctgtaacatggcccgcgactgcagagattggtctgatgagcctattaaagaatgcgggaccaacgagtgcttggataataatgggggatgtagccatgtgtgcaatgacttgaaaatcggttacgagtgtctctgccctgacgggttccagctggtggcacaacgacggtgcgaagatatcgatgagtgtcaggacccagacacatgtagccagctttgtgtcaatctggaaggtggttacaagtgtcagtgcgaagagggctttcaactcgaccctcacaccaaggcttgcaaggctgtcggctcaatcgcctaccttttttttactaatcggcacgaggttcgtaagatgactttggaccgctctgaatacacgagcctgatccctaatttaagaaatgtggttgcactggatacagaggttgcttcaaacaggatatactggtcagatctgagccagaggatgatctgctcaactcagcttgatagagcccacggagtctcatcttacgatacagtaattagcagagacatccaagcccctgatggcctcgccgtggactggatccactcaaatatatactggaccgactctgtgctggggaccgtgagcgtggcagacacgaaaggtgtgaaacgtaagacgctctttagggagaatgggtcgaagccccgcgcaattgtcgtggaccccgtccatggtttcatgtactggaccgattggggaacacccgcaaaaataaagaaggggggccttaacggggtagatatttatagcctcgttacagagaacattcagtggccaaatgggattaccctcgatttacttagcggccgcctctactgggtggacagcaaactccacagcatttcgtccatcgacgtgaacgggggcaaccgcaagacaatactcgaggatgaaaagagactggcccatccattctccctggccgtgtttgaagataaggtgttctggactgacattatcaacgaggcgattttcagtgcaaacaggctgaccggatccgatgtgaacctgctggctgagaatttgctatctccagaggatatggtgctgtttcacaacctgacccagccaagagaggctgaggccgcagttgccacacaggaaacctctaccgttaggctgaaagtcagctccactgcagtgagaacacagcacacaacgacaagaccagtacccgatacatcacgcctgcccggggctacacctggactcaccactgtcgaaatcgtgaccatgtctcaccaggcgttaggtgacgtagctgggagaggcaacgaaaagaagccaagttctgtgcgcgctctgtccatcgtactccctattgtcctgttggtgtttttgtgtcttggcgtgtttttgttgtggaagaactggcgacttaaaaatattaattccataaactttgacaaccccgtgtatcagaagaccactgaggatgaagtgcatatctgtcataatcaagacggctacagttaccccagcaggcaaatggtgtctctggaggatgacgtagcatag

SEQ ID NO: 75213 - DNA, 2049 bp, Artificial Sequence
  derived and/or modified sequence
atgggcccctggggctggaagctgcgctggacagtggccctgctgctggccgctgctggaacagctgtgggggacagatgtgaaagaaatgagttccagtgccaggacggcaagtgcatctcctacaagtgggtgtgtgatggcagcgctgagtgccaggacggcagtgatgagagccaggagacctgcctgtctgtgacctgcaagagcggggacttcagctgtggcggccgggtgaaccgctgcatcccccagttctggaggtgtgatggccaggtggactgtgacaatggaagtgatgagcagggctgccctgtggccacctgcaggccagatgagttccagtgcagtgatggcaactgcatccacggcagccggcagtgtgaccgggagtatgactgcaaggacatgtctgatgaggtgggctgtgtgaatgtgaccctgtgtgagggccccaacaagttcaagtgccacagcggggagtgcatcaccctggacaaggtgtgcaacatggcccgggactgccgggactggagcgatgagcccatcaaggaatgtggcaccaatgaatgtctggacaacaatggaggctgcagccacgtgtgcaatgacctgaagattggctatgagtgcctgtgcccagatggcttccagctggtggcccagaggcgctgtgaggacattgatgagtgccaggaccctgacacctgcagccagctgtgtgtgaacctggagggcggctacaagtgccagtgtgaggagggcttccagctggacccccacaccaaggcctgcaaggctgtgggcagcatcgcctacctgttcttcaccaacagacatgaggtgaggaagatgaccctggacagaagtgagtacaccagcctcatccccaacctgagaaatgtggtggccctggacacagaggtggccagcaaccgcatctactggagcgacctgagccagaggatgatctgcagcacccagctggaccgggcccatggagtgtcctcctatgacaccgtcatcagccgggacatccaggccccagatggcctggccgtggactggatccacagcaacatctactggacagacagcgtgctgggcaccgtgtctgtggccgacaccaagggcgtgaagaggaagaccctcttcagagaaaatggcagcaagccccgggccatcgtggtggaccctgtgcacggcttcatgtactggacagactggggcaccccagccaagatcaagaagggcggcctgaatggagtggacatctacagcctggtgacagagaacatccagtggcccaacggcatcaccctggacctgctgagcggccgcctgtactgggtggacagcaagctgcacagcatcagcagcattgatgtgaatggaggcaacaggaagaccatcctggaggatgagaagaggctggcccaccccttcagcctggccgtgtttgaggacaaggtgttctggacagacatcatcaatgaggccatcttcagcgccaaccggctgaccggcagtgatgtgaacctgctggccgagaacctgctgagccctgaggacatggtgctcttccacaacctgacccagccccgggaggccgaggccgctgtggccacccaggagaccagcacagtgcggctgaaggtgagcagcacagctgtgaggacccagcacaccaccaccaggcctgtgcctgacaccagccggctgcccggggccaccccaggcctgaccaccgtggagatcgtgaccatgagccaccaggccctgggagatgtggccggcagaggaaatgagaagaagcccagctctgtgcgggccctgagcatcgtgctgcccatcgtgctgctggtgttcctgtgcctgggcgtcttcctgctgtggaagaactggaggctgaagaacatcaacagcatcaactttgacaaccctgtgtaccagaagaccacagaagatgaggtgcacatctgccacaaccaggacggctacagctaccccagccggcagatggtgtccctggaggatgatgtggcctag

SEQ ID NO: 75214 - DNA, 2049 bp, Artificial Sequence
  derived and/or modified sequence
atgggcccctggggctggaagctgcggtggaccgtggccctgctgctggccgctgctgggacagctgtgggcgatcggtgcgagagaaacgaatttcaatgccaggacggcaagtgtattagctataagtgggtatgcgacggaagtgcagagtgccaagatggatcagatgagagccaggaaacctgcctcagcgtgacttgtaaatctggggacttctcatgcggcggaagagtgaataggtgtataccgcaattctggcggtgcgatggacaggtggattgcgacaatggctccgatgagcaggggtgcccagttgccacatgccgtcctgatgagttccaatgttctgacggcaactgtatacatggcagcaggcaatgtgatcgtgagtatgattgcaaggatatgagcgacgaagtaggctgtgtcaacgttacactatgcgagggacctaataagttcaagtgccactctggggaatgtatcactctggacaaggtatgtaacatggcacgcgattgccgggactggtctgatgagccaatcaaagagtgtggtactaacgaatgcctggataataatgggggctgttcccacgtgtgcaatgacctaaagattggctacgagtgtttatgtcccgatggcttccagctggtggcccagaggcgatgtgaggacatcgatgaatgccaggatccagacacgtgtagccaattatgcgtgaacttagagggagggtataagtgccaatgtgaggaaggcttccagctggatcctcacaccaaagcgtgtaaagctgtggggagcatcgcctaccttttcttcaccaatcgccacgaagtcaggaaaatgactctggataggtcggagtatacctctctcattcccaatctgagaaacgtggttgctctcgatactgaagtcgcatccaaccgaatctactggtctgacctttcccagcgcatgatttgctccacacagctggatagggctcacggtgtgagtagctatgataccgttattagtagagatatacaggctccagatggcctcgccgtggactggatccactcaaacatatattggaccgacagcgtcctaggcaccgtgtctgtcgcggacaccaagggggtgaaaaggaaaaccctctttcgcgagaacgggtcaaagcctcgagccatcgtggtggaccctgttcacggcttcatgtactggactgattggggaactcccgccaaaatcaagaaaggtggcctgaatggcgttgacatttactccttggtgactgaaaatatccagtggcccaacgggattactctggatctgctgtctggccgcctctattgggtcgattctaagctgcattccatcagctctattgacgtgaacggaggaaatcgaaaaacaatcttagaagacgagaagcgccttgcccacccgtttagccttgccgtgttcgaggataaagttttttggaccgacattatcaatgaggcaatcttttcggcaaacaggctgacaggatccgacgtcaacctcttagcagagaatctgctgtctcccgaggatatggtcctgtttcacaatctaacccagccgcgcgaggccgaggccgcagtggccactcaagaaaccagtaccgtcagactgaaagtgagcagcactgctgttagaacccagcataccactacgagaccagtaccagatactagccgcctgccaggggcgactcccggtctcactaccgtagagatcgtgactatgagccatcaagccctcggagatgtggccgggcgcggtaatgagaagaagccttcaagtgttagagctctatctattgtcctgcccattgtcctgctggttttcctctgcctgggtgtgtttctcttgtggaagaactggaggcttaaaaatatcaattctataaacttcgacaaccctgtctatcagaagaccactgaggacgaggtgcatatctgccacaatcaggacggatattcatatccctctaggcaaatggtgagtttagaggacgatgtcgcatag

SEQ ID NO: 75215 - DNA, 2049 bp, Artificial Sequence
  derived and/or modified sequence
atgggcccttggggctggaaactacgctggaccgtggccctgctgctcgctgccgcagggaccgcagtgggtgatcggtgtgagcgcaatgaatttcagtgccaggacggaaaatgtatttcatacaagtgggtttgtgacggcagcgccgagtgtcaggatggaagcgatgagtctcaggaaacctgcctatccgtgacatgtaagtcaggggatttctcctgtggcggacgggttaatcggtgcataccccagttttggcgttgcgatgggcaggtggattgcgacaacggcagtgacgaacaaggctgtcccgttgccacatgcaggcctgacgaatttcagtgcagcgatggaaactgcattcacggatcccgccagtgcgatcgcgaatacgactgcaaggatatgagcgatgaagtcggatgtgtgaatgtaactctgtgcgagggtccaaataaatttaagtgtcatagcggcgagtgtatcaccctcgataaagtttgtaatatggcgcgtgattgcagagattggagcgacgagcctattaaggagtgcggaacaaatgagtgcctggataacaatggaggctgctcacatgtgtgcaatgacctcaagattggctacgagtgcctgtgcccagatggtttccaactggtagcgcagagaaggtgcgaagacatcgacgaatgtcaagaccctgacacctgctcccaactgtgcgttaatctggagggcggatacaagtgccagtgcgaggaaggctttcaactggaccctcatacaaaggcatgtaaggcggtaggcagcatcgcttatctgtttttcaccaaccgtcacgaagttcggaaaatgaccctcgaccgatccgagtacaccagcctaatccccaatctcagaaatgtggtcgctctggacaccgaggtcgcatcaaataggatttactggagcgatctgagccagcgcatgatctgctctactcagctggatcgggctcatggggtatcctcgtatgatacagtcatctcgcgagatattcaggcgcctgacggccttgctgttgactggatacacagcaacatatactggactgatagcgtgctgggcaccgtgagtgtggccgatacgaagggtgtgaagaggaaaacactgtttagagagaacggtagcaaacctcgcgctatcgtcgtggacccagtgcatggattcatgtattggaccgactgggggacccccgctaaaatcaagaaaggaggactcaacggcgtggacatctacagcttggttactgaaaatatccagtggcccaacggcatcaccctggatctgttaagtggccgtctgtactgggttgactctaaactccatagcatatcttccatcgacgttaatggtggcaatagaaagacaatcctggaggacgaaaagcggcttgctcatcccttttccctcgccgtgttcgaggacaaggttttttggacggatatcattaatgaagctatcttctccgccaatcgtcttacggggtccgacgttaaccttctcgcagaaaatctgctgtcaccagaagacatggtgctgtttcacaatctcacacaacccagagaagccgaagccgcagttgccacgcaggaaacctctacagttcgtttgaaagtttcctctaccgccgtgcgcactcagcacacaaccacaagacccgtgccggacacttcacgactgccaggcgctactccaggacttacaacagtggagatcgtcaccatgtcccatcaggccctgggcgatgttgccggtcgcggaaatgagaaaaaaccaagctccgtccgagcactatctatcgtgcttcccatcgtgctgctggtgtttctgtgtctgggcgttttcctcctgtggaagaactggagactgaagaacatcaacagtattaacttcgataacccggtctaccagaaaaccaccgaggatgaggtgcacatttgccacaaccaagacggatactcttacccaagtcgccaaatggtgtctctggaagacgacgtcgcgtag

SEQ ID NO: 75216 - DNA, 2429 bp, Artificial Sequence
  derived and/or modified sequence
gtgcaatcgcgggaagccagggtttccagctaggacacagcaggtcgtgatccgggtcgggacactgcctggcagaggctgcgagcatggggccctggggctggaaattgcgctggaccgtcgccttgctcctcgccgcggcggggactgcagtgggcgacagatgcgaaagaaacgagttccagtgccaagacgggaaatgcatctcctacaagtgggtctgcgatggcagcgctgagtgccaggatggctctgatgagtcccaggagacgtgcttgtctgtcacctgcaaatccggggacttcagctgtgggggccgtgtcaaccgctgcattcctcagttctggaggtgcgatggccaagtggactgcgacaacggctcagacgagcaaggctgtcctgtggccacctgtcgccctgacgaattccagtgctctgatggaaactgcatccatggcagccggcagtgtgaccgggaatatgactgcaaggacatgagcgatgaagttggctgcgttaatgtgacactctgcgagggacccaacaagttcaagtgtcacagcggcgaatgcatcaccctggacaaagtctgcaacatggctagagactgccgggactggtcagatgaacccatcaaagagtgcgggaccaacgaatgcttggacaacaacggcggctgttcccacgtctgcaatgaccttaagatcggctacgagtgcctgtgccccgacggcttccagctggtggcccagcgaagatgcgaagatatcgatgagtgtcaggatcccgacacctgcagccagctctgcgtgaacctggagggtggctacaagtgccagtgtgaggaaggcttccagctggacccccacacgaaggcctgcaaggctgtgggctccatcgcctacctcttcttcaccaaccggcacgaggtcaggaagatgacgctggaccggagcgagtacaccagcctcatccccaacctgaggaacgtggtcgctctggacacggaggtggccagcaatagaatctactggtctgacctgtcccagagaatgatctgcagcacccagcttgacagagcccacggcgtctcttcctatgacaccgtcatcagcagagacatccaggcccccgacgggctggctgtggactggatccacagcaacatctactggaccgactctgtcctgggcactgtctctgttgcggataccaagggcgtgaagaggaaaacgttattcagggagaacggctccaagccaagggccatcgtggtggatcctgttcatggcttcatgtactggactgactggggaactcccgccaagatcaagaaagggggcctgaatggtgtggacatctactcgctggtgactgaaaacattcagtggcccaatggcatcaccctagatctcctcagtggccgcctctactgggttgactccaaacttcactccatctcaagcatcgatgtcaacgggggcaaccggaagaccatcttggaggatgaaaagaggctggcccaccccttctccttggccgtctttgaggacaaagtattttggacagatatcatcaacgaagccattttcagtgccaaccgcctcacaggttccgatgtcaacttgttggctgaaaacctactgtccccagaggatatggttctcttccacaacctcacccagccaagagaggctgaggctgcagtggccacccaggagacatccaccgtcaggctaaaggtcagctccacagccgtaaggacacagcacacaaccacccgacctgttcccgacacctcccggctgcctggggccacccctgggctcaccacggtggagatagtgacaatgtctcaccaagctctgggcgacgttgctggcagaggaaatgagaagaagcccagtagcgtgagggctctgtccattgtcctccccatcgtgctcctcgtcttcctttgcctgggggtcttccttctatggaagaactggcggcttaagaacatcaacagcatcaactttgacaaccccgtctatcagaagaccacagaggatgaggtccacatttgccacaaccaggacggctacagctacccctcgagacagatggtcagtctggaggatgacgtggcgtgaacatctgcctggagtcccgtccctgcccagaacccttcctgagacctcgccggccttgttttattcaaagacagagaagaccaaagcattgcctgccagagctttgttttatatatttattcatctgggaggcagaacaggcttcggacagtgcccatgcaatggcttgggttgggattttggtttcttcctttcctcgtgaaggataagagaaacaggcccggggggaccaggatgacacctccatttctctccaggaagttttgagtttctctccaccgtgacacaatcctc

SEQ ID NO: 75217 - protein, 474 aa, Artificial Sequence
  derived and/or modified sequence
MSQQKCIVIFALVCCFAILVALIFSAVDIMGEDEDGLSEKNCQNKCRIALVENIPEGLNYSENAPFHLSLFQGWMNLLNMAKKSVDIVSSHWDLNHTHPSACQGQRLFEKLLQLTSQNIEIKLVSDVTADSKVLEALKLKGAEVTYMNMTAYNKGRLQSSFWIVDKQHVYIGSAGLDWQSLGQMKELGVIFYNCSCLVLDLQRIFALYSSLKFKSRVPQTWSKRLYGVYDNEKKLQLQLNETKSQAFVSNSPKLFCPKNRSFDIDAIYSVIDDAKQYVYIAVMDYLPISSTSTKRTYWPDLDAKIREALVLRSVRVRLLLSFWKETDPLTFNFISSLKAICTEIANCSLKVKFFDLERENACATKEQKNHTFPRLNRNKYMVTDGAAYIGNFDWVGNDFTQNAGTGLVINQADVRNNRSIIKQLKDVFERDWYSPYAKTLQPTKQPNCSSLFKLKPLSNKTATDDTGGKDPRNV

SEQ ID NO: 75218 - protein, 47 aa, Artificial Sequence
  derived and/or modified sequence
MSQQKCIVIFALVCCFAILVALIFSAVDIMGEDEDGLSEKNCQNKCR

SEQ ID NO: 75219 - DNA, 1425 bp, Artificial Sequence
  derived and/or modified sequence
atgagccagcagaagtgcatcgtgatcttcgccctggtgtgctgcttcgccatcctggtggccctgatcttcagcgccgtggacatcatgggcgaggacgaggacggcctgagcgagaagaactgccagaacaagtgcagaatcgccctggtggagaacatccccgagggcctgaactacagcgagaacgcccccttccacctgagcctgttccagggctggatgaacctgctgaacatggccaagaagagcgtggacatcgtgagcagccactgggacctgaaccacacccaccccagcgcctgccagggccagagactgttcgagaagctgctgcagctgaccagccagaacatcgagatcaagctggtgagcgacgtgaccgccgacagcaaggtgctggaggccctgaagctgaagggcgccgaggtgacctacatgaacatgaccgcctacaacaagggcagactgcagagcagcttctggatcgtggacaagcagcacgtgtacatcggcagcgccggcctggactggcagagcctgggccagatgaaggagctgggcgtgatcttctacaactgcagctgcctggtgctggacctgcagagaatcttcgccctgtacagcagcctgaagttcaagagcagagtgccccagacctggagcaagagactgtacggcgtgtacgacaacgagaagaagctgcagctgcagctgaacgagaccaagagccaggccttcgtgagcaacagccccaagctgttctgccccaagaacagaagcttcgacatcgacgccatctacagcgtgatcgacgacgccaagcagtacgtgtacatcgccgtgatggactacctgcccatcagcagcaccagcaccaagagaacctactggcccgacctggacgccaagatcagagaggccctggtgctgagaagcgtgagagtgagactgctgctgagcttctggaaggagaccgaccccctgaccttcaacttcatcagcagcctgaaggccatctgcaccgagatcgccaactgcagcctgaaggtgaagttcttcgacctggagagagagaacgcctgcgccaccaaggagcagaagaaccacaccttccccagactgaacagaaacaagtacatggtgaccgacggcgccgcctacatcggcaacttcgactgggtgggcaacgacttcacccagaacgccggcaccggcctggtgatcaaccaggccgacgtgagaaacaacagaagcatcatcaagcagctgaaggacgtgttcgagagagactggtacagcccctacgccaagaccctgcagcccaccaagcagcccaactgcagcagcctgttcaagctgaagcccctgagcaacaagaccgccaccgacgacaccggcggcaaggaccccagaaacgtgtag

SEQ ID NO: 75220 - DNA, 1425 bp, Artificial Sequence
  derived and/or modified sequence
atgagtcaacagaagtgtattgttatatttgctctggtttgctgcttcgctatcctagtggctctgatctttagcgctgttgatattatgggggaagatgaggacggcctctcagagaaaaattgtcagaacaagtgcagaattgccttggtcgagaacatccctgaaggcctgaattatagtgaaaatgcccccttccatttgtccctctttcagggctggatgaatctcctgaacatggctaaaaagagcgttgacattgtgagtagtcactgggatttaaatcacacacaccccagcgcctgtcagggccagcggctgtttgaaaaactgttgcagttgacgtcccagaacatcgagatcaaactcgtctctgatgtcacagcggacagcaaagttctcgaggctttgaagctgaaaggagccgaggtgacctacatgaacatgactgcttataacaaggggaggttgcaatcgtcattctggattgtggataaacagcatgtttacataggttccgctgggctcgattggcagagcctcggccaaatgaaggagctaggggtaattttttacaactgtagctgcctcgtgctagatctccagcggatcttcgcattatactccagcctgaagtttaagagcagagtgccacaaacctggtcaaaacgtttgtatggcgtgtacgacaacgagaagaagttgcagttacagctcaatgaaacaaagtcccaggcttttgtatctaacagcccaaagttgttctgccccaaaaataggtccttcgatatagacgccatatattccgttatcgatgacgccaagcaatacgtttatatcgccgtaatggactatctccccatctctagtactagtacaaaacggacttactggccagatctggacgcaaagattcgcgaggctctggttctaagatctgttagagtgagactactcttatctttttggaaggagacagaccccctcaccttcaatttcattagctcactgaaggcaatatgtaccgaaatcgctaattgttccctgaaggtgaagttcttcgatctggagcgagaaaacgcgtgcgccaccaaagagcagaagaatcacacttttccaaggctgaaccgcaataaatatatggttacagacggtgctgcctacatcggaaattttgactgggttggaaacgactttacgcagaacgccgggactggattggtcatcaatcaggccgacgtccgaaataaccgctccattattaaacagctgaaggacgtgttcgagcgggattggtactctccatacgccaaaactctccagccaacaaaacagccaaactgctcttcactgttcaagctcaagcctctcagcaacaaaaccgcgactgacgataccggagggaaagacccccggaacgtgtag

SEQ ID NO: 75221 - DNA, 1425 bp, Artificial Sequence
  derived and/or modified sequence
atgagccagcagaagtgcatcgtcatctttgccctggtgtgctgctttgccatcctggtggccctgatcttctctgctgtggacatcatgggagaagatgaagatggcctgtctgagaagaactgccagaacaagtgccgcatcgccctggtggagaacatccctgagggcctgaactacagtgaaaatgcccccttccacctgagcctcttccagggctggatgaacctgctgaacatggccaagaagtctgtggacatcgtgagcagccactgggacctgaaccacacccaccccagcgcctgccagggccagaggctgtttgagaagctgctgcagctgaccagccagaacatcgagatcaagctggtgtctgatgtgacagctgacagcaaggtgctggaggccctgaagctgaagggagctgaggtgacctacatgaacatgacagcctacaacaagggccgcctgcagagcagcttctggatcgtggacaagcagcacgtgtacatcggcagcgctggcctggactggcagagcctgggccagatgaaggagctgggcgtcatcttctacaactgcagctgcctggtgctggacctgcagaggatctttgccctgtacagcagcctgaagttcaagagccgggtgccccagacctggagcaagaggctgtatggagtgtatgacaatgagaagaagctgcagctgcagctgaatgagaccaagagccaggcctttgtgagcaacagccccaagctgttctgccccaagaacagaagctttgatattgatgccatctacagcgtgattgatgatgccaagcagtatgtgtacatcgctgtgatggactacctgcccatcagcagcaccagcaccaagaggacctactggccagacctggatgccaagatccgggaggccctggtgctgcggtctgtgcgggtgcggctgctgctgtccttctggaaggagacagaccccctgaccttcaacttcatcagcagcctgaaggccatctgcacagagatcgccaactgcagcctgaaggtgaagttctttgacctggagagagaaaatgcctgtgccaccaaggagcagaagaaccacaccttcccccggctgaacagaaacaagtacatggtgacagatggagctgcctacatcggcaactttgactgggtgggcaatgacttcacccagaatgccggcaccggcctggtgatcaaccaggctgatgtgaggaacaacagaagcatcatcaagcagctgaaggatgtgtttgagcgggactggtacagcccctatgccaagaccctgcagcccaccaagcagcccaactgcagcagcctcttcaagctgaagcccctgagcaacaagacagccacagatgacaccggcggcaaggaccccagaaatgtgtag

SEQ ID NO: 75222 - DNA, 1425 bp, Artificial Sequence
  derived and/or modified sequence
atgagccagcagaagtgcatcgtgatcttcgccctggtgtgctgcttcgctatactggtggccctgattttttcagctgtggatattatgggggaggacgaagacggactcagcgaaaagaattgtcagaacaagtgtcgcattgccctggttgagaatattcccgagggcctcaactattctgagaacgcccccttccatttgtcccttttccagggctggatgaatctactgaatatggccaagaagtcggtggacatagtgagttcacattgggacctaaaccatacccatcccagcgcttgtcaaggtcagcgtttgttcgaaaaattactgcaactgacctcccagaatattgagatcaagctggtgtctgatgtgaccgccgattccaaggtcctcgaggccctgaaactgaagggtgcagaggtgacatatatgaatatgacagcctataacaagggcaggctccagtcttctttttggatagtggacaaacagcatgtatatattggtagtgctggtctcgactggcaatccttgggacagatgaaagaacttggggtgattttttataattgctcatgccttgtacttgacctccagcggatctttgcgctctattctagcttgaagttcaaatctcgtgtaccacagacatggtctaaacgtttatatggcgtttatgacaatgagaagaagctccaactccagctcaacgagacgaagtctcaggcttttgtgagcaattccccgaagcttttctgcccaaagaatcgctcattcgatattgatgccatatattccgtgattgatgacgctaaacagtatgtctatatcgctgtcatggactacctgcctatttccagcacctctaccaaacggacttactggcctgatctggatgccaaaattagggaggcactggtgctgagatctgtgagagtcagactgctgctgagcttctggaaggaaaccgaccccctgacatttaattttatatcgtccctgaaggcaatctgtactgagattgccaattgctccctcaaggtgaaattctttgatctggagcgggaaaacgcttgtgccacgaaagaacagaaaaaccataccttcccgagactgaatagaaacaagtatatggtgacagacggcgcagcctatattggcaatttcgactgggtgggcaatgacttcacgcagaacgctggaaccggtcttgtgataaaccaggccgacgttcggaataaccgaagcatcattaagcaactcaaggatgtctttgagagagactggtattccccttacgccaagactctgcagcctaccaagcagcccaattgtagttctctctttaagctgaagcctctctctaataaaacagccacagacgatactggaggtaaagatccacgaaacgtctag

SEQ ID NO: 75223 - DNA, 2436 bp, Artificial Sequence
  derived and/or modified sequence
ggtgatacgtttgtgccacatgaaacattctctgcctctgaaggctccagaggctgtgggaagcagcacatcagcgacagctcctggctgctggactccgcagggagggaaggaagattggtcgcaatgtcccagcagaagtgcatcgtgatctttgccctggtgtgctgctttgccattctggttgcactgatcttttcagccgtggacatcatgggagaggatgaggatggactctcagaaaaaaattgccaaaataaatgtcgaattgccctggtggaaaatattcctgaaggccttaactattcagaaaatgcaccatttcacttatcacttttccaaggctggatgaatttactcaacatggccaaaaagtctgttgacatagtgtcttcccattgggatctcaaccacactcatccatcagcatgtcagggtcaacgtctttttgaaaagttgctccagctgacttcgcaaaatattgaaatcaagctagtgagtgatgtaacagctgattcaaaggtattagaagccttgaaattaaagggagccgaggtgacgtacatgaacatgaccgcttacaacaagggccggctgcagtcctccttctggatcgtggacaaacagcacgtgtatatcggcagtgccggtttggactggcaatccctgggacagatgaaagaactcggtgtcatcttctacaactgcagctgcctggtcctagatttacaaaggatatttgctctatatagttcattaaaattcaaaagcagagtgcctcaaacctggtccaaaagactctatggagtctatgacaatgaaaagaaattgcaacttcagttgaatgaaaccaaatctcaagcatttgtatcgaattctccaaaactcttttgccctaaaaacagaagttttgacatagatgccatctacagtgtgatagatgatgccaagcagtatgtgtacatcgctgtcatggactacctgcctatctccagcacaagcaccaaaaggacttactggccagacttggatgcaaaaataagagaagcattagttttacgaagcgttagagttcgactccttttaagcttctggaaggaaactgatccccttacgtttaactttatttcatctcttaaagcgatttgcactgaaatagccaactgcagtttgaaagttaaattttttgatctggaaagagagaatgcttgtgctacaaaagaacaaaagaatcacacctttcctaggttaaatcgcaacaagtacatggtgacagatggagcagcttatattggaaattttgattgggtagggaatgatttcactcagaatgctggcacgggccttgttatcaaccaggcagatgtgaggaacaacagaagcatcattaagcaacttaaagatgtgtttgaaagggactggtattcaccgtatgccaaaaccttacagccaaccaaacagccgaactgctcaagcctgttcaaactcaaacccctctccaacaaaactgccacagacgacacaggcggaaaggatccccggaacgtataacatgatgaagaaactgacaggacagctctgtatttcatatttatacataaaggacttgaggagagaaaaaacactttaatatgtctctttttttagggaaaaagcacacttataaaaaatattctctgaacaacacataatacctatctaacaatatcttagcgtcgtgtacactaaaattaagacttttgtatttgttacctctgacagagaatgtcattctggcgtagaagttagtttttacgtttgcatacaaattttaagactttcattcctgctcctttctagttttagaactttttctgctgacctacccggtcagttgttaggaagcttagcatgaggtgggctctttaacaccattctgagaactgttgatttagagaggaaggtgaggattttgccttggagaagagactgataaaaccaagtgtttattcttgtaaatcgtctccaagacctacacagtcagctaagcatgaatagcttacatctcatgccagccttcaacacccttgaaaaatatccttttctgtcttgctcattttcttcttataccataagttttatttggtatcattttctcttctcacaaaatgttcctattatatagcattttctgtattcacctcaacattacttctaactatgataacatcttttgaaaacatacaaatttttcagaatggatactaagtggaaatagcagtctttcattttcacctttcaactgaatccttttttcccctaccgaattggtatttaaaaaaaatcacagtcagcaatatgtatcctttctctcaagctcagaaaaattatgtagccacctgctaatatccagcaagctatcaagtctgcattttgggaataaagtagtttttcaca

SEQ ID NO: 75224 - DNA, 1425 bp, Artificial Sequence
  derived and/or modified sequence
atgagtcagcagaaatgcatcgtgattttcgcactggtgtgctgttttgctatcctagtcgctcttattttctctgcagtcgatattatgggcgaggatgaggatggattgtcggaaaagaattgccagaataagtgccggatcgccctggttgaaaatattccggaagggctgaattactctgaaaacgcacctttccatctgtcactgttccaggggtggatgaatctgctgaatatggcgaagaaaagcgttgatatcgtgtcctctcactgggacttaaaccatacacacccctcagcttgccaagggcagcggctcttcgaaaaactccttcagctcactagtcagaatatcgaaatcaagctggtttctgatgtgactgcagatagtaaagtgctggaggcactgaagcttaaaggagctgaggtgacctatatgaatatgacagcctataacaagggcaggctccagtcatcattttggatcgttgataaacaacacgtgtacattggatcggcaggtctcgactggcaaagtctcgggcagatgaaggagctgggtgttattttctataactgttcatgtctggtcctcgatttgcagcgcattttcgcgctgtactctagcctgaagttcaaatccagggtgccacagacatggagcaaaaggctatacggcgtgtatgacaatgagaaaaaactgcagttgcagttgaacgagaccaagagccaggcttttgttagcaattccccaaaactgttctgcccaaaaaacagaagttttgatatagacgcgatctactccgtgatcgacgacgcaaaacaatacgtctacattgctgtaatggattacctcccaatcagctccacaagcaccaagcggacctactggccggacctcgatgctaagatcagagaggccctcgtgctgcgctctgtgcgagtgcgtctgttgctgtccttctggaaagaaaccgatcccctgacattcaacttcatctcctccctcaaggccatttgcaccgagattgcgaactgcagcctgaaggtgaaatttttcgatcttgagcgcgaaaacgcttgtgcaaccaaggaacagaagaatcatacctttccgaggctaaatcgcaataaatacatggtgacagacggcgcagcctatatcggcaatttcgactgggtcggcaacgattttactcaaaacgccggaacaggcttggtgatcaaccaggcggacgtaagaaataaccgcagcatcatcaaacagctgaaagacgttttcgagagagactggtatagcccatatgccaagaccctgcagcccacgaagcagccaaactgctcaagtctgttcaagttaaagcccctgtctaataagaccgcaactgatgacaccgggggtaaggacccccgtaacgtatag

SEQ ID NO: 75225 - DNA, 144 bp, Artificial Sequence
  derived and/or modified sequence
atgagccagcagaagtgcatcgtgatcttcgccctggtgtgctgcttcgccatcctggtggccctgatcttcagcgccgtggacatcatgggcgaggacgaggacggcctgagcgagaagaactgccagaacaagtgcagatag

SEQ ID NO: 75226 - DNA, 144 bp, Artificial Sequence
  derived and/or modified sequence
atgtcccaacagaaatgtatcgttattttcgccttagtctgctgttttgctatattggtcgcactgatattctctgcagtggatatcatgggggaggacgaagacggtctgtccgaaaagaactgccagaacaaatgtaggtag

SEQ ID NO: 75227 - DNA, 144 bp, Artificial Sequence
  derived and/or modified sequence
atgagccagcagaagtgcatcgtcatctttgccctggtgtgctgctttgccatcctggtggccctgatcttctctgctgtggacatcatgggagaagatgaagatggcctgtctgagaagaactgccagaacaagtgcaggtag

SEQ ID NO: 75228 - DNA, 144 bp, Artificial Sequence
  derived and/or modified sequence
atgagccagcagaagtgcatcgtgatcttcgccctggtgtgctgcttcgccattctggtggccctaatattctccgccgttgatattatgggcgaagatgaggatgggttgagtgagaaaaactgtcaaaacaagtgtaggtag

SEQ ID NO: 75229 - DNA, 2830 bp, Artificial Sequence
  derived and/or modified sequence
attctctgcctctgaaggctccagaggctgtgggaagcagcacatcagcgacagctcctggctgctggactccgcagggagggaaggaagattggtcgcaatgtcccagcagaagtgcatcgtgatctttgccctggtgtgctgctttgccattctggttgcactgatcttttcagccgtggacatcatgggagaggatgaggatggactctcagaaaaaaattgccaaaataaatgtcggtaagagggtcaacgtctttttgaaaagttgctccagctgacttcgcaaaatattgaaatcaagctagtgagtgatgtaacagctgattcaaaggtattagaagccttgaaattaaagggagccgaggtgacgtacatgaacatgaccgcttacaacaagggccggctgcagtcctccttctggatcgtggacaaacagcacgtgtatatcggcagtgccggtttggactggcaatccctgggacagatgaaagaactcggtgtcatcttctacaactgcagctgcctggtcctagatttacaaaggatatttgctctatatagttcattaaaattcaaaagcagagtgcctcaaacctggtccaaaagactctatggagtctatgacaatgaaaagaaattgcaacttcagttgaatgaaaccaaatctcaagcatttgtatcgaattctccaaaactcttttgccctaaaaacagaagttttgacatagatgccatctacagtgtgatagatgatgccaagcagtatgtgtacatcgctgtcatggactacctgcctatctccagcacaagcaccaaaaggacttactggccagacttggatgcaaaaataagagaagcattagttttacgaagcgttagagttcgactccttttaagcttctggaaggaaactgatccccttacgtttaactttatttcatctcttaaagcgatttgcactgaaatagccaactgcagtttgaaagttaaattttttgatctggaaagagagaatgcttgtgctacaaaagaacaaaagaatcacacctttcctaggttaaatcgcaacaagtacatggtgacagatggagcagcttatattggaaattttgattgggtagggaatgatttcactcagaatgctggcacgggccttgttatcaaccaggcagatgtgaggaacaacagaagcatcattaagcaacttaaagatgtgtttgaaagggactggtattcaccgtatgccaaaaccttacagccaaccaaacagccgaactgctcaagcctgttcaaactcaaacccctctccaacaaaactgccacagacgacacaggcggaaaggatccccggaacgtataacatgatgaagaaactgacaggacagctctgtatttcatatttatacataaaggacttgaggagagaaaaaacactttaatatgtctctttttttagggaaaaagcacacttataaaaaatattctctgaacaacacataatacctatctaacaatatcttagcgtcgtgtacactaaaattaagacttttgtatttgttacctctgacagagaatgtcattctggcgtagaagttagtttttacgtttgcatacaaattttaagactttcattcctgctcctttctagttttagaactttttctgctgacctacccggtcagttgttaggaagcttagcatgaggtgggctctttaacaccattctgagaactgttgatttagagaggaaggtgaggattttgccttggagaagagactgataaaaccaagtgtttattcttgtaaatcgtctccaagacctacacagtcagctaagcatgaatagcttacatctcatgccagccttcaacacccttgaaaaatatccttttctgtcttgctcattttcttcttataccataagttttatttggtatcattttctcttctcacaaaatgttcctattatatagcattttctgtattcacctcaacattacttctaactatgataacatcttttgaaaacatacaaatttttcagaatggatactaagtggaaatagcagtctttcattttcacctttcaactgaatccttttttcccctaccgaattggtatttaaaaaaaatcacagtcagcaatatgtatcctttctctcaagctcagaaaaattatgtagccacctgctaatatccagcaagctatcaagtctgcattttgggaataaagtagtttttcacatttttgttcagtttatggtattataaaggaaaaaatctctatgcgtcagtggattttaatttctttagaatcattatgctgttaagagtatgccagcaaacgtttctagagctatttaatataccttctgctatttaatataccaaatgcttttcagagaaatgcaatttaaatactgtgcttaacatattttactaagaagcagaaatattgaattattgttctataacgtaattgtgtgttgttgttttatatctatacaatatatacccctgtattaatggagaccattgctacactagggagaggcatggcctcttcagagcccacagcaggtggccgggatgtccagttccaatgttgttcccgactctgtgactcaaagcggagcccctcactgcttggcctcgggcttctcttggtaatgtagacggtaataactcacctacctcgcaaggatgttgtcacggtaggaaatatttataacttgttttgaaatcaaaagaacctatataaatgctaagcattataatatataatctttttcttgaaataaactttgtcatatcttgatggaatcaa

SEQ ID NO: 75230 - DNA, 144 bp, Artificial Sequence
  derived and/or modified sequence
atgtcacagcagaagtgtatcgttatctttgcgctcgtctgctgcttcgcgattctggtggcactgatcttcagcgccgtggatattatgggcgaagacgaggatggactgtctgagaaaaactgccaaaacaaatgcaggtag

SEQ ID NO: 75231 - protein, 345 aa, Artificial Sequence
  derived and/or modified sequence
MLPNTGRLAGCTVFITGASRGIGKAIALKAAKDGANIVIAAKTAQPHPKLLGTIYTAAEEIEAVGGKALPCIVDVRDEQQISAAVEKAIKKFGAYTIAKYGMSMYVLGMAEEFKGEIAVNALWPKTAIHTAAMDMLGGPGIESQCRKVDIIADAAYSIFQKPKSFTGNFVIDENILKEEGIENFDVYAIKPGHPLQPDFFLDEYPEAVSKKVESTGAVPEFKEEKLQLQPKPRSGAVEETFRIVKDSLSDDVVKATQAIYLFELSGEDGGTWFLDLKSKGGNVGYGEPSDQADVVMSMTTDDFVKMFSGKLKPTMAFMSGKLKIKGNMALAIKLEKLMNQMNARL

SEQ ID NO: 75232 - DNA, 1038 bp, Artificial Sequence
  derived and/or modified sequence
atgctgcccaacaccggcagactggccggctgcaccgtgttcatcaccggcgccagcagaggcatcggcaaggccatcgccctgaaggccgccaaggacggcgccaacatcgtgatcgccgccaagaccgcccagccccaccccaagctgctgggcaccatctacaccgccgccgaggagatcgaggccgtgggcggcaaggccctgccctgcatcgtggacgtgagagacgagcagcagatcagcgccgccgtggagaaggccatcaagaagttcggcgcctacaccatcgccaagtacggcatgagcatgtacgtgctgggcatggccgaggagttcaagggcgagatcgccgtgaacgccctgtggcccaagaccgccatccacaccgccgccatggacatgctgggcggccccggcatcgagagccagtgcagaaaggtggacatcatcgccgacgccgcctacagcatcttccagaagcccaagagcttcaccggcaacttcgtgatcgacgagaacatcctgaaggaggagggcatcgagaacttcgacgtgtacgccatcaagcccggccaccccctgcagcccgacttcttcctggacgagtaccccgaggccgtgagcaagaaggtggagagcaccggcgccgtgcccgagttcaaggaggagaagctgcagctgcagcccaagcccagaagcggcgccgtggaggagaccttcagaatcgtgaaggacagcctgagcgacgacgtggtgaaggccacccaggccatctacctgttcgagctgagcggcgaggacggcggcacctggttcctggacctgaagagcaagggcggcaacgtgggctacggcgagcccagcgaccaggccgacgtggtgatgagcatgaccaccgacgacttcgtgaagatgttcagcggcaagctgaagcccaccatggccttcatgagcggcaagctgaagatcaagggcaacatggccctggccatcaagctggagaagctgatgaaccagatgaacgccagactgtag

SEQ ID NO: 75233 - DNA, 1038 bp, Artificial Sequence
  derived and/or modified sequence
atgttgcccaatacgggaagactagcgggttgcacagtctttattaccggagcttccagggggattggcaaggccatcgcactgaaagccgctaaagatggagctaacattgtgatcgctgccaaaactgcgcagccccaccctaaactgctgggcactatctacaccgccgctgaggagattgaagctgtgggcggtaaggcattaccgtgcatagtggacgtgagagacgaacaacaaatcagcgctgctgtggaaaaggccatcaagaagttcggcgcctacacaatagcgaagtacggcatgtcaatgtacgtcctgggaatggctgaggaatttaagggggagatagctgtcaatgccttatggcccaagacagctatacacacggcagcaatggacatgcttgggggacccggaatagaatcccaatgccggaaggtcgacatcatcgcagacgcggcttactccatcttccagaaaccaaagagctttaccggcaactttgtaatcgatgagaatatcctgaaagaggaggggattgagaacttcgatgtatatgccatcaagcccggacaccccctgcagccggatttttttctggatgaataccccgaggcagtctctaagaaggtcgaaagcactggagctgtgccagaatttaaggaggagaagctccagttgcagcctaagccaaggtcaggggccgtggaagagacttttcggatagtgaaagattctctatccgatgatgttgtcaaggccacccaggctatctacctgtttgagttatcgggggaggatgggggtacctggtttcttgacctgaaatcaaagggagggaatgtcgggtatggagagccctccgaccaagccgatgtcgtcatgtcaatgactaccgatgatttcgtgaagatgttctccggcaaactgaaaccaacgatggcattcatgagcggtaagttgaagataaagggcaatatggctctggctatcaaactcgagaagctaatgaatcaaatgaacgcgagactgtag

SEQ ID NO: 75234 - DNA, 1038 bp, Artificial Sequence
  derived and/or modified sequence
atgctgcccaacacaggccgcctggccggctgcaccgtcttcatcaccggggccagccggggcatcggcaaggccatcgccctgaaggccgccaaggatggagccaacatcgtgattgctgccaagacagcccagccccaccccaagctgctgggcaccatctacacagctgctgaggagattgaagctgtgggcggcaaggccctgccctgcatcgtggatgtgagagatgagcagcagatctctgctgctgtggagaaggccatcaagaagtttggagcctacaccatcgccaagtatggcatgtccatgtatgtgctgggcatggccgaggagttcaagggggagattgctgtgaatgccctgtggcccaagacagccatccacacagctgccatggacatgctgggcggccctggcatcgagagccagtgcaggaaggtggacatcatcgcagatgctgcctacagcatcttccagaagcccaagagcttcaccggcaactttgtgattgatgagaacatcctgaaggaggagggcatcgagaactttgatgtgtatgccatcaagccaggccaccccctgcagcctgacttcttcctggatgagtacccagaggccgtgtccaagaaggtggagagcactggagctgtgcctgagttcaaggaggagaagctgcagctgcagcccaagcccaggtctggagctgtggaggagaccttcagaattgtgaaggacagcctgagtgatgatgtggtgaaggccacccaggccatctacctgtttgagctgtctggagaagatggcggcacctggttcctggacctgaagagcaaaggaggaaatgtgggctatggagagcccagcgaccaggctgatgtggtgatgtccatgaccacagatgactttgtgaagatgttcagcggcaagctgaagcccaccatggccttcatgtctgggaagctgaagatcaagggcaacatggccctggccatcaagctggagaagctgatgaaccagatgaatgcccggctgtag

SEQ ID NO: 75235 - DNA, 1038 bp, Artificial Sequence
  derived and/or modified sequence
atgctgcccaacaccggccggctggccggctgcaccgtgttcatcacaggcgccagtcgcggaattgggaaggccatcgccctaaaagccgcgaaagatggggccaatatcgtcatcgcagctaagacagctcagccacatcccaagctgctcggcactatctatacagcagccgaagagatcgaagcagtcggcggcaaggctctaccatgcatcgtcgatgtaagggatgaacagcagatttcagcagccgtggaaaaggccatcaagaaattcggcgcctacaccatagctaaatacggcatgagtatgtacgtgctcgggatggcggaggagttcaagggagagattgcggtcaatgctctgtggcccaagaccgcgattcacacggccgctatggatatgttgggcggccctggtattgaaagtcagtgtaggaaggtagatatcatcgctgacgcagcttactccatctttcagaagcctaagtcattcaccggaaattttgtgatcgatgagaacatattgaaggaagaagggattgaaaactttgatgtctatgcgatcaagccaggccaccctctgcagcctgatttttttcttgacgaataccccgaggccgtgtcaaaaaaagtcgagtctacaggcgccgtcccggaattcaaggaagaaaaacttcagctccaacccaagccacgctcaggagccgtagaggagacatttaggatcgtgaaggacagtcttagcgatgacgtggttaaggcaacccaggctatttacctttttgagctatccggggaggacggcgggacttggttcctggacctaaagtcaaaaggtgggaatgtggggtatggcgagccctccgaccaagccgacgtcgtcatgagcatgacgaccgatgattttgtgaagatgttttccggaaagctcaaacctaccatggcctttatgtcaggcaaattaaagatcaaaggaaatatggcactggccataaaactggagaaacttatgaatcaaatgaatgccaggctctag

SEQ ID NO: 75236 - DNA, 2983 bp, Artificial Sequence
  derived and/or modified sequence
gataaatgcggagggacggtccagctttagctctctgctcgccgccgccgctgtcgccgccacctcctctgatctacgaaagtcatgttacccaacaccgggaggctggcaggatgtacagtttttatcacaggtgcaagccgtggcattggcaaagctattgcattgaaagcagcaaaggatggagcaaatattgttattgctgcaaagaccgcccagccacatccaaaacttctaggcacaatctatactgctgctgaagaaattgaagcagttggaggaaaggccttgccatgtattgttgatgtgagagatgaacagcagatcagtgctgcagtggagaaagccatcaagaaatttggagcttataccattgctaagtatggtatgtctatgtatgtgcttggaatggcagaagaatttaaaggtgaaattgcagtcaatgcattatggcctaaaacagccatacacactgctgctatggatatgctgggaggacctggtatcgaaagccagtgtagaaaagttgatatcattgcagatgcagcatattccattttccaaaagccaaaaagttttactggcaactttgtcattgatgaaaatatcttaaaagaagaaggaatagaaaattttgacgtttatgcaattaaaccaggtcatcctttgcaaccagatttcttcttagatgaatacccagaagcagttagcaagaaagtggaatcaactggtgctgttccagaattcaaagaagagaaactgcagctgcaaccaaaaccacgttctggagctgtggaagaaacatttagaattgttaaggactctctcagtgatgatgttgttaaagccactcaagcaatctatctgtttgaactctccggtgaagatggtggcacgtggtttcttgatctgaaaagcaagggtgggaatgtcggatatggagagccttctgatcaggcagatgtggtgatgagtatgactactgatgactttgtaaaaatgttttcagggaaactaaaaccaacaatggcattcatgtcagggaaattgaagattaaaggtaacatggccctagcaatcaaattggagaagctaatgaatcagatgaatgccagactgtgaaggaaaatataaaaaaaaagtcgactgctatgctcaaaaagtaaaaaaagctcaacagttaaaatctaatgtttgttttctttcctgttatattataaggatatgcacgtttgttctggaaaagatagaatttgtctctaaaagacttgaaattgtaattaaaatggcaagctaatcaaacataagcttcattaagtgggattctaagacagtctgtgtttttatatttcaagggtttaaccctttgagccttacatctcattcactgtctttctccaagaaaagtattttgggcggacagtcagatcaagcagtaaaattagctctttcaaatcttcttgtcatgtaaaatgaagctagtctgttttaaaatttttagttttggattgtatactaatgaaaatcttaatgatgtttttgatttttatatacttattttaaagaaaatcttatatagtacattttacaaaaattataaaaaatgaattagtactggcgaggactaaatgaaacaataatttttcattttgataactagctttccaggtggacttagccataggaaaatattactaatgtaatttaacaaattgctgcatgtattccatttaaaaatatgtttaaattgtcctaaaacaaaataattttctccctaggagtatgcatttggctacagtgttttgaaacagaaaccttagaataggtcattggtatgggctgaactgtgtatcccccaattcatttgttgaggtcctaactcccatttcttttgaatgtgactgttcggagatgaggcctttaaagaggtgacttaagttcaaaggaggctgttagtctaatccaacatggtgtcctttggacataagagataccagcaatgtgtgcacagaacaaagaccaggagaggacacagtgagaaggcagttatctgcaagcaaagagagaggcttcagaagaaacaaaatcaccagcaccttgatctttgacttctaatctccagaatagtgagaaataaatttctgttgttaagccgtccactgtgggaggccgacgcaggaggattgcttgaggccaggagttcaaggccagcctggacaacatagtaagaccctatctctacccccctaataaattaatttaaaaagccccccaatctgtggtattttattatggcagccctagcaagctaatacagtggtttgagaggctgggagggttgaggggaagataaacttttaaaaagctcttatctttcatttcaatcagttaaaaatacttgctcagtgtaacaattttgcttctcagcttccactctaatattgttgtgccattaagcaatttagctaatcctgacatttcttagattcataatgttaggagcatttaatctgtattttacaagttaggaagcagaggatcagagatgggaaaggactagcccaaggccaacattaacaagccctctaacaaaaactttacaatacatttatgttgaatggaactccaagatctcacctctccatccaggaatggagtccatgtaatcaaagtgaacttaaaaataggacagtttcaacaagtcaggagattcacagcaactgatcaaagggagtccagtcaacgtgagcaagcgtgattatgatgaggaagccccctctgctttaatccacacaaggaacgtaacctgaagtaacctgatgttaaccaatctgctgtgtctactatgctgtttccttgttcctgctagtgctgctttacaaatgcagaccattctatcatacctggcggggcttctgttttattttgtaggctggatgctacccagttcatgaatcgctaataaaagccaattagatcttta

SEQ ID NO: 75237 - DNA, 1038 bp, Artificial Sequence
  derived and/or modified sequence
atgctgcccaatacgggacgactcgccggttgcactgtgttcatcactggtgcttcgcgtggcatcgggaaggccattgcactgaaggcagcgaaggacggggctaatatcgttatcgcagccaagacagcccagccacaccctaagctgcttggcactatctataccgctgctgaggaaattgaggccgtgggcggaaaagctctcccatgtattgtcgacgtgagggatgaacagcagatcagcgctgccgtcgagaaggctatcaaaaagtttggagcgtacaccattgctaaatacgggatgagtatgtacgtgctgggcatggcagaggagttcaaaggcgaaatagctgtgaatgcactgtggccaaagacggcaatccacactgctgccatggatatgctgggtggccctgggattgaatcacagtgtcgaaaggtcgatattattgctgacgcagcgtacagcatctttcagaaacccaagtcatttacaggtaactttgttattgacgagaacatacttaaagaagagggcatcgagaactttgacgtctatgcaataaaacctggccatcctctccagcccgacttcttcctggacgaatatccagaagctgtttcaaagaaggtggagagcacaggcgctgtcccagaatttaaagaggagaagctgcagctgcagcctaaaccccgttctggtgcagtggaggagacgtttagaatcgtgaaggactctctgagtgacgacgtggtaaaagccacacaagctatctatttgtttgaactcagcggcgaggacggcggaacctggtttctagacctaaagagtaagggcggaaacgtcggatatggggaaccgagcgatcaagcggatgtggttatgtcaatgacaaccgatgacttcgttaaaatgttctctggaaaactgaaaccaaccatggcctttatgtcaggcaaactcaagatcaagggtaacatggcactggcaattaagttggagaagctcatgaaccagatgaatgcacgtctttag

SEQ ID NO: 75238 - DNA, 1245 bp, Artificial Sequence
  derived and/or modified sequence
ctctgctcgccgccgccgctgtcgccgccacctcctctgatctacgaaagtcatgttacccaacaccgggaggctggcaggatgtacagtttttatcacaggtgcaagccgtggcattggcaaagctattgcattgaaagcagcaaaggatggagcaaatattgttattgctgcaaagaccgcccagccacatccaaaacttctaggcacaatctatactgctgctgaagaaattgaagcagttggaggaaaggccttgccatgtattgttgatgtgagagatgaacagcagatcagtgctgcagtggagaaagccatcaagaaatttggaggaattgatattctggtaaataatgccagtgccattagtttgaccaatacattggacacacctaccaagagattggatctgatgatgaacgtgaacaccagaggcacctaccttgcccatacacactgctgctatggatatgctgggaggacctggtatcgaaagccagtgtagaaaagttgatatcattgcagatgcagcatattccattttccaaaagccaaaaagttttactggcaactttgtcattgatgaaaatatcttaaaagaagaaggaatagaaaattttgacgtttatgcaattaaaccaggtcatcctttgcaaccagatttcttcttagatgaatacccagaagcagttagcaagaaagtggaatcaactggtgctgttccagaattcaaagaagagaaactgcagctgcaaccaaaaccacgttctggagctgtggaagaaacatttagaattgttaaggactctctcagtgatgatgttgttaaagccactcaagcaatctatctgtttgaactctccggtgaagatggtggcacgtggtttcttgatctgaaaagcaagggtgggaatgtcggatatggagagccttctgatcaggcagatgtggtgatgagtatgactactgatgactttgtaaaaatgttttcagggaaactaaaaccaacaatggcattcatgtcagggaaattgaagattaaaggtaacatggccctagcaatcaaattggagaagctaatgaatcagatgaatgccagactgtgaaggaaaatataaaaaaaaagtcgactgctatgctcaaaaagtaaaaaaagctcaacagttaaaatctaatgtttgttttctttcctgttatattataaggatatgcacgtttgttctggaaaagatagaatttgtctct

SEQ ID NO: 75239 - protein, 276 aa, Artificial Sequence
  derived and/or modified sequence
MLLFSVLLLLSLVTGTQLGPRTPLPEAGVAILGRARGAHRPQPPHPPSPVSECGDRSIFEGRTRYSRITGGMEAEVGEFPWQVSIQARSEPFCGGSILNKWWILTAAHCLYSEELFPEELSVVLGTNDLTSPSMEIKEVASIILHKDFKRANMDNDIALLLLASPIKLDDLKVPICLPTQPGPATWRECWVAGWGQTNAADKNSVKTDLMKAPMVIMDWEECSKMFPKLTKNMLCAGYKNESYDACKQSYFPTLQRMNTGSSQTKPPGSHTFHLQN

SEQ ID NO: 75240 - DNA, 831 bp, Artificial Sequence
  derived and/or modified sequence
atgctgctgttcagcgtgctgctgctgctgagcctggtgaccggcacccagctgggccccagaacccccctgcccgaggccggcgtggccatcctgggcagagccagaggcgcccacagaccccagcccccccacccccccagccccgtgagcgagtgcggcgacagaagcatcttcgagggcagaaccagatacagcagaatcaccggcggcatggaggccgaggtgggcgagttcccctggcaggtgagcatccaggccagaagcgagcccttctgcggcggcagcatcctgaacaagtggtggatcctgaccgccgcccactgcctgtacagcgaggagctgttccccgaggagctgagcgtggtgctgggcaccaacgacctgaccagccccagcatggagatcaaggaggtggccagcatcatcctgcacaaggacttcaagagagccaacatggacaacgacatcgccctgctgctgctggccagccccatcaagctggacgacctgaaggtgcccatctgcctgcccacccagcccggccccgccacctggagagagtgctgggtggccggctggggccagaccaacgccgccgacaagaacagcgtgaagaccgacctgatgaaggcccccatggtgatcatggactgggaggagtgcagcaagatgttccccaagctgaccaagaacatgctgtgcgccggctacaagaacgagagctacgacgcctgcaagcagagctacttccccaccctgcagagaatgaacaccggcagcagccagaccaagccccccggcagccacaccttccacctgcagaactag

SEQ ID NO: 75241 - DNA, 831 bp, Artificial Sequence
  derived and/or modified sequence
atgctcctgtttagcgtcctcctgctgctgtcactggtgaccggcacacagctaggcccccgcacccctctgccggaagcaggcgtagctattctggggagggcgaggggagcccacagacctcagcccccacatcctccaagtcccgtgtctgagtgtggagatcggagcattttcgagggcaggacacgctactcacgtatcacaggtggcatggaggcggaagttggtgagttcccgtggcaggttagtattcaggccaggtcagagccattttgtggcggcagtatactcaacaagtggtggattctgactgcggcccattgcctttactctgaggaactttttcccgaagagctttcagtggtccttggcacaaacgatttaacatccccttcaatggagatcaaggaggtggcatccataattcttcacaaggatttcaagcgagccaatatggataatgacattgccttattattgctggctagccccatcaagctggatgacctgaaggtccctatctgtctcccgacgcaacccgggcctgccacatggcgcgagtgttgggtcgccggctggggtcagaccaacgcagccgacaagaactcagttaaaacagatctgatgaaagcacccatggtcatcatggactgggaggagtgcagcaagatgttcccgaaactgacaaaaaatatgctttgcgctggttacaagaacgaatcctacgatgcatgcaagcaatcttacttccctaccctccagcggatgaataccggttcttcacaaactaagcctcctggctctcacacgttccacttgcagaactag

SEQ ID NO: 75242 - DNA, 831 bp, Artificial Sequence
  derived and/or modified sequence
atgctgctcttctctgtgctgctgctgctgagcctggtgacaggcacccagctgggccccaggacccccctgcctgaggccggcgtggccatcctgggccgggcccggggggcccaccggccccagcccccccacccccccagccctgtgtctgaatgtggggacaggagcatctttgagggccgcacccgctacagccgcatcactggaggcatggaggccgaggtgggggagttcccctggcaggtgtccatccaggcccggtctgagcccttctgtggcggcagcatcctgaacaagtggtggatcctgacagctgcccactgcctgtacagcgaggagctgtttcctgaggagctgtctgtggtgctgggcaccaatgacctgaccagccccagcatggagatcaaggaggtggccagcatcatcctgcacaaggacttcaagagggccaacatggacaatgacatcgccctgctgctgctggccagccccatcaagctggatgacctgaaggtgcccatctgcctgcccacccagcccggccctgccacctggagggagtgctgggtggccggctggggccagaccaatgctgctgacaagaacagcgtgaagacagacctgatgaaggcccccatggtgatcatggactgggaggagtgcagcaagatgttccccaagctgaccaagaacatgctgtgtgccggctacaagaatgaaagctatgatgcctgcaagcagagctacttccccaccctgcagaggatgaacacaggcagcagccagaccaagcccccaggcagccacaccttccacctgcagaactag

SEQ ID NO: 75243 - DNA, 831 bp, Artificial Sequence
  derived and/or modified sequence
atgctgctgttcagcgtgctgctgctgctgagcctggtgaccggcacccagttggggccaaggacacccctccctgaggctggggtcgccattctagggagagcgcggggtgctcacaggccgcagcccccccatccccccagcccggtctcagagtgcggcgatcgcagcatctttgaggggcgcacccgttattcgcggattaccggtggaatggaggcagaagtgggagagtttccatggcaggtctctatacaggcgcgatcggagcctttctgcggaggttctatactcaataagtggtggattctcacggcagctcattgcctgtattcagaagagttgttccctgaggaactgtccgtagttctggggacaaacgacctgacctccccatcaatggaaatcaaggaagtggccagcattattctgcataaggactttaagcgtgccaatatggacaacgatattgccttgctactgctggcctcaccaataaaacttgatgaccttaaggttcccatatgcctgcccacacagcctggtccagccacctggagagagtgctgggtggccgggtgggggcagaccaacgctgcggacaaaaatagcgtgaagaccgacttgatgaaagctccaatggtgatcatggactgggaggaatgctctaagatgttcccaaaacttactaagaacatgctctgtgcagggtacaagaacgagtcatacgacgcctgcaaacaatcttacttccccactctgcagagaatgaacactggttccagtcagaccaagccccctgggtctcacacatttcatctgcagaattag

SEQ ID NO: 75244 - DNA, 1005 bp, Artificial Sequence
  derived and/or modified sequence
ggcctctgtcacccccgggcccacagcacagcccagggccatgctcctgttctcagtgttgctgctcctgtccctggtcacgggaactcagctcggtccacggactcctctcccagaggctggagtggctatcctaggcagggctaggggagcccaccgccctcagccccctcatccccccagcccagtcagtgaatgtggtgacagatctattttcgagggaagaactcggtattccagaatcacaggggggatggaggcggaggtgggtgagtttccgtggcaggtgagtattcaggcaagaagtgaacctttctgtggcggctccatcctcaacaagtggtggattctcactgcggctcactgcttatattccgaggagctgtttccagaagaactgagtgtcgtgctggggaccaacgacttaactagcccatccatggaaataaaggaggtcgccagcatcattcttcacaaagactttaagagagccaacatggacaatgacattgccttgctgctgctggcttcgcccatcaagctcgatgacctgaaggtgcccatctgcctccccacgcagcccggccctgccacatggcgcgaatgctgggtggcaggttggggccagaccaatgctgctgacaaaaactctgtgaaaacggatctgatgaaagcgccaatggtcatcatggactgggaggagtgttcaaagatgtttccaaaacttaccaaaaatatgctgtgtgccggatacaagaatgagagctatgatgcctgcaagcaaagctattttcccactttacaaagaatgaacaccggaagctctcaaacaaagccgcctgggtctcacacctttcatctgcaaaactgatgctttgctctttcttctacatggagccatttttggggcagaaaacatacccttgggcatagccttgagttgaaaatctttgagggtgttttctgtccaaatgactgaaaaaatgaataaaagcctccccattt

SEQ ID NO: 75245 - DNA, 831 bp, Artificial Sequence
  derived and/or modified sequence
atgttattgttcagcgtcctgttactcctatctctggtgacaggcactcagctcgggccacgtacaccactgcccgaggctggggttgctattctgggtcgcgctaggggcgcacaccgaccgcagcctccacatccgccaagccccgtctcggagtgcggggacaggagcattttcgaaggaaggacacgatactcgagaatcacagggggaatggaagctgaggtcggggaatttccatggcaagtgagtatccaggcccgttctgaacccttttgcgggggaagcatcctgaataaatggtggatcctgactgccgcacactgcttgtacagcgaagaactgtttcccgaggagctatcagtggtgctggggacgaacgatctgacttcgccctcgatggaaataaaggaggtagcgagcatcatcctgcacaaggatttcaagagggccaatatggacaacgatatcgctctgttactcctggcctcaccgattaagctggatgatctcaaagttcctatttgcttgccaacgcaacccggacccgctacctggcgcgagtgctgggtggccggatgggggcagaccaacgccgcagacaagaacagtgtgaagaccgatctcatgaaagcccctatggttatcatggattgggaagagtgtagtaagatgtttccaaagctaacgaaaaatatgctctgtgcgggatataagaacgaatcttatgatgcttgcaagcagtcttactttcctacactgcaacgaatgaacacagggtccagccaaaccaagccgccaggtagtcatacattccatttgcagaattag

SEQ ID NO: 75246 - DNA, 1206 bp, Artificial Sequence
  derived and/or modified sequence
atgagccattgttccggctattcggatccatctagtttcgcagaagatgggccggaggttctggacgaggagggaactcaagaggatttagagtataagctgaagggactaatcgatttaacgctcgacaagagcgccaaaaccaggcaggctgccctggaggggattaaaaacgcccttgcatctaagatgctctacgagtttatcctcgagaggcgcatgactctaaccgatagtatcgaacgatgtttgaagaagggcaagtcagacgagcagcgcgctgcagcggcgctcgcatctgtgctgtgcattcagttaggccccggcatcgagagtgaggagatactgaaaaccttagggcctatcctgaaaaagatcatctgtgatggatccgcatccatgcaggcaagacagacctgcgccacatgtttcggcgtgtgctgcttcatcgcaactgacgacataaccgaactctactccacacttgagtgtctggagaatatattcacaaaaagctatctgaaggagaaggacaccacagtaatctgctccacccctaacaccgtattacacattagcagcctgctcgcgtggaccctgttgttgacaatctgtccaataaatgaggtgaaaaagaaactggagatgcattttcataaacttcctagcctgctgtcttgcgacgacgtgaatatgcggatcgctgcaggcgagtctcttgccctgttgttcgaactagcacgtgggattgagagtgatttcttctacgaggacatggaaagtcttacacagatgctgagggccctcgccacggatggaaataagcatcgcgctaaggtggacaaaagaaagcaacggtccgttttcagagacgtgcttcgtgcggtcgaggagagagactttcccactgaaaccatcaagttcggcccggaaagaatgtatatcgactgctgggtcaaaaagcatacctacgatacatttaaggaggtgctgggctccggcatgcaatatcatctgcagagcaacgagttcctgcgtaatgttttcgagctgggccctcctgtgatgctggatgcagcaacattgaaaaccatgaaaatctctaggtttgagaggcacctgtacaattcagcagcttttaaggcccggacaaaagcacgatcaaagtgtcgtgacaagcgtgcagacgtcggagagtttttttag

SEQ ID NO: 75247 - DNA, 474 bp, Artificial Sequence
  derived and/or modified sequence
atgcacttccataaacttccgagccttttgtcatgtgatgatgtaaacatgcgaattgcagcaggcgagagtctggcccttctcttcgagttggcccgaggaatcgagtcagacttcttctatgaagatatggaaagcctgactcaaatgcttagagcactggcaaccgacggtaacaaacacagagccaaggtcgacaaacgcaagcagagatcagtgttccgagatgtgctcagagccgtggaggagcgagattttcccacagagactatcaaatttggcccagagagaatgtacatcgactgctgggtgaagaagcatacatacgacacatttaaagaggtgctaggaagcggtatgcagtaccacctgcaatctaatgagttcttgaggaacgtgttcgagctcggcccacctgtgatgctggacgcagcaacactgaaaacgatgaagatctcacggttcgagcgctag

SEQ ID NO: 75248 - DNA, 1114 bp, Artificial Sequence
  derived and/or modified sequence
cccacgatgccgaagaacaagaagcggaacactccccaccgcggtagcagtgctggcggcggcgggtcaggagcagccgcagcgacggcggcgacagcaggtggccagcatcgaaatgttcagccttttagtgatgaagatgcatcaattgaaacaatgagccattgcagtggttatagcgatccttccagttttgctgaagatggaccagaagtccttgatgaggaaggaactcaagaagacctagagtacaagttgaagggattaattgacctaaccctggataagagtgcgaagacaaggcaagcagctcttgaaggtattaaaaatgcactggcttcaaaaatgctgtatgaatttattctggaaaggagaatgactttaactgatagcattgaacgctgcctgaaaaaagtgtgcaacttgctttggtgtttgctgttttattgccacagatgacattactgaactatactcaactctggaatgtttggaaaatatcttcactaaatcctatctcaaagagaaagacactactgttatttgcagcactcctaatacagtgcttcatatcagctctcttcttgcatggacactactgctgaccatatgcccaatcaatgaagtgaagaaaaagcttgagatgcatttccataagcttccaagcctcctctcttgtgatgatgtaaacatgagaatagctgctggtgaatctttggcacttctctttgaattggccagaggaatagagagtgactttttttatgaagacatggagtccttgacgcagatgcttagggccttggcaacagatggaaataaacaccgggccaaagtggacaagagaaagcagcggtcagttttcagagatgtcctgagggcagtggaggaacgggattttccaacagaaaccattaaatttggtcctgaacgcatgtatattgattgctgggtaaaaaaacacacctatgacacctttaaggaggttcttggatcagggatgcagtaccacttgcagtcaaatgaattccttcgaaatgtatttgaacttggacccccagtgatgcttgatgctgcaacgcttaaaacgatgaagatttctcgtttcgaaagg

SEQ ID NO: 75249 - DNA, 1206 bp, Artificial Sequence
  derived and/or modified sequence
atgagccactgcagcggctacagcgaccccagcagctttgctgaagatggccctgaggtgctggatgaggagggcacccaggaggacctggagtacaagctgaagggcctgattgacctgaccctggacaagagcgccaagacccggcaggccgccctggagggcatcaagaatgccctggccagcaagatgctgtatgagttcatcctggagaggaggatgaccctgacagacagcattgagcgctgcctgaagaagggcaagagtgatgagcagagagctgctgctgccctggcctctgtgctgtgcatccagctgggccctggcatcgagagcgaggagatcctgaagaccctgggccccatcctgaagaagatcatctgtgatggcagcgcctccatgcaggcccggcagacctgtgccacctgcttcggcgtgtgctgcttcatcgccacagatgacatcacagagctgtacagcaccctggagtgcctggagaacatcttcaccaagagctacctgaaggagaaggacaccaccgtcatctgcagcacccccaacacagtgctgcacatcagcagcctgctggcctggaccctgctgctgaccatctgccccatcaatgaggtgaagaagaagctggagatgcacttccacaagctgcccagcctgctgagctgtgatgatgtgaacatgagaattgctgctggggagagcctggccctgctgtttgagctggcccggggcatcgagagtgacttcttctatgaggacatggagagcctgacccagatgctgcgggccctggccacagatggcaacaagcaccgggccaaggtggacaagaggaagcagaggtctgtgttcagagatgtgctgcgggctgtggaggagcgggacttccccacagagaccatcaagtttggacctgagaggatgtacatcgactgctgggtgaagaagcacacctatgacaccttcaaggaggtgctgggcagcggcatgcagtaccacctgcagagcaatgagttcctgagaaatgtgtttgagctgggcccccctgtgatgctggatgctgccaccctgaagaccatgaagatcagcagatttgagcggcacctgtacaacagcgctgccttcaaggcccggaccaaggcccggagcaaatgtcgggacaagagagcagatgtgggggagttcttctag

SEQ ID NO: 75250 - DNA, 474 bp, Artificial Sequence
  derived and/or modified sequence
atgcacttccacaagctgcccagcctgctgagctgtgatgatgtgaacatgagaattgctgctggggagagcctggccctgctgtttgagctggcccggggcattgaaagtgacttcttctatgaggacatggagagcctgacccagatgctgcgggccctggccacagatggcaacaagcaccgggccaaggtggacaagaggaagcagaggagcgtcttcagagatgtgctgcgggctgtggaggagcgggacttccccacagagaccatcaagtttggacctgagaggatgtacatcgactgctgggtgaagaagcacacctatgacaccttcaaggaggtgctgggcagcggcatgcagtaccacctgcagagcaatgagttcctgagaaatgtgtttgagctgggcccccctgtgatgctggatgctgccaccctgaagaccatgaagatcagcagatttgaaagatag

SEQ ID NO: 75251 - DNA, 1206 bp, Artificial Sequence
  derived and/or modified sequence
atgagccactgcagcggctacagcgaccccagcagcttcgccgaggacggcccagaagtgctagacgaggagggcacacaggaggatctggagtataagcttaaaggccttatcgacctaacactcgataagtcagcaaaaactaggcaggctgctctggagggaattaagaatgctctggcaagcaaaatgctatacgagttcatcctggagcgtaggatgaccctgacagacagtatcgagaggtgcctgaaaaaagggaaatcggatgagcagcgagcagccgccgccctagctagcgtgttatgcatccagttggggcccggtattgagagcgaagagatcttgaagactctcggaccaatactcaaaaagattatctgcgacggaagcgcttctatgcaagctaggcaaacctgtgccacttgctttggcgtctgctgtttcattgctacggatgacatcacggaactctatagcacactagagtgtctggagaacattttcaccaagtcttacctcaaggaaaaggatactacagtgatctgttcaacgccaaatactgtgctacacatttcatccctcctcgcctggactcttttgctaaccatctgcccgatcaacgaggtaaagaagaaactggagatgcattttcacaaactcccgtcacttcttagctgtgacgacgttaatatgagaatcgcggcgggagaatctctcgcccttctgtttgagctcgccagaggcatcgaatcggacttcttttacgaagatatggaaagcctgactcagatgctgcgagcacttgccactgacggaaataagcatcgcgccaaggtggataagaggaaacaacgatccgtgttccgcgacgtcctccgagctgtggaggaacgagacttccccacagagaccatcaagttcggcccagagcggatgtacatcgactgttgggtgaaaaaacacacttatgacacgttcaaagaagtcttgggaagcgggatgcagtatcatttacagtccaatgaatttctcaggaacgtgttcgagctcgggcctccggtgatgctggatgctgccacccttaagacaatgaagatctccagattcgaacggcacctctacaattctgcagcttttaaggccagaactaaggcccggagcaagtgccgcgataagcgggcagacgtcggcgagttcttctag

SEQ ID NO: 75252 - DNA, 474 bp, Artificial Sequence
  derived and/or modified sequence
atgcacttccacaagctgcccagcctgctgagctgcgacgacgtgaacatgcgcatcgccgccggtgagtcactggcattattatttgagctggcccgcggcatagagagcgatttcttctatgaggacatggaaagcctgacacagatgctgcgggccctggcgactgacggcaataaacatcgagctaaggttgataagcgcaagcaacgcagcgtgttccgcgatgtgctgagagccgttgaagaacgggactttcccacggaaactatcaagtttggcccggaacggatgtatatcgattgttgggtcaaaaagcacacttatgacaccttcaaggaagtcctcggttcaggtatgcagtatcacttgcagtcaaatgagttcttacggaatgtgtttgaactgggcccaccagttatgctggatgctgctacgctaaagaccatgaaaatctctagatttgaacggtag

SEQ ID NO: 75253 - DNA, 1206 bp, Artificial Sequence
  derived and/or modified sequence
atgagccactgttcggggtacagcgacccaagctcttttgccgaagatggccctgaagtgctggatgaggaaggaacacaagaggatctagaatacaagctaaaagggttaatagacctgacacttgacaagagtgccaagacacgacaggccgcactcgagggaattaagaacgcactcgcgtcaaaaatgctttatgaattcatacttgagcggcgtatgacccttaccgattcaatcgagcgctgcctgaaaaaaggtaaatccgatgagcagagggccgcagccgctctggcctccgtactctgtatccagctgggaccgggaatcgagtccgaagagattctgaagactcttggtcctatcctgaagaagattatctgtgacggtagcgcttccatgcaggcacgccagacatgcgccacttgttttggggtttgttgtttcattgctacagacgacatcactgagctgtattccacactggagtgcttggagaatatattcactaaatcttacctcaaggagaaggatacaacagtgatctgctctacgcctaacactgtcctgcatatcagctcacttctggcctggaccctgttgttgactatctgccccatcaatgaagtcaaaaaaaagttggagatgcacttccataagctaccctcactcctctcctgcgatgatgtgaatatgaggatcgctgccggtgagagcttggctttgttgtttgagctcgctaggggtatcgagtcagattttttttacgaagatatggaatcattgacacagatgctccgggcattggctactgacggaaacaaacacagggctaaggtcgataagcgaaagcagcggtccgtgttccgcgacgtcctgcgcgcagtcgaggaacgggatttccccaccgagacgatcaagtttggaccagagagaatgtatatcgactgctgggtgaaaaaacatacctacgataccttcaaggaagtgctaggaagcgggatgcagtaccatttacagagcaatgaattcctccgaaacgtttttgagctgggacctcccgtgatgcttgatgccgctacacttaaaacaatgaagatatcccgctttgaacgacacctctataattctgccgcattcaaagccaggacaaaagccaggtcaaagtgtcgcgacaagagagcagacgtgggggaatttttctag

SEQ ID NO: 75254 - DNA, 474 bp, Artificial Sequence
  derived and/or modified sequence
atgcacttccacaaactgccctcattgctgagttgcgacgacgtgaacatgaggatcgcagctggcgagagtttagctctgctgttcgaactcgcacgtggcatagaaagtgactttttctatgaagacatggaatcactgacccagatgctgcgggcactggctacagacggaaataagcaccgggctaaggtggataagcgcaaacagaggtccgttttccgggacgtgctccgagcagtcgaggaacgcgactttccaacggaaaccatcaagtttggccctgaacggatgtacattgattgctgggtaaagaaacatacctacgacacgtttaaggaggttcttggatccgggatgcagtatcaccttcagtcaaacgagtttctcagaaacgtgtttgaattgggcccaccagtgatgcttgacgccgctaccctgaagacgatgaagatctcacggtttgagcggtag

SEQ ID NO: 75255 - DNA, 1206 bp, Artificial Sequence
  derived and/or modified sequence
atgagccactgcagcggctacagcgaccccagcagcttcgccgaggacggccccgaggtgctggacgaggagggcacccaggaggacctggagtacaagctgaagggcctgatcgacctgaccctggacaagagcgccaagaccagacaggccgccctggagggcatcaagaacgccctggccagcaagatgctgtacgagttcatcctggagagaagaatgaccctgaccgacagcatcgagagatgcctgaagaagggcaagagcgacgagcagagagccgccgccgccctggccagcgtgctgtgcatccagctgggccccggcatcgagagcgaggagatcctgaagaccctgggccccatcctgaagaagatcatctgcgacggcagcgccagcatgcaggccagacagacctgcgccacctgcttcggcgtgtgctgcttcatcgccaccgacgacatcaccgagctgtacagcaccctggagtgcctggagaacatcttcaccaagagctacctgaaggagaaggacaccaccgtgatctgcagcacccccaacaccgtgctgcacatcagcagcctgctggcctggaccctgctgctgaccatctgccccatcaacgaggtgaagaagaagctggagatgcacttccacaagctgcccagcctgctgagctgcgacgacgtgaacatgagaatcgccgccggcgagagcctggccctgctgttcgagctggccagaggcatcgagagcgacttcttctacgaggacatggagagcctgacccagatgctgagagccctggccaccgacggcaacaagcacagagccaaggtggacaagagaaagcagagaagcgtgttcagagacgtgctgagagccgtggaggagagagacttccccaccgagaccatcaagttcggccccgagagaatgtacatcgactgctgggtgaagaagcacacctacgacaccttcaaggaggtgctgggcagcggcatgcagtaccacctgcagagcaacgagttcctgagaaacgtgttcgagctgggcccccccgtgatgctggacgccgccaccctgaagaccatgaagatcagcagattcgagagacacctgtacaacagcgccgccttcaaggccagaaccaaggccagaagcaagtgcagagacaagagagccgacgtgggcgagttcttctag

SEQ ID NO: 75256 - DNA, 474 bp, Artificial Sequence
  derived and/or modified sequence
atgcacttccacaagctgcccagcctgctgagctgcgacgacgtgaacatgagaatcgccgccggcgagagcctggccctgctgttcgagctggccagaggcatcgagagcgacttcttctacgaggacatggagagcctgacccagatgctgagagccctggccaccgacggcaacaagcacagagccaaggtggacaagagaaagcagagaagcgtgttcagagacgtgctgagagccgtggaggagagagacttccccaccgagaccatcaagttcggccccgagagaatgtacatcgactgctgggtgaagaagcacacctacgacaccttcaaggaggtgctgggcagcggcatgcagtaccacctgcagagcaacgagttcctgagaaacgtgttcgagctgggcccccccgtgatgctggacgccgccaccctgaagaccatgaagatcagcagattcgagagatag

SEQ ID NO: 75257 - protein, 261 aa, Artificial Sequence
  derived and/or modified sequence
MHMRETSGFTLKKGRSAPLVFHPPDALIAVPFDDDDKIVGGYTCEENSLPYQVSLNSGSHFCGGSLISEQWVVSAAHCYKTRIQVRLGEHNIKVLEGNEQFINAAKIIRHPKYNRDTLDNDIMLIKLSSPAVINARVSTISLPTTPPAAGTECLISGWGNTLSFGADYPDELKCLDAPVLTQAECKASYPGKITNSMFCVGFLEGGKDSCQRDSGGPVVCNGQLQGVVSWGHGCAWKNRPGVYTKVYNYVDWIKDTIAANS

SEQ ID NO: 75258 - protein, 178 aa, Artificial Sequence
  derived and/or modified sequence
MRETSGFTLKKGRSAPLVFHPPDALIAVPFDDDDKIVGGYTCEENSLPYQVSLNSGSHFCGGSLISEQWVVSAAHCYKTRIQVRLGEHNIKVLEGNEQFINAAKIIRHPKYNRDTLDNDIMLIKLSSPAVINARVSTISLPTTPPAAGTECLISGWGNTLSFGADYPDELKCLDAPVL

SEQ ID NO: 75259 - DNA, 786 bp, Artificial Sequence
  derived and/or modified sequence
atgcacatgagagagacctctggctttactttaaagaaaggaaggtccgcgccccttgtttttcaccccccagatgccctcatagccgtccccttcgacgacgacgacaagatagtgggaggctacacatgcgaagaaaactcactgccatatcaagtttcattaaattccggcagccacttctgtggagggagcctcatatctgaacagtgggtggtgagcgcggcccactgctacaaaaccaggatccaggtccgtctcggtgagcataatattaaagtgctggagggtaatgaacagttcattaacgctgccaaaatcatcagacaccctaagtacaaccgggatacgttggataacgatattatgttgataaaactgtcctcacccgctgtgataaatgctcgcgtctcaactatttctcttccgaccaccccacccgccgctggaaccgagtgcctgatctctggatggggaaatacccttagtttcggcgcagattatcccgacgagttgaaatgtctcgacgcccctgtactcacccaggcagagtgcaaggcttcttatcctggcaagatcaccaattccatgttttgtgtgggattcctggaaggcggcaaggattcatgccaaagggattctggcggcccggtggtgtgtaatggccagcttcagggcgtcgtgtcctggggccatgggtgcgcatggaaaaatagacctggagtttacaccaaagtctacaactatgtcgattggattaaggacaccatcgccgcaaacagctag

SEQ ID NO: 75260 - DNA, 537 bp, Artificial Sequence
  derived and/or modified sequence
atgagggagacaagtggctttaccttgaagaagggacgatcagccccactggtcttccacccccctgatgcacttattgccgttcccttcgatgatgatgataagattgtggggggttatacatgtgaagaaaattccctaccttaccaggtgtccctgaacagcggctcacacttttgtggaggaagcctgatctcagagcaatgggttgtgtcagctgcccactgttacaaaactaggattcaggttagactgggggagcacaacatcaaggtgctcgaggggaatgaacagttcattaacgccgccaaaatcatccggcaccccaagtacaatcgggataccctagacaatgatatcatgcttatcaagctgagtagtccagcagtgattaacgcgagggtatccactattagtctacctacaacaccacccgccgctgggaccgagtgtctcatttcaggctggggaaataccttgtcgtttggagccgactacccggatgagcttaaatgtctcgacgcccctgttctgtag

SEQ ID NO: 75261 - DNA, 786 bp, Artificial Sequence
  derived and/or modified sequence
atgcacatgagggagaccagcggcttcaccctgaagaagggccgcagcgcccccctggtgttccaccccccagatgccctgattgctgtgccctttgatgatgatgacaagatcgtgggcggctacacctgtgaggagaacagcctgccctaccaggtgtccctgaacagcggcagccacttctgtggcggcagcctcatcagcgagcagtgggtggtgtctgctgcccactgctacaagacccgcatccaggtgcggctgggggagcacaacatcaaggtgctggagggcaatgagcagttcatcaatgctgccaagatcatccgccaccccaagtacaacagagacaccctggacaatgacatcatgctgatcaagctgagcagccctgctgtgatcaatgcccgggtgtccaccatcagcctgcccaccaccccacctgctgctggaacagagtgcctgatcagcggctggggcaacaccctgagctttggagctgactacccagatgagctgaagtgcctggatgcccctgtgctgacccaggccgagtgcaaggccagctacccaggcaagatcaccaacagcatgttctgtgtgggcttcctggagggcggcaaggacagctgccagagggacagcggcggccctgtggtgtgcaatggccagctgcagggcgtggtgtcctggggccacggctgtgcctggaagaacagacctggggtgtacaccaaggtgtacaactacgtggactggatcaaggacaccatcgccgccaacagctag

SEQ ID NO: 75262 - DNA, 537 bp, Artificial Sequence
  derived and/or modified sequence
atgagggagaccagcggcttcaccctgaagaagggccgcagcgcccccctggtgttccaccccccagatgccctgattgctgtgccctttgatgatgatgacaagatcgtgggcggctacacctgtgaggagaacagcctgccctaccaggtgtccctgaacagcggcagccacttctgtggcggcagcctcatcagcgagcagtgggtggtgtctgctgcccactgctacaagacccgcatccaggtgcggctgggggagcacaacatcaaggtgctggagggcaatgagcagttcatcaatgctgccaagatcatccgccaccccaagtacaacagagacaccctggacaatgacatcatgctgatcaagctgagcagccctgctgtgatcaatgcccgggtgtccaccatcagcctgcccaccaccccacctgctgctggaacagagtgcctgatcagcggctggggcaacaccctgagctttggagctgactacccagatgagctgaagtgcctggatgcccctgtgctgtag

SEQ ID NO: 75263 - DNA, 786 bp, Artificial Sequence
  derived and/or modified sequence
atgcacatgcgggagaccagcggcttcaccctgaagaagggccggagcgcccctctggttttccatccccctgatgccctcatcgctgtgccattcgatgatgatgataaaatcgtgggcgggtacacatgcgaagagaacagtctgccttaccaggttagcctgaattccggttcgcacttctgtggcggatctttaattagtgagcaatgggtcgtcagtgccgcgcactgctataaaactaggatacaagtgcggttaggcgaacacaacataaaggtcctcgagggaaatgagcagtttataaatgcagccaagatcatacgccaccccaagtacaaccgtgacactcttgataacgacattatgctgataaaattatccagcccagccgtcataaacgcgcgggtatctacgattagcctgcccactactccccctgcagctggcacggaatgtctgatcagtggctggggaaataccctaagtttcggagcagattacccggacgagctcaaatgtcttgatgcccctgtgctgactcaggcagaatgtaaggcctcctaccctggcaaaatcactaactcgatgttctgtgtaggtttcctggagggggggaaagacagctgtcagcgcgactctgggggccccgtggtctgcaacggtcagctgcaaggtgttgtcagctggggacacggctgcgcttggaaaaacagacctggcgtatacaccaaggtgtataattacgtcgattggattaaggacaccatcgccgctaattcctag

SEQ ID NO: 75264 - DNA, 537 bp, Artificial Sequence
  derived and/or modified sequence
atgcgggagaccagcggcttcaccctgaagaagggccggagcgcccctctcgttttccatccacccgacgcgttaatcgccgtacccttcgacgatgatgataaaatcgtggggggatacacctgcgaggagaacagcctgccatatcaagtcagcctcaattcaggatcacacttttgtggcggatccttgatatctgaacagtgggtagtgtcggccgcccattgttataaaacgaggattcaagtccggttaggagagcataacatcaaagtgttggagggaaacgagcaatttatcaatgccgccaaaatcattaggcacccaaaatataaccgcgataccctggataatgatataatgttgatcaaactgagcagccccgcagtcattaacgcccgtgtgtctactatctctctgccaactactcctccagctgcgggcacagaatgccttatttcgggatggggaaacacgctgagtttcggggcggattacccagacgagctgaaatgcctggatgccccagtgctgtag

SEQ ID NO: 75265 - DNA, 786 bp, Artificial Sequence
  derived and/or modified sequence
atgcatatgcgggagactagcgggttcactctcaaaaaaggacggtcagcccctttggtgttccatccccctgatgcactcatcgctgtgcctttcgatgacgatgacaagattgtgggtggatacacgtgcgaggagaacagtctgccttatcaggtcagtctgaactccggctcacatttctgcggtggcagtttaatttccgagcagtgggtggtgagtgctgcacattgttacaagacaaggattcaggtgcggctgggcgagcataatattaaggtgctcgagggtaacgaacagtttatcaatgctgcgaaaattatccgccatccgaaatacaatcgcgataccttggacaatgacataatgttgatcaagttgagttctccagcagtcattaatgctagagtatccacaatttccctgcccaccactccacccgctgcaggtactgaatgcctgatttctgggtgggggaatactcttagcttcggggctgactaccccgatgaattgaagtgtctggacgcccctgtcctcacacaggccgaatgtaaggctagctaccctggaaagatcaccaatagcatgttttgtgtgggcttcctggagggtggcaaggactcctgtcaaagggacagcggcggacctgtcgtgtgcaacggccagctccagggcgtggtttcttgggggcacggatgtgcgtggaaaaaccggcctggcgtgtacactaaggtttacaactacgtggactggatcaaagataccatcgcggctaactcctag

SEQ ID NO: 75266 - DNA, 537 bp, Artificial Sequence
  derived and/or modified sequence
atgcgggagactagcggctttaccctgaagaaagggaggagcgcaccattggtgttccatccccctgatgcactgatcgcagtgcccttcgacgacgacgacaagattgtgggcggttatacttgtgaggagaactctctcccttatcaagtgagcttaaacagtgggagtcatttctgtggcggaagtctgatctctgagcagtgggtggtaagtgctgcccattgctataaaactaggatacaggtccggctcggcgaacacaacattaaagttctcgaaggcaatgaacaattcattaacgctgccaaaatcataaggcatccaaagtacaatcgcgacacactggataacgacatcatgctgatcaagctctcgtctcccgctgttattaacgccagagttagcactatcagcctgcctaccacacctcccgcagctggcacggagtgcttgatcagcggttggggaaacaccctcagcttcggcgcagactatcccgacgaattgaaatgcctggacgccccagtgctgtag

SEQ ID NO: 75267 - DNA, 922 bp, Artificial Sequence
  derived and/or modified sequence
ggcgcgggatgcagacggctgcgaggcgctgggcacaggttgccaggacaaccgtgaggctgcataaaaagaacctatgacaggatgcacatgagagagacaagtggcttcacattgaagaaggggaggagtgcgccattggttttccatcctccagatgcactgattgctgtcccctttgacgatgatgacaagattgttgggggctacacctgtgaggagaattctctcccctaccaggtgtccctgaattctggctcccacttctgcggtggctccctcatcagcgaacagtgggtggtatcagcagctcactgctacaagacccgcatccaggtgagactgggagagcacaacatcaaagtcctggaggggaatgagcagttcatcaatgcggccaagatcatccgccaccctaaatacaacagggacactctggacaatgacatcatgctgatcaaactctcctcacctgccgtcatcaatgcccgcgtgtccaccatctctctgcccaccacccctccagctgctggcactgagtgcctcatctccggctggggcaacactctgagctttggtgctgactacccagacgagctgaagtgcctggatgctccggtgctgacccaggctgagtgtaaagcctcctaccctggaaagattaccaacagcatgttctgtgtgggcttccttgagggaggcaaggattcctgccagcgtgactctggtggccctgtggtctgcaacggacagctccaaggagttgtctcctggggccatggctgtgcctggaagaacaggcctggagtctacaccaaggtctacaactatgtggactggattaaggacaccatcgctgccaacagctaaagcccccggtccctctgcagtctctataccaataaagtggccctgctctcac

SEQ ID NO: 75268 - DNA, 623 bp, Artificial Sequence
  derived and/or modified sequence
ggcgcgggatgcagacggctgcgaggcgctgggcacaggttgccaggacaaccgtgaggctgcataaaaagaacctatgacaggatgcacatgagagagacaagtggcttcacattgaagaaggggaggagtgcgccattggttttccatcctccagatgcactgattgctgtcccctttgacgatgatgacaagattgttgggggctacacctgtgaggagaattctctcccctaccaggtgtccctgaattctggctcccacttctgcggtggctccctcatcagcgaacagtgggtggtatcagcagctcactgctacaagacccgcatccaggtgagactgggagagcacaacatcaaagtcctggaggggaatgagcagttcatcaatgcggccaagatcatccgccaccctaaatacaacagggacactctggacaatgacatcatgctgatcaaactctcctcacctgccgtcatcaatgcccgcgtgtccaccatctctctgcccaccacccctccagctgctggcactgagtgcctcatctccggctggggcaacactctgagctttggtgctgactacccagacgagctgaagtgcctggatgctccggtgct

SEQ ID NO: 75269 - DNA, 786 bp, Artificial Sequence
  derived and/or modified sequence
atgcacatgagagagaccagcggcttcaccctgaagaagggcagaagcgcccccctggtgttccacccccccgacgccctgatcgccgtgcccttcgacgacgacgacaagatcgtgggcggctacacctgcgaggagaacagcctgccctaccaggtgagcctgaacagcggcagccacttctgcggcggcagcctgatcagcgagcagtgggtggtgagcgccgcccactgctacaagaccagaatccaggtgagactgggcgagcacaacatcaaggtgctggagggcaacgagcagttcatcaacgccgccaagatcatcagacaccccaagtacaacagagacaccctggacaacgacatcatgctgatcaagctgagcagccccgccgtgatcaacgccagagtgagcaccatcagcctgcccaccaccccccccgccgccggcaccgagtgcctgatcagcggctggggcaacaccctgagcttcggcgccgactaccccgacgagctgaagtgcctggacgcccccgtgctgacccaggccgagtgcaaggccagctaccccggcaagatcaccaacagcatgttctgcgtgggcttcctggagggcggcaaggacagctgccagagagacagcggcggccccgtggtgtgcaacggccagctgcagggcgtggtgagctggggccacggctgcgcctggaagaacagacccggcgtgtacaccaaggtgtacaactacgtggactggatcaaggacaccatcgccgccaacagctag

SEQ ID NO: 75270 - DNA, 537 bp, Artificial Sequence
  derived and/or modified sequence
atgagagagaccagcggcttcaccctgaagaagggcagaagcgcccccctggtgttccacccccccgacgccctgatcgccgtgcccttcgacgacgacgacaagatcgtgggcggctacacctgcgaggagaacagcctgccctaccaggtgagcctgaacagcggcagccacttctgcggcggcagcctgatcagcgagcagtgggtggtgagcgccgcccactgctacaagaccagaatccaggtgagactgggcgagcacaacatcaaggtgctggagggcaacgagcagttcatcaacgccgccaagatcatcagacaccccaagtacaacagagacaccctggacaacgacatcatgctgatcaagctgagcagccccgccgtgatcaacgccagagtgagcaccatcagcctgcccaccaccccccccgccgccggcaccgagtgcctgatcagcggctggggcaacaccctgagcttcggcgccgactaccccgacgagctgaagtgcctggacgcccccgtgctgtag

SEQ ID NO: 75271 - protein, 240 aa, Artificial Sequence
  derived and/or modified sequence
MGPAGEVAVPFDDDDKIVGGYTCEENSLPYQVSLNSGSHFCGGSLISEQWVVSAAHCYKTRIQVRLGEHNIKVLEGNEQFINAAKIIRHPKYNRDTLDNDIMLIKLSSPAVINARVSTISLPTTPPAAGTECLISGWGNTLSFGADYPDELKCLDAPVLTQAECKASYPGKITNSMFCVGFLEGGKDSCQRDSGGPVVCNGQLQGVVSWGHGCAWKNRPGVYTKVYNYVDWIKDTIAANS

SEQ ID NO: 75272 - DNA, 723 bp, Artificial Sequence
  derived and/or modified sequence
atgggcccagctggcgaagtggccgtgccctttgatgatgacgacaaaattgtcggaggctacacttgtgaagaaaattctctcccctaccaagtgagcttaaactcaggctcacacttctgcggtggctccctgattagtgaacagtgggtcgtgagcgctgcgcattgctacaagacgagaatccaggtgcggctcggcgaacacaatatcaaagtactggaaggcaatgaacagttcattaacgcggcgaaaataatacggcaccctaagtacaatagggacacactcgacaatgacataatgctcattaaactcagtagcccagcagtgatcaacgcaagagtgtccaccattagtctgcctacaaccccacccgccgcaggtactgagtgtctaatctccggatggggcaatacactttcattcggggcagattatccagacgagctgaagtgccttgatgctcctgtgttgacccaggctgaatgtaaagcttcctacccaggaaagatcactaactctatgttttgtgtgggattcctggaagggggaaaggacagttgccagcgggattccggcggcccagtagtctgtaatgggcaacttcagggtgtcgtcagctggggacatgggtgcgcgtggaagaaccgacctggggtgtataccaaggtgtacaactacgtagattggatcaaggatacaattgccgcgaactcctag

SEQ ID NO: 75273 - DNA, 723 bp, Artificial Sequence
  derived and/or modified sequence
atgggccctgctggggaggtggccgtgccctttgatgatgatgacaagatcgtgggcggctacacctgtgaggagaacagcctgccctaccaggtgtccctgaacagcggcagccacttctgtggcggcagcctcatcagcgagcagtgggtggtgtctgctgcccactgctacaagacccgcatccaggtgcggctgggggagcacaacatcaaggtgctggagggcaatgagcagttcatcaatgctgccaagatcatccgccaccccaagtacaacagagacaccctggacaatgacatcatgctgatcaagctgagcagccctgctgtgatcaatgcccgggtgtccaccatcagcctgcccaccaccccacctgctgctggaacagaatgtctcatcagcggctggggcaacaccctgagctttggagctgactacccagatgagctgaagtgcctggatgcccctgtgctgacccaggccgagtgcaaggccagctacccaggcaagatcaccaacagcatgttctgtgtgggcttcctggagggcggcaaggacagctgccagagggacagcggcggccctgtggtgtgcaatggccagctgcagggcgtggtgtcctggggccacggctgtgcctggaagaacagacctggggtgtacaccaaggtgtacaactacgtggactggatcaaggacaccatcgccgccaacagctag

SEQ ID NO: 75274 - DNA, 723 bp, Artificial Sequence
  derived and/or modified sequence
atgggccccgccggcgaggtggccgtgcccttcgacgacgacgacaaaatagttgggggttacacttgcgaggagaactcccttccctaccaagtatcacttaattcagggtcacacttttgcggcgggtctttgatatccgagcagtgggtggtaagcgccgcccactgttacaagacccgtattcaggtgcggctgggggaacataatatcaaagtcctggagggcaacgagcagttcatcaatgcagcaaagatcattagacacccaaaatataatagagatactctggacaacgatatcatgcttatcaagttgtcctcgccagctgttattaacgcaagggtgtcaaccatcagtctcccaacaacgccaccagccgcaggtaccgagtgcctaataagtggttggggcaatacactttcatttggcgccgactacccagacgaactgaagtgtctcgatgccccggtactgacgcaggccgagtgcaaagcgtcctaccctggaaagattactaactctatgttctgtgtgggctttctggaagggggaaaggattcgtgccagagagattctggagggcctgttgtgtgcaatgggcagctccaaggcgtggtctcttggggccacggctgtgcctggaaaaatagaccaggggtgtatactaaggtgtacaactacgtcgactggatcaaggacacaatcgccgccaactcctag

SEQ ID NO: 75275 - DNA, 723 bp, Artificial Sequence
  derived and/or modified sequence
atgggtcctgcaggtgaggttgctgtgccttttgacgacgacgacaaaatagtcggcggttacacctgcgaagaaaactctctaccctaccaggtgtccttaaactccgggagccacttctgcgggggaagcctcatcagcgagcagtgggtcgtatctgccgctcactgctacaagactagaattcaggtgcgcctgggggagcataatattaaggttttggaaggaaatgagcagttcatcaacgccgctaagatcataaggcacccaaaatacaatcgcgacacactagataacgacatcatgttgattaagttgagcagccctgctgtaatcaatgctagggtgagtacgatctcgctgccaactacaccccctgcagccggaactgagtgtcttataagcgggtggggcaacactttatctttcggggcagactacccagacgagctgaaatgtctcgatgcccctgtactaactcaggcagaatgtaaggcttcctacccgggtaagatcacaaatagtatgttctgtgtgggcttccttgaggggggaaaggattcctgccagagagacagcggcggacctgttgtgtgtaatgggcagctccaaggagtcgtgtcctggggccacggatgtgcctggaagaataggccgggagtgtacactaaggtctacaattatgtggattggatcaaggacaccattgcagcgaattcatag

SEQ ID NO: 75276 - DNA, 786 bp, Artificial Sequence
  derived and/or modified sequence
ggttccgactcgcatgggacctgcgggggaggttgctgtcccctttgacgatgatgacaagattgttgggggctacacctgtgaggagaattctctcccctaccaggtgtccctgaattctggctcccacttctgcggtggctccctcatcagcgaacagtgggtggtatcagcagctcactgctacaagacccgcatccaggtgagactgggagagcacaacatcaaagtcctggaggggaatgagcagttcatcaatgcggccaagatcatccgccaccctaaatacaacagggacactctggacaatgacatcatgctgatcaaactctcctcacctgccgtcatcaatgcccgcgtgtccaccatctctctgcccaccacccctccagctgctggcactgagtgcctcatctccggctggggcaacactctgagctttggtgctgactacccagacgagctgaagtgcctggatgctccggtgctgacccaggctgagtgtaaagcctcctaccctggaaagattaccaacagcatgttctgtgtgggcttccttgagggaggcaaggattcctgccagcgtgactctggtggccctgtggtctgcaacggacagctccaaggagttgtctcctggggccatggctgtgcctggaagaacaggcctggagtctacaccaaggtctacaactatgtggactggattaaggacaccatcgctgccaacagctaaagcccccggtccctctgcagtctctataccaataaagtggccctgctctc

SEQ ID NO: 75277 - DNA, 723 bp, Artificial Sequence
  derived and/or modified sequence
atgggccccgccggcgaggtggccgtgcccttcgacgacgacgacaagatcgtgggcggctacacctgcgaggagaacagcctgccctaccaggtgagcctgaacagcggcagccacttctgcggcggcagcctgatcagcgagcagtgggtggtgagcgccgcccactgctacaagaccagaatccaggtgagactgggcgagcacaacatcaaggtgctggagggcaacgagcagttcatcaacgccgccaagatcatcagacaccccaagtacaacagagacaccctggacaacgacatcatgctgatcaagctgagcagccccgccgtgatcaacgccagagtgagcaccatcagcctgcccaccaccccccccgccgccggcaccgagtgcctgatcagcggctggggcaacaccctgagcttcggcgccgactaccccgacgagctgaagtgcctggacgcccccgtgctgacccaggccgagtgcaaggccagctaccccggcaagatcaccaacagcatgttctgcgtgggcttcctggagggcggcaaggacagctgccagagagacagcggcggccccgtggtgtgcaacggccagctgcagggcgtggtgagctggggccacggctgcgcctggaagaacagacccggcgtgtacaccaaggtgtacaactacgtggactggatcaaggacaccatcgccgccaacagctag

SEQ ID NO: 75278 - protein, 132 aa, Artificial Sequence
  derived and/or modified sequence
MRLEELKRLQNPLEQVNDGKYSFENIQRAWREYLQRQEPLGKRSPSPPSVSSEKLSSSVSMNTFSDSSTPFARAPVGKIHPYISWRLQSPGDKLPGGRKVILLYLDQLARPTGFIHTLKEPQIERLGFLTLQ

SEQ ID NO: 75279 - DNA, 399 bp, Artificial Sequence
  derived and/or modified sequence
atgcgacttgaggagctcaaacggcttcagaatcctctagaacaagtaaatgacggcaagtattcattcgagaacattcagcgcgcttggagagagtatctccagaggcaggagccactgggcaaacgcagtccaagtcccccctcggtctcatccgaaaaactgtcttcaagcgtatcgatgaacaccttttctgattcttccaccccttttgcccgggcccccgtcggaaagattcacccatacatttcatggaggcttcaatccccaggagacaagttgcctggcggtcgcaaggtgatactgctttatttggatcaactggctagacccaccgggtttatccacaccctgaaagagcctcaaatcgagcgcctgggctttctgaccctccagtag

SEQ ID NO: 75280 - DNA, 1408 bp, Artificial Sequence
  derived and/or modified sequence
tcacattcccccacagtcacattgcgctctgtgattctgaggaatacagtgtgccagcatccgatccagtctcctttcacctgcaggtgttccagaaacttcaaaatgcgtctggaagaactgaaaagattgcagaatcctctagaacaagttaatgatggaaaatattcatttgaaaacattcagcgagcatggcgagagtacctgcagcggcaggagcccctggggaagaggagcccgtccccaccctctgtctcctcagagaagctgagcagctctgtcagcatgaacaccttctccgacagcagcacaccctttgccagggcccctgttgggaagattcatccttacatctcttggaggttgcagtcacctggggacaagttgcctggtggaaggaaggtgattcttctctaccttgaccagcttgccagacccactgggttcatacatactctcaaggagccccagatagaaagacttggttttctcaccctccagtgaatggacctcaagtttatggagggaataggatgatccctggcctacactgactaagcctgtcatcaagaaatgagcttcctctaacaaccatgagtccatttggaacttctgtgttaaaagccttcagtccaagtcaaatgttgtcagtgagctgtgtccctggggagttctttatgccctgcctcttgcttgatcttttccaggttgttgaacctcagccctctttctctgggtttaatctattgctgttactgcctagacaattttctatcttctcatatctgatcaactgactgtcttgtcccaagtcccttccttccttctactaacctctaacacaaccttaatggaggccaacaagcccttacctaacttctggacattgccagctgctctgcagccccacgcccataactgcaattattgcctatctcaactatctaccccaggcatgcactacacaggaaatcagctcactaatctggttgagttcctgtgtggagctgataatgatgcttttgcatgcttctgctctgattgttttggctaggcctagtggttaatgtggttctttgaacatttctgccttaaaatatataacaaaagtaacgtttaagtatgagtgctcaaattcattatcttaataaaagctgagcacttgttatgtgccaggcactctgctattatcttgtttaatcctatcaatgatcatacaaagaaagacactattattatctccattttacaggtgatgaaaaagagacttaaagagataactaccttttcttgggccacccattgggttggagctccatattttattcttccactatattacttgaaaagaaggctgcatttagacacggtcaagcaatcagttcatgcatttctaagactgctttac

SEQ ID NO: 75281 - DNA, 399 bp, Artificial Sequence
  derived and/or modified sequence
atgaggctggaggagctgaagaggctgcagaaccccctggagcaggtgaatgatggcaagtacagctttgagaacatccagagggcctggagggagtacctgcagaggcaggagcccctgggcaagaggagccccagccccccatctgtgagcagcgagaagctgagcagctctgtgtccatgaacaccttcagtgacagcagcaccccatttgcccgggcccctgtgggcaagatccacccctacatctcctggaggctgcagagccctggggacaagctgcccggcggcaggaaggtgatcctgctgtacctggaccagctggcccggcccaccggcttcatccacaccctgaaggagccccagatcgagcggctgggcttcctgaccctgcagtag

SEQ ID NO: 75282 - DNA, 399 bp, Artificial Sequence
  derived and/or modified sequence
atgcggctggaggagctgaagcggctgcagaaccccctggagcaggttaatgatggcaagtacagtttcgagaatatccagagagcttggagggaatatctgcagcgtcaagagcccctggggaaaagatcacccagcccaccaagcgtgagctctgagaaattgagctccagcgtgtcaatgaatactttttccgactcgagcactcccttcgcccgcgccccagtcggtaagattcacccctacatctcttggcgcctgcaaagtcccggcgataagttacctgggggccgaaaagtgatattactatatttagatcagctggcccgtccgacaggtttcattcatactttgaaggagccccagatagagagactgggcttcctgaccctgcagtag

SEQ ID NO: 75283 - DNA, 399 bp, Artificial Sequence
  derived and/or modified sequence
atgaggctagaggagctgaaaagactgcagaatcccctggagcaagttaatgacggtaagtacagcttcgaaaatatccagagggcctggcgcgagtaccttcaaagacaagagccgctgggtaaacggagtccttcaccaccatccgttagcagtgaaaagttgtcctcctccgtaagcatgaatacgtttagcgatagctcaaccccctttgcaagggctcccgtggggaaaatacatccctacatttcatggagattgcagtcacctggcgacaaactgcccggaggccgaaaggtgatcttgctttacctggaccagctggcacggcctaccggcttcatccataccctgaaggaaccccagatcgagcgcctgggcttcttgaccttgcagtag

SEQ ID NO: 75284 - DNA, 399 bp, Artificial Sequence
  derived and/or modified sequence
atgagactggaggagctgaagagactgcagaaccccctggagcaggtgaacgacggcaagtacagcttcgagaacatccagagagcctggagagagtacctgcagagacaggagcccctgggcaagagaagccccagcccccccagcgtgagcagcgagaagctgagcagcagcgtgagcatgaacaccttcagcgacagcagcacccccttcgccagagcccccgtgggcaagatccacccctacatcagctggagactgcagagccccggcgacaagctgcccggcggcagaaaggtgatcctgctgtacctggaccagctggccagacccaccggcttcatccacaccctgaaggagccccagatcgagagactgggcttcctgaccctgcagtag

SEQ ID NO: 75285 - protein, 3972 aa, Artificial Sequence
  derived and/or modified sequence
MAHSCRWRFPARPGTTGGGGGGGRRGLGGAPRQRVPALLLPPGPPVGGGGPGAPPSPPAVAAAAAAAGSSGAGVPGGAAAASAASSSSASSSSSSSSSASSGPALLRVGPGFDAALQVSAAIGTNLRRFRAVFGESGGGGGSGEDEQFLGFGSDEEVRVRSPTRSPSVKTSPRKPRGRPRSGSDRNSAILSDPSVFSPLNKSETKSGDKIKKKDSKSIEKKRGRPPTFPGVKIKITHGKDISELPKGNKEDSLKKIKRTPSATFQQATKIKKLRAGKLSPLKSKFKTGKLQIGRKGVQIVRRRGRPPSTERIKTPSGLLINSELEKPQKVRKDKEGTPPLTKEDKTVVRQSPRRIKPVRIIPSSKRTDATIAKQLLQRAKKGAQKKIEKEAAQLQGRKVKTQVKNIRQFIMPVVSAISSRIIKTPRRFIEDEDYDPPIKIARLESTPNSRFSAPSCGSSEKSSAASQHSSQMSSDSSRSSSPSVDTSTDSQASEEIQVLPEERSDTPEVHPPLPISQSPENESNDRRSRRYSVSERSFGSRTTKKLSTLQSAPQQQTSSSPPPPLLTPPPPLQPASSISDHTPWLMPPTIPLASPFLPASTAPMQGKRKSILREPTFRWTSLKHSRSEPQYFSSAKYAKEGLIRKPIFDNFRPPPLTPEDVGFASGFSASGTAASARLFSPLHSGTRFDMHKRSPLLRAPRFTPSEAHSRIFESVTLPSNRTSAGTSSSGVSNRKRKRKVFSPIRSEPRSPSHSMRTRSGRLSSSELSPLTPPSSVSSSLSISVSPLATSALNPTFTFPSHSLTQSGESAEKNQRPRKQTSAPAEPFSSSSPTPLFPWFTPGSQTERGRNKDKAPEELSKDRDADKSVEKDKSRERDREREKENKRESRKEKRKKGSEIQSSSALYPVGRVSKEKVVGEDVATSSSAKKATGRKKSSSHDSGTDITSVTLGDTTAVKTKILIKKGRGNLEKTNLDLGPTAPSLEKEKTLCLSTPSSSTVKHSTSSIGSMLAQADKLPMTDKRVASLLKKAKAQLCKIEKSKSLKQTDQPKAQGQESDSSETSVRGPRIKHVCRRAAVALGRKRAVFPDDMPTLSALPWEEREKILSSMGNDDKSSIAGSEDAEPLAPPIKPIKPVTRNKAPQEPPVKKGRRSRRCGQCPGCQVPEDCGVCTNCLDKPKFGGRNIKKQCCKMRKCQNLQWMPSKAYLQKQAKAVKKKEKKSKTSEKKDSKESSVVKNVVDSSQKPTPSAREDPAPKKSSSEPPPRKPVEEKSEEGNVSAPGPESKQATTPASRKSSKQVSQPALVIPPQPPTTGPPRKEVPKTTPSEPKKKQPPPPESGPEQSKQKKVAPRPSIPVKQKPKEKEKPPPVNKQENAGTLNILSTLSNGNSSKQKIPADGVHRIRVDFKEDCEAENVWEMGGLGILTSVPITPRVVCFLCASSGHVEFVYCQVCCEPFHKFCLEENERPLEDQLENWCCRRCKFCHVCGRQHQATKQLLECNKCRNSYHPECLGPNYPTKPTKKKKVWICTKCVRCKSCGSTTPGKGWDAQWSHDFSLCHDCAKLFAKGNFCPLCDKCYDDDDYESKMMQCGKCDRWVHSKCENLSGTEDEMYEILSNLPESVAYTCVNCTERHPAEWRLALEKELQISLKQVLTALLNSRTTSHLLRYRQAAKPPDLNPETEESIPSRSSPEGPDPPVLTEVSKQDDQQPLDLEGVKRKMDQGNYTSVLEFSDDIVKIIQAAINSDGGQPEIKKANSMVKSFFIRQMERVFPWFSVKKSRFWEPNKVSSNSGMLPNAVLPPSLDHNYAQWQEREENSHTEQPPLMKKIIPAPKPKGPGEPDSPTPLHPPTPPILSTDRSREDSPELNPPPGIEDNRQCALCLTYGDDSANDAGRLLYIGQNEWTHVNCALWSAEVFEDDDGSLKNVHMAVIRGKQLRCEFCQKPGATVGCCLTSCTSNYHFMCSRAKNCVFLDDKKVYCQRHRDLIKGEVVPENGFEVFRRVFVDFEGISLRRKFLNGLEPENIHMMIGSMTIDCLGILNDLSDCEDKLFPIGYQCSRVYWSTTDARKRCVYTCKIVECRPPVVEPDINSTVEHDENRTIAHSPTSFTESSSKESQNTAEIISPPSPDRPPHSQTSGSCYYHVISKVPRIRTPSYSPTQRSPGCRPLPSAGSPTPTTHEIVTVGDPLLSSGLRSIGSRRHSTSSLSPQRSKLRIMSPMRTGNTYSRNNVSSVSTTGTATDLESSAKVVDHVLGPLNSSTSLGQNTSTSSNLQRTVVTVGNKNSHLDGSSSSEMKQSSASDLVSKSSSLKGEKTKVLSSKSSEGSAHNVAYPGIPKLAPQVHNTTSRELNVSKIGSFAEPSSVSFSSKEALSFPHLHLRGQRNDRDQHTDSTQSANSSPDEDTEVKTLKLSGMSNRSSIINEHMGSSSRDRRQKGKKSCKETFKEKHSSKSFLEPGQVTTGEEGNLKPEFMDEVLTPEYMGQRPCNNVSSDKIGDKGLSMPGVPKAPPMQVEGSAKELQAPRKRTVKVTLTPLKMENESQSKNALKESSPASPLQIESTSPTEPISASENPGDGPVAQPSPNNTSCQDSQSNNYQNLPVQDRNLMLPDGPKPQEDGSFKRRYPRRSARARSNMFFGLTPLYGVRSYGEEDIPFYSSSTGKKRGKRSAEGQVDGADDLSTSDEDDLYYYNFTRTVISSGGEERLASHNLFREEEQCDLPKISQLDGVDDGTESDTSVTATTRKSSQIPKRNGKENGTENLKIDRPEDAGEKEHVTKSSVGHKNEPKMDNCHSVSRVKTQGQDSLEAQLSSLESSRRVHTSTPSDKNLLDTYNTELLKSDSDNNNSDDCGNILPSDIMDFVLKNTPSMQALGESPESSSSELLNLGEGLGLDSNREKDMGLFEVFSQQLPTTEPVDSSVSSSISAEEQFELPLELPSDLSVLTTRSPTVPSQNPSRLAVISDSGEKRVTITEKSVASSESDPALLSPGVDPTPEGHMTPDHFIQGHMDADHISSPPCGSVEQGHGNNQDLTRNSSTPGLQVPVSPTVPIQNQKYVPNSTDSPGPSQISNAAVQTTPPHLKPATEKLIVVNQNMQPLYVLQTLPNGVTQKIQLTSSVSSTPSVMETNTSVLGPMGGGLTLTTGLNPSLPTSQSLFPSASKGLLPMSHHQHLHSFPAATQSSFPPNISNPPSGLLIGVQPPPDPQLLVSESSQRTDLSTTVATPSSGLKKRPISRLQTRKNKKLAPSSTPSNIAPSDVVSNMTLINFTPSQLPNHPSLLDLGSLNTSSHRTVPNIIKRSKSSIMYFEPAPLLPQSVGGTAATAAGTSTISQDTSHLTSGSVSGLASSSSVLNVVSMQTTTTPTSSASVPGHVTLTNPRLLGTPDIGSISNLLIKASQQSLGIQDQPVALPPSSGMFPQLGTSQTPSTAAITAASSICVLPSTQTTGITAASPSGEADEHYQLQHVNQLLASKTGIHSSQRDLDSASGPQVSNFTQTVDAPNSMGLEQNKALSSAVQASPTSPGGSPSSPSSGQRSASPSVPGPTKPKPKTKRFQLPLDKGNGKKHKVSHLRTSSSEAHIPDQETTSLTSGTGTPGAEAEQQDTASVEQSSQKECGQPAGQVAVLPEVQVTQNPANEQESAEPKTVEEEESNFSSPLMLWLQQEQKRKESITEKKPKKGLVFEISSDDGFQICAESIEDAWKSLTDKVQEARSNARLKQLSFAGVNGLRMLGILHDAVVFLIEQLSGAKHCRNYKFRFHKPEEANEPPLNPHGSARAEVHLRKSAFDMFNFLASKHRQPPEYNPNDEEEEEVQLKSARRATSMDLPMPMRFRHLKKTSKEAVGVYRSPIHGRGLFCKRNIDAGEMVIEYAGNVIRSIQTDKREKYYDSKGIGCYMFRIDDSEVVDATMHGNAARFINHSCEPNCYSRVINIDGQKHIVIFAMRKIYRGEELTYDYKFPIEDASNKLPCNCGAKKCRKFLN

SEQ ID NO: 75286 - DNA, 11919 bp, Artificial Sequence
  derived and/or modified sequence
atggcacactcatgcagatggcgctttccagccaggccggggacaacaggtggaggggggggcgggggacggcggggtcttggcggtgcccctagacagagggtgcctgcactgctgttacctccgggccctccagtgggtgggggggggccgggcgccccgccgtccccacctgctgtcgctgcagctgccgcagccgctggcagttccggagcaggtgtcccaggaggcgccgcagctgcctcagccgctagcagttcaagcgcctcctcttcctcttcctccagcagttccgcatcctccggcccagcactattacgagtaggtcccggattcgatgctgcccttcaggtcagcgcagcgattgggactaatctcaggcgtttcagagcagtgttcggtgaaagcggtggaggaggaggcagcggagaggacgagcaatttcttgggttcggttccgatgaagaggtgagggttcgcagcccaacccggtctccctcagtcaagacttctcctcgaaaaccacggggacggccacgaagcggcagtgaccggaactccgctatcctttcagatccaagtgtgtttagtccactgaataaatcagaaaccaaatctggggacaaaatcaagaagaaggactctaagtcaatcgagaaaaaacgaggccggcctcctacctttccaggtgtgaaaataaaaattacccacgggaaggatatttccgaactaccgaagggaaacaaagaggatagtctgaagaaaatcaaaaggactccctctgcgacattccagcaggccaccaaaattaagaaattgcgcgccggcaaactgagcccgctgaagagcaaattcaagacaggtaaactgcaaattgggagaaagggcgtccagatcgtcaggagacgcggccgaccaccctctaccgaaagaataaaaaccccttccggccttctgattaactcagagttggagaagccccagaaggtgagaaaggacaaggaaggtacaccaccgctgaccaaagaggacaagactgtggtaaggcaatcaccacgccgcatcaagcccgtgcggatcattccatcctctaagcgcaccgacgcgactattgctaagcagctgctgcagcgcgctaagaaaggcgcccaaaagaagatcgaaaaagaggcagcccaactgcagggaagaaaggtgaaaacccaggtgaagaatatccgacagttcattatgccagtggtctctgcgataagctcaagaataatcaagacgccgaggcgctttatcgaggatgaggactacgacccccccataaagattgcaaggctcgaatctacacccaacagcagattcagtgcccccagttgcggctcctccgagaagtcaagtgccgcctcacagcattcaagtcaaatgtcaagtgactccagcagaagctcaagcccctccgtcgacacctcaacagattcacaagcatccgaagagatccaggtcctcccagaggaacggtcagacacccccgaggtccaccctccactgccaatcagccagtcacctgaaaacgagagtaatgataggaggagtcggaggtattctgtatcagagcgaagtttcggaagccgcacaacgaaaaagttgagtacactgcagtccgcaccacagcagcagaccagttcctctccgccaccccctctgcttactccgcctcctccactgcagccagcgagctcgatctctgatcatacgccctggcttatgcctcctaccatccctcttgcctctcctttccttccagctagcaccgcgcctatgcagggaaagaggaagtctatcttaagggagcctacgttccgttggacatcccttaagcacagccgatccgaacctcagtactttagctctgctaaatacgcaaaagaaggtctgattcggaagccgatttttgacaacttcagacccccacccctgacgcctgaggacgtgggctttgccagcggctttagcgcctcaggtacagctgcatcagcccgccttttttcacctctgcactccggaacgcgctttgacatgcataagcgctcccccctgctccgagctcctaggttcaccccttccgaagctcacagtaggatcttcgaatctgtgacactgccgagcaatcgcacgagtgcaggcacctccagcagtggggtatctaaccggaaacgaaagagaaaagttttctcccccatcaggtccgaacccagaagtccaagtcactcaatgcgcactaggtcaggccgattatccagtagcgagctgtctcctctcacccctccatcttccgtgagcagttctctgagcatttccgtgtctccactcgctacatctgctctcaatcctacattcacatttccttcccactctttgacacagtcaggagagtctgccgagaagaatcaaaggcctcgtaagcagacctctgcaccggctgagcccttctcctccagtagtcctaccccccttttcccgtggtttaccccgggttcacaaacagagcgcggccgcaacaaggataaggccccagaagagttatccaaggaccgcgatgctgacaagtctgtggagaaggacaagagccgggagagagatcgtgagagggagaaagagaataaaagagaaagtcggaaggagaagcggaagaaaggcagcgaaatacagtcatcctcagccctttaccctgtcgggcgtgtgagcaaagagaaagtggtgggagaagatgtggccactagtagctccgccaagaaagcgacaggaaggaagaagtctagttctcacgatagtgggactgatattacctccgttaccctaggagacactactgccgtcaaaacaaaaattctcattaagaaaggccgcggaaatctggagaagacgaatctggatcttggtccaaccgcgcccagtcttgagaaagagaagactctgtgtctcagtactcccagttctagcactgtcaagcacagtacttccagtattggtagtatgcttgctcaagccgataagctccccatgaccgataagcgagtcgcaagtttactgaaaaaggcaaaggcccagctctgcaaaatagaaaaaagtaaatcactgaaacagaccgaccagccaaaggcccaaggtcaggaatcagattccagcgaaaccagcgtgcggggccctcggatcaagcacgtgtgccggcgcgcagctgtggccctcggacgtaagagagctgtttttcccgacgatatgcccaccctctctgctctcccttgggaggaacgggaaaagattctgagttccatgggtaacgatgataagagctctatcgccgggagcgaggacgccgaacctctggcccctccaatcaagcctataaagcctgtgacacgaaacaaagcccctcaagaacctccggtaaagaaaggcagacggagtcgtagatgcggacaatgtccaggatgccaagtgcccgaggactgcggggtctgtaccaactgccttgataagcccaaatttggcgggcggaacatcaagaagcagtgttgtaagatgagaaagtgtcagaacctgcagtggatgccaagcaaagcctacctgcagaagcaggccaaagcagtgaaaaagaaggagaaaaaatcaaagacgagcgagaagaaggatagcaaagaaagctcggtggtgaaaaacgtcgtcgattcatcccaaaagcctacaccgagcgcgcgggaggaccccgcccccaagaagtcaagtagcgagcctcccccccggaagcccgtagaggaaaagagcgaagaaggtaacgtaagtgccccaggtcccgaatccaagcaggcgacaaccccagctagtagaaagtcttcaaaacaggtctcacagcctgcattagtgatccctcctcagccgcctaccactggcccaccaaggaaggaagtgcccaagacgactccttctgaaccaaagaaaaaacagccaccaccccccgaaagtgggcccgagcaatccaagcagaaaaaggttgccccccgtccaagtatccctgtgaaacaaaaacctaaggaaaaggaaaagccacctcccgtgaataagcaagaaaatgcaggaaccttaaacatactaagcacacttagtaatggcaactctagtaaacagaaaatacctgccgacggcgtccaccggattcgcgtggacttcaaggaagactgcgaggccgaaaatgtctgggagatgggtgggctgggaattctgacgagtgtgccaatcacacctagagtcgtgtgtttcctctgtgcctccagtgggcacgtagaatttgtatactgccaggtgtgctgcgagcctttccataagttttgtcttgaagagaatgaaaggcctctcgaggaccagctcgagaattggtgttgccgtcgttgcaagttctgccatgtctgcgggaggcagcatcaagctaccaagcaactgctggagtgtaataagtgtaggaatagctatcacccagagtgtctgggtcctaactacccaacaaagccgacgaagaaaaaaaaggtgtggatctgtacaaagtgcgtcagatgtaaatcttgcgggtccacaacacctggtaagggctgggacgcccaatggtcacatgatttctccttgtgtcacgactgtgccaaacttttcgccaagggcaacttctgcccactctgcgacaaatgctatgacgatgatgattatgagtccaagatgatgcagtgtggcaaatgcgatcgatgggttcattcaaagtgcgagaatctatccggcaccgaggacgagatgtatgagattctttccaatctgcctgaatcagtcgcctatacatgtgttaattgtactgagagacaccctgctgaatggcgcctcgccctggagaaggaactgcaaatcagtctcaagcaggtcctcactgcactgctgaacagtcggactacgtcacacctgctgcgctaccggcaggcggcaaagcccccggacctgaatcctgagacggaagaaagcattccaagcagatcatctcccgaaggacccgatcccccagtgttgaccgaggtctctaagcaggacgaccagcagccgcttgatcttgagggcgtgaagcgcaagatggaccaggggaattacacatctgttctagagtttagtgacgatatcgttaagataatccaagccgcgatcaattccgacggtgggcagccagaaataaaaaaagcaaactccatggtgaaaagcttttttattagacagatggagagggtcttcccttggttcagcgtgaagaagtccagattttgggaacctaacaaggtgtctagcaactcaggcatgctgcctaatgccgtcctaccaccaagccttgatcataactatgcccagtggcaggagagggaagagaactctcacaccgagcagccccccctaatgaagaaaatcattcccgcacccaagcccaaaggcccaggcgagcccgatagcccgacccccctgcacccacctactccacctatcctgagcaccgatcgttcacgcgaagacagccctgagcttaatccgccaccaggtatagaggacaaccggcaatgtgccctgtgtctaacatacggtgacgactcagccaatgacgcagggcgcctgctatacatcggtcagaacgagtggacacacgttaattgtgctttgtggagcgccgaagtattcgaggacgacgacgggagcctcaagaacgtacacatggctgtgattaggggcaagcaattgagatgcgagttttgtcaaaagcctggggctaccgttggctgctgcctcacctcatgtactagtaactatcacttcatgtgctcgcgggctaagaattgtgtttttctggatgacaagaaggtgtactgtcaacgtcatagagacctcatcaagggtgaggttgttcccgagaatggattcgaggtcttcaggcgcgtgttcgtcgattttgaaggcatatcgctaaggaggaagtttctaaatggactcgagccagaaaacattcacatgatgattggctctatgaccatcgactgccttggtatcctgaacgatctcagtgactgcgaagataaactgtttcccattggctatcaatgttctcgggtgtattggagtacaaccgatgcccgcaaaaggtgcgtctacacctgcaaaattgtggaatgccgaccccccgtggtggaaccagacatcaacagtaccgtggaacacgacgagaaccgcacaatcgctcactccccaacaagctttacagagtcctcctctaaagaaagccagaatacagctgaaatcattagccctcctagtcctgatcgcccaccgcacagtcagacatcaggaagttgctattaccatgttatttccaaggtcccaagaattagaactccgtcatactctccaacacagcgaagccctggttgccggcctcttccgtcggccggctcgccaacccctaccactcacgagatcgtcactgttggcgaccccctgcttagttcagggcttcgatccatcggatctagaagacattctacatcctccctgagtcctcagcggtctaaactgcggataatgtcacccatgcgcactggcaatacatatagcagaaataatgtgtcgagcgtgagtacaaccggaaccgccacagacctggagtcctcagccaaggtcgtggatcacgttctggggcccctcaacagtagtaccagcctcggtcagaacactagtaccagttccaatctccagcgaacagtagttaccgtggggaacaaaaattcccaccttgatgggagctcaagttcagagatgaagcagagtagtgccagcgacctcgtgtcgaagagcagctcattgaagggggaaaaaactaaggtgttgtcatccaagagcagcgagggctctgcgcacaacgtggcctatcccgggatcccaaagctggccccacaagttcacaacacaacgtcgcgcgaattgaacgtgtccaaaatcggctcatttgccgagccatcgagcgtcagcttttcctcaaaagaggctctctctttcccgcatttgcatctgagggggcaacgtaatgacagggaccagcacacagattcgacacagtcagcgaacagcagtccagacgaggacactgaggtgaaaacgctgaagctttcaggaatgtccaataggagctccattatcaacgaacacatgggcagtagctccagagatagaaggcaaaagggtaagaagtcgtgcaaagagaccttcaaggaaaaacactccagcaagtctttcctggagcctggtcaggtgacaacaggagaggaaggcaaccttaagcctgagttcatggacgaggtgctcacacctgagtatatggggcagcgaccatgtaataacgtgagcagcgacaaaatcggagacaaaggtttgagcatgcctggagtgcctaaggcaccccctatgcaggtagagggtagtgctaaagagctccaggcaccccgtaaacgtaccgtgaaggtgacacttaccccacttaaaatggaaaacgaaagtcaaagtaagaatgcgctgaaagagtcaagcccagctagccccttacagatcgaatctacatcacctacagaacctatctctgctagcgaaaatcccggcgacggccccgtggctcagccttccccaaataataccagctgtcaagacagtcagtcaaataattaccagaaccttcctgtccaggatagaaatctgatgctgcccgacgggcccaaaccccaggaggatgggtcctttaaacgacgttatccgcggcgctcggccagagccaggagcaacatgttttttggactgacacccctgtatggcgtccggagctatggagaggaagacattccattctactcttcatctaccggcaagaagcgtggcaaacgctcagctgagggccaggtcgacggcgccgatgacctgagtacatcagacgaggacgatctctattactacaattttacgagaactgttatctcctcgggaggggaggaacgattagcaagccataatctgttcagggaggaagaacagtgcgatcttcccaaaatctctcagctggacggcgttgatgacggcaccgagtccgacacttccgtgaccgccaccaccaggaaaagtagccaaattcccaagcgaaacgggaaagaaaatggaacagaaaacctgaaaatagatcggcccgaggacgcgggcgaaaaggagcacgtcactaagtcctccgttggccataaaaatgagcccaaaatggataactgccacagcgtgagtagggtgaagactcagggacaagattcgctggaagcccagctgtcaagcctggagtcgtcgcggcgggtgcacacaagtaccccttcagataagaatctgctagacacatacaatacggaactcctgaaatccgatagcgataataacaattccgatgactgcggtaacatcctaccatctgacatcatggactttgtgctcaaaaacacaccctctatgcaggccctgggagaatctccggagtctagtagctctgagctccttaacctcggagaagggctcggactggacagtaaccgtgaaaaagatatgggcttgttcgaagtgttttcccagcaactccccacaacagaaccagttgactcaagcgtgtcaagcagtatcagtgctgaggaacagtttgagcttccacttgagctcccctcagacctgagcgttctgacgacacggagccctactgttccctcccagaacccctcaagattggctgtaatttctgactccggcgagaaacgggtaactattaccgagaagagtgttgccagttccgagtctgatccagcactcctgagccccggcgtagaccccacacccgaggggcacatgaccccagatcactttattcaggggcatatggacgctgaccatatttcttccccaccctgtgggagcgttgagcagggtcacgggaacaatcaagacctaactcgcaactcaagcacccccgggctgcaggtccccgtgtctcctaccgtgccaattcaaaatcaaaagtacgtgcccaattcaactgacagccccgggccctcccaaatatctaatgcggccgtacagacaacccctccacacttaaagcctgctaccgaaaagctgattgttgtcaaccagaatatgcagcccctgtatgttttgcaaaccctccctaatggggtgactcaaaaaattcagttgacttcctccgtaagctccacgccatccgtcatggagacaaacacgtcagtgctaggcccgatggggggtggcttgaccctcaccacaggactcaatccatcgctccctaccagtcagtccttgttccctagtgcctcaaagggtctactgccaatgtcgcaccaccagcatctgcattcgttccctgccgcgacccagtcctcctttcctcccaatataagcaacccgccaagcggactactgattggcgtgcagccgccacccgacccccagctgctggtatccgagtcctctcagaggaccgatctgtccactactgtggccaccccctcaagcgggctcaagaaacgcccgatctctcgcttgcaaacccgcaagaacaagaagcttgccccgagcagcacacctagcaacattgcgccttccgatgtcgtgagcaatatgacactgattaatttcaccccatcacaattgccaaatcatccgagtctcctcgacctgggaagcctgaatacgtcatcacatcggaccgtgcccaatattatcaagagaagcaaatccagcataatgtattttgagccagctcccttgctgcctcaaagcgtcgggggaaccgctgccacagctgctggcaccagtactatctctcaggacaccagccaccttacttctgggtctgtctcgggcctggcttcctcttcatccgtgctcaacgtcgtttccatgcagacaaccacgactcccacaagcagtgctagtgtgccaggacacgtgactttgaccaacccaaggctgcttggcactcctgacattggatctatcagcaacctcctgattaaagcttcacaacagtctctggggattcaggatcagcccgtggctctgcccccatctagtggcatgtttcctcaactcggaacaagccagaccccatccaccgcagctataacggccgctagcagcatctgcgtgctcccgagcacccagaccactggtattactgctgccagtccaagcggcgaagctgatgaacactaccaactgcaacatgtgaaccagctcctggcttctaaaactggcatccactcatcacagcgggatcttgattcggcatctggcccacaagtgagtaatttcactcagactgttgacgcccccaactctatgggtctcgagcagaataaagctctgagcagtgccgttcaggcttccccgacttctcccggcggcagtccttccagcccaagttccggacagaggtctgcctctccatctgtgcctggtccaactaagccaaagccgaaaacaaaaaggtttcagctgcccctggataagggcaatggcaagaagcacaaagtgagccatcttcgcacttcgagtagtgaggctcacatcccggatcaagagactacatctctcacatctgggaccggaaccccaggcgctgaggccgaacaacaggacacagcaagtgtcgaacaaagcagccagaaggaatgcggtcagccagccggccaagttgccgtactgcccgaggtgcaggttactcagaatcctgctaacgagcaggaaagcgcggagccgaagacagtcgaggaagaagaatccaatttttcttcccccctgatgctatggctccagcaggagcagaagcgaaaagagtccattaccgagaagaaacccaaaaagggccttgtgtttgagatctcctcagacgacggattccagatttgcgccgagagcatcgaagacgcctggaagagcctcacagacaaggttcaagaggctaggagtaacgcgcgtctgaaacagctgagcttcgccggagtcaatggcctccgaatgcttggtatactacacgatgctgtcgtgttcctgatcgaacagctatcaggggctaagcattgtcggaactacaagtttagatttcacaagcctgaggaggctaacgaacccccactgaatcctcacgggtcagcgagagcagaggtccacttaagaaaaagtgcattcgatatgtttaactttctggcatcaaaacatcgccaacccccagaatataatcccaacgacgaggaggaagaagaggtacagctcaagtctgcacgacgggcaacatctatggacctccctatgcctatgcgattcaggcacctgaagaagacatccaaggaagctgttggtgtgtaccgcagccctatacacggtcgtggtctgttctgtaaacgcaacatcgacgctggggagatggtgatagaatacgctgggaacgtcatccgcagtatccagactgacaagagagaaaagtactacgattccaaggggattggttgctacatgtttaggattgacgattcagaagtggtggacgctaccatgcacggcaacgctgccagattcatcaaccactcttgcgaaccaaactgctactctcgcgtgattaatatcgacggtcagaagcatatcgttatattcgctatgcggaagatttaccgtggggaagaactgacctacgactacaagtttcctatcgaggacgcttcaaacaagctgccatgcaattgcggtgccaagaagtgcagaaagttcttgaactag

SEQ ID NO: 75287 - DNA, 11919 bp, Artificial Sequence
  derived and/or modified sequence
atggcccacagctgccgctggaggtttcctgcccggcccggcaccaccggcggcggcggcggcggcggccggcggggcctgggcggggccccccggcagagggtgcctgccctgctgctgcccccaggcccccctgtgggcggcggcggccctggggccccacccagccccccagctgtggccgctgctgctgctgctgctggcagcagcggggccggcgtgcctggaggagctgctgctgccagcgctgccagcagcagcagcgccagcagcagcagcagcagcagcagcagcgccagcagcggccctgccctgctgcgggtgggccctggctttgatgctgccctgcaggtgtctgctgccatcggcaccaacctgcggcgcttccgggctgtgtttggagagagcggcggcggcggcggcagcggggaggatgagcagttcctgggctttggaagtgatgaggaggtgcgggtgcgcagccccaccaggagccccagcgtgaagaccagccccaggaagccccggggccggcccaggagcggcagtgacagaaattctgccatcctgagtgaccccagcgtcttcagccccctgaacaagtctgagaccaagagcggggacaagatcaagaagaaggacagcaagagcattgagaagaagaggggccggccccccaccttccctggggtgaagatcaagatcacccacggcaaggacatcagcgagctgcccaagggcaacaaggaggacagcctgaagaagatcaagaggaccccatctgccaccttccagcaggccaccaagatcaagaagctgcgggccggcaagctgagccccctgaagagcaagttcaagacaggcaagctgcagatcggcaggaaaggagtgcagatcgtgagaagaagaggccggccccccagcacagagcgcatcaagacccccagcggcctgctgatcaacagcgagctggagaagccccagaaggtgaggaaggacaaggagggcaccccacccctgaccaaggaggacaagacagtggtgcggcagagcccccggcgcatcaagcctgtgcgcatcatccccagcagcaagaggacagatgccaccatcgccaagcagctgctgcagagggccaagaagggggcccagaagaagattgagaaggaggccgcccagctgcagggcaggaaggtgaagacccaggtgaagaacatccggcagttcatcatgcctgtggtgtctgccatcagcagccgcatcatcaagaccccccggcgcttcattgaagatgaggactatgacccccccatcaagatcgcccggctggagagcacccccaacagccgcttcagcgcccccagctgtggcagcagcgagaagagcagcgctgccagccagcacagcagccagatgagcagtgacagcagccgcagcagcagccccagcgtggacaccagcacagacagccaggccagcgaggagatccaggtgctgcctgaggagaggagtgacaccccagaggtgcacccccccctgcccatcagccagagcccagaaaatgaaagcaatgaccggcgcagccgccgctacagcgtgtctgagaggagctttggcagcaggaccaccaagaagctgagcaccctgcagagcgccccccagcagcagaccagcagcagccccccaccacccctgctgaccccacctccacccctgcagcctgccagcagcatcagtgaccacaccccctggctgatgccacccaccatccccctggccagccccttcctgcctgccagcacagcccccatgcagggcaagaggaagagcatcctgcgggagcccaccttccgctggaccagcctgaagcacagccgctctgagccccagtacttcagcagcgccaagtatgccaaggagggcctcatcaggaagcccatctttgacaacttccggcccccacccctgaccccagaagatgtgggctttgccagcggcttcagcgccagcggcacagctgccagcgcccggctcttcagccccctgcacagcggcaccaggtttgacatgcacaagaggagccccctgctgcgggccccccgcttcaccccatctgaggcccacagccgcatctttgagagcgtgaccctgcccagcaacagaacatctgctggcaccagcagcagtggagtgagcaacaggaagaggaagaggaaggtgttcagccccatccgctctgagcccaggagccccagccacagcatgaggaccaggagcggccgcctgagcagcagcgagctgagccccctgaccccacccagctctgtgagcagcagcctgagcatctctgtgagccccctggccaccagcgccctgaaccccaccttcaccttccccagccacagcctgacccagagcggggagagcgctgagaagaaccagaggcccaggaagcagaccagcgccccagctgagcccttcagcagcagcagccccacccccctcttcccctggttcaccccaggcagccagacagagcggggcaggaacaaggacaaggcccctgaggagctgagcaaggacagagatgctgacaagtctgtggagaaggacaagagccgggagcgggaccgggagcgggagaaggagaacaagcgggagagcaggaaggagaagaggaagaagggcagcgagatccagagcagcagcgccctgtaccctgtgggccgggtgtccaaggagaaggtggtgggagaagatgtggccaccagcagcagcgccaagaaggccactggaaggaagaagagcagcagccatgattctggaacagacatcacctctgtgaccctgggggacaccacagctgtgaagaccaagatcctgatcaagaagggccggggcaacctggagaagaccaacctggacctgggccccacagcccccagcctggagaaggagaagaccctgtgcctgagcacccccagcagcagcacagtgaagcacagcaccagcagcatcggctccatgctggcccaggccgacaagctgcccatgacagacaagagggtggccagcctgctgaagaaggccaaggcccagctgtgcaagattgagaagagcaagagcctgaagcagacagaccagcccaaggcccagggccaggagagtgacagcagcgagacctctgtgcggggcccccgcatcaagcacgtgtgcagaagagctgctgtggccctgggcaggaagagagctgtgtttcctgatgacatgcccaccctgagcgccctgccctgggaggagcgggagaagatcctgagctccatgggaaatgatgacaagagcagcattgctggctctgaagatgctgagcccctggccccacccatcaagcccatcaagcctgtgaccaggaacaaggccccccaggagccccctgtgaagaagggccgccgcagcagaagatgtggccagtgccccggctgccaggtgcctgaggactgtggggtgtgcaccaactgcctggacaagcccaagtttggaggcaggaacatcaagaagcagtgctgcaagatgaggaagtgccagaacctgcagtggatgcccagcaaggcctacctgcagaagcaggccaaggctgtgaagaagaaggagaagaagagcaagaccagcgagaagaaggacagcaaggagagctctgtggtgaagaatgtggtggacagcagccagaagcccaccccatctgcccgggaggaccctgcccccaagaagagcagcagcgagcccccacccaggaagcctgtggaggagaagtctgaggagggcaatgtgtctgcccctggccctgagagcaagcaggccaccaccccagccagcaggaagagcagcaagcaggtgtcccagcctgccctggtgatccccccccagccccccaccaccggcccccccaggaaggaggtgcccaagaccaccccatctgagcccaagaagaagcagcccccacctcctgagagcggccctgagcagagcaagcagaagaaggtggccccccggcccagcatccctgtgaagcagaagcccaaggagaaggagaagcccccacctgtgaacaagcaggagaatgccggcaccctgaacatcctgagcaccctgagcaatggaaacagcagcaagcagaagatcccagcagatggagtgcaccgcatccgggtggacttcaaggaggactgtgaggccgagaatgtgtgggagatgggcggcctgggcatcctgacctctgtgcccatcaccccccgggtggtgtgcttcctgtgtgccagcagcggccacgtggagtttgtgtactgccaggtgtgctgtgagcccttccacaagttctgcctggaggagaatgaaagacccctggaggaccagctggagaactggtgctgccgccgctgcaagttctgccacgtgtgtggccggcagcaccaggccaccaagcagctgctggagtgcaacaagtgcaggaacagctaccaccctgagtgcctgggccccaactaccccaccaagcccaccaagaagaagaaggtgtggatctgcaccaagtgtgtgcgctgcaagagctgtggcagcaccaccccaggcaagggctgggatgcccagtggagccatgacttcagcctgtgccacgactgtgccaagctgtttgccaagggcaacttctgccccctgtgtgacaagtgctatgatgatgatgattatgagagcaagatgatgcagtgtgggaaatgtgaccgctgggtgcacagcaaatgtgagaacctgtctggaacagaagatgagatgtatgagatcctgagcaacctgcctgagagcgtggcctacacctgtgtgaactgcacagagcggcaccctgctgagtggaggctggccctggagaaggagctgcagatcagcctgaagcaggtgctgacagccctgctgaacagcaggaccaccagccacctgctgcgctaccggcaggccgccaagcccccagacctgaaccctgagacagaggagagcatccccagccgcagcagccctgagggccctgacccccctgtgctgacagaggtgtccaagcaggatgaccagcagcccctggacctggagggcgtgaagaggaagatggaccagggcaactacacctctgtgctggagttcagtgatgacatcgtgaagatcatccaggccgccatcaacagtgatggcggccagcctgagatcaagaaggccaacagcatggtgaagagcttcttcatccggcagatggagagggtcttcccctggttctctgtgaagaagagccgcttctgggagcccaacaaggtgagcagcaacagcggcatgctgcccaatgctgtgctgccccccagcctggaccacaactatgcccagtggcaggagcgggaggagaacagccacacagagcagccccccctgatgaagaagatcatcccagcccccaagcccaagggccctggagagccagacagccccacccccctgcacccccccaccccacccatcctgagcacagacaggagccgggaggacagccctgagctgaaccccccacctggcatcgaggacaaccggcagtgtgccctgtgcctgacctatggagatgacagcgccaatgatgctggccgcctgctgtacatcggccagaatgagtggacccacgtgaactgtgccctgtggagcgctgaggtgtttgaagatgatgatggcagcctgaagaatgtgcacatggctgtgatccggggcaagcagctgcgctgtgagttctgccagaagccaggggccaccgtgggctgctgcctgaccagctgcaccagcaactaccacttcatgtgcagccgggccaagaactgtgtgttcctggatgacaagaaggtgtactgccagaggcaccgggacctgatcaagggggaggtggtgcctgaaaatggatttgaggtgttccggcgggtgtttgtggactttgagggcatcagcctgcggaggaagttcctgaatggcctggagcctgagaacatccacatgatgattggctccatgaccatcgactgcctgggcatcctgaatgacctgagtgactgtgaggacaagctgttccccatcggctaccagtgcagccgggtgtactggagcaccacagatgccaggaagagatgtgtgtacacctgcaagatcgtggagtgcaggcctcctgtggtggagccagacatcaacagcacagtggagcatgatgagaacagaaccatcgcccacagccccaccagcttcacagagagcagcagcaaggagagccagaacacagctgagatcatcagcccccccagcccagaccggcccccccacagccagaccagcggcagctgctactaccacgtgatcagcaaggtgccccgcatccgcacccccagctacagccccacccagaggagccctggctgccggcccctgcccagcgctggcagccccacccccaccacccatgagatcgtgacagtgggggaccccctgctgagcagcggcctgcggagcatcggcagccgccgccacagcaccagcagcctgagcccccagaggagcaagctgcgcatcatgagccccatgaggacaggcaacacctacagcaggaacaacgtgtcctctgtgtccaccactggaacagccacagacctggagagcagcgccaaggtggtggaccacgtgctgggccccctgaacagcagcaccagcctgggccagaacaccagcaccagcagcaacctgcagaggacagtggtgacagtgggcaacaagaacagccacctggatggcagcagcagcagcgagatgaagcagagcagcgccagtgacctggtgtccaagagcagcagcctgaagggggagaagaccaaggtgctgagcagcaagagcagcgagggcagcgcccacaacgtggcctacccaggcatccccaagctggccccccaggtgcacaacaccaccagccgggagctgaatgtgtccaagattggcagctttgctgagcccagctctgtgtccttcagcagcaaggaggccctgtccttcccccacctgcacctgcggggccagagaaatgaccgggaccagcacacagacagcacccagagcgccaacagcagcccagatgaggacacagaggtgaagaccctgaagctgagcggcatgagcaacagaagcagcatcatcaatgagcacatgggcagcagcagccgggaccggcggcagaagggcaagaagagctgcaaggagaccttcaaggagaagcacagcagcaagagcttcctggagcccggccaggtgaccactggagaggagggcaacctgaagccagagttcatggatgaggtgctgaccccagagtacatgggccagaggccctgcaacaacgtgtccagtgacaagatcggggacaagggcctgtccatgcctggggtgcccaaggccccacccatgcaggtggagggcagcgccaaggagctgcaggcccccaggaagaggacagtgaaggtgaccctgacccccctgaagatggagaatgaaagccagagcaagaatgccctgaaggagagcagccctgccagccccctgcagatcgagagcaccagccccacagagcccatcagcgccagcgagaaccctggagatggccctgtggcccagcccagccccaacaacaccagctgccaggacagccagagcaacaactaccagaacctgcctgtgcaggacaggaacctgatgctgcctgatggccccaagccccaggaggatggcagcttcaagaggcgctaccccaggagaagtgcccgggcccggagcaacatgttcttcggcctgacccccctgtatggagtgcgctcctatggagaggaggacatccccttctacagcagcagcacaggcaagaagaggggcaagaggtctgctgagggccaggtggatggagcagatgacctgagcaccagtgatgaagatgacctgtactactacaacttcaccaggacagtcatcagcagcggcggggaggagcggctggccagccacaacctcttccgggaggaggagcagtgtgacctgcccaagatcagccagctggatggagtggatgatggaacagaaagtgacacctctgtgacagccaccaccaggaagagcagccagatccccaagagaaatggcaaggaaaatggaacagagaacctgaagattgacagaccagaagatgctggggagaaggagcacgtgaccaagagctctgtgggccacaagaatgagcccaagatggacaactgccacagcgtgtcccgggtgaagacccagggccaggacagcctggaggcccagctgagcagcctggagagcagcagaagagtgcacaccagcacccccagcgacaagaacctgctggacacctacaacacagagctgctgaagagtgacagcgacaacaacaacagtgatgactgtggcaacatcctgcccagcgacatcatggactttgtgctgaagaacacccccagcatgcaggccctgggggagagccctgagagcagcagcagcgagctgctgaacctgggggagggcctgggcctggacagcaaccgggagaaggacatgggcctgtttgaggtgttcagccagcagctgcccaccacagagcctgtggacagctctgtgagcagcagcatctctgctgaggagcagtttgagctgcccctggagctgcccagcgacctgtctgtgctgaccaccaggagccccaccgtgcccagccagaaccccagccggctggccgtcatcagtgacagcggggagaagagggtgaccatcacagagaagtctgtggccagcagcgagagtgaccctgccctgctgagccctggggtggaccccaccccagagggccacatgaccccagaccacttcatccagggccacatggatgctgaccacatcagcagccccccctgtggctctgtggagcagggccacggcaacaaccaggacctgaccaggaacagcagcaccccaggcctgcaggtgcctgtgagccccaccgtgcccatccagaaccagaagtatgtgcccaacagcacagacagccctggccccagccagatcagcaatgctgctgtgcagaccaccccaccccacctgaagccagccacagagaagctgattgtggtgaaccagaacatgcagcccctgtatgtgctgcagaccctgcccaatggagtgacccagaagatccagctgaccagctctgtgagcagcacccccagcgtgatggagaccaacacctctgtgctgggccccatgggcggcggcctgaccctgaccaccggcctgaaccccagcctgcccaccagccagagcctcttccccagcgccagcaagggcctgctgcccatgagccaccaccagcacctgcacagcttccctgctgccacccagagcagcttcccccccaacatcagcaaccccccatctggcctgctgattggagtgcagcccccaccagacccccagctgctggtgtctgagagcagccagaggacagacctgagcaccaccgtggccacccccagcagcggcctgaagaagaggcccatcagccggctgcagaccaggaagaacaagaagctggcccccagcagcacccccagcaacatcgcccccagtgatgtggtgagcaacatgaccctcatcaacttcacccccagccagctgcccaaccaccccagcctgctggacctgggcagcctgaacaccagcagccacaggacagtgcccaacatcatcaagaggagcaagagcagcatcatgtactttgagcccgcccccctgctgccccagagcgtgggcggcacagctgccacagctgctggcaccagcaccatcagccaggacaccagccacctgaccagcggctctgtgtctggcctggccagcagcagctctgtgctgaatgtggtgtccatgcagaccaccaccacccccaccagcagcgcctctgtgcccggccacgtgaccctgaccaacccccggctgctgggcaccccagacatcggcagcatcagcaacctgctgatcaaggccagccagcagagcctgggcatccaggaccagcctgtggccctgccccccagcagcggcatgttcccccagctgggcaccagccagacccccagcacagctgccatcacagctgccagcagcatctgtgtgctgcccagcacccagaccaccggcatcacagctgccagccccagcggggaggctgatgagcactaccagctgcagcacgtgaaccagctgctggccagcaagacaggcatccacagcagccagagggacctggacagcgccagcggcccccaggtgagcaacttcacccagacagtggatgcccccaacagcatgggcctggagcagaacaaggccctgagcagcgctgtgcaggccagccccaccagccctgggggcagccccagcagccccagcagcggccagaggtctgccagccccagcgtgcccggccccaccaagcccaagcccaagaccaagcgcttccagctgcccctggacaagggaaatggcaagaagcacaaggtgagccacctgcggaccagcagcagcgaggcccacatcccagaccaggagaccaccagcctgaccagcggcaccggcaccccaggagctgaggccgagcagcaggacacagcctctgtggagcagagcagccagaaggaatgtggccagcctgctggccaggtggccgtgctgcctgaggtgcaggtgacccagaacccagccaatgagcaggagagcgctgagcccaagacagtggaggaggaggagagcaacttcagcagccccctgatgctgtggctgcagcaggagcagaagaggaaggagagcatcacagagaagaagcccaagaagggcctggtgtttgagatcagcagtgatgatggcttccagatctgtgccgagagcattgaagatgcctggaagagcctgacagacaaggtgcaggaggcccggagcaatgcccggctgaagcagctgagctttgctggggtgaatggcctgaggatgctgggcatcctgcatgatgctgtggtgttcctgattgagcagctgagcggggccaagcactgcaggaactacaagttccgcttccacaagccagaggaggccaatgaaccacccctgaacccccacggcagcgcccgggcagaggtgcacctgaggaagagcgcctttgacatgttcaacttcctggccagcaagcaccggcagcccccagagtacaaccccaatgatgaggaggaggaggaggtgcagctgaagagcgcccggcgggccacctccatggacctgcccatgcccatgaggttccgccacctgaagaagaccagcaaggaggccgtgggcgtgtaccgcagccccatccacggccggggcctcttctgcaagaggaacattgatgctggggagatggtgattgaatatgctggaaatgtcatccgcagcatccagacagacaagcgggagaagtactatgacagcaaaggaattggctgctacatgttcagaattgatgattctgaggtggtggatgccaccatgcatggaaatgctgcccgcttcatcaaccacagctgtgagcccaactgctacagcagggtcatcaacattgatggccagaagcacatcgtcatctttgccatgaggaagatctacagaggagaggagctgacctatgactacaagttccccattgaagatgccagcaacaagctgccctgcaactgtggggccaagaagtgcaggaagttcctgaactag

SEQ ID NO: 75288 - DNA, 16594 bp, Artificial Sequence
  derived and/or modified sequence
ctgcttcacttcacggggcgaacatggcgcacagctgtcggtggcgcttccccgcccgacccgggaccaccgggggcggcggcggcggggggcgccggggcctagggggcgccccgcggcaacgcgtcccggccctgctgcttccccccgggcccccggtcggcggtggcggccccggggcgcccccctcccccccggctgtggcggccgcggcggcggcggcgggaagcagcggggctggggttccagggggagcggccgccgcctcagcagcctcctcgtcgtccgcctcgtcttcgtcttcgtcatcgtcctcagcctcttcagggccggccctgctccgggtgggcccgggcttcgacgcggcgctgcaggtctcggccgccatcggcaccaacctgcgccggttccgggccgtgtttggggagagcggcgggggaggcggcagcggagaggatgagcaattcttaggttttggctcagatgaagaagtcagagtgcgaagtcccacaaggtctccttcagttaaaactagtcctcgaaaacctcgtgggagacctagaagtggctctgaccgaaattcagctatcctctcagatccatctgtgttttcccctctaaataaatcagagaccaaatctggagataagatcaagaagaaagattctaaaagtatagaaaagaagagaggaagacctcccaccttccctggagtaaaaatcaaaataacacatggaaaggacatttcagagttaccaaagggaaacaaagaagatagcctgaaaaaaattaaaaggacaccttctgctacgtttcagcaagccacaaagattaaaaaattaagagcaggtaaactctctcctctcaagtctaagtttaagacagggaagcttcaaataggaaggaagggggtacaaattgtacgacggagaggaaggcctccatcaacagaaaggataaagaccccttcgggtctcctcattaattctgaactggaaaagccccagaaagtccggaaagacaaggaaggaacacctccacttacaaaagaagataagacagttgtcagacaaagccctcgaaggattaagccagttaggattattccttcttcaaaaaggacagatgcaaccattgctaagcaactcttacagagggcaaaaaagggggctcaaaagaaaattgaaaaagaagcagctcagctgcagggaagaaaggtgaagacacaggtcaaaaatattcgacagttcatcatgcctgttgtcagtgctatctcctcgcggatcattaagacccctcggcggtttatagaggatgaggattatgaccctccaattaaaattgcccgattagagtctacaccgaatagtagattcagtgccccgtcctgtggatcttctgaaaaatcaagtgcagcttctcagcactcctctcaaatgtcttcagactcctctcgatctagtagccccagtgttgatacctccacagactctcaggcttctgaggagattcaggtacttcctgaggagcggagcgatacccctgaagttcatcctccactgcccatttcccagtccccagaaaatgagagtaatgataggagaagcagaaggtattcagtgtcggagagaagttttggatctagaacgacgaaaaaattatcaactctacaaagtgccccccagcagcagacctcctcgtctccacctccacctctgctgactccaccgccaccactgcagccagcctccagtatctctgaccacacaccttggcttatgcctccaacaatccccttagcatcaccatttttgcctgcttccactgctcctatgcaagggaagcgaaaatctattttgcgagaaccgacatttaggtggacttctttaaagcattctaggtcagagccacaatacttttcctcagcaaagtatgccaaagaaggtcttattcgcaaaccaatatttgataatttccgaccccctccactaactcccgaggacgttggctttgcatctggtttttctgcatctggtaccgctgcttcagcccgattgttttcgccactccattctggaacaaggtttgatatgcacaaaaggagccctcttctgagagctccaagatttactccaagtgaggctcactctagaatatttgagtctgtaaccttgcctagtaatcgaacttctgctggaacatcttcttcaggagtatccaatagaaaaaggaaaagaaaagtgtttagtcctattcgatctgaaccaagatctccttctcactccatgaggacaagaagtggaaggcttagtagttctgagctctcacctctcacccccccgtcttctgtctcttcctcgttaagcatttctgttagtcctcttgccactagtgccttaaacccaacttttacttttccttctcattccctgactcagtctggggaatctgcagagaaaaatcagagaccaaggaagcagactagtgctccggcagagccattttcatcaagtagtcctactcctctcttcccttggtttaccccaggctctcagactgaaagagggagaaataaagacaaggcccccgaggagctgtccaaagatcgagatgctgacaagagcgtggagaaggacaagagtagagagagagaccgggagagagaaaaggagaataagcgggagtcaaggaaagagaaaaggaaaaagggatcagaaattcagagtagttctgctttgtatcctgtgggtagggtttccaaagagaaggttgttggtgaagatgttgccacttcatcttctgccaaaaaagcaacagggcggaagaagtcttcatcacatgattctgggactgatattacttctgtgactcttggggatacaacagctgtcaaaaccaaaatacttataaagaaagggagaggaaatctggaaaaaaccaacttggacctcggcccaactgccccatccctggagaaggagaaaaccctctgcctttccactccttcatctagcactgttaaacattccacttcctccataggctccatgttggctcaggcagacaagcttccaatgactgacaagagggttgccagcctcctaaaaaaggccaaagctcagctctgcaagattgagaagagtaagagtcttaaacaaaccgaccagcccaaagcacagggtcaagaaagtgactcatcagagacctctgtgcgaggaccccggattaaacatgtctgcagaagagcagctgttgcccttggccgaaaacgagctgtgtttcctgatgacatgcccaccctgagtgccttaccatgggaagaacgagaaaagattttgtcttccatggggaatgatgacaagtcatcaattgctggctcagaagatgctgaacctcttgctccacccatcaaaccaattaaacctgtcactagaaacaaggcaccccaggaacctccagtaaagaaaggacgtcgatcgaggcggtgtgggcagtgtcccggctgccaggtgcctgaggactgtggtgtttgtactaattgcttagataagcccaagtttggtggtcgcaatataaagaagcagtgctgcaagatgagaaaatgtcagaatctacaatggatgccttccaaagcctacctgcagaagcaagctaaagctgtgaaaaagaaagagaaaaagtctaagaccagtgaaaagaaagacagcaaagagagcagtgttgtgaagaacgtggtggactctagtcagaaacctaccccatcagcaagagaggatcctgccccaaagaaaagcagtagtgagcctcctccacgaaagcccgtcgaggaaaagagtgaagaagggaatgtctcggcccctgggcctgaatccaaacaggccaccactccagcttccaggaagtcaagcaagcaggtctcccagccagcactggtcatcccgcctcagccacctactacaggaccgccaagaaaagaagttcccaaaaccactcctagtgagcccaagaaaaagcagcctccaccaccagaatcaggtccagagcagagcaaacagaaaaaagtggctccccgcccaagtatccctgtaaaacaaaaaccaaaagaaaaggaaaaaccacctccggtcaataagcaggagaatgcaggcactttgaacatcctcagcactctctccaatggcaatagttctaagcaaaaaattccagcagatggagtccacaggatcagagtggactttaaggaggattgtgaagcagaaaatgtgtgggagatgggaggcttaggaatcttgacttctgttcctataacacccagggtggtttgctttctctgtgccagtagtgggcatgtagagtttgtgtattgccaagtctgttgtgagcccttccacaagttttgtttagaggagaacgagcgccctctggaggaccagctggaaaattggtgttgtcgtcgttgcaaattctgtcacgtttgtggaaggcaacatcaggctacaaagcagctgctggagtgtaataagtgccgaaacagctatcaccctgagtgcctgggaccaaactaccccaccaaacccacaaagaagaagaaagtctggatctgtaccaagtgtgttcgctgtaagagctgtggatccacaactccaggcaaagggtgggatgcacagtggtctcatgatttctcactgtgtcatgattgcgccaagctctttgctaaaggaaacttctgccctctctgtgacaaatgttatgatgatgatgactatgagagtaagatgatgcaatgtggaaagtgtgatcgctgggtccattccaaatgtgagaatctttcaggtacagaagatgagatgtatgagattctatctaatctgccagaaagtgtggcctacacttgtgtgaactgtactgagcggcaccctgcagagtggcgactggcccttgaaaaagagctgcagatttctctgaagcaagttctgacagctttgttgaattctcggactaccagccatttgctacgctaccggcaggctgccaagcctccagacttaaatcccgagacagaggagagtataccttcccgcagctcccccgaaggacctgatccaccagttcttactgaggtcagcaaacaggatgatcagcagcctttagatctagaaggagtcaagaggaagatggaccaagggaattacacatctgtgttggagttcagtgatgatattgtgaagatcattcaagcagccattaattcagatggaggacagccagaaattaaaaaagccaacagcatggtcaagtccttcttcattcggcaaatggaacgtgtttttccatggttcagtgtcaaaaagtccaggttttgggagccaaataaagtatcaagcaacagtgggatgttaccaaacgcagtgcttccaccttcacttgaccataattatgctcagtggcaggagcgagaggaaaacagccacactgagcagcctcctttaatgaagaaaatcattccagctcccaaacccaaaggtcctggagaaccagactcaccaactcctctgcatcctcctacaccaccaattttgagtactgataggagtcgagaagacagtccagagctgaacccacccccaggcatagaagacaatagacagtgtgcgttatgtttgacttatggtgatgacagtgctaatgatgctggtcgtttactatatattggccaaaatgagtggacacatgtaaattgtgctttgtggtcagcggaagtgtttgaagatgatgacggatcactaaagaatgtgcatatggctgtgatcaggggcaagcagctgagatgtgaattctgccaaaagccaggagccaccgtgggttgctgtctcacatcctgcaccagcaactatcacttcatgtgttcccgagccaagaactgtgtctttctggatgataaaaaagtatattgccaacgacatcgggatttgatcaaaggcgaagtggttcctgagaatggatttgaagttttcagaagagtgtttgtggactttgaaggaatcagcttgagaaggaagtttctcaatggcttggaaccagaaaatatccacatgatgattgggtctatgacaatcgactgcttaggaattctaaatgatctctccgactgtgaagataagctctttcctattggatatcagtgttccagggtatactggagcaccacagatgctcgcaagcgctgtgtatatacatgcaagatagtggagtgccgtcctccagtcgtagagccggatatcaacagcactgttgaacatgatgaaaacaggaccattgcccatagtccaacatcttttacagaaagttcatcaaaagagagtcaaaacacagctgaaattataagtcctccatcaccagaccgacctcctcattcacaaacctctggctcctgttattatcatgtcatctcaaaggtccccaggattcgaacacccagttattctccaacacagagatcccctggctgtcgaccgttgccttctgcaggaagtcctaccccaaccactcatgaaatagtcacagtaggtgatcctttactctcctctggacttcgaagcattggctccaggcgtcacagtacctcttccttatcaccccagcggtccaaactccggataatgtctccaatgagaactgggaatacttactctaggaataatgtttcctcagtctccaccaccgggaccgctactgatcttgaatcaagtgccaaagtagttgatcatgtcttagggccactgaattcaagtactagtttagggcaaaacacttccacctcttcaaatttgcaaaggacagtggttactgtaggcaataaaaacagtcacttggatggatcttcatcttcagaaatgaagcagtccagtgcttcagacttggtgtccaagagctcctctttaaagggagagaagaccaaagtgctgagttccaagagctcagagggatctgcacataatgtggcttaccctggaattcctaaactggccccacaggttcataacacaacatctagagaactgaatgttagtaaaatcggctcctttgctgaaccctcttcagtgtcgttttcttctaaagaggccctctccttcccacacctccatttgagagggcaaaggaatgatcgagaccaacacacagattctacccaatcagcaaactcctctccagatgaagatactgaagtcaaaaccttgaagctatctggaatgagcaacagatcatccattatcaacgaacatatgggatctagttccagagataggagacagaaagggaaaaaatcctgtaaagaaactttcaaagaaaagcattccagtaaatcttttttggaacctggtcaggtgacaactggtgaggaaggaaacttgaagccagagtttatggatgaggttttgactcctgagtatatgggccaacgaccatgtaacaatgtttcttctgataagattggtgataaaggcctttctatgccaggagtccccaaagctccacccatgcaagtagaaggatctgccaaggaattacaggcaccacggaaacgcacagtcaaagtgacactgacacctctaaaaatggaaaatgagagtcaatccaaaaatgccctgaaagaaagtagtcctgcttcccctttgcaaatagagtcaacatctcccacagaaccaatttcagcctctgaaaatccaggagatggtccagtggcccaaccaagccccaataatacctcatgccaggattctcaaagtaacaactatcagaatcttccagtacaggacagaaacctaatgcttccagatggccccaaacctcaggaggatggctcttttaaaaggaggtatccccgtcgcagtgcccgtgcacgttctaacatgttttttgggcttaccccactctatggagtaagatcctatggtgaagaagacattccattctacagcagctcaactgggaagaagcgaggcaagagatcagctgaaggacaggtggatggggccgatgacttaagcacttcagatgaagacgacttatactattacaacttcactagaacagtgatttcttcaggtggagaggaacgactggcatcccataatttatttcgggaggaggaacagtgtgatcttccaaaaatctcacagttggatggtgttgatgatgggacagagagtgatactagtgtcacagccacaacaaggaaaagcagccagattccaaaaagaaatggtaaagaaaatggaacagagaacttaaagattgatagacctgaagatgctggggagaaagaacatgtcactaagagttctgttggccacaaaaatgagccaaagatggataactgccattctgtaagcagagttaaaacacagggacaagattccttggaagctcagctcagctcattggagtcaagccgcagagtccacacaagtaccccctccgacaaaaatttactggacacctataatactgagctcctgaaatcagattcagacaataacaacagtgatgactgtgggaatatcctgccttcagacattatggactttgtactaaagaatactccatccatgcaggctttgggtgagagcccagagtcatcttcatcagaactcctgaatcttggtgaaggattgggtcttgacagtaatcgtgaaaaagacatgggtctttttgaagtattttctcagcagctgcctacaacagaacctgtggatagtagtgtctcttcctctatctcagcagaggaacagtttgagttgcctctagagctaccatctgatctgtctgtcttgaccacccggagtcccactgtccccagccagaatcccagtagactagctgttatctcagactcaggggagaagagagtaaccatcacagaaaaatctgtagcctcctctgaaagtgacccagcactgctgagcccaggagtagatccaactcctgaaggccacatgactcctgatcattttatccaaggacacatggatgcagaccacatctctagccctccttgtggttcagtagagcaaggtcatggcaacaatcaggatttaactaggaacagtagcacccctggccttcaggtacctgtttccccaactgttcccatccagaaccagaagtatgtgcccaattctactgatagtcctggcccgtctcagatttccaatgcagctgtccagaccactccaccccacctgaagccagccactgagaaactcatagttgttaaccagaacatgcagccactttatgttctccaaactcttccaaatggagtgacccaaaaaatccaattgacctcttctgttagttctacacccagtgtgatggagacaaatacttcagtattgggacccatgggaggtggtctcacccttaccacaggactaaatccaagcttgccaacttctcaatctttgttcccttctgctagcaaaggattgctacccatgtctcatcaccagcacttacattccttccctgcagctactcaaagtagtttcccaccaaacatcagcaatcctccttcaggcctgcttattggggttcagcctcctccggatccccaacttttggtttcagaatccagccagaggacagacctcagtaccacagtagccactccatcctctggactcaagaaaagacccatatctcgtctacagacccgaaagaataaaaaacttgctccctctagtaccccttcaaacattgccccttctgatgtggtttctaatatgacattgattaacttcacaccctcccagcttcctaatcatccaagtctgttagatttggggtcacttaatacttcatctcaccgaactgtccccaacatcataaaaagatctaaatctagcatcatgtattttgaaccggcacccctgttaccacagagtgtgggaggaactgctgccacagcggcaggcacatcaacaataagccaggatactagccacctcacatcagggtctgtgtctggcttggcatccagttcctctgtcttgaatgttgtatccatgcaaactaccacaacccctacaagtagtgcgtcagttccaggacacgtcaccttaaccaacccaaggttgcttggtaccccagatattggctcaataagcaatcttttaatcaaagctagccagcagagcctggggattcaggaccagcctgtggctttaccgccaagttcaggaatgtttccacaactggggacatcacagaccccctctactgctgcaataacagcggcatctagcatctgtgtgctcccctccactcagactacgggcataacagccgcttcaccttctggggaagcagacgaacactatcagcttcagcatgtgaaccagctccttgccagcaaaactgggattcattcttcccagcgtgatcttgattctgcttcagggccccaggtatccaactttacccagacggtagacgctcctaatagcatgggactggagcagaacaaggctttatcctcagctgtgcaagccagccccacctctcctgggggttctccatcctctccatcttctggacagcggtcagcaagcccttcagtgccgggtcccactaaacccaaaccaaaaaccaaacggtttcagctgcctctagacaaagggaatggcaagaagcacaaagtttcccatttgcggaccagttcttctgaagcacacattccagaccaagaaacgacatccctgacctcaggcacagggactccaggagcagaggctgagcagcaggatacagctagcgtggagcagtcctcccagaaggagtgtgggcaacctgcagggcaagtcgctgttcttccggaagttcaggtgacccaaaatccagcaaatgaacaagaaagtgcagaacctaaaacagtggaagaagaggaaagtaatttcagctccccactgatgctttggcttcagcaagaacaaaagcggaaggaaagcattactgagaaaaaacccaagaaaggacttgtttttgaaatttccagtgatgatggctttcagatctgtgcagaaagtattgaagatgcctggaagtcattgacagataaagtccaggaagctcgatcaaatgcccgcctaaagcagctctcatttgcaggtgttaacggtttgaggatgctggggattctccatgatgcagttgtgttcctcattgagcagctgtctggtgccaagcactgtcgaaattacaaattccgtttccacaagccagaggaggccaatgaaccccccttgaaccctcacggctcagccagggctgaagtccacctcaggaagtcagcatttgacatgtttaacttcctggcttctaaacatcgtcagcctcctgaatacaaccccaatgatgaagaagaggaggaggtacagctgaagtcagctcggagggcaactagcatggatctgccaatgcccatgcgcttccggcacttaaaaaagacttctaaggaggcagttggtgtctacaggtctcccatccatggccggggtcttttctgtaagagaaacattgatgcaggtgagatggtgattgagtatgccggcaacgtcatccgctccatccagactgacaagcgggaaaagtattacgacagcaagggcattggttgctatatgttccgaattgatgactcagaggtagtggatgccaccatgcatggaaatgctgcacgcttcatcaatcactcgtgtgagcctaactgctattctcgggtcatcaatattgatgggcagaagcacattgtcatctttgccatgcgtaagatctaccgaggagaggaactcacttacgactataagttccccattgaggatgccagcaacaagctgccctgcaactgtggcgccaagaaatgccggaagttcctaaactaaagctgctcttctcccccagtgttggagtgcaaggaggcggggccatccaaagcaacgctgaaggccttttccagcagctgggagctcccggattgcgtggcacagctgaggggcctctgtgatggctgagctctcttatgtcctatactcacatcagacatgtgatcatagtcccagagacagagttgaggtctcgaagaaaagatccatgatcggctttctcctggggcccctccaattgtttactgttagaaagtgggaatggggtccctagcagacttgcctggaaggagcctattatagagggttggttatgttgggagattgggcctgaatttctccacagaaataagttgccatcctcaggttggccctttcccaagcactgtaagtgagtgggtcaggcaaagccccaaatggagggttggttagattcctgacagtttgccagccaggccccacctacagcgtctgtcgaacaaacagaggtctggtggttttccctactatcctcccactcgagagttcacttctggttgggagacaggattcctagcacctccggtgtcaaaaggctgtcatggggttgtgccaattaattaccaaacattgagcctgcaggctttgagtgggagtgttgcccccaggagccttatctcagccaattacctttcttgacagtaggagcggcttccctctcccattccctcttcactcccttttcttcctttcccctgtcttcatgccactgctttcccatgcttctttcgggttgtaggggagactgactgcctgctcaaggacactccctgctgggcataggatgtgcctgcaaaaagttccctgagcctgtaagcactccaggtggggaagtggacaggagccattggtcataaccagacagaatttggaaacattttcataaagctccatggagagttttaaagaaacatatgtagcatgattttgtaggagaggaaaaagattatttaaataggatttaaatcatgcaacaacgagagtatcacagccaggatgacccttgggtcccattcctaagacatggttactttattttccccttgttaagacataggaagacttaatttttaaacggtcagtgtccagttgaaggcagaacactaatcagatttcaaggcccacaacttggggactagaccaccttatgttgagggaactctgccacctgcgtgcaacccacagctaaagtaaattcaatgacactactgccctgattactccttaggatgtggtcaaaacagcatcaaatgtttcttctcttcctttccccaagacagagtcctgaacctgttaaattaagtcattggattttactctgttctgtttacagtttactatttaaggttttataaatgtaaatatattttgtatatttttctatgagaagcacttcatagggagaagcacttatgacaaggctattttttaaaccgcggtattatcctaatttaaaagaagatcggtttttaataattttttattttcataggatgaagttagagaaaatattcagctgtacacacaaagtctggtttttcctgcccaacttccccctggaaggtgtactttttgttgtttaatgtgtagcttgtttgtgccctgttgacataaatgtttcctgggtttgctctttgacaataaatggagaaggaaggtcacccaactccattgggccactcccctccttcccctattgaagctcctcaaaaggctacagtaatatcttgatacaacagattctcttctttcccgcctctctcctttccggcgcaacttccagagtggtgggagacggcaatctttacatttccctcatctttcttacttcagagttagcaaacaacaagttgaatggcaacttgacatttttgcatcaccatctgcctcataggccactctttcctttccctctgcccaccaagtcctcatatctgcagagaacccattgatcaccttgtgccctcttttggggcagcctgttgaaactgaagcacagtctgaccactcacgataaagcagatttttctctgcctctgccacaaggtttcagagtagtgtagtccaagtagagggtggggcacccttttctcgccgcaagaagcccattcctatggaagtctagcaaagcaatacgactcagcccagcactctctgccccaggactcatggctctgctgtgccttccatcctgggctcccttctctcctgtgaccttaagaactttgtctggtggctttgctggaacattgtcactgttttcactgtcatgcagggagcccagcactgtggccaggatggcagagacttccttgtcatcatggagaagtgccagcaggggactgggaaaagcactctacccagacctcacctcccttcctccttttgcccatgaacaagatgcagtggccctaggggttccactagtgtctgctttcctttattattgcactgtgtgaggtttttttgtaaatccttgtattcctattttttttaaagaaaaaaaaaaaaccttaagctgcatttgttactgaaatgattaatgcactgatgggtcctgaattcaccttgagaaagacccaaaggccagtcagggggtggggggaactcagctaaatagacctagttactgccctgctaggccatgctgtactgtgagcccctcctcactctctaccaaccctaaaccctgaggacaggggaggaacccacagcttccttctcctgccagctgcagatggtttgccttgcctttccaccccctaattgtcaaccacaaaaatgagaaattcctcttctagctcagccttgagtccattgccaaattttcagcacacctgccagcaacttgggggaataagcgaaggtttccctacaagagggaaagaaggcaaaaacggcacagctatctccaaacacatctgagttcatttcaaaagtgaccaagggaatctccgcacaaaagtgcagattgaggaattgtgatgggtcattcccaagaatcccccaaggggcatcccaaatccctgaggagtaacagctgcaaacctggtcagttctcagtgagagccagctcacttatagctttgctgctagaacctgttgtggctgcatttcctggtggccagtgacaactgtgtaaccagaatagctgcatggcgctgaccctttggccggaacttggtctcttggctccctccttggccacccaccacctctcgcacagcccctctgtttttacaccaataacaagaattaagggggaagccctggcagctatacgttttcaaccagactcctttgccgggacccagcccgccaccctgctcgcctccgtcaaacccccggccaatgcagtgagcaccatgtagctcccttgatttaaaaaaaataaaaaataaaaaaaaaaggaaaaaaaaatacaacacacacacaaaaataaaaaaaatattctaatgaatgtatctttctaaaggactgacgttcaatcaaatatctgaaaatactaaaggtcaaaaccttgtcagatgttaacttctaagttcggtttgggattttttttttttaatagaaatcaagttgtttttgtttttaaggaaaagcgggtcattgcaaagggctgggtgtaattttatgtttcatttccttcattttaaagcaatacaaggttatggagcagatggttttgtgccgaatcatgaatactagtcaagtcacacactctggaaacttgcaactttttgtttgttttggttttcaaataaatataaatatgatatatataggaactaatatagtaatgcaccatgtaacaaagcctagttcagtccatggcttttaattctcttaacactatagataaggattgtgttacagttgctagtagcggcaggaagatgtcaggctcactttcctctgattcccgaaatggggggaacctctaaccataaaggaatggtagaacagtccattcctcggatcagagaaaaatgcagacatggtgtcacctggatttttttctgcccatgaatgttgccagtcagtacctgtcctccttgtttctctatttttggttatgaatgttggggttaccacctgcatttaggggaaaattgtgttctgtgctttcctggtatcttgttccgaggtactctagttctgtctttcaaccaagaaaatagaattgtggtgtttcttttattgaacttttaacagtctctttagtaaatacaggtagttgaataattgtttcaagagctcaacagatgacaagcttcttttctagaaataagacattttttgacaactttatcatgtataacagatctgttttttttccttgtgttcttccaagcttctggttagagaaaaagagaaaaaaaaaaaaggaaaatgtgtctaaagtccatcagtgttaactccctgtgacagggatgaaggaaaatactttaatagttcaaaaaataataatgctgaaagctctctacgaaagactgaatgtaaaagtaaaaagtgtacatagttgtaaaaaaaaggagtttttaaacatgtttattttctatgcacttttttttatttaagtgatagtttaattaataaacatgtcaagttta

SEQ ID NO: 75289 - DNA, 11919 bp, Artificial Sequence
  derived and/or modified sequence
atggcccacagctgccggtggcggttccccgcccggcccggcaccactggaggtggaggaggcgggggtaggaggggcctgggcggagcccctcgacagagggtgccagctctgcttctccctcccggccctccggtcggaggcggcgggcccggggcacccccctctccgcccgccgtggccgccgccgcggctgccgcgggttcatcgggagcgggtgtgcctggcggagccgctgccgcaagcgccgccagcagctcaagcgcatcttcttcatccagctcaagctcctccgcatcctcaggccccgccttgctgagagttggcccgggcttcgacgccgcgttgcaggtgtctgcagcgatcggaactaaccttaggaggttccgcgctgtgttcggcgaaagtggcggtggaggaggctctggtgaggacgaacagtttcttggtttcggctccgacgaagaagttcgcgtacgatcacccactaggagcccgtccgtgaagacctcacccagaaagccgaggggccggcccagaagcggatccgacagaaatagtgcaatcctgagcgacccatccgtgtttagccctctcaacaagagtgagaccaagagtggcgacaaaattaaaaagaaggatagtaagtctattgaaaagaaacgaggccggccacctacatttcccggagtcaagatcaagattacgcacggcaaggatatctctgaattacccaagggaaacaaggaggatagccttaagaaaattaagcggacaccaagtgccactttccagcaggccaccaagattaagaaactacgcgctggaaaactctctcccctgaaaagcaaattcaaaaccggaaaacttcagattggcagaaagggagtgcagatcgtgcgcagacgtggccgacctccgtcaacagagagaatcaagacaccttccgggctcttaatcaattccgaactcgagaaaccacagaaggtgcgtaaggataaggaggggaccccacccctcactaaggaggacaaaaccgtggtgaggcagtctccaaggcggattaagccggtccggattataccatcttctaagcgcactgatgctaccattgccaaacagctgctacagagggccaagaagggagcccagaagaaaattgagaaagaggcagctcaactgcagggccggaaagtgaagactcaagtgaagaatattcgccagttcataatgcccgtggtctccgctatcagttcccgcatcattaagaccccccgccggtttatcgaggacgaggattacgacccccccattaagatcgcccgattggagtctactcctaactcaagattttcagcgcccagttgtggctcaagcgagaaatcgagcgcagccagccagcactccagccagatgagtagtgatagcagtcggtccagttctccatctgtcgatacatctaccgacagtcaggcttctgaggaaatacaggtactgccggaagaaaggagcgataccccggaagtgcatccccctttacctatttcccagtctcctgagaacgagtcaaatgacaggaggagcagacggtactccgttagcgaacggtcgtttggcagccggaccactaaaaaactgagcacactgcaatccgctccacagcagcagactagttcatcaccccctcctcccttactgacgcctccgccacctcttcagccagcatctagtatctccgatcacacgccctggctgatgcctccaactattcccctggcctcaccttttctgcctgcaagcactgctcccatgcaagggaaaagaaagagcatcctgcgtgaaccaacttttaggtggactagtctcaaacactcgcgttcagagccccagtatttcagtagtgcaaaatatgcgaaggagggattaattagaaagcctatatttgacaattttcggcctcctccgttgactcctgaggacgtgggtttcgcaagtgggtttagcgcttccggcacagcagcttccgcccgtctattctcacctctccattcaggcacccgcttcgacatgcacaaaagaagtcctcttctgcgtgcgcccagattcactccaagtgaggcacacagtcgtatctttgagtccgtaacgctgccctctaaccgaaccagcgctgggacttcaagtagcggcgtgagtaatcgcaaaaggaaacgaaaggtgttttccccaatccgtagtgaacctcggtcccctagtcactctatgagaactcgctctggacggctctctagctcggaattgtctcccctgaccccaccctcctctgtctcctcctcgctgtcaatttccgtctcacctctggccacttctgcccttaatccaacattcacattcccatcacatagcctgacgcagtccggtgagagcgcggagaaaaatcagcggcccagaaaacagacttcagctccagcagagccattctccagtagttccccaacacccctcttcccctggttcacccccggctctcaaaccgagagaggccgaaataaggacaaagcacccgaggaactttccaaagatcgggatgccgataaatctgtagagaaggacaagtcaagggagcgagaccgggagcgtgaaaaagagaacaagcgtgagtcccggaaagaaaagaggaagaaggggagcgagattcaatcttctagtgctctgtatcctgtcggtcgggtctcaaaagaaaaagtagtaggggaggatgtggccactagcagttcggccaaaaaggctacaggaaggaagaaatccagctcacacgacagcggaacggatataacctccgtcactctgggcgataccaccgcggtgaagaccaaaattctgatcaaaaaaggccgtgggaacttggagaagacgaatctcgatctcgggcctaccgcccctagtctggaaaaggaaaaaactctgtgtctttccacccctagctcttccacagtgaagcacagtaccagtagcataggctcaatgctcgcacaggcagacaaactccccatgactgacaaacgggttgcatcccttctcaaaaaggccaaggctcagctatgcaagatcgagaagtcaaagtcgcttaaacaaacagaccagcctaaagcccagggccaagagagcgacagtagtgaaacgtccgtgagaggtccgcggatcaaacacgtttgtcgtagagcggccgtagcactcggtaggaaaagggcagtttttcccgacgatatgccaaccctgagcgcactcccgtgggaagaaagagagaagattttatcttctatggggaatgacgataaaagttctatcgccggatctgaggacgctgaaccactggccccacctatcaagccaatcaaacccgtgacccggaacaaggctccccaggaacccccagtcaagaaagggcgtcggtccagacggtgcgggcagtgtcccgggtgccaggtcccagaggactgtggggtctgcactaactgcctggataaaccaaagttcggaggcagaaacatcaaaaagcagtgttgtaagatgagaaagtgccagaatttacagtggatgccctccaaggcatatcttcaaaagcaggccaaggctgtaaagaagaaggagaaaaaatcaaaaacaagtgaaaaaaaagacagtaaagagtcaagcgtggtaaagaatgtcgtcgatagttcacaaaagcccaccccgtctgcaagggaagacccggcgcccaagaagtcaagttccgagccccctcctaggaaaccagtcgaagagaagtctgaggaaggcaacgtcagtgcccctgggcccgaaagtaagcaagccactaccccagcaagtcgcaagagtagcaagcaggtttcccaacctgcgctcgtcatccctccccaacctccaaccaccggacctccccgaaaagaggtacctaagacaaccccatcggagccgaaaaaaaagcaacctccgccccctgaaagtgggcccgaacagtctaagcagaagaaggtcgcgcccagacctagcattccagtgaagcagaagcccaaggaaaaggagaaacctccccctgttaacaagcaagagaacgcgggtaccctgaacatcctgtccacgctgtctaacggcaattctagcaagcaaaagatccccgccgatggcgtgcaccgcatcagagttgattttaaagaggactgcgaggccgaaaacgtatgggagatgggaggactaggaatcttaacttcagttcccatcactcccagagtggtgtgtttcctgtgcgccagctcgggtcatgtggagttcgtgtattgtcaggtgtgctgtgagcctttccataaattttgtttagaggagaatgagagaccactggaggatcagcttgagaactggtgttgcagaagatgcaaattctgccatgtatgcgggcgacagcaccaggccacaaagcagctgctagaatgtaataagtgtcgtaacagctaccaccctgagtgtctgggccctaattaccccacaaaaccaactaagaagaagaaagtctggatctgtaccaagtgtgtccggtgcaagagctgcggttccacaacacccgggaagggctgggatgcgcagtggtcacacgacttttctctctgccacgattgcgccaaactatttgccaaggggaatttttgtccactgtgtgataagtgctatgatgacgatgactacgaatcaaaaatgatgcagtgtggtaagtgtgacagatgggtccacagtaagtgtgaaaaccttagcggaaccgaggacgagatgtacgagatcctgtctaacctacctgagtctgtcgcgtacacatgcgtaaattgtacagaacgccatcctgccgaatggaggcttgccctggaaaaggaacttcagatttccctgaaacaggtgttgaccgcattgctgaattcacgaaccacgtcccaccttttgaggtatcggcaggctgcaaagcctccagatctgaaccctgagaccgaagagtctatccccagtagatcctccccggagggccccgaccccccagttctcacggaagtgtccaaacaggatgatcagcagccgctggatctggagggcgtgaagaggaaaatggaccaaggaaattacacatccgtgctggaattctccgacgatattgtcaaaatcatacaggccgccatcaactccgacggtggtcagcccgaaataaagaaagcgaacagcatggtgaagagcttttttatccgtcagatggagcgggtttttccctggttttctgtaaaaaagtcccgcttctgggaacccaacaaggtcagctctaattctggaatgctcccaaatgccgtactgcctccaagcctggaccacaattacgcccagtggcaagagcgggaggaaaacagccatactgaacaaccgccactgatgaagaaaataatccccgccccaaaacccaagggccctggtgaacctgactcgccaaccccgctgcatccaccaacaccacccattctgagcacggatcgctctagagaagatagtcccgagcttaacccacctcctggtattgaagataacagacagtgtgccctatgtcttacatacggggacgacagcgcaaacgacgctggacggttgttgtacattgggcagaacgagtggacgcatgttaactgcgcgttgtggtcagccgaggtattcgaagatgacgacggaagtttgaagaacgtgcatatggctgtcatacgggggaagcagctgagatgcgagttctgccagaaacccggtgccactgtcggctgctgtttaacctcatgtacctcgaattatcatttcatgtgttctagagcgaaaaactgcgtgttcctcgatgataagaaggtgtattgccagcggcatcgcgatctgatcaagggcgaagtcgttccggagaacggcttcgaagtttttaggagagtgtttgtggactttgaagggatttcactgaggagaaagtttcttaatgggttggaacccgaaaacatccatatgatgatcggcagtatgacaatcgattgcctgggtatcctgaacgacctgtccgattgcgaggacaaactctttcctatcggctaccagtgttcaagagtgtattggtctacaactgatgctaggaagagatgcgtttatacttgcaagatcgtggagtgccgcccaccagtggtggagcccgatatcaattctactgtggaacacgacgagaaccgcacaattgcacacagtccgacaagtttcacagaatcttcaagtaaggagtcacagaatactgcggagatcatcagtccaccatcgcctgaccggcccccccatagccagacctctggttcttgctattatcacgtcatcagtaaggtgccacggattcgcacaccttcctattcaccaacacagcgtagcccaggttgtcgtcccctccctagcgctggatcacccacaccaactacccacgaaattgtgacagtcggagatccgcttttgagttctgggctccgatcaatcggcagtcggaggcactcaacttcatctctgagccctcagcgatccaagctcaggattatgagccctatgaggactgggaatacctactcaaggaataacgtcagtagcgtcagcacgaccggaactgccacggatctggaatcctcagctaaagtggtggatcatgtgctgggcccgctgaactcatccacttctcttggtcaaaacacatccacaagttcaaatctccagaggactgtggtgactgtcgggaataaaaatagccacttggacgggagttcatcctccgaaatgaagcagtcgtccgccagcgacctggttagcaagtcaagcagcctaaaaggtgagaagacgaaggtcctttccagcaagtccagcgaggggtctgctcacaacgtcgcctaccccggcatcccaaaattggccccccaagtgcacaacaccacttcccgcgagctcaatgtgagtaagatcgggagttttgcggagccctctagcgtcagcttcagcagtaaggaggcgctgagttttccccacctgcatctacgcggtcagagaaacgacagggaccagcacaccgacagtacgcaatcagcaaacagttccccggacgaagatactgaagtgaaaaccttgaagctgagcggcatgagcaacagaagctccatcattaatgagcacatggggagtagttctagggacaggcgccaaaaaggtaaaaaaagctgcaaggaaactttcaaggagaagcacagttccaagtccttcctcgaacccgggcaggtcacaaccggagaggagggcaatcttaagccagagttcatggacgaggtactaacacctgagtatatgggccagagaccatgtaataatgtaagcagtgacaagatcggcgacaagggcctttccatgccaggagtgccgaaagccccaccaatgcaggtcgagggaagcgctaaggagctgcaggctccgagaaaacgcacagtcaaagtgacacttactcccctgaaaatggagaatgagtcacaaagcaagaacgcactaaaggagtcgagcccagcttccccattgcagatagagagcactagccccaccgaacccatcagcgcctccgaaaacccgggggatggcccagtagcacagccctcccccaacaacacctcctgtcaggactcacagtctaacaactaccagaacctgcccgtgcaggaccgcaacctgatgctgcctgacggacccaagcctcaggaggatggctctttcaagcggcgttacccccgacgatcagctcgcgctcgaagtaacatgtttttcggcctcacccccctctacggggtgcgatcctatggagaggaggatataccattttattcctcttccaccggaaaaaaacgcggcaagcgctcagccgagggccaggtcgatggtgccgatgacctgtcaactagcgatgaggacgatctgtactattataactttacaagaacggtgatttcctccgggggagaagagcgactcgccagtcataacttattccgcgaagaagaacagtgtgatttacctaagatcagtcagttagacggggtagatgacggtacagagtccgatactagcgtcacagccacaacccggaagagctcacagattccaaagcggaatggcaaagagaacggaactgagaacttgaagatcgatcgacccgaggacgcgggcgagaaagagcacgtgaccaagagctctgtgggccataaaaacgaaccaaaaatggacaactgccactctgtgtctagggtcaaaacgcagggtcaagattctctcgaggcacagctgagtagtctcgagagtagtagacgcgtgcacacctcaacacccagcgataagaatttgctggacacatataacactgagttgttgaaatccgattctgataacaacaatagcgatgattgcgggaatatactgccctcagacataatggactttgttttaaaaaatactccttcaatgcaggctttaggagaatcacctgaatcatcaagttcagaactgctgaatcttggggagggcttgggcctggactccaaccgagaaaaggacatgggtctgttcgaagtgtttagccagcagctgcccacaacagaacccgtagattcctccgtatccagttctatctccgctgaagagcagttcgagctgccattagagctgccttccgatctcagcgtcctgacaaccaggtcccccactgtgccctcacagaatccttctcggctcgcagtgatcagcgactcaggtgaaaagcgggttacaattacggaaaagtcagtcgccagttccgaatctgacccagccttgctgtctcctggcgttgatcccacgccagagggacatatgacaccagatcatttcatccagggtcacatggacgctgatcacatatcttcccctccctgcggatcggtcgagcaggggcacggcaataaccaagacctcacgagaaattcatctacacccggactgcaggttccggtctctcccacagtgcccatccaaaaccagaaatacgttcccaacagcactgacagccctggtcccagccaaatctcaaatgcagccgtacagaccacccccccgcacctgaagcctgccacagagaagttgatcgtcgttaatcagaacatgcagcccttgtatgtcctccagactctgcctaacggggtcacgcagaaaatccagctcacttctagcgtgtcctctacaccttcggtgatggagaccaacacatctgtgctgggaccaatgggtggtggacttactcttactacgggactgaacccatccctgccaacctcacagagcctttttccttctgccagcaaaggactgctcccaatgtcccaccatcaacacctgcactcatttcccgccgccactcagagctcctttccacccaatatttccaatccgccttcaggactgctcattggtgtgcagcctccaccggacccccaacttctggtgtctgaatcctctcagaggaccgatctaagtaccaccgtggccaccccttcgtcggggctcaaaaaacgacctatcagcagattacaaacacgtaaaaacaagaagctcgctccaagctctaccccaagcaatattgcccctagcgacgtggtgtccaacatgaccctcataaattttacacctagtcagctgcctaatcaccctagcctgctggatctaggaagtctgaacactagcagtcaccgtacagtgcctaacataatcaaaagatcgaaatcatctatcatgtatttcgaaccagcccccttactgccacagtcagttggcggtacggctgctacagcagctggaactagcactatttcccaggatacctctcaccttacatccggctcagtgagcgggctcgccagcagcagtagtgtgctgaatgtggtcagcatgcagacaaccactacccccacgtcttccgcttccgtacccggccatgtcactctgacaaatcctcggttgctgggtaccccagatatcgggagcatcagcaaccttctgatcaaggcgagtcagcagtccctcggaattcaggaccagcccgtggcactgccaccatcctctgggatgttcccccagctgggaacatcacaaacccctagcactgctgccatcacggccgcttccagtatttgtgtactgccatcaacccagaccaccggcattacagctgccagcccgtcaggcgaagctgacgagcactaccagctgcagcatgtcaatcaacttctagcatccaaaaccggcattcattcgtctcagagggatctcgattctgcaagcggcccacaggtctcaaacttcacacagacagtggatgcacctaacagcatgggtttggagcaaaacaaagctctgtcctctgctgtgcaggcttcccctacttcacctggaggaagcccgtcctctccctcgtccggccaacgttctgcatcgccctctgtacctggacctacgaagccaaagccaaagaccaaaaggttccagctgccacttgacaagggcaatgggaaaaagcataaggtgagtcatcttagaacctcatcctcagaagcacacatcccagatcaggaaacaacatccctgacttcagggactggaactccaggggccgaggcagaacagcaagatactgcctccgtggaacagagcagtcaaaaagaatgtggacagcccgcgggacaggtggcggtcctccccgaagtgcaggtgacacagaacccggctaatgagcaggaaagcgccgaaccgaagacagttgaagaggaagagtctaattttagcagccctctgatgctctggctccaacaggagcagaagcgtaaggagtctataaccgagaagaagcccaagaagggcttggtgtttgagattagtagcgacgatggctttcagatttgtgctgagagtatagaggatgcctggaaatccctaacagacaaggtccaggaagcgcggtcaaacgcccgcctgaagcagctcagtttcgccggggtgaatggcctcagaatgttgggaattctccatgatgcagtggtattcctgatcgagcagctgagcggcgcgaagcactgtagaaattacaagttccgatttcacaagccggaagaggccaatgagccccctctgaatccccatgggtcagccagagcagaagtgcacctccgaaagtctgccttcgatatgttcaattttctcgccagtaaacatcgacagccacccgagtacaacccaaatgacgaggaggaggaggaggtacagcttaaatcagctcgtagggccacatccatggacctccccatgccaatgaggtttcggcatttgaagaaaacttccaaggaggccgtcggagtctaccgctctcccatacatgggcggggcctcttctgtaaacgaaatatagatgccggggaaatggttatcgagtatgctggcaatgtgattcggagcatacagacggataagagggagaaatactacgatagtaagggcatcgggtgctacatgtttagaatagatgacagcgaagtggttgacgccacaatgcacgggaacgcagccagattcatcaatcattcctgcgaacctaattgttactcacgcgtaatcaatatagatggccagaagcacattgtaatattcgccatgcgcaagatttatcgcggtgaggagcttacatacgactacaagttccccattgaagatgctagcaacaagctgccctgtaattgcggggctaaaaagtgtaggaagtttttaaactag

SEQ ID NO: 75290 - DNA, 11919 bp, Artificial Sequence
  derived and/or modified sequence
atggcccattcttgccgctggaggttccctgccaggcctggtaccactggcggtgggggtggcggaggacgccgtggactaggaggtgcgcctcgccagcgggtccccgcactcctgctgccaccaggtccgccagtaggcggaggtgggcctggtgctccaccatctcctccagccgttgcggcagcagccgcagctgctggctcgtccggagcaggcgtgcctgggggagctgccgcagcaagcgcggcaagttcatccagcgcctcctccagcagttctagctccagttcagccagttcagggccagcgctgctgcgggtgggcccagggtttgatgctgccctgcaggtgagtgcagctatcggcactaacctccgccgtttccgtgcagtgtttggcgagtccggtggcggaggtggttccggcgaggatgagcagtttctgggcttcggctctgacgaggaggttcgcgtccgatcacctactcgcagtccttcagtaaagacaagcccccgaaagccacgtgggcgtcccaggagcggaagcgatagaaacagtgccatcctatcggatcccagcgtatttagccctctaaacaagtctgaaactaagagtggcgacaagattaagaagaaggatagcaaatccatcgagaagaagagagggagacctcctacgttccctggggtaaagatcaaaataacccacggaaaagatatttcagaacttccaaaaggcaataaggaagactccctgaagaagatcaaaaggacgccctcagccacattccagcaggctaccaaaattaagaagttacgagccggaaagctgagccctttgaaatcaaaatttaaaaccgggaagctgcagattggaaggaagggcgtacagattgtcaggaggcggggacggccacctagcactgagcgcatcaagacaccttctggactgctcataaatagcgagctcgaaaagccgcagaaggtcagaaaagataaagaaggaaccccgcctctaacaaaagaagataagacggtggtgcgacagtcccctcggcgtatcaagcccgtgcgtattatcccaagcagtaagcgaaccgacgccacaatcgctaagcagctccttcagcgtgcgaagaagggtgcccagaaaaagatcgaaaaggaagccgcacagttgcagggccgtaaggtgaagacacaggtgaaaaatataaggcaattcatcatgcctgtggtgtctgctatttccagccgaattattaaaacccctagacgctttattgaggatgaagattacgatcctccgataaaaatagcaagactcgaaagtacccccaactcacgattttccgctccgagttgcggtagttcagagaaatcgtctgctgcctcacagcactcctcccaaatgtcaagcgactcatccaggtccagctctcctagtgtggacacgagcaccgactctcaggcaagtgaggagattcaagtcctgccggaagaacgcagtgataccccggaggtacaccctcccctgccaattagtcagtcccctgagaacgagtcgaacgacaggcgctcacggaggtacagtgtttctgaacggtccttcgggagcaggaccacaaaaaagttgtcaacgctacagtcggcccctcagcaacaaaccagtagttccccgcctccaccccttctcactcctcctcctcctttacagcccgcaagctcgatcagtgaccacactccttggctgatgcctcccactatacccctggcaagtccattcttgccggcttctaccgcgccaatgcaaggtaagcggaagtctatcctccgggaaccaacatttcgctggacttcactcaaacattcccgctcagagccccagtactttagcagtgccaagtatgcaaaggaaggcttgataagaaaaccaatcttcgacaactttagacctcctcccctgacccccgaagatgtaggttttgcgagcgggtttagtgccagcggaaccgcagcatctgctcgcctattttcaccactccactctggcacccggtttgatatgcacaagcgctcccctctcctgcgcgctcccaggttcactccatctgaagcgcacagccggatcttcgagtcggttactctgcccagcaacagaacttccgccggtacaagcagttcaggcgtaagtaacagaaagcgcaagcggaaggtgttctctccgattcgctctgagccgcgtagcccctcccacagtatgcgcacacggagtggcagactgagctccagcgagctaagcccgttgacgccaccatcttcagtctcctccagcttgagcatcagtgtgagtcccttagcaaccagcgccctgaatcctacgttcacctttccctcccactccctgacccagagtggagaatcagctgagaagaaccagcgccctcgcaagcagactagcgcgcctgccgaacccttctcaagttcctctccaacccctctgtttccatggtttacaccaggatctcaaactgaacgcggacgtaataaagataaggcccctgaagaactctcaaaggaccgggacgctgataagagtgtcgagaaggataaatcacgggagagagacagggagcgagagaaggaaaataagagggaatctcggaaagagaagcggaagaagggaagtgaaatccagagtagctccgctctctacccggttgggcgagtgtcgaaggaaaaggttgtgggtgaggacgtcgcaacttccagttcagccaagaaagctactggtcgcaagaagtcgagtagtcatgactctgggacagatataacttctgtgaccctgggcgatacaacagccgtgaagacaaagattctgatcaagaagggacgcggaaatctagagaagaccaatttagacctggggcctacggcaccctcattggaaaaggaaaagacattatgtctttccactccaagctcctccacagtgaaacattctacatcttctatcggttcaatgctggcccaggcagataagctgcccatgactgacaaacgggtggcttccctgctcaagaaagcgaaggcccaactctgcaaaatcgagaaaagcaagtcactgaagcagaccgaccagcctaaggcccaggggcaggaatccgactccagcgaaacgagcgtgcggggaccgaggataaaacatgtatgccggcgtgcagccgtggctcttggacggaaaagggccgtctttccggacgatatgccaacactgagcgctctcccgtgggaggagagggagaaaatactgtctagcatgggaaacgatgacaaaagttcaattgctggttctgaggacgctgagccattagcgccacctataaaaccgataaagcccgttacgaggaacaaagcccctcaggaaccaccagtgaagaaggggcgtcggtccagaaggtgcggacagtgccctggttgccaggtcccagaggactgcggggtgtgcacgaactgtctggataagcccaaattcggcggacgaaacattaaaaagcagtgctgtaagatgagaaagtgtcaaaacttgcagtggatgccttccaaggcgtatctccaaaagcaggctaaagccgtgaagaaaaaggaaaagaaaagcaaaacctccgaaaaaaaagacagtaaagaaagcagtgtggtgaagaacgtggtggactcttcacagaaaccaaccccttctgcccgagaggatccagctccaaaaaaatcctcttccgagcctccaccacgtaagcccgttgaggagaaaagcgaggaagggaatgtttccgcgcctggccctgagtctaaacaggccactacacctgctagtcggaagtccagcaaacaggttagtcaacccgctctggtcatccctccccagccaccaacaacagggcctccacgaaaggaggtacctaagaccacccccagcgaacccaaaaagaaacagccccctccacctgagagcggtcctgagcaatccaagcagaaaaaagtagcccctcggccatccatacctgtgaagcaaaagcctaaggagaaggagaagccacctccagtaaataagcaagagaacgcaggtacgttgaacatactatcgacactttcaaatgggaattcttctaaacaaaaaatcccggctgatggggtccacaggatacgtgttgactttaaggaagattgtgaagccgaaaatgtgtgggaaatgggcggactcggtattctgactagcgttccgatcaccccccgagtggtctgttttctctgtgcctcatctggccatgtagagttcgtctactgccaggtgtgctgcgagccgttccataagttctgtctggaagaaaatgagcgccctttggaggaccagcttgaaaattggtgctgcagaagatgtaaattctgccacgtctgtggcagacagcatcaggccacaaagcagttactggaatgtaataaatgtcgaaatagctaccaccctgaatgcctgggcccaaactaccccaccaaaccaacaaagaagaaaaaagtctggatttgcaccaagtgtgtgagatgtaagtcatgtggatctaccactccagggaagggttgggatgctcagtggagtcatgatttctcgctctgccatgattgcgcaaagctcttcgcaaagggtaacttttgcccactttgtgacaaatgctacgacgacgacgactatgaatccaaaatgatgcagtgtggaaaatgtgatcgatgggtccactccaagtgcgagaacctctcaggaaccgaggacgaaatgtatgagatactgtctaatttaccagaaagcgttgcatacacttgtgtcaattgtaccgaaagacatcccgcagaatggcggctggccctcgaaaaggaactgcaaatttccctaaagcaggttctgacagctctgctgaacagtcggactactagtcacctgctgagatatcgacaggcagctaagcctccggacctaaaccccgagaccgaagagtccattccgtctaggtcaagccccgaagggcctgatccgccagtgctaaccgaggtctccaagcaagatgaccagcagccactcgatctcgaaggagttaaaagaaagatggatcagggcaattacactagcgtcttggagttttccgacgatattgtgaaaattatacaagccgctattaattccgatggcggacagcccgagatcaaaaaggccaacagcatggtgaaaagctttttcatccggcaaatggaacgtgttttcccatggttctccgtcaagaagtcgcgattttgggaacccaataaggtctcctcgaatagcgggatgctgcccaacgcggtgctcccaccatccctcgatcacaactacgcacagtggcaggaacgagaggagaattcccacaccgaacagccaccactcatgaaaaaaatcatacccgcacccaaacctaaggggccaggcgaacccgactccccaaccccactccaccccccaaccccgcctattttgtcaactgaccgctcccgggaagattccccggagctgaatcccccacccggtatcgaggacaaccggcagtgcgcactatgcctgacctatggcgacgacagcgctaacgacgcgggaagactcctgtatattggccagaatgagtggacccacgttaactgcgcactctggtctgcggaggtgtttgaggatgacgacggctctctcaaaaacgtgcacatggccgtgattcgcggtaagcaattgcggtgtgagttctgtcagaagcccggagctaccgtggggtgttgtctgacatcctgtaccagcaattatcatttcatgtgtagccgggcaaaaaactgtgtgtttctcgatgataagaaggtctattgccaaagacacagggatttgataaagggcgaggttgtgcccgaaaatgggtttgaagtgtttcgaagagtctttgttgactttgaaggcatctccctgcgccgtaagtttctgaatggactcgagccagagaacatccacatgatgatcggaagtatgacaattgactgccttgggatcctgaacgacctgtccgactgcgaggataagttatttcctatcggctaccaatgctcccgagtttactggagtacaaccgacgcacgcaaacgctgcgtgtacacatgcaagatcgttgaatgccgcccaccagtagtggagcccgacatcaattcaacggttgagcatgatgaaaacagaaccatagcccattcacccacgagcttcactgagagctccagtaaggaaagccagaacacagccgagatcataagtccaccaagtccagaccggcctcctcactcacagacttccgggtcttgctactaccatgtgatcagcaaagtgcctagaatcagaactccgagctacagccctacccagcgctcccccggatgccggccacttccctccgcaggatcccccacccctaccacccacgaaatcgtcacggtgggggaccccctgcttagttccgggttaaggtcaattggatctcgtagacacagtacatcatctctaagcccccagcgcagcaagctgagaattatgtcaccgatgagaactggcaatacgtactccaggaataacgtttcaagcgtctctacaaccggcaccgccacagacctggagtccagcgcaaaggttgtcgaccatgttctagggcctctgaacagtagcacaagcctgggtcaaaacacatctaccagctctaacctccaacgcaccgttgtgaccgtcgggaataaaaacagccacttggatgggtcgagctcaagcgaaatgaagcagtctagcgcatctgatcttgtgagcaagtcctcctctctcaaaggggaaaaaacaaaagttctgagctctaagtccagcgaagggtcagcacacaatgttgcttacccagggatccctaaactcgctccacaggtccataacacaacctccagggagctgaatgtgtctaagattggttcatttgctgagccaagctccgtgagtttcagttctaaagaagctctctctttcccccacctccacctgcgaggacaacggaacgaccgcgaccagcacaccgactcaacccagtcagccaattctagcccagatgaagacaccgaggtcaaaacccttaaactgtccggaatgtcaaacagaagctccattatcaacgaacacatgggaagcagttcccgggatcgcaggcagaagggtaagaagtcatgcaaggaaaccttcaaagaaaagcactcaagtaagagcttcctagagccaggccaggtcaccacgggtgaagaagggaatctgaaacccgaattcatggacgaagttctgaccccagagtacatggggcaacgaccctgtaataatgtctcctcggataagattggcgacaagggcctgtccatgcccggtgtacccaaagccccacccatgcaagtggaggggagcgccaaagagcttcaggcccctcggaagagaactgtcaaggtgaccctcactccgctcaagatggagaatgaatcccagtcaaagaatgcgctcaaggagtcttcaccggcttcccctcttcaaatcgagtccacctcaccaacagaaccaatctctgcctcagaaaatcccggtgatgggccagtagctcagccctcccccaacaacacatcctgtcaggacagtcagtcaaataactaccagaacctaccagtgcaagatcggaacttgatgcttcccgatggtcccaagccccaggaagacggcagttttaaaaggagatatccccgacggtctgcccgagccagatctaatatgttcttcggtctgacaccgctttatggcgtaaggtcttacggcgaggaagatattcccttctatagtagcagcactggtaagaagaggggcaaaagatctgccgaaggccaagtcgatggcgcagatgatttgtccacgtccgatgaagacgacctctattattacaattttacccgcacagtgatctctagcggaggtgaagaaagacttgcaagccataacctcttccgcgaagaagagcaatgcgatctcccaaaaatctcccagcttgacggggtggatgatgggacagaatccgataccagcgttaccgcaacgacccggaagagtagccagattcctaagaggaacggcaaagaaaatggtaccgaaaacctgaagatagatcgccctgaggatgcgggagagaaggagcatgtgaccaagtcttccgtcggacataagaatgaacccaagatggacaattgtcactccgttagccgggtgaaaactcagggacaggatagcctcgaggcccagctgagcagcttggaatcatctagaagggtgcacacatctacaccatccgacaagaatttgcttgacacgtacaacactgaactgcttaagagcgattccgataataataatagcgatgattgcgggaacatcctgcctagtgacatcatggatttcgtgcttaagaatactcccagtatgcaggcactcggcgaaagccctgaatccagttcttccgagttgttgaatttgggagaaggcctgggcttggactctaatagagaaaaagatatgggcttatttgaggtgttctctcagcaactccctacgaccgagccggtggactcatccgtttcaagcagcatcagtgctgaagagcagtttgagctgcctctcgagctgccgtccgatctgtcagtactgactacgcgaagcccgacggttccatcgcagaatccctctcgcctggccgtgatctcagactcgggtgagaagcgcgtgacaattactgaaaagtcagtggcttcgtccgaatccgaccctgcgctgctgtcccccggagtggatccaaccccagagggacatatgacgccggaccactttatccagggacacatggacgctgatcacatctcttccccaccatgcggatcagttgagcaaggccacgggaacaaccaagaccttactagaaattcctccacacctgggttacaggtgcccgtttcacccacggtgcccatccaaaatcagaagtacgtgccgaacagtactgatagtcccggaccatcacagatctccaacgccgctgtgcagacaacaccccctcatttgaaacccgcaacagaaaagcttattgtggtcaaccagaacatgcaacctctttatgtgttgcagaccttaccaaatggagtgacgcagaagatccagttaacatcaagcgtgtcttccaccccctccgtgatggaaacaaacacttcggtactcggaccaatgggaggtggcctgactctcacaaccggcctgaatccgtcgctgcctacctcacaatcattgttcccctctgccagcaaaggactcctgccaatgtcgcaccatcaacacctccattcatttcctgcggctacccaaagttcattcccccctaacatcagcaatccacctagtggcctgctgattggggtgcagccacccccagaccctcagctgctggtatcagaatcctcccaacggacagatctttccactacggttgcgactccctcttccggtctcaagaaacgtccaattagtagactgcagacaaggaagaataagaaactggcaccttctagcaccccgtcaaacatagccccatctgacgtcgtgagcaatatgactttgattaacttcacccccagccagctaccgaaccaccctagcttgctggatttggggagcctgaacacctcaagccaccggaccgtgccaaacatcatcaaaagatctaaaagttccatcatgtattttgagccggctccgctgttaccccaatccgtgggcggtaccgctgcaaccgccgctggcacgagtacaattagtcaggatactagccacttgacctcagggagcgtgagcggcctggcctcctctagctcagtactcaatgtcgtgagtatgcagaccaccactactcccacctcaagtgcaagcgtacctggtcacgtcaccctgacaaatcccagactgctcgggacccctgacataggatccatcagcaatctcttaattaaggcatcacaacagagcttgggcattcaagaccaaccagtagcactgcctcccagttcaggcatgttccctcagttgggcacatcccagacacccagcactgctgcgataactgccgcatccagtatttgcgttctcccgagcacccagactactggaataacagccgcttctcctagcggcgaagctgatgagcattaccagttgcaacacgtgaatcagttactcgccagtaagactgggatccattcctctcaaagagacttggactctgcttcgggcccacaagtttccaacttcacccagacggtcgacgcccctaactcaatggggttagaacaaaataaggcactgagctcagcagtgcaggctagccctactagccctggcggaagcccttcatctccttcctctgggcagagatctgcctctccatcggtgcccggtcctacaaagccaaagccgaagacaaagagatttcagttgccattggacaagggcaatggcaaaaagcataaagtctctcacctaagaacatcaagctccgaagctcatattcctgaccaggagaccactagtttgactagcggaaccggcacacctggagcggaggccgaacaacaggatacagcatctgtcgagcaaagtagtcagaaggagtgcggccagccagccggtcaggtggcagtgctccccgaggtccaggtgactcagaatccagctaatgaacaggagtcagccgagccaaagacagtggaggaggaggagagcaatttctcaagcccccttatgctgtggctgcagcaagagcagaaaaggaaggagagcattacagaaaagaagccgaaaaaggggctcgtgttcgaaattagttctgacgatggctttcagatctgcgccgaatcaatagaagatgcttggaagagtctcacggacaaggtccaggaagcacggagcaatgcccgtctcaagcaactctcttttgcaggcgtgaacggtctgagaatgcttggaatcctccatgacgcggtagtgtttttgattgagcagctctcgggggctaagcactgccgtaattataagtttaggttccacaaacctgaggaggccaatgagccccctctgaacccccacgggtcggcaagggcggaagtgcacttaagaaaatctgcttttgatatgtttaactttctcgcctccaagcaccggcaaccacctgaatacaacccgaatgatgaagaggaggaggaagtccagctgaagtctgcccgaagagccacaagtatggatttacctatgccaatgaggttcagacacttgaaaaaaacatccaaggaggcagtcggcgtataccgaagccccattcacgggcgagggctgttctgcaagagaaatatcgatgccggagaaatggtgatcgagtacgcgggtaatgtcattcgctccatccagacagacaaacgcgaaaagtactatgactcgaaagggatcggctgttatatgttccgcattgatgactccgaggtggtggatgccacaatgcacgggaacgcagctaggtttattaaccattcatgtgagcccaattgctactccagagttattaatatcgatgggcaaaaacatattgtcatattcgctatgagaaaaatctaccgtggagaagaactgacctacgattacaagttcccaattgaggatgccagtaacaaactgccctgtaattgcggagccaagaagtgcaggaagtttttgaattac

SEQ ID NO: 75291 - DNA, 11919 bp, Artificial Sequence
  derived and/or modified sequence
atggcccacagctgcagatggagattccccgccagacccggcaccaccggcggcggcggcggcggcggcagaagaggcctgggcggcgcccccagacagagagtgcccgccctgctgctgccccccggcccccccgtgggcggcggcggccccggcgccccccccagcccccccgccgtggccgccgccgccgccgccgccggcagcagcggcgccggcgtgcccggcggcgccgccgccgccagcgccgccagcagcagcagcgccagcagcagcagcagcagcagcagcagcgccagcagcggccccgccctgctgagagtgggccccggcttcgacgccgccctgcaggtgagcgccgccatcggcaccaacctgagaagattcagagccgtgttcggcgagagcggcggcggcggcggcagcggcgaggacgagcagttcctgggcttcggcagcgacgaggaggtgagagtgagaagccccaccagaagccccagcgtgaagaccagccccagaaagcccagaggcagacccagaagcggcagcgacagaaacagcgccatcctgagcgaccccagcgtgttcagccccctgaacaagagcgagaccaagagcggcgacaagatcaagaagaaggacagcaagagcatcgagaagaagagaggcagaccccccaccttccccggcgtgaagatcaagatcacccacggcaaggacatcagcgagctgcccaagggcaacaaggaggacagcctgaagaagatcaagagaacccccagcgccaccttccagcaggccaccaagatcaagaagctgagagccggcaagctgagccccctgaagagcaagttcaagaccggcaagctgcagatcggcagaaagggcgtgcagatcgtgagaagaagaggcagaccccccagcaccgagagaatcaagacccccagcggcctgctgatcaacagcgagctggagaagccccagaaggtgagaaaggacaaggagggcaccccccccctgaccaaggaggacaagaccgtggtgagacagagccccagaagaatcaagcccgtgagaatcatccccagcagcaagagaaccgacgccaccatcgccaagcagctgctgcagagagccaagaagggcgcccagaagaagatcgagaaggaggccgcccagctgcagggcagaaaggtgaagacccaggtgaagaacatcagacagttcatcatgcccgtggtgagcgccatcagcagcagaatcatcaagacccccagaagattcatcgaggacgaggactacgacccccccatcaagatcgccagactggagagcacccccaacagcagattcagcgcccccagctgcggcagcagcgagaagagcagcgccgccagccagcacagcagccagatgagcagcgacagcagcagaagcagcagccccagcgtggacaccagcaccgacagccaggccagcgaggagatccaggtgctgcccgaggagagaagcgacacccccgaggtgcacccccccctgcccatcagccagagccccgagaacgagagcaacgacagaagaagcagaagatacagcgtgagcgagagaagcttcggcagcagaaccaccaagaagctgagcaccctgcagagcgccccccagcagcagaccagcagcagcccccccccccccctgctgaccccccccccccccctgcagcccgccagcagcatcagcgaccacaccccctggctgatgccccccaccatccccctggccagccccttcctgcccgccagcaccgcccccatgcagggcaagagaaagagcatcctgagagagcccaccttcagatggaccagcctgaagcacagcagaagcgagccccagtacttcagcagcgccaagtacgccaaggagggcctgatcagaaagcccatcttcgacaacttcagacccccccccctgacccccgaggacgtgggcttcgccagcggcttcagcgccagcggcaccgccgccagcgccagactgttcagccccctgcacagcggcaccagattcgacatgcacaagagaagccccctgctgagagcccccagattcacccccagcgaggcccacagcagaatcttcgagagcgtgaccctgcccagcaacagaaccagcgccggcaccagcagcagcggcgtgagcaacagaaagagaaagagaaaggtgttcagccccatcagaagcgagcccagaagccccagccacagcatgagaaccagaagcggcagactgagcagcagcgagctgagccccctgaccccccccagcagcgtgagcagcagcctgagcatcagcgtgagccccctggccaccagcgccctgaaccccaccttcaccttccccagccacagcctgacccagagcggcgagagcgccgagaagaaccagagacccagaaagcagaccagcgcccccgccgagcccttcagcagcagcagccccacccccctgttcccctggttcacccccggcagccagaccgagagaggcagaaacaaggacaaggcccccgaggagctgagcaaggacagagacgccgacaagagcgtggagaaggacaagagcagagagagagacagagagagagagaaggagaacaagagagagagcagaaaggagaagagaaagaagggcagcgagatccagagcagcagcgccctgtaccccgtgggcagagtgagcaaggagaaggtggtgggcgaggacgtggccaccagcagcagcgccaagaaggccaccggcagaaagaagagcagcagccacgacagcggcaccgacatcaccagcgtgaccctgggcgacaccaccgccgtgaagaccaagatcctgatcaagaagggcagaggcaacctggagaagaccaacctggacctgggccccaccgcccccagcctggagaaggagaagaccctgtgcctgagcacccccagcagcagcaccgtgaagcacagcaccagcagcatcggcagcatgctggcccaggccgacaagctgcccatgaccgacaagagagtggccagcctgctgaagaaggccaaggcccagctgtgcaagatcgagaagagcaagagcctgaagcagaccgaccagcccaaggcccagggccaggagagcgacagcagcgagaccagcgtgagaggccccagaatcaagcacgtgtgcagaagagccgccgtggccctgggcagaaagagagccgtgttccccgacgacatgcccaccctgagcgccctgccctgggaggagagagagaagatcctgagcagcatgggcaacgacgacaagagcagcatcgccggcagcgaggacgccgagcccctggccccccccatcaagcccatcaagcccgtgaccagaaacaaggccccccaggagccccccgtgaagaagggcagaagaagcagaagatgcggccagtgccccggctgccaggtgcccgaggactgcggcgtgtgcaccaactgcctggacaagcccaagttcggcggcagaaacatcaagaagcagtgctgcaagatgagaaagtgccagaacctgcagtggatgcccagcaaggcctacctgcagaagcaggccaaggccgtgaagaagaaggagaagaagagcaagaccagcgagaagaaggacagcaaggagagcagcgtggtgaagaacgtggtggacagcagccagaagcccacccccagcgccagagaggaccccgcccccaagaagagcagcagcgagcccccccccagaaagcccgtggaggagaagagcgaggagggcaacgtgagcgcccccggccccgagagcaagcaggccaccacccccgccagcagaaagagcagcaagcaggtgagccagcccgccctggtgatccccccccagccccccaccaccggcccccccagaaaggaggtgcccaagaccacccccagcgagcccaagaagaagcagccccccccccccgagagcggccccgagcagagcaagcagaagaaggtggcccccagacccagcatccccgtgaagcagaagcccaaggagaaggagaagcccccccccgtgaacaagcaggagaacgccggcaccctgaacatcctgagcaccctgagcaacggcaacagcagcaagcagaagatccccgccgacggcgtgcacagaatcagagtggacttcaaggaggactgcgaggccgagaacgtgtgggagatgggcggcctgggcatcctgaccagcgtgcccatcacccccagagtggtgtgcttcctgtgcgccagcagcggccacgtggagttcgtgtactgccaggtgtgctgcgagcccttccacaagttctgcctggaggagaacgagagacccctggaggaccagctggagaactggtgctgcagaagatgcaagttctgccacgtgtgcggcagacagcaccaggccaccaagcagctgctggagtgcaacaagtgcagaaacagctaccaccccgagtgcctgggccccaactaccccaccaagcccaccaagaagaagaaggtgtggatctgcaccaagtgcgtgagatgcaagagctgcggcagcaccacccccggcaagggctgggacgcccagtggagccacgacttcagcctgtgccacgactgcgccaagctgttcgccaagggcaacttctgccccctgtgcgacaagtgctacgacgacgacgactacgagagcaagatgatgcagtgcggcaagtgcgacagatgggtgcacagcaagtgcgagaacctgagcggcaccgaggacgagatgtacgagatcctgagcaacctgcccgagagcgtggcctacacctgcgtgaactgcaccgagagacaccccgccgagtggagactggccctggagaaggagctgcagatcagcctgaagcaggtgctgaccgccctgctgaacagcagaaccaccagccacctgctgagatacagacaggccgccaagccccccgacctgaaccccgagaccgaggagagcatccccagcagaagcagccccgagggccccgacccccccgtgctgaccgaggtgagcaagcaggacgaccagcagcccctggacctggagggcgtgaagagaaagatggaccagggcaactacaccagcgtgctggagttcagcgacgacatcgtgaagatcatccaggccgccatcaacagcgacggcggccagcccgagatcaagaaggccaacagcatggtgaagagcttcttcatcagacagatggagagagtgttcccctggttcagcgtgaagaagagcagattctgggagcccaacaaggtgagcagcaacagcggcatgctgcccaacgccgtgctgccccccagcctggaccacaactacgcccagtggcaggagagagaggagaacagccacaccgagcagccccccctgatgaagaagatcatccccgcccccaagcccaagggccccggcgagcccgacagccccacccccctgcacccccccaccccccccatcctgagcaccgacagaagcagagaggacagccccgagctgaaccccccccccggcatcgaggacaacagacagtgcgccctgtgcctgacctacggcgacgacagcgccaacgacgccggcagactgctgtacatcggccagaacgagtggacccacgtgaactgcgccctgtggagcgccgaggtgttcgaggacgacgacggcagcctgaagaacgtgcacatggccgtgatcagaggcaagcagctgagatgcgagttctgccagaagcccggcgccaccgtgggctgctgcctgaccagctgcaccagcaactaccacttcatgtgcagcagagccaagaactgcgtgttcctggacgacaagaaggtgtactgccagagacacagagacctgatcaagggcgaggtggtgcccgagaacggcttcgaggtgttcagaagagtgttcgtggacttcgagggcatcagcctgagaagaaagttcctgaacggcctggagcccgagaacatccacatgatgatcggcagcatgaccatcgactgcctgggcatcctgaacgacctgagcgactgcgaggacaagctgttccccatcggctaccagtgcagcagagtgtactggagcaccaccgacgccagaaagagatgcgtgtacacctgcaagatcgtggagtgcagaccccccgtggtggagcccgacatcaacagcaccgtggagcacgacgagaacagaaccatcgcccacagccccaccagcttcaccgagagcagcagcaaggagagccagaacaccgccgagatcatcagcccccccagccccgacagacccccccacagccagaccagcggcagctgctactaccacgtgatcagcaaggtgcccagaatcagaacccccagctacagccccacccagagaagccccggctgcagacccctgcccagcgccggcagccccacccccaccacccacgagatcgtgaccgtgggcgaccccctgctgagcagcggcctgagaagcatcggcagcagaagacacagcaccagcagcctgagcccccagagaagcaagctgagaatcatgagccccatgagaaccggcaacacctacagcagaaacaacgtgagcagcgtgagcaccaccggcaccgccaccgacctggagagcagcgccaaggtggtggaccacgtgctgggccccctgaacagcagcaccagcctgggccagaacaccagcaccagcagcaacctgcagagaaccgtggtgaccgtgggcaacaagaacagccacctggacggcagcagcagcagcgagatgaagcagagcagcgccagcgacctggtgagcaagagcagcagcctgaagggcgagaagaccaaggtgctgagcagcaagagcagcgagggcagcgcccacaacgtggcctaccccggcatccccaagctggccccccaggtgcacaacaccaccagcagagagctgaacgtgagcaagatcggcagcttcgccgagcccagcagcgtgagcttcagcagcaaggaggccctgagcttcccccacctgcacctgagaggccagagaaacgacagagaccagcacaccgacagcacccagagcgccaacagcagccccgacgaggacaccgaggtgaagaccctgaagctgagcggcatgagcaacagaagcagcatcatcaacgagcacatgggcagcagcagcagagacagaagacagaagggcaagaagagctgcaaggagaccttcaaggagaagcacagcagcaagagcttcctggagcccggccaggtgaccaccggcgaggagggcaacctgaagcccgagttcatggacgaggtgctgacccccgagtacatgggccagagaccctgcaacaacgtgagcagcgacaagatcggcgacaagggcctgagcatgcccggcgtgcccaaggccccccccatgcaggtggagggcagcgccaaggagctgcaggcccccagaaagagaaccgtgaaggtgaccctgacccccctgaagatggagaacgagagccagagcaagaacgccctgaaggagagcagccccgccagccccctgcagatcgagagcaccagccccaccgagcccatcagcgccagcgagaaccccggcgacggccccgtggcccagcccagccccaacaacaccagctgccaggacagccagagcaacaactaccagaacctgcccgtgcaggacagaaacctgatgctgcccgacggccccaagccccaggaggacggcagcttcaagagaagataccccagaagaagcgccagagccagaagcaacatgttcttcggcctgacccccctgtacggcgtgagaagctacggcgaggaggacatccccttctacagcagcagcaccggcaagaagagaggcaagagaagcgccgagggccaggtggacggcgccgacgacctgagcaccagcgacgaggacgacctgtactactacaacttcaccagaaccgtgatcagcagcggcggcgaggagagactggccagccacaacctgttcagagaggaggagcagtgcgacctgcccaagatcagccagctggacggcgtggacgacggcaccgagagcgacaccagcgtgaccgccaccaccagaaagagcagccagatccccaagagaaacggcaaggagaacggcaccgagaacctgaagatcgacagacccgaggacgccggcgagaaggagcacgtgaccaagagcagcgtgggccacaagaacgagcccaagatggacaactgccacagcgtgagcagagtgaagacccagggccaggacagcctggaggcccagctgagcagcctggagagcagcagaagagtgcacaccagcacccccagcgacaagaacctgctggacacctacaacaccgagctgctgaagagcgacagcgacaacaacaacagcgacgactgcggcaacatcctgcccagcgacatcatggacttcgtgctgaagaacacccccagcatgcaggccctgggcgagagccccgagagcagcagcagcgagctgctgaacctgggcgagggcctgggcctggacagcaacagagagaaggacatgggcctgttcgaggtgttcagccagcagctgcccaccaccgagcccgtggacagcagcgtgagcagcagcatcagcgccgaggagcagttcgagctgcccctggagctgcccagcgacctgagcgtgctgaccaccagaagccccaccgtgcccagccagaaccccagcagactggccgtgatcagcgacagcggcgagaagagagtgaccatcaccgagaagagcgtggccagcagcgagagcgaccccgccctgctgagccccggcgtggaccccacccccgagggccacatgacccccgaccacttcatccagggccacatggacgccgaccacatcagcagccccccctgcggcagcgtggagcagggccacggcaacaaccaggacctgaccagaaacagcagcacccccggcctgcaggtgcccgtgagccccaccgtgcccatccagaaccagaagtacgtgcccaacagcaccgacagccccggccccagccagatcagcaacgccgccgtgcagaccacccccccccacctgaagcccgccaccgagaagctgatcgtggtgaaccagaacatgcagcccctgtacgtgctgcagaccctgcccaacggcgtgacccagaagatccagctgaccagcagcgtgagcagcacccccagcgtgatggagaccaacaccagcgtgctgggccccatgggcggcggcctgaccctgaccaccggcctgaaccccagcctgcccaccagccagagcctgttccccagcgccagcaagggcctgctgcccatgagccaccaccagcacctgcacagcttccccgccgccacccagagcagcttcccccccaacatcagcaacccccccagcggcctgctgatcggcgtgcagcccccccccgacccccagctgctggtgagcgagagcagccagagaaccgacctgagcaccaccgtggccacccccagcagcggcctgaagaagagacccatcagcagactgcagaccagaaagaacaagaagctggcccccagcagcacccccagcaacatcgcccccagcgacgtggtgagcaacatgaccctgatcaacttcacccccagccagctgcccaaccaccccagcctgctggacctgggcagcctgaacaccagcagccacagaaccgtgcccaacatcatcaagagaagcaagagcagcatcatgtacttcgagcccgcccccctgctgccccagagcgtgggcggcaccgccgccaccgccgccggcaccagcaccatcagccaggacaccagccacctgaccagcggcagcgtgagcggcctggccagcagcagcagcgtgctgaacgtggtgagcatgcagaccaccaccacccccaccagcagcgccagcgtgcccggccacgtgaccctgaccaaccccagactgctgggcacccccgacatcggcagcatcagcaacctgctgatcaaggccagccagcagagcctgggcatccaggaccagcccgtggccctgccccccagcagcggcatgttcccccagctgggcaccagccagacccccagcaccgccgccatcaccgccgccagcagcatctgcgtgctgcccagcacccagaccaccggcatcaccgccgccagccccagcggcgaggccgacgagcactaccagctgcagcacgtgaaccagctgctggccagcaagaccggcatccacagcagccagagagacctggacagcgccagcggcccccaggtgagcaacttcacccagaccgtggacgcccccaacagcatgggcctggagcagaacaaggccctgagcagcgccgtgcaggccagccccaccagccccggcggcagccccagcagccccagcagcggccagagaagcgccagccccagcgtgcccggccccaccaagcccaagcccaagaccaagagattccagctgcccctggacaagggcaacggcaagaagcacaaggtgagccacctgagaaccagcagcagcgaggcccacatccccgaccaggagaccaccagcctgaccagcggcaccggcacccccggcgccgaggccgagcagcaggacaccgccagcgtggagcagagcagccagaaggagtgcggccagcccgccggccaggtggccgtgctgcccgaggtgcaggtgacccagaaccccgccaacgagcaggagagcgccgagcccaagaccgtggaggaggaggagagcaacttcagcagccccctgatgctgtggctgcagcaggagcagaagagaaaggagagcatcaccgagaagaagcccaagaagggcctggtgttcgagatcagcagcgacgacggcttccagatctgcgccgagagcatcgaggacgcctggaagagcctgaccgacaaggtgcaggaggccagaagcaacgccagactgaagcagctgagcttcgccggcgtgaacggcctgagaatgctgggcatcctgcacgacgccgtggtgttcctgatcgagcagctgagcggcgccaagcactgcagaaactacaagttcagattccacaagcccgaggaggccaacgagccccccctgaacccccacggcagcgccagagccgaggtgcacctgagaaagagcgccttcgacatgttcaacttcctggccagcaagcacagacagccccccgagtacaaccccaacgacgaggaggaggaggaggtgcagctgaagagcgccagaagagccaccagcatggacctgcccatgcccatgagattcagacacctgaagaagaccagcaaggaggccgtgggcgtgtacagaagccccatccacggcagaggcctgttctgcaagagaaacatcgacgccggcgagatggtgatcgagtacgccggcaacgtgatcagaagcatccagaccgacaagagagagaagtactacgacagcaagggcatcggctgctacatgttcagaatcgacgacagcgaggtggtggacgccaccatgcacggcaacgccgccagattcatcaaccacagctgcgagcccaactgctacagcagagtgatcaacatcgacggccagaagcacatcgtgatcttcgccatgagaaagatctacagaggcgaggagctgacctacgactacaagttccccatcgaggacgccagcaacaagctgccctgcaactgcggcgccaagaagtgcagaaagttcctgaactag

SEQ ID NO: 75292 - protein, 474 aa, Artificial Sequence
  derived and/or modified sequence
MERSGQRVTTWDCDQGKHSDSDYREDGMDLGSDAGSSSSSSRASSQSNSTKVTPCSECKSSSSPGGSLDLVSALEDYEEPFPVYQKKVIDEWAPEEDGEEEEEEDERDQRGYRDDRSPAREPGDVSARTRSGGGGGRSATTAMPPPVPNGNLHQHDPQDLRHNGNVVVAGRPSCSRGPRRAIQKPQPAGGRRSGRGPAAGGLCLQPPDGGTCVPEEPPVPPMDWEALEKHLAGLQFREQEAQKNERESIRQKLALGSFFDDGPGIYTSCSKSGKPSLSSRLQSGMNLQICFVNDSGSDKDSDADDSKTETSLDTPLSPMSKQSSSYSDRDTTEEESESLDDMDFLTRQKKLQAEAKMALAMAKPMAKMQVEVEKQNRKKSPVADLLPHMPHISECLMKRSLKPTDLRDMTIGQLQVIVNDLHSQIESLNEELVQLLLIRDELHTEQDAMLVDIEDLTRHAESQQKHMAEKMPAK

SEQ ID NO: 75293 - DNA, 1425 bp, Artificial Sequence
  derived and/or modified sequence
atggagagaagcggccagagagtgaccacctgggactgcgaccagggcaagcacagcgacagcgactacagagaggacggcatggacctgggcagcgacgccggcagcagcagcagcagcagcagagccagcagccagagcaacagcaccaaggtgaccccctgcagcgagtgcaagagcagcagcagccccggcggcagcctggacctggtgagcgccctggaggactacgaggagcccttccccgtgtaccagaagaaggtgatcgacgagtgggcccccgaggaggacggcgaggaggaggaggaggaggacgagagagaccagagaggctacagagacgacagaagccccgccagagagcccggcgacgtgagcgccagaaccagaagcggcggcggcggcggcagaagcgccaccaccgccatgcccccccccgtgcccaacggcaacctgcaccagcacgacccccaggacctgagacacaacggcaacgtggtggtggccggcagacccagctgcagcagaggccccagaagagccatccagaagccccagcccgccggcggcagaagaagcggcagaggccccgccgccggcggcctgtgcctgcagccccccgacggcggcacctgcgtgcccgaggagccccccgtgccccccatggactgggaggccctggagaagcacctggccggcctgcagttcagagagcaggaggcccagaagaacgagagagagagcatcagacagaagctggccctgggcagcttcttcgacgacggccccggcatctacaccagctgcagcaagagcggcaagcccagcctgagcagcagactgcagagcggcatgaacctgcagatctgcttcgtgaacgacagcggcagcgacaaggacagcgacgccgacgacagcaagaccgagaccagcctggacacccccctgagccccatgagcaagcagagcagcagctacagcgacagagacaccaccgaggaggagagcgagagcctggacgacatggacttcctgaccagacagaagaagctgcaggccgaggccaagatggccctggccatggccaagcccatggccaagatgcaggtggaggtggagaagcagaacagaaagaagagccccgtggccgacctgctgccccacatgccccacatcagcgagtgcctgatgaagagaagcctgaagcccaccgacctgagagacatgaccatcggccagctgcaggtgatcgtgaacgacctgcacagccagatcgagagcctgaacgaggagctggtgcagctgctgctgatcagagacgagctgcacaccgagcaggacgccatgctggtggacatcgaggacctgaccagacacgccgagagccagcagaagcacatggccgagaagatgcccgccaagtag

SEQ ID NO: 75294 - DNA, 1425 bp, Artificial Sequence
  derived and/or modified sequence
atggagcggtctggccagcgcgtcacgacttgggattgtgatcagggtaaacactctgattcagactatcgggaagacggcatggatctgggctccgatgctggaagcagctcatcgtcaagccgcgcgagttcacagagtaactccaccaaagtgacaccctgttctgagtgcaaatcaagctccagtcccggagggtccctggatctggtaagcgccctcgaggattatgaggagcctttccccgtttaccagaagaaagtgattgacgaatgggcccctgaggaagacggtgaggaggaggaagaagaggacgaaagagaccaacgcggatatagagacgatcggagccctgccagggagcccggagacgtctcagcgaggacccgcagtggtggaggtggcggccgttccgcgacaacggcaatgcccccaccggtgcctaacggaaaccttcatcagcatgatccccaggatctcagacataacggcaacgtcgtggtggccgggagacccagctgcagcagaggtcccaggcgggccatccagaagcctcagcctgcaggtggcaggagatctggcagggggcccgcagccgggggactctgcttgcagcctcccgatggaggaacttgcgttcccgaggagccccccgtgccacccatggattgggaagccctggaaaaacatcttgctgggttacagttccgggagcaggaagctcagaaaaacgagcgggaatcaattagacagaagctggccctggggtccttctttgacgatgggccaggaatttacaccagttgctcgaagagtgggaaaccctcactctcctcacgcctgcagagtgggatgaatctccagatatgcttcgtgaacgactccggaagcgataaagattctgacgccgacgactcaaagaccgagacatcactggacacacccctgtcaccaatgagtaaacagagtagcagctactccgatcgtgatactacggaagaggagtcagagtcactggacgacatggactttctgacccgacaaaagaagttgcaggccgaggcaaaaatggctttagctatggccaaacccatggccaagatgcaggtggaggtggaaaagcagaatcgtaagaagtcgcctgtggccgacctactgccacacatgccacacatatcggagtgcctgatgaagcggtccttaaagcccacagatctgcgagacatgacaatcggtcagctgcaggtgattgttaatgacctgcacagccagatagagtccttgaatgaggagctggtccagctgctgctgatccgagacgaattacataccgagcaggacgctatgctggtggacattgaggacctgacacgccacgccgagagccagcaaaagcacatggcggagaagatgcccgcgaagtag

SEQ ID NO: 75295 - DNA, 1425 bp, Artificial Sequence
  derived and/or modified sequence
atggagaggagcggccagagggtgaccacctgggactgtgaccagggcaagcacagcgacagcgactacagagaagatggcatggacctgggcagtgatgctggcagcagcagcagcagcagccgggccagcagccagagcaacagcaccaaggtgaccccctgcagcgagtgcaagagcagcagcagccctgggggcagcctggacctggtgtctgccctggaggactatgaggagcccttccctgtgtaccagaagaaggtgattgatgagtgggcccctgaggaggatggagaggaggaggaggaggaggatgagcgggaccagaggggctacagagatgacaggagccctgcccgggagcctggagatgtgtctgcccggaccaggtctgggggcggcggcggccgcagcgccaccacagccatgcctcctcctgtgcccaatggaaacctgcaccagcacgacccccaggacctgcggcacaatggaaatgtggtggtggccggccggcccagctgcagccggggcccccggcgggccatccagaagccccagcctgctgggggcagaagaagtggccggggccctgctgctgggggcctgtgcctgcagcccccagatggcggcacctgtgtgcctgaggagccccctgtgccccccatggactgggaggccctggagaagcacctggccggcctgcagttccgggagcaggaggcccagaagaatgaaagagagagcatccggcagaagctggccctgggcagcttctttgatgatggccctggcatctacaccagctgcagcaagagcggcaagcccagcctgagcagccggctgcagagcggcatgaacctgcagatctgctttgtgaatgattctggcagtgacaaggacagtgatgctgatgacagcaagacagagaccagcctggacacccccctgagccccatgagcaagcagagcagcagctacagcgaccgggacaccacagaggaggagagcgagagcctggatgacatggacttcctgacccggcagaagaagctgcaggccgaggccaagatggccctggccatggccaagcccatggccaagatgcaggtggaggtggagaagcagaacaggaagaagagccctgtggccgacctgctgccccacatgccccacatcagcgagtgcctgatgaagaggagcctgaagcccacagacctgcgggacatgaccatcggccagctgcaggtgattgtgaatgacctgcacagccagatcgagagcctgaatgaggagctggtgcagctgctgctgatcagagatgagctgcacacagagcaggatgccatgctggtggacatcgaggacctgaccaggcatgctgagagccagcagaagcacatggccgagaagatgcctgccaagtag

SEQ ID NO: 75296 - DNA, 1425 bp, Artificial Sequence
  derived and/or modified sequence
atggagcggagcggccagcgggtgaccacctgggactgcgaccagggcaaacattcagattcagattacagagaagatggaatggacctgggaagtgacgccggaagttccagtagttcttcccgtgctagcagccaatccaattctacaaaggtaacaccctgctcggagtgcaagagtagttcctcccccggcggtagtttagacctggttagcgctctggaggattacgaggagccatttcctgtgtaccagaagaaagtgattgacgagtgggcacctgaggaggatggcgaggaggaggaagaggaagatgagcgggatcagcggggctaccgcgatgaccgcagccccgccagagaaccgggtgacgtgtcagccagaacccggtcaggcggcggaggcggccgttcggctacaaccgccatgcccccaccagtgccaaacggaaacctgcaccagcatgatcctcaggatttaaggcacaacggcaacgtggtcgtggctgggcgcccctcatgtagtaggggcccaaggcgtgctatacaaaagccccagccagctggcggccgccgctctgggcgtggtccagccgccggcggcctgtgcttacagccacctgatggcgggacttgcgtgcccgaggagccgcccgtccctcccatggactgggaggccctggaaaagcacttggctgggctccaatttagggaacaggaagctcagaagaacgagagagagagtattagacagaagcttgccctgggctctttttttgacgacgggcccgggatatatacttcttgctctaaatcggggaagccctctctgagctccagattgcagtccggcatgaaccttcagatatgtttcgtgaacgatagcggctctgataaagatagcgatgccgatgactcaaagacggagacatcgctcgacaccccactgtctccaatgtccaaacagagttccagctattcagaccgggacaccacggaagaggagtctgaaagtcttgacgatatggactttctgaccaggcagaaaaagctgcaggcggaggctaaaatggccctcgcaatggccaaacctatggccaagatgcaagttgaggtggaaaagcaaaataggaaaaaaagccccgttgcggatcttctgccccacatgccgcatattagtgaatgtctgatgaagaggagtctaaagcccaccgacctaagagacatgactatcgggcagctgcaggtgatagtaaacgacctgcattcacagatcgagtctttgaatgaagagcttgttcagctcctgctgattcgcgacgagttgcatactgagcaggacgctatgttggtggacattgaagacttaacccgccacgccgaaagtcaacagaagcatatggctgaaaagatgccagccaaatag

SEQ ID NO: 75297 - DNA, 2067 bp, Artificial Sequence
  derived and/or modified sequence
ctttcaaagccaatttgaataaacaactcttccctctcaaatgggcaagagtaactcttcagcaccatggagaggtccgggcagcgtgttacaacgtgggactgtgaccagggcaagcactctgacagtgattaccgagaggatgggatggatctaggcagtgacgccggcagcagcagcagcagcagccgcgccagttcacagtccaactccaccaaagtgaccccttgctccgagtgcaaatcttcatcgtcgccggggggcagcctggacttggtgtctgccctggaggactatgaggagcccttcccggtctaccagaagaaggtgattgatgagtgggcgccggaggaggacggggaggaggaggaagaggaggacgagcgcgaccagcgagggtaccgggatgaccgctctccggcccgggaaccgggggacgtaagcgccaggacccgcagcggcggcggcgggggcaggagcgccaccaccgccatgccgcccccggtgcccaacggcaacctccaccagcacgacccccaggacctcaggcacaatggcaacgtggtggtggctggccggccgagctgttcccggggcccccgccgggcgatccaaaagccccagccggctgggggccggcgcagtggccgcggcccggcggctggggggctctgccttcagcccccagacggcgggacgtgcgtccccgaagagcccccggtgccacctatggattgggaggcgctggagaagcatctggccgggctgcagttccgggagcaggaggcacagaaaaatgagagagagtctatcagacagaagttggcacttggaagcttctttgatgatggcccaggaatttataccagctgtagcaaaagtgggaagccaagcctttcctcccgactgcagagtgggatgaacttgcagatatgctttgtcaacgacagtggcagtgataaggacagtgatgctgatgacagtaagactgaaaccagcttggacacccccttgtctcccatgagcaaacagagttcttcctattctgatagagacactactgaagaggagtctgaatccttggatgacatggacttccttacaaggcaaaagaaattgcaagctgaagccaaaatggcccttgccatggccaaaccaatggccaaaatgcaagtagaagtggagaaacagaacaggaaaaagtctcccgtcgctgatcttctgccacacatgcctcatataagtgaatgcttgatgaaaagaagtttaaaacccaccgacctgagagacatgactattgggcagctacaagtgatagtcaatgatctccattcccagatagaaagcttgaatgaagagttggtccagctgcttctcatccgagatgagctgcacacagagcaggatgccatgctggtggacattgaagacttgaccagacatgctgaaagtcagcagaagcacatggcagagaaaatgcctgcaaagtgaaaagaagccattcaaccagagaacaagctagaatttattttgcttctgtggttgtaaaaatgctgttgctaaaggtggcgcagaaacaaatatcagtgttagtcattgataatgtctgaagcttaatgtccagtgattggcctttgcttcttaatttattttaattttttacttgtgccacttaatatcaggcattttaataaaatattgttacaaaaaatgtacagtactgacaccaccacaaatcatggttaataaaagagagtagttttaactttatttttatttgtttagagattttaagttggaacagtattttcccattgactacttttcattcttcactgtagttttaaagaagaactgtaaatgacggtgctatacaagtcaaaaaatacatgcctgcctcgtagtgaagttgtagctctccgtaatatgtatattttactcagttttcaacattttgtgaatgttgactacctgaagttcctttttagatgtgctattaacattctgttggattcagagggttccttgaaagttttatgtataaatatgtaaaataaaaattaaaac

SEQ ID NO: 75298 - DNA, 1425 bp, Artificial Sequence
  derived and/or modified sequence
atggagcggtctggtcagcgtgtgaccacgtgggactgcgaccaagggaagcacagcgactctgactatagagaggacggcatggatttggggtctgacgccggatcatccagttcctcctctagggcgtcttcgcagagcaactctaccaaagtaaccccctgcagcgagtgcaagagttcgagcagcccgggtggctcactggatcttgtttccgcattagaggactacgaggagcctttcccagtgtaccagaagaaggtcatcgacgaatgggcccctgaggaagacggcgaggaagaagaggaagaggatgagcgggatcaaagaggatacagggacgatcgttcccccgctcgggagcctggggacgttagtgctagaaccaggtcgggtggcggtggcggaaggagcgctaccacagctatgcctccacccgttcctaatggcaatctacatcagcatgatccgcaggatctgagacataacgggaatgtcgtggtagccggaaggccatcttgttctcgcggtccacggagagcaatccagaaaccccagcccgcaggcggacggaggtccggacgcggtcctgccgctggcggactttgcctgcagcctccagacggcggaacttgcgtacctgaggagccgcctgtgcccccaatggactgggaagccctcgaaaagcacctggccggtctgcagtttcgcgaacaggaagcgcagaagaacgagcgagaatcaatccgacagaagctcgcactgggctctttttttgatgatggccctggtatctatacttcttgcagtaagtccggcaagccctctttatctagcaggctgcagagtggaatgaacctccaaatctgtttcgttaatgattcggggtcggacaaggatagcgacgctgacgactccaagactgaaacgtctctggacaccccactgagccccatgagtaaacaatcctcatcttattcagatcgagacactacagaggaggaatccgagagcctcgacgatatggacttcctcacccgtcagaaaaaattgcaggccgaggcaaagatggcgctggccatggctaaacctatggctaagatgcaggtggaggtggagaagcagaatcggaagaaatctccagtcgctgatctgctgccccatatgccacacatcagcgagtgcctcatgaagcggagtctgaagcccacagatttgagggacatgaccatcggacagctccaggtgatcgtcaatgacttgcactctcagatcgaatctcttaatgaagagttagtgcagctgctgttgattcgagatgagctacacaccgaacaggatgcgatgctcgtggatattgaggatctcacaaggcatgcagaatctcagcagaagcatatggctgagaaaatgcctgcaaagtag

SEQ ID NO: 75299 - protein, 255 aa, Artificial Sequence
  derived and/or modified sequence
MERSGQRVTTWDCDQGKHSDSAQKNERESIRQKLALGSFFDDGPGIYTSCSKSGKPSLSSRLQSGMNLQICFVNDSGSDKDSDADDSKTETSLDTPLSPMSKQSSSYSDRDTTEEESESLDDMDFLTRQKKLQAEAKMALAMAKPMAKMQVEVEKQNRKKSPVADLLPHMPHISECLMKRSLKPTDLRDMTIGQLQVIVNDLHSQIESLNEELVQLLLIRDELHTEQDAMLVDIEDLTRHAESQQKHMAEKMPAK

SEQ ID NO: 75300 - DNA, 768 bp, Artificial Sequence
  derived and/or modified sequence
atggagagaagcggccagagagtgaccacctgggactgcgaccagggcaagcacagcgacagcgcccagaagaacgagagagagagcatcagacagaagctggccctgggcagcttcttcgacgacggccccggcatctacaccagctgcagcaagagcggcaagcccagcctgagcagcagactgcagagcggcatgaacctgcagatctgcttcgtgaacgacagcggcagcgacaaggacagcgacgccgacgacagcaagaccgagaccagcctggacacccccctgagccccatgagcaagcagagcagcagctacagcgacagagacaccaccgaggaggagagcgagagcctggacgacatggacttcctgaccagacagaagaagctgcaggccgaggccaagatggccctggccatggccaagcccatggccaagatgcaggtggaggtggagaagcagaacagaaagaagagccccgtggccgacctgctgccccacatgccccacatcagcgagtgcctgatgaagagaagcctgaagcccaccgacctgagagacatgaccatcggccagctgcaggtgatcgtgaacgacctgcacagccagatcgagagcctgaacgaggagctggtgcagctgctgctgatcagagacgagctgcacaccgagcaggacgccatgctggtggacatcgaggacctgaccagacacgccgagagccagcagaagcacatggccgagaagatgcccgccaagtag

SEQ ID NO: 75301 - DNA, 768 bp, Artificial Sequence
  derived and/or modified sequence
atggagcgtagtgggcagcgtgtgactacctgggactgcgaccaggggaagcactcagattcggctcagaaaaatgagagagagagtatcaggcagaagctagcacttggctcttttttcgatgacgggcccggcatctacacatcctgtagcaagtcgggcaagccgagcctgagctcacgccttcagtcagggatgaatcttcaaatttgctttgtgaatgactctggatccgacaaggacagcgatgcggatgacagcaagactgagacctcgctcgacacccctttaagccccatgagtaagcagagctcctcatatagcgatcgagacacaacagaagaggagagcgaaagcctagacgatatggattttttaaccaggcagaagaaattgcaggccgaggccaaaatggccctggccatggctaagcccatggccaagatgcaggtcgaggtggagaagcagaaccggaagaaatcccctgttgcagacctcctccctcatatgccccacatctcagagtgtctcatgaagaggtctctgaaaccaaccgacctgcgggacatgactatcgggcagctacaagtgatcgtgaatgacctccatagtcagattgaatcactgaacgaggagttagtgcaactcctcctgattcgcgacgaactgcacacagaacaggacgcaatgttggtggatattgaggacctgacgcgccacgccgagtcacaacagaagcacatggccgaaaagatgccggcgaagtag

SEQ ID NO: 75302 - DNA, 768 bp, Artificial Sequence
  derived and/or modified sequence
atggagaggagcggccagagggtgaccacctgggactgtgaccagggcaagcacagcgacagcgcccagaagaatgaaagagagagcatccggcagaagctggccctgggcagcttctttgatgatggccctggcatctacaccagctgcagcaagagcggcaagcccagcctgagcagccggctgcagagcggcatgaacctgcagatctgctttgtgaatgacagcggcagtgacaaggacagtgatgctgatgacagcaagacagagaccagcctggacacccccctgagccccatgagcaagcagagcagcagctacagcgaccgggacaccacagaggaggagagcgagagcctggatgacatggacttcctgacccggcagaagaagctgcaggccgaggccaagatggccctggccatggccaagcccatggccaagatgcaggtggaggtggagaagcagaacaggaagaagagccctgtggccgacctgctgccccacatgccccacatcagtgaatgtctgatgaagaggagcctgaagcccacagacctgcgggacatgaccatcggccagctgcaggtgattgtgaatgacctgcacagccagatcgagagcctgaatgaggagctggtgcagctgctgctgatcagagatgagctgcacacagagcaggatgccatgctggtggacatcgaggacctgaccaggcatgctgagagccagcagaagcacatggccgagaagatgcctgccaagtag

SEQ ID NO: 75303 - DNA, 768 bp, Artificial Sequence
  derived and/or modified sequence
atggagcggagcggccagcgggtgaccacctgggactgcgaccagggcaagcactctgactccgcccagaagaacgaaagagaaagtatcagacagaagctggccttgggctcattctttgatgacggccccggaatctacacttcctgttccaaatccggtaagccctcgcttagcagcaggctccaatccggaatgaatcttcagatatgtttcgtgaatgattccgggtccgataaggactccgacgccgacgatagcaagaccgaaacaagccttgataccccactgtctcctatgagtaagcaatctagctcctacagcgacagggacaccaccgaggaggaatctgaatcgttagatgatatggactttctgacgaggcagaagaaactccaagcagaagcaaagatggcgctagccatggcaaaaccaatggccaagatgcaggtggaggtggagaagcaaaacagaaagaagagcccagtggctgatttgttgccccatatgcctcacataagtgaatgtctgatgaaaaggagcctgaaacccacagatcttcgggacatgaccattggccaactgcaggtgattgttaatgatctgcattcacagatagagagcctgaacgaagaactcgtccaattgctactcatacgggatgagcttcacacagagcaagacgccatgctggtggatattgaagatctcacccggcacgctgagtctcagcaaaaacacatggcggaaaagatgccggctaaatag

SEQ ID NO: 75304 - DNA, 768 bp, Artificial Sequence
  derived and/or modified sequence
atggagaggagcggacaacgagtgaccacctgggattgtgaccagggcaaacattccgactctgcacagaagaatgagcgcgagtcgatcaggcagaaactggctttaggaagcttcttcgatgacggccctggcatttatacatcttgctcaaagagtggaaagccaagcttatccagccgattgcagtctggcatgaaccttcaaatttgcttcgttaacgattcagggagcgataaggacagcgacgccgacgactcaaagactgagacgagcctcgacacacctctaagcccaatgtccaaacaatctagctcctattcagatcgggataccacagaagaagaatcagagtctctggatgacatggactttctgacccgacagaaaaagttacaggctgaggctaagatggccctggctatggctaaacccatggccaagatgcaggtggaagtagagaagcagaacaggaagaagtctcctgtagccgacctccttccacatatgccacacatatccgaatgcttaatgaaaagatcgttgaagccaacagacctgcgggatatgacgattggacagcttcaggtgattgtcaacgatcttcacagtcagatcgagtcattaaacgaagaactcgttcagctgttactgattcgcgacgagcttcacaccgagcaggacgcaatgctggtcgacatcgaagacctgactagacacgccgaatcacaacagaagcacatggctgaaaagatgcccgcaaaatag

SEQ ID NO: 75305 - DNA, 1410 bp, Artificial Sequence
  derived and/or modified sequence
ctttcaaagccaatttgaataaacaactcttccctctcaaatgggcaagagtaactcttcagcaccatggagaggtccgggcagcgtgttacaacgtgggactgtgaccagggcaagcactctgacagtgcacagaaaaatgagagagagtctatcagacagaagttggcacttggaagcttctttgatgatggcccaggaatttataccagctgtagcaaaagtgggaagccaagcctttcctcccgactgcagagtgggatgaacttgcagatatgctttgtcaacgacagtggcagtgataaggacagtgatgctgatgacagtaagactgaaaccagcttggacacccccttgtctcccatgagcaaacagagttcttcctattctgatagagacactactgaagaggagtctgaatccttggatgacatggacttccttacaaggcaaaagaaattgcaagctgaagccaaaatggcccttgccatggccaaaccaatggccaaaatgcaagtagaagtggagaaacagaacaggaaaaagtctcccgtcgctgatcttctgccacacatgcctcatataagtgaatgcttgatgaaaagaagtttaaaacccaccgacctgagagacatgactattgggcagctacaagtgatagtcaatgatctccattcccagatagaaagcttgaatgaagagttggtccagctgcttctcatccgagatgagctgcacacagagcaggatgccatgctggtggacattgaagacttgaccagacatgctgaaagtcagcagaagcacatggcagagaaaatgcctgcaaagtgaaaagaagccattcaaccagagaacaagctagaatttattttgcttctgtggttgtaaaaatgctgttgctaaaggtggcgcagaaacaaatatcagtgttagtcattgataatgtctgaagcttaatgtccagtgattggcctttgcttcttaatttattttaattttttacttgtgccacttaatatcaggcattttaataaaatattgttacaaaaaatgtacagtactgacaccaccacaaatcatggttaataaaagagagtagttttaactttatttttatttgtttagagattttaagttggaacagtattttcccattgactacttttcattcttcactgtagttttaaagaagaactgtaaatgacggtgctatacaagtcaaaaaatacatgcctgcctcgtagtgaagttgtagctctccgtaatatgtatattttactcagttttcaacattttgtgaatgttgactacctgaagttcctttttagatgtgctattaacattctgttggattcagagggttccttgaaagttttatgtataaatatgtaaaataaaaattaaaac

SEQ ID NO: 75306 - protein, 244 aa, Artificial Sequence
  derived and/or modified sequence
MVHQDNCSYQAQKNERESIRQKLALGSFFDDGPGIYTSCSKSGKPSLSSRLQSGMNLQICFVNDSGSDKDSDADDSKTETSLDTPLSPMSKQSSSYSDRDTTEEESESLDDMDFLTRQKKLQAEAKMALAMAKPMAKMQVEVEKQNRKKSPVADLLPHMPHISECLMKRSLKPTDLRDMTIGQLQVIVNDLHSQIESLNEELVQLLLIRDELHTEQDAMLVDIEDLTRHAESQQKHMAEKMPAK

SEQ ID NO: 75307 - DNA, 735 bp, Artificial Sequence
  derived and/or modified sequence
atggtgcaccaggacaactgcagctaccaggcccagaagaacgagagagagagcatcagacagaagctggccctgggcagcttcttcgacgacggccccggcatctacaccagctgcagcaagagcggcaagcccagcctgagcagcagactgcagagcggcatgaacctgcagatctgcttcgtgaacgacagcggcagcgacaaggacagcgacgccgacgacagcaagaccgagaccagcctggacacccccctgagccccatgagcaagcagagcagcagctacagcgacagagacaccaccgaggaggagagcgagagcctggacgacatggacttcctgaccagacagaagaagctgcaggccgaggccaagatggccctggccatggccaagcccatggccaagatgcaggtggaggtggagaagcagaacagaaagaagagccccgtggccgacctgctgccccacatgccccacatcagcgagtgcctgatgaagagaagcctgaagcccaccgacctgagagacatgaccatcggccagctgcaggtgatcgtgaacgacctgcacagccagatcgagagcctgaacgaggagctggtgcagctgctgctgatcagagacgagctgcacaccgagcaggacgccatgctggtggacatcgaggacctgaccagacacgccgagagccagcagaagcacatggccgagaagatgcccgccaagtag

SEQ ID NO: 75308 - DNA, 783 bp, Artificial Sequence
  derived and/or modified sequence
atgaacctggacagcgacggcatggacgacatcatcagccaggagagcagcctggacatggagggcaactacaagaaggcccagaagaacgagagagagagcatcagacagaagctggccctgggcagcttcttcgacgacggccccggcatctacaccagctgcagcaagagcggcaagcccagcctgagcagcagactgcagagcggcatgaacctgcagatctgcttcgtgaacgacagcggcagcgacaaggacagcgacgccgacgacagcaagaccgagaccagcctggacacccccctgagccccatgagcaagcagagcagcagctacagcgacagagacaccaccgaggaggagagcgagagcctggacgacatggacttcctgaccagacagaagaagctgcaggccgaggccaagatggccctggccatggccaagcccatggccaagatgcaggtggaggtggagaagcagaacagaaagaagagccccgtggccgacctgctgccccacatgccccacatcagcgagtgcctgatgaagagaagcctgaagcccaccgacctgagagacatgaccatcggccagctgcaggtgatcgtgaacgacctgcacagccagatcgagagcctgaacgaggagctggtgcagctgctgctgatcagagacgagctgcacaccgagcaggacgccatgctggtggacatcgaggacctgaccagacacgccgagagccagcagaagcacatggccgagaagatgcccgccaagtag

SEQ ID NO: 75309 - DNA, 735 bp, Artificial Sequence
  derived and/or modified sequence
atggtgcaccaggataattgttcttatcaggcccaaaagaatgagcgggagtcaattcggcagaaactagccctgggctcattctttgatgatggacctggcatctatacctcgtgtagcaagtctggaaaaccttcgctctcgagccggctgcaatcaggtatgaacttgcagatctgcttcgtcaacgacagtggctccgacaaagattccgatgccgatgactccaagacagaaaccagcctggatacaccattgtctccaatgagcaaacaatccagctcttattctgacagggacacgacagaagaagagtctgagtctttggatgatatggattttttaactcggcagaagaagttgcaggccgaagcaaaaatggctcttgcaatggccaagcccatggccaagatgcaggtcgaggttgagaagcaaaatcgtaaaaaatcgccagtggccgatctcctgccccatatgccccacatatcagaatgcctcatgaagagatcattgaaaccaaccgacttacgagatatgaccattggtcagctgcaagtgatagtgaatgatctgcattctcaaattgagagcctcaatgaggagcttgttcagttgcttttaatcagagatgagcttcacacagagcaagacgctatgctagtcgacatagaggatctgacaagacacgccgagtctcaacagaaacatatggctgaaaaaatgcctgctaagtag

SEQ ID NO: 75310 - DNA, 783 bp, Artificial Sequence
  derived and/or modified sequence
atgaaccttgactctgatggtatggacgacataatatcacaggaatccagcctcgatatggaaggtaactacaagaaagcccaaaaaaatgaaagggagtctatacgccagaaacttgcccttggatccttttttgatgatggccctggaatctacacatcgtgctctaagtcagggaagccgagcctgtcctcacgactacaatccggaatgaacctgcagatatgtttcgtgaatgactctggcagcgacaaggactcagacgctgacgactcaaagaccgaaacaagtctggacacccctctgtctcctatgtccaagcagtccagcagctatagtgaccgagataccaccgaggaggaaagcgagtctctcgacgacatggattttctaacacggcagaagaaactccaggccgaagccaaaatggccctggcaatggcgaaacctatggccaagatgcaggtggaggtggagaaacagaatagaaagaagtcccccgtggcagacctgttgccccacatgccccacatttccgagtgcctgatgaaacggagcttaaaacctactgatctgcgagacatgaccattggccagctgcaggtaatcgtgaacgacctccattcacagatcgaatccctgaacgaagaactggtgcagctgttgcttatcagggatgagctccatacagaacaggacgcaatgctcgtggatattgaagatctgacaaggcacgcagagtcccagcagaagcatatggccgaaaagatgcctgctaagtag

SEQ ID NO: 75311 - DNA, 735 bp, Artificial Sequence
  derived and/or modified sequence
atggtgcaccaggacaactgcagctaccaggcccagaagaatgaaagagagagcatccggcagaagctggccctgggcagcttctttgatgatggccctggcatctacaccagctgcagcaagagcggcaagcccagcctgagcagccggctgcagagcggcatgaacctgcagatctgctttgtgaatgattctggcagtgacaaggacagtgatgctgatgacagcaagacagagaccagcctggacacccccctgagccccatgagcaagcagagcagcagctacagcgaccgggacaccacagaggaggagagcgagagcctggatgacatggacttcctgacccggcagaagaagctgcaggccgaggccaagatggccctggccatggccaagcccatggccaagatgcaggtggaggtggagaagcagaacaggaagaagagccctgtggccgacctgctgccccacatgccccacatcagcgagtgcctgatgaagaggagcctgaagcccacagacctgcgggacatgaccatcggccagctgcaggtgattgtgaatgacctgcacagccagatcgagagcctgaatgaggagctggtgcagctgctgctgatcagagatgagctgcacacagagcaggatgccatgctggtggacatcgaggacctgaccaggcatgctgagagccagcagaagcacatggccgagaagatgcctgccaagtag

SEQ ID NO: 75312 - DNA, 783 bp, Artificial Sequence
  derived and/or modified sequence
atgaacctggacagtgatggcatggatgacatcatcagccaggagagcagcctggacatggagggcaactacaagaaggcccagaagaatgaaagagagagcatccggcagaagctggccctgggcagcttctttgatgatggccctggcatctacaccagctgcagcaagagcggcaagcccagcctgagcagccggctgcagagcggcatgaacctgcagatctgctttgtgaatgattctggcagtgacaaggacagtgatgctgatgacagcaagacagagaccagcctggacacccccctgagccccatgagcaagcagagcagcagctacagcgaccgggacaccacagaggaggagagcgagagcctggatgacatggacttcctgacccggcagaagaagctgcaggccgaggccaagatggccctggccatggccaagcccatggccaagatgcaggtggaggtggagaagcagaacaggaagaagagccctgtggccgacctgctgccccacatgccccacatcagcgagtgcctgatgaagaggagcctgaagcccacagacctgcgggacatgaccatcggccagctgcaggtgattgtgaatgacctgcacagccagatcgagagcctgaatgaggagctggtgcagctgctgctgatcagagatgagctgcacacagagcaggatgccatgctggtggacatcgaggacctgaccaggcatgctgagagccagcagaagcacatggccgagaagatgcctgccaagtag

SEQ ID NO: 75313 - DNA, 735 bp, Artificial Sequence
  derived and/or modified sequence
atggtgcaccaggacaactgcagctaccaggcccagaagaacgagcgagagtcaatccgtcagaagctggctctgggctctttcttcgatgatggccctggaatttacacaagctgctccaaaagtggaaagccaagcctctcgtcccgcctgcagtcgggaatgaacctgcagatctgctttgtgaatgattccggttcagacaaagacagtgacgcagacgactctaagactgagacatccctcgataccccactgtcacccatgagtaaacagagctcttcttactccgaccgcgacactaccgaagaggagagcgagtcgcttgatgatatggatttcctgacacgccaaaaaaagctccaggccgaagcgaagatggcactggcaatggcaaaacctatggctaagatgcaggtggaggtggaaaaacagaataggaagaagtcacctgttgcagatttactcccccacatgccacatattagcgaatgtctgatgaagcgatctctcaaaccgacggacctgagagacatgacaataggacaattacaggtaatcgtgaatgatcttcactctcagatcgagtcattgaatgaggagctcgttcagctgctgctgattagggatgaactgcacaccgaacaggacgcaatgttggtggatatcgaggatttgacccggcatgccgaatctcagcagaagcacatggctgagaagatgcctgctaagtag

SEQ ID NO: 75314 - DNA, 783 bp, Artificial Sequence
  derived and/or modified sequence
atgaacctggacagcgacggcatggacgacatcatcagccaggagtccagtttggacatggaaggaaactacaaaaaagcccaaaaaaatgaacgtgaatctatacgtcagaaactcgcattggggtccttcttcgacgatggccctggcatctacacttcttgttcaaaatcagggaaacctagcctctcttcccgcttacagtcaggaatgaatctgcagatttgtttcgtcaacgactccggaagcgacaaggacagtgatgccgatgatagcaagaccgagacgtccctggatacgccacttagtcccatgtcaaaacaatcctcatcgtattctgaccgggataccaccgaggaggagtcagagagcttggacgacatggattttctgacccgacagaagaaactacaggccgaggctaagatggccctagccatggccaagccaatggcgaagatgcaggtagaagttgaaaagcagaataggaagaaaagccctgtggccgatctgttgccccatatgccacacattagtgagtgtctcatgaagagaagcctgaagccaaccgatctgcgggacatgactatcggccaattacaagtaatagtgaatgacctgcactcgcagatagagtctctgaatgaagagctcgtgcagctgctcctaatccgcgatgagctgcataccgaacaagacgccatgctcgtggatatcgaggatctgacccgccacgcagaaagccagcaaaagcatatggcagaaaagatgccggcaaaatag

SEQ ID NO: 75315 - DNA, 735 bp, Artificial Sequence
  derived and/or modified sequence
atggtgcatcaggacaactgctcataccaggcccagaagaatgagcgagaaagtattcggcagaagctggctcttggatccttcttcgatgatggccctggaatctacactagttgcagcaagtccgggaagccatccctgtccagtcgcctgcagagtggaatgaacctccagatctgctttgttaatgactccggctctgataaggattctgacgcagacgatagcaaaacagagacctcactggatactccactctccccgatgagtaaacagagctccagttatagcgatagagatacaaccgaagaggagtctgaaagcctggatgatatggattttctcactcggcagaaaaagcttcaggcggaggccaaaatggccctcgctatggcaaaacctatggctaaaatgcaggtagaggtcgaaaaacagaacagaaagaagagccccgtggccgatctgttgccgcatatgcctcacatctcggagtgcttaatgaagcgctcccttaagcctaccgatctgcgggacatgaccataggccagcttcaggtaattgtcaatgacctgcattcccagattgagagcttgaatgaagaattagtccaactgttgctaattcgcgatgagctccacaccgaacaggatgccatgctggtcgacatcgaggacctgacccgccatgcggaatcacagcagaagcatatggccgaaaagatgccagcgaagtag

SEQ ID NO: 75316 - DNA, 783 bp, Artificial Sequence
  derived and/or modified sequence
atgaatttggattccgatggaatggacgacataatatctcaggagtcttcactcgatatggaaggcaattacaagaaagcgcagaagaatgagagggagagcatccgacagaagctggcactcggatcatttttcgacgatggtcctggaatctatacctcttgttccaagtccggcaaaccatcgctgtcatccaggctgcagagcggaatgaacctgcagatctgtttcgtaaacgattccggatccgacaaggacagcgatgcggatgactctaaaaccgaaaccagtttggacacgcccctgagccctatgtctaaacagagctctagctattcagacagagacaccactgaagaggagtctgagagccttgatgacatggactttctgacccgtcagaagaagctgcaggcagaagcgaaaatggccctagcgatggcaaaacccatggccaaaatgcaggtggaggtcgagaagcagaatcgcaaaaagagcccagtcgccgacctgttaccccacatgccgcacatcagtgagtgtctcatgaagagatctttgaaacctaccgatcttcgggacatgacaattggtcagctacaggtgatcgtcaacgatcttcactcacaaatcgagagtctcaatgaggagctcgtgcaattactgctgattcgcgatgaactgcatacagagcaggatgccatgctggtcgatattgaagatctgacacggcatgcggagtcccaacaaaaacacatggccgaaaaaatgccggcaaaatag

SEQ ID NO: 75317 - DNA, 1645 bp, Artificial Sequence
  derived and/or modified sequence
ttttctttgtgcctataatataattggctgattgtgcgggtgatgagcgccccctcccccagcccggtcccagctccatgttcctaagcctgcctcactggtttcggagggctggagagcagctcagctcgctagctgcgcgcttcccggcacaggcagtgccactgcgcaggttgatcagcgaaacagcatccattttaatctgcggggagcccctgccttaccagggcgttctctccgcccgccggtggatgctccgcgcctgccctccgcagcctcgctcagcagtcctgcgttggggtctgcgccctaggatgcactgagatggtacatcaggataactgctcgtatcaggcacagaaaaatgagagagagtctatcagacagaagttggcacttggaagcttctttgatgatggcccaggaatttataccagctgtagcaaaagtgggaagccaagcctttcctcccgactgcagagtgggatgaacttgcagatatgctttgtcaacgacagtggcagtgataaggacagtgatgctgatgacagtaagactgaaaccagcttggacacccccttgtctcccatgagcaaacagagttcttcctattctgatagagacactactgaagaggagtctgaatccttggatgacatggacttccttacaaggcaaaagaaattgcaagctgaagccaaaatggcccttgccatggccaaaccaatggccaaaatgcaagtagaagtggagaaacagaacaggaaaaagtctcccgtcgctgatcttctgccacacatgcctcatataagtgaatgcttgatgaaaagaagtttaaaacccaccgacctgagagacatgactattgggcagctacaagtgatagtcaatgatctccattcccagatagaaagcttgaatgaagagttggtccagctgcttctcatccgagatgagctgcacacagagcaggatgccatgctggtggacattgaagacttgaccagacatgctgaaagtcagcagaagcacatggcagagaaaatgcctgcaaagtgaaaagaagccattcaaccagagaacaagctagaatttattttgcttctgtggttgtaaaaatgctgttgctaaaggtggcgcagaaacaaatatcagtgttagtcattgataatgtctgaagcttaatgtccagtgattggcctttgcttcttaatttattttaattttttacttgtgccacttaatatcaggcattttaataaaatattgttacaaaaaatgtacagtactgacaccaccacaaatcatggttaataaaagagagtagttttaactttatttttatttgtttagagattttaagttggaacagtattttcccattgactacttttcattcttcactgtagttttaaagaagaactgtaaatgacggtgctatacaagtcaaaaaatacatgcctgcctcgtagtgaagttgtagctctccgtaatatgtatattttactcagttttcaacattttgtgaatgttgactacctgaagttcctttttagatgtgctattaacattctgttggattcagagggttccttgaaagttttatgtataaatatgtaaaataaaaattaaaactttgtttcat

SEQ ID NO: 75318 - DNA, 1799 bp, Artificial Sequence
  derived and/or modified sequence
agattgctagtttcctcacagagctccagtccacactcggccctgaacgcggagttgaatcagctggctgaagctgagtgcctctcttttcctttcttgggaacaggaaaggtgctgtggagaggaattggggcgggatcattcaggggaaggtgacagcagatggtgggaaggccggagtcagcaagccaagtgtcaggggcagagtgagcctcagaaaacagcagctgcccggtgccagagcaaggaaaggccagggaggctgggcggggcagtgtctgtgggacagagtggggcaagaacacacacggccgggcacagcctcttagccagctctccatgtcagtatgagcagtaaccagggaactgggcaattggcacatcagcctatcagaattcatgggaggttatttcttaagtgaaattctaaagagttaaaggatgaatttggacagtgatggaatggatgacatcatcagtcaagaatcctcattggatatggaggggaattataaaaaggcacagaaaaatgagagagagtctatcagacagaagttggcacttggaagcttctttgatgatggcccaggaatttataccagctgtagcaaaagtgggaagccaagcctttcctcccgactgcagagtgggatgaacttgcagatatgctttgtcaacgacagtggcagtgataaggacagtgatgctgatgacagtaagactgaaaccagcttggacacccccttgtctcccatgagcaaacagagttcttcctattctgatagagacactactgaagaggagtctgaatccttggatgacatggacttccttacaaggcaaaagaaattgcaagctgaagccaaaatggcccttgccatggccaaaccaatggccaaaatgcaagtagaagtggagaaacagaacaggaaaaagtctcccgtcgctgatcttctgccacacatgcctcatataagtgaatgcttgatgaaaagaagtttaaaacccaccgacctgagagacatgactattgggcagctacaagtgatagtcaatgatctccattcccagatagaaagcttgaatgaagagttggtccagctgcttctcatccgagatgagctgcacacagagcaggatgccatgctggtggacattgaagacttgaccagacatgctgaaagtcagcagaagcacatggcagagaaaatgcctgcaaagtgaaaagaagccattcaaccagagaacaagctagaatttattttgcttctgtggttgtaaaaatgctgttgctaaaggtggcgcagaaacaaatatcagtgttagtcattgataatgtctgaagcttaatgtccagtgattggcctttgcttcttaatttattttaattttttacttgtgccacttaatatcaggcattttaataaaatattgttacaaaaaatgtacagtactgacaccaccacaaatcatggttaataaaagagagtagttttaactttatttttatttgtttagagattttaagttggaacagtattttcccattgactacttttcattcttcactgtagttttaaagaagaactgtaaatgacggtgctatacaagtcaaaaaatacatgcctgcctcgtagtgaagttgtagctctccgtaatatgtatattttactcagttttcaacattttgtgaatgttgactacctgaagttcctttttagatgtgctattaacattctgttggattcagagggttccttgaaagttttatgtataaatatgtaaaataaaaattaaaa

SEQ ID NO: 75319 - protein, 563 aa, Artificial Sequence
  derived and/or modified sequence
MRLEELKRLQNPLEQVNDGKYSFENHQLAMDAENNIEKYPLNLQPLESKVKIIQRAWREYLQRQEPLGKRSPSPPSVSSEKLSSSVSMNTFSDSSTPDYREDGMDLGSDAGSSSSSSRASSQSNSTKVTPCSECKSSSSPGGSLDLVSALEDYEEPFPVYQKKVIDEWAPEEDGEEEEEEDERDQRGYRDDRSPAREPGDVSARTRSGGGGGRSATTAMPPPVPNGNLHQHDPQDLRHNGNVVVAGRPSCSRGPRRAIQKPQPAGGRRSGRGPAAGGLCLQPPDGGTCVPEEPPVPPMDWEALEKHLAGLQFREQEVRNQGQARTNSTSAQKNERESIRQKLALGSFFDDGPGIYTSCSKSGKPSLSSRLQSGMNLQICFVNDSGSDKDSDADDSKTETSLDTPLSPMSKQSSSYSDRDTTEEESESLDDMDFLTRQKKLQAEAKMALAMAKPMAKMQVEVEKQNRKKSPVADLLPHMPHISECLMKRSLKPTDLRDMTIGQLQVIVNDLHSQIESLNEELVQLLLIRDELHTEQDAMLVDIEDLTRHAESQQKHMAEKMPAK

SEQ ID NO: 75320 - DNA, 1692 bp, Artificial Sequence
  derived and/or modified sequence
atgagactggaggagctgaagagactgcagaaccccctggagcaggtgaacgacggcaagtacagcttcgagaaccaccagctggccatggacgccgagaacaacatcgagaagtaccccctgaacctgcagcccctggagagcaaggtgaagatcatccagagagcctggagagagtacctgcagagacaggagcccctgggcaagagaagccccagcccccccagcgtgagcagcgagaagctgagcagcagcgtgagcatgaacaccttcagcgacagcagcacccccgactacagagaggacggcatggacctgggcagcgacgccggcagcagcagcagcagcagcagagccagcagccagagcaacagcaccaaggtgaccccctgcagcgagtgcaagagcagcagcagccccggcggcagcctggacctggtgagcgccctggaggactacgaggagcccttccccgtgtaccagaagaaggtgatcgacgagtgggcccccgaggaggacggcgaggaggaggaggaggaggacgagagagaccagagaggctacagagacgacagaagccccgccagagagcccggcgacgtgagcgccagaaccagaagcggcggcggcggcggcagaagcgccaccaccgccatgcccccccccgtgcccaacggcaacctgcaccagcacgacccccaggacctgagacacaacggcaacgtggtggtggccggcagacccagctgcagcagaggccccagaagagccatccagaagccccagcccgccggcggcagaagaagcggcagaggccccgccgccggcggcctgtgcctgcagccccccgacggcggcacctgcgtgcccgaggagccccccgtgccccccatggactgggaggccctggagaagcacctggccggcctgcagttcagagagcaggaggtgagaaaccagggccaggccagaaccaacagcaccagcgcccagaagaacgagagagagagcatcagacagaagctggccctgggcagcttcttcgacgacggccccggcatctacaccagctgcagcaagagcggcaagcccagcctgagcagcagactgcagagcggcatgaacctgcagatctgcttcgtgaacgacagcggcagcgacaaggacagcgacgccgacgacagcaagaccgagaccagcctggacacccccctgagccccatgagcaagcagagcagcagctacagcgacagagacaccaccgaggaggagagcgagagcctggacgacatggacttcctgaccagacagaagaagctgcaggccgaggccaagatggccctggccatggccaagcccatggccaagatgcaggtggaggtggagaagcagaacagaaagaagagccccgtggccgacctgctgccccacatgccccacatcagcgagtgcctgatgaagagaagcctgaagcccaccgacctgagagacatgaccatcggccagctgcaggtgatcgtgaacgacctgcacagccagatcgagagcctgaacgaggagctggtgcagctgctgctgatcagagacgagctgcacaccgagcaggacgccatgctggtggacatcgaggacctgaccagacacgccgagagccagcagaagcacatggccgagaagatgcccgccaagtag

SEQ ID NO: 75321 - DNA, 1692 bp, Artificial Sequence
  derived and/or modified sequence
atgcggctggaggagcttaagagacttcagaaccccttggagcaggtcaatgatggcaaatattcatttgagaaccaccaattggctatggatgccgaaaacaatattgagaagtaccccctgaaccttcaacctctggagagcaaggtgaagatcatacagagggcctggagggagtatctccaaagacaggagcctctgggcaagagatctccctccccgccttccgtgtcttcagagaaactgagtagctccgttagcatgaataccttctctgactcatccacaccagactatcgcgaagatggtatggacctgggatccgacgctggctcaagttctagcagctctcgggcttcctctcagtcgaattctacgaaagtgaccccttgctctgaatgcaagtctagctctagcccgggggggagtctggatttggtctctgcgctagaggactatgaggagccatttcctgtgtatcagaagaaagtgattgatgagtgggccccggaagaggacggagaggaggaggaggaggaggatgaacgggaccagcgcggatatagggatgaccgctcgcccgcgagagagcccggcgacgttagcgcacgcactcggtccggagggggaggcggccgcagcgctaccacagctatgccacctcctgtgccaaacggcaatctgcatcagcacgatccacaggatctgcgacacaacggcaacgtggtagttgccgggcgaccatcatgttccagagggccccgcagagccattcaaaagccccagcctgctggaggtagacgctctggcaggggccccgcagccggaggcctctgtctgcaacccccagacggaggcacctgcgtgccagaggaaccaccagttcccccgatggattgggaagccctcgaaaaacacctagcgggtttacagttcagagaacaggaagtgcgcaatcagggacaagcaagaactaactctacctcggcccagaagaacgagcgggagtccatcaggcagaaactggcccttggttcattcttcgatgacggaccagggatatacacaagttgttccaaaagcggtaagccatctcttagctcccgtcttcagtccgggatgaatttacagatatgcttcgttaacgacagcgggagtgacaaggattctgatgccgacgacagcaagaccgaaacctcactagatactcctctgtcccctatgtcaaaacaatcatccagctacagcgatagagacacgaccgaagaagagtctgagtccctggacgacatggacttcctgactcggcagaagaagctgcaggctgaggctaagatggcactcgctatggctaaaccaatggcgaagatgcaggtcgaggtggaaaagcagaataggaaaaagtcccccgttgccgacctcctgccacacatgccacacatctcggagtgtttgatgaaaaggtcacttaagcccactgatttaagagatatgactatcggccagctccaggtaatagtaaatgatttgcattcccagatcgagtcgctgaacgaggagcttgtgcaactgcttttgatacgcgatgagctccacactgaacaggatgctatgttagtggatatcgaagaccttaccaggcacgccgaatcacaacagaagcatatggctgaaaaaatgcctgctaagtag

SEQ ID NO: 75322 - DNA, 1692 bp, Artificial Sequence
  derived and/or modified sequence
atgaggctggaggagctgaagaggctgcagaaccccctggagcaggtgaatgatggcaagtacagctttgagaaccaccagctggccatggatgctgagaacaacatcgagaagtaccccctgaacctgcagcccctggagagcaaggtgaagatcatccagagggcctggagggagtacctgcagaggcaggagcccctgggcaagaggagccccagcccccccagcgtgtcctctgagaagctgagcagctctgtgtccatgaacaccttcagtgacagcagcaccccagactacagagaagatggcatggacctgggcagtgatgctggcagcagcagcagcagcagccgggccagcagccagagcaacagcaccaaggtgaccccctgcagcgagtgcaagagcagcagcagccctgggggcagcctggacctggtgtctgccctggaggactatgaggagcccttccctgtgtaccagaagaaggtgattgatgagtgggcccctgaggaggatggagaggaggaggaggaggaggatgagcgggaccagaggggctacagagatgacaggagccctgcccgggagcctggagatgtgtctgcccggaccaggtctgggggcggcggcggccgcagcgccaccacagccatgcctcctcctgtgcccaatggaaacctgcaccagcacgacccccaggacctgcggcacaatggaaatgtggtggtggccggccggcccagctgcagccggggcccccggcgggccatccagaagccccagcctgctgggggcagaagaagtggccggggccctgctgctgggggcctgtgcctgcagcccccagatggcggcacctgtgtgcctgaggagccccctgtgccccccatggactgggaggccctggagaagcacctggccggcctgcagttccgggagcaggaggtgaggaaccagggccaggcccggaccaacagcaccagcgcccagaagaatgaaagagagagcatccggcagaagctggccctgggcagcttctttgatgatggccctggcatctacaccagctgcagcaagagcggcaagcccagcctgagcagccggctgcagagcggcatgaacctgcagatctgctttgtgaatgacagcggcagtgacaaggacagtgatgctgatgacagcaagacagagaccagcctggacacccccctgagccccatgagcaagcagagcagcagctacagcgaccgggacaccacagaggaggagagcgagagcctggatgacatggacttcctgacccggcagaagaagctgcaggccgaggccaagatggccctggccatggccaagcccatggccaagatgcaggtggaggtggagaagcagaacaggaagaagagccctgtggccgacctgctgccccacatgccccacatcagtgaatgtctgatgaagaggagcctgaagcccacagacctgcgggacatgaccatcggccagctgcaggtgattgtgaatgacctgcacagccagatcgagagcctgaatgaggagctggtgcagctgctgctgatcagagatgagctgcacacagagcaggatgccatgctggtggacatcgaggacctgaccaggcatgctgagagccagcagaagcacatggccgagaagatgcctgccaagtag

SEQ ID NO: 75323 - DNA, 1692 bp, Artificial Sequence
  derived and/or modified sequence
atgcggctggaggagctgaagcggctgcagaaccccctggagcaggttaacgatggtaagtacagtttcgagaaccatcagctggccatggatgctgagaacaatatcgagaagtatccactgaatctacagccactggagagcaaggtgaagatcattcaacgggcctggcgggagtatttacagcgtcaagagccactgggtaaacggtccccgagccccccgtctgtatcttctgagaagctcagttcatctgtttcaatgaatacctttagcgactcctctacccctgactacagggaggacggaatggatctggggtctgacgcaggctcatctagttcttccagtcgagcctcttcccagtctaattccacaaaggtgacgccatgttccgagtgcaagtccagctccagccccggggggtctctggacctcgtgtccgccctagaggattatgaagaaccctttcccgtttaccagaagaaagttatagacgagtgggccccagaggaagacggagaggaagaagaggaggaagatgagcgcgaccagcggggatatcgggacgatcggtcacccgccagggagcccggtgacgtttccgctaggacacgcagtggcggcggtgggggacgcagtgctacaaccgctatgccacctccagtacccaatggcaacctgcaccagcacgacccccaggatttgcgccataacgggaatgtcgtagtggccgggcgcccatcatgtagccgagggccgcgacgcgcaattcaaaagccccagcccgccggcggacgacgtagtgggaggggccccgctgcaggagggttgtgtttgcagccacctgatggcggtacttgtgtgcccgaggagccccccgtcccaccaatggattgggaggccctcgaaaagcacctggcagggctgcagtttcgcgagcaggaggtcaggaaccagggacaggctaggaccaattctactagtgcacagaaaaatgagcgcgagtccattcggcagaagctcgccctgggatcattcttcgacgatggtcccggcatctacacatcatgtagcaaatctggcaagccttccctgagctccagactccaatccggcatgaacctccaaatctgttttgtgaacgatagcggctcggacaaggactctgatgctgatgattctaaaactgagacttctctagacacacccctgtcgccaatgtctaaacagtcatcaagttattctgaccgcgatactaccgaggaagagtccgaatccctggatgacatggacttcttgacccgacagaagaagctccaggccgaagcaaagatggcattggccatggctaaacctatggccaaaatgcaggtagaggtggagaaacagaatcggaagaagtcgcctgtcgctgatctactcccacatatgccgcatatcagtgagtgcctcatgaaaaggtcattgaagcccactgacctgcgtgatatgactatcggacagctccaggtgatcgtcaatgacctgcactctcagattgaatcacttaacgaagaattggtgcagttgttgcttatcagagacgagttacacactgaacaggatgccatgctggtcgatatagaggaccttacacgccatgcggagagtcagcagaagcatatggccgagaagatgccagccaagtag

SEQ ID NO: 75324 - DNA, 1692 bp, Artificial Sequence
  derived and/or modified sequence
atgcgactggaagagctcaagaggctccagaatcctcttgagcaagtgaacgacggaaagtattcttttgagaaccaccagctggccatggacgccgagaacaatatagagaaatatccactgaacctgcaaccgctggagagcaaggtcaaaattatccagcgcgcatggcgcgaatacctacagagacaggaaccactgggcaagcgcagcccaagcccaccatcggtttcatcagaaaaattgagctccagcgtcagcatgaacaccttcagcgatagcagtaccccagattatagagaggacgggatggatctcggcagtgacgcaggctcgagctcttccagcagcagagcctcatcacagtccaactctaccaaagtcacaccttgcagtgaatgtaaatccagctcgtcaccagggggaagcctcgatctggtgagcgctctggaagactacgaggaacccttccccgtgtaccaaaagaaagtaatcgacgaatgggccccagaagaagacggtgaggaagaggaggaggaagacgaacgggatcagcgtggatatagggacgaccggtcacccgctagggagcccggagacgtcagtgccagaacacggtccggtgggggaggcggacgatcagccactactgcaatgccccctccggttcctaacggaaatctacaccagcatgaccctcaggatctacgccataacggaaacgtggtggttgcaggtcgaccaagctgcagcagagggcctagaagagccatccagaagccacagcctgccggtgggcgtaggagcggaagaggcccagccgcaggaggcttgtgtctccagcctcccgacggcggaacatgtgtgccagaagagccgcctgtgccccctatggactgggaggcactagagaaacaccttgcgggactgcagttccgcgagcaggaggtgcggaatcagggtcaggcaagaaccaatagtactagcgcgcagaaaaatgaaagggaaagcattcgccaaaaactggctctgggctcgttcttcgatgatggtcccggaatctatacttcctgcagtaagtccgggaagccatcgttgtcctcaagactgcagtctggcatgaatctgcaaatctgcttcgtaaacgattccggctctgacaaggatagcgacgccgacgactccaaaacagagacttcgctcgacacccctttgagtcctatgagcaagcaatcctccagttacagcgaccgggacactaccgaagaggagtcagaatcattagatgatatggatttcctcactaggcagaagaaactgcaagcagaagcgaaaatggcactcgcaatggccaagcctatggccaagatgcaggtcgaagtggagaaacaaaaccgcaaaaagtcacccgtcgccgacctgttgcctcacatgccacatatctccgaatgtctgatgaagcgatcacttaagccaacggatcttagggatatgaccattggccaactccaggttatagtaaacgacctccactctcagatcgaatccttgaacgaggaactcgtgcagctcctgctgattcgcgacgaattgcatacagagcaggacgccatgctagtagacattgaggacctgacgaggcatgcggagtcgcaacagaaacacatggcagagaagatgcccgcaaagtag

SEQ ID NO: 75325 - DNA, 2445 bp, Artificial Sequence
  derived and/or modified sequence
ctctttgaggctttctgatgcctagagtgagctcaactcaaaggtttccagcctcacactcgcctcacattcccccacagtcacattgcgctctgtgattctgaggaatacagtgtgccagcatccgatccagtctcctttcacctgcaggtgttccagaaacttcaaaatgcgtctggaagaactgaaaagattgcagaatcctctagaacaagttaatgatggaaaatattcatttgaaaatcaccagctggccatggatgcagagaataatattgaaaagtatcccctcaatctacagcccttggaatcaaaggtgaaaatcattcagcgagcatggcgagagtacctgcagcggcaggagcccctggggaagaggagcccgtccccaccctctgtctcctcagagaagctgagcagctctgtcagcatgaacaccttctccgacagcagcacacccgattaccgagaggatgggatggatctaggcagtgacgccggcagcagcagcagcagcagccgcgccagttcacagtccaactccaccaaagtgaccccttgctccgagtgcaaatcttcatcgtcgccggggggcagcctggacttggtgtctgccctggaggactatgaggagcccttcccggtctaccagaagaaggtgattgatgagtgggcgccggaggaggacggggaggaggaggaagaggaggacgagcgcgaccagcgagggtaccgggatgaccgctctccggcccgggaaccgggggacgtaagcgccaggacccgcagcggcggcggcgggggcaggagcgccaccaccgccatgccgcccccggtgcccaacggcaacctccaccagcacgacccccaggacctcaggcacaatggcaacgtggtggtggctggccggccgagctgttcccggggcccccgccgggcgatccaaaagccccagccggctgggggccggcgcagtggccgcggcccggcggctggggggctctgccttcagcccccagacggcgggacgtgcgtccccgaagagcccccggtgccacctatggattgggaggcgctggagaagcatctggccgggctgcagttccgggagcaggaggtacggaaccagggccaggcgaggaccaactccacctccgcacagaaaaatgagagagagtctatcagacagaagttggcacttggaagcttctttgatgatggcccaggaatttataccagctgtagcaaaagtgggaagccaagcctttcctcccgactgcagagtgggatgaacttgcagatatgctttgtcaacgacagtggcagtgataaggacagtgatgctgatgacagtaagactgaaaccagcttggacacccccttgtctcccatgagcaaacagagttcttcctattctgatagagacactactgaagaggagtctgaatccttggatgacatggacttccttacaaggcaaaagaaattgcaagctgaagccaaaatggcccttgccatggccaaaccaatggccaaaatgcaagtagaagtggagaaacagaacaggaaaaagtctcccgtcgctgatcttctgccacacatgcctcatataagtgaatgcttgatgaaaagaagtttaaaacccaccgacctgagagacatgactattgggcagctacaagtgatagtcaatgatctccattcccagatagaaagcttgaatgaagagttggtccagctgcttctcatccgagatgagctgcacacagagcaggatgccatgctggtggacattgaagacttgaccagacatgctgaaagtcagcagaagcacatggcagagaaaatgcctgcaaagtgaaaagaagccattcaaccagagaacaagctagaatttattttgcttctgtggttgtaaaaatgctgttgctaaaggtggcgcagaaacaaatatcagtgttagtcattgataatgtctgaagcttaatgtccagtgattggcctttgcttcttaatttattttaattttttacttgtgccacttaatatcaggcattttaataaaatattgttacaaaaaatgtacagtactgacaccaccacaaatcatggttaataaaagagagtagttttaactttatttttatttgtttagagattttaagttggaacagtattttcccattgactacttttcattcttcactgtagttttaaagaagaactgtaaatgacggtgctatacaagtcaaaaaatacatgcctgcctcgtagtgaagttgtagctctccgtaatatgtatattttactcagttttcaacattttgtgaatgttgactacctgaagttcctttttagatgtgctattaacattctgttggattcagagggttccttgaaagttttatgtataaatatgtaaaataaaaattaaaactttgtttc

SEQ ID NO: 75326 - DNA, 651 bp, Artificial Sequence
  derived and/or modified sequence
gcctggaccgtgagcggcctgctgagcgccgccttcgagcccgaggtgcccgccagcctgagccagaagagcgaccacagaagcagcctgcccagcagccccagcctgcccctgagcaagaccctggccgtggcctacgaccccgaggacagcagcgccgccaactggtgcttcggcctgtgcgccgtgcccggccccgccagcctggacctgggcagaccctggcccgtggaggaggcccaggtgaaggccggcggctgctgctggctgagcagcctgctgctggaggtgagcgccagcctgagaatgggcagaaccgaccccctgaccggcctgcagagcctggagggcagcatcggccagggcaacggcggccacgtgaccagctgcagagccccctgccacagacccaaggagcagctgtgccccctgagcgtgggcggccccggcggcgaggtggacagacacctgccccccaccggcatctggcagcaggagcccggcctgctgtgcaagaagggcagacccaagggcgagcagtggcccatcaagaccctggagaacaagcaccccttccccagatggctgcagatcatcaccagctgcaagagcacccccggcgagcagctgaccttcatcagcctgagctag

SEQ ID NO: 75327 - protein, 536 aa, Artificial Sequence
  derived and/or modified sequence
MRLEELKRLQNPLEQVNDGKYSFENIQRAWREYLQRQEPLGKRSPSPPSVSSEKLSSSVSMNTFSDSSTPDYREDGMDLGSDAGSSSSSSRASSQSNSTKVTPCSECKSSSSPGGSLDLVSALEDYEEPFPVYQKKVIDEWAPEEDGEEEEEEDERDQRGYRDDRSPAREPGDVSARTRSGGGGGRSATTAMPPPVPNGNLHQHDPQDLRHNGNVVVAGRPSCSRGPRRAIQKPQPAGGRRSGRGPAAGGLCLQPPDGGTCVPEEPPVPPMDWEALEKHLAGLQFREQEVRNQGQARTNSTSAQKNERESIRQKLALGSFFDDGPGIYTSCSKSGKPSLSSRLQSGMNLQICFVNDSGSDKDSDADDSKTETSLDTPLSPMSKQSSSYSDRDTTEEESESLDDMDFLTRQKKLQAEAKMALAMAKPMAKMQVEVEKQNRKKSPVADLLPHMPHISECLMKRSLKPTDLRDMTIGQLQVIVNDLHSQIESLNEELVQLLLIRDELHTEQDAMLVDIEDLTRHAESQQKHMAEKMPAK

SEQ ID NO: 75328 - protein, 260 aa, Artificial Sequence
  derived and/or modified sequence
MNLDSDGMDDIISQESSLDMEGNYKKAQKNERESIRQKLALGSFFDDGPGIYTSCSKSGKPSLSSRLQSGMNLQICFVNDSGSDKDSDADDSKTETSLDTPLSPMSKQSSSYSDRDTTEEESESLDDMDFLTRQKKLQAEAKMALAMAKPMAKMQVEVEKQNRKKSPVADLLPHMPHISECLMKRSLKPTDLRDMTIGQLQVIVNDLHSQIESLNEELVQLLLIRDELHTEQDAMLVDIEDLTRHAESQQKHMAEKMPAK

SEQ ID NO: 75329 - DNA, 1611 bp, Artificial Sequence
  derived and/or modified sequence
atgagactggaggagctgaagagactgcagaaccccctggagcaggtgaacgacggcaagtacagcttcgagaacatccagagagcctggagagagtacctgcagagacaggagcccctgggcaagagaagccccagcccccccagcgtgagcagcgagaagctgagcagcagcgtgagcatgaacaccttcagcgacagcagcacccccgactacagagaggacggcatggacctgggcagcgacgccggcagcagcagcagcagcagcagagccagcagccagagcaacagcaccaaggtgaccccctgcagcgagtgcaagagcagcagcagccccggcggcagcctggacctggtgagcgccctggaggactacgaggagcccttccccgtgtaccagaagaaggtgatcgacgagtgggcccccgaggaggacggcgaggaggaggaggaggaggacgagagagaccagagaggctacagagacgacagaagccccgccagagagcccggcgacgtgagcgccagaaccagaagcggcggcggcggcggcagaagcgccaccaccgccatgcccccccccgtgcccaacggcaacctgcaccagcacgacccccaggacctgagacacaacggcaacgtggtggtggccggcagacccagctgcagcagaggccccagaagagccatccagaagccccagcccgccggcggcagaagaagcggcagaggccccgccgccggcggcctgtgcctgcagccccccgacggcggcacctgcgtgcccgaggagccccccgtgccccccatggactgggaggccctggagaagcacctggccggcctgcagttcagagagcaggaggtgagaaaccagggccaggccagaaccaacagcaccagcgcccagaagaacgagagagagagcatcagacagaagctggccctgggcagcttcttcgacgacggccccggcatctacaccagctgcagcaagagcggcaagcccagcctgagcagcagactgcagagcggcatgaacctgcagatctgcttcgtgaacgacagcggcagcgacaaggacagcgacgccgacgacagcaagaccgagaccagcctggacacccccctgagccccatgagcaagcagagcagcagctacagcgacagagacaccaccgaggaggagagcgagagcctggacgacatggacttcctgaccagacagaagaagctgcaggccgaggccaagatggccctggccatggccaagcccatggccaagatgcaggtggaggtggagaagcagaacagaaagaagagccccgtggccgacctgctgccccacatgccccacatcagcgagtgcctgatgaagagaagcctgaagcccaccgacctgagagacatgaccatcggccagctgcaggtgatcgtgaacgacctgcacagccagatcgagagcctgaacgaggagctggtgcagctgctgctgatcagagacgagctgcacaccgagcaggacgccatgctggtggacatcgaggacctgaccagacacgccgagagccagcagaagcacatggccgagaagatgcccgccaagtag

SEQ ID NO: 75330 - DNA, 1611 bp, Artificial Sequence
  derived and/or modified sequence
atgaggctggaagaactgaagcggctgcagaatcccttggagcaagtcaacgacgggaagtactcgtttgaaaacatccagcgcgcatggagggaatatctccaaaggcaggaacctctggggaagaggtccccaagccccccaagtgtctcttctgaaaaattgagctctagcgtctcaatgaatactttcagtgattcttccacccccgactatagggaagacggcatggatcttggatcagatgccggctccagcagctctagcagtcgggccagctcacagtccaactcaaccaaggtgaccccttgcagcgagtgcaagagctcctcatcgcccggtggttccctggatctcgtgagcgcactggaagactatgaggagccttttcccgtgtaccagaagaaggtcatagatgagtgggcccccgaagaagatggcgaggaggaggaagaggaagacgagagggatcagcgaggataccgtgacgaccggtccccggctagagagcccggtgacgtctcggcccgcacgaggtccggcgggggggggggaagaagcgctacaaccgcaatgcccccaccagttccgaacggcaacctgcaccagcatgatccccaggacctgcggcataacggcaacgtggtagtggccggccgccccagttgtagccgcggacctaggagggctatacagaagccacagcccgcaggcggtcgacggagcggccggggtccggccgctggaggactttgtctccagccccctgacggtgggacctgtgtgcctgaggagcctcccgtgccacccatggattgggaagccctcgagaagcacctggcaggactccagttccgggagcaagaggtgaggaaccagggacaggcaagaactaattccacctcagcacagaaaaatgaacgcgaaagcataaggcagaaactggcccttggctcattcttcgatgatggacctgggatttatacttcatgcagcaagtccggaaagccttcgttgtcttctaggctgcagagcgggatgaatctgcagatttgttttgtcaacgattcaggttccgacaaagactcagacgcagacgactccaagaccgaaacgtccctggacacaccactgagtcctatgagtaagcagtcttcttcctattccgaccgggacacaactgaggaggagtccgagtctctggatgacatggacttcctcaccagacagaaaaagctgcaggcagaagctaagatggctttggccatggcaaagccaatggccaaaatgcaggttgaggtggagaagcagaatcggaagaagagccccgtggccgaccttttgccgcacatgccccacataagcgagtgccttatgaagcggtcccttaaacccaccgacctgagagatatgactattggacagctacaggtcattgtgaatgatcttcatagccaaatcgaatctttaaatgaagagcttgtacagctgctgctgatcagagatgagctccacactgagcaagatgctatgcttgtagatattgaggacctgacaagacacgcagaatcgcaacaaaagcatatggccgagaagatgcccgcaaaatag

SEQ ID NO: 75331 - DNA, 1611 bp, Artificial Sequence
  derived and/or modified sequence
atgaggctggaggagctgaagaggctgcagaaccccctggagcaggtgaatgatggcaagtacagctttgagaacatccagagggcctggagggagtacctgcagaggcaggagcccctgggcaagaggagccccagccccccatctgtgagcagcgagaagctgagcagctctgtgtccatgaacaccttcagtgacagcagcaccccagactaccgggaggatggcatggacctgggcagtgatgctggcagcagcagcagcagcagccgggccagcagccagagcaacagcaccaaggtgaccccctgcagcgagtgcaagagcagcagcagccctgggggcagcctggacctggtgtctgccctggaggactatgaggagcccttccctgtgtaccagaagaaggtgattgatgagtgggccccagaagaagatggagaggaggaggaggaggaggatgagcgggaccagaggggctacagagatgacaggagccctgcccgggagcctggagatgtgtctgcccggaccaggtctgggggcggcggcggccgcagcgccaccacagccatgcctcctcctgtgcccaacggcaacctgcaccagcacgacccccaggacctgcggcacaatggaaatgtggtggtggccggccggcccagctgcagccggggcccccggcgggccatccagaagccccagcctgctgggggccgccgcagcggccggggccctgctgctgggggcctgtgcctgcagcccccagatggcggcacctgtgtgcctgaggagccccctgtgccccccatggactgggaggccctggagaagcacctggccggcctgcagttccgggagcaggaggtgaggaaccagggccaggcccggaccaacagcaccagcgcccagaagaatgaaagagagagcatccggcagaagctggccctgggcagcttctttgatgatggccctggcatctacaccagctgcagcaagagcggcaagcccagcctgagcagccggctgcagagcggcatgaacctgcagatctgctttgtgaatgattctggcagtgacaaggacagtgatgctgatgacagcaagacagagaccagcctggacacccccctgagccccatgagcaagcagagcagcagctacagcgaccgggacaccacagaggaggagagcgagagcctggatgacatggacttcctgacccggcagaagaagctgcaggccgaggccaagatggccctggccatggccaagcccatggccaagatgcaggtggaggtggagaagcagaacaggaagaagagccctgtggccgacctgctgccccacatgccccacatcagcgagtgcctgatgaagaggagcctgaagcccacagacctgcgggacatgaccatcggccagctgcaggtgattgtgaatgacctgcacagccagatcgagagcctgaatgaggagctggtgcagctgctgctgatcagagatgagctgcacacagagcaggatgccatgctggtggacatcgaggacctgaccaggcatgctgagagccagcagaagcacatggccgagaagatgcctgccaagtag

SEQ ID NO: 75332 - DNA, 1611 bp, Artificial Sequence
  derived and/or modified sequence
atgcggctggaggagctgaagcggctgcagaaccccctggagcaggttaatgatggaaagtatagcttcgaaaacatccagcgcgcctggcgcgaatacctgcaaaggcaagaaccactgggcaagcgatccccgagtccaccctctgtcagcagtgagaaactgagcagctccgtgagcatgaacaccttttctgattcgagcacaccagactatcgagaggatggcatggatctgggcagtgacgccggctcatcctcctcaagctctcgcgccagcagccagagcaacagcacaaaggtcaccccttgttcagagtgtaaatcttcctctagccctggcgggtctctcgatttagtctcggctctggaggattacgaggaaccttttcctgtttaccagaagaaagtgatcgacgagtgggcacctgaggaagatggcgaggaggaagaggaggaggatgagcgggaccaaaggggatatcgcgacgaccgcagccctgccagggagcctggggacgtctccgctcgcaccagatcaggcggtggcggtggtagatctgctaccaccgcaatgccacccccagtgcctaatggaaacctgcaccaacacgatcctcaggatctccgtcacaacggtaacgtcgtagtggcgggcaggccatcatgctcacgcgggcctaggagagctattcagaaaccacagcccgcgggaggcaggaggtccggcagaggaccggccgccgggggactatgcctgcaaccccccgatggcgggacctgtgtgcccgaggagccccccgttcctcctatggattgggaagccctggagaagcatctcgcaggtttacagtttcgcgagcaagaggtcaggaaccaggggcaggctcgcacaaatagcactagcgcacaaaaaaacgaacgggaaagtatcaggcagaagctggctctgggttccttttttgatgacggcccagggatctatacaagttgcagtaagtctggtaagccctcgctgtcatcaaggctgcaatcaggcatgaatctgcagatttgttttgttaatgactctgggtcggacaaggattcggatgccgacgatagcaaaaccgaaaccagcctcgatactcctctatcccccatgtcgaaacagtcaagctcctactctgatcgagacaccacagaagaggaatccgaatcactggacgacatggattttctgacccggcaaaagaaattgcaagccgaagcaaagatggcactggccatggccaaaccgatggccaagatgcaggtggaggtggagaagcagaataggaaaaagagtccagttgcagatcttctgccgcacatgccacatatctctgagtgcctgatgaagcgatccctgaagcctacggatttaagggatatgacgattggacagctccaggtaatcgtcaacgatttgcactcacagatcgaatccctcaatgaggaactggtgcagttgctgctaattcgggacgaactgcataccgagcaggacgcaatgctcgtggacatcgaagatcttacccggcatgcggagtcacagcagaagcatatggctgagaagatgccagcaaaatag

SEQ ID NO: 75333 - DNA, 1611 bp, Artificial Sequence
  derived and/or modified sequence
atgaggttggaggagctaaagagactgcagaatcccctcgaacaagtgaacgatggcaagtatagtttcgagaacatccagcgagcatggagagagtatctccagcggcaggaaccattgggcaagcggagcccttcaccaccatctgtttcttcagaaaagctgagcagcagtgtctcaatgaacacgttctctgattcttcaacccctgactacagggaagatggtatggacctcggcagtgacgcagggtcaagcagtagttcaagtcgggcttctagtcagtcaaatagtacaaaggtgactccttgtagcgaatgcaaatcaagttcatctcctggtggcagcctcgatcttgtgtctgcactggaggattacgaagagcccttccctgtgtatcaaaaaaaggtcatagacgagtgggctccagaagaggacggggaggaagaagaagaggaggacgagagggaccagcgaggttatcgcgacgatcggagccccgcaagagagcccggagatgtgagcgccaggactaggtccggcggagggggagggcgttcagcaaccacagctatgcctcctccggtgcctaacggcaatctgcaccagcacgacccacaagacctgagacacaacggaaacgtggtagttgcaggacgtccaagctgctcccgcggaccgagacgcgctatccagaaaccccaacccgctggagggcgtcggagtgggagaggtccggcagctggcggactgtgcctgcaaccacctgatggagggacatgcgtccctgaagaacctccagtgccacctatggactgggaggccctggagaaacatcttgctggactgcagttcagggagcaggaagtacgaaatcaggggcaggctagaacaaacagcacaagcgcccagaagaatgaacgggagtccatcagacagaagctggccctgggaagctttttcgatgacgggccaggaatttatacaagctgttcaaagtccggaaagcccagtctgagctctaggctacagtccggaatgaacctgcagatttgctttgtcaacgactccggaagtgacaaggactccgatgcagacgatagcaagaccgagacctcattggatacaccgctgagcccaatgtccaaacagtcttcctcttactctgacagagataccaccgaggaagagtccgagtctctcgatgatatggatttcctcacccggcaaaagaagcttcaggccgaggccaagatggccctggccatggcaaagcccatggctaaaatgcaagtggaagtcgagaaacaaaaccgcaagaagagtcccgtcgccgacttgctaccacatatgcctcacatctccgagtgcctgatgaagcggagtctgaagcccactgacctgagggacatgaccattggtcagctgcaggtgatcgtgaatgacctgcactcccagattgagtctctcaatgaggaactggttcaactcctacttatacgagatgagctacataccgaacaggacgccatgcttgtcgatatcgaagacctgactaggcatgcggagtcccaacagaaacacatggcagaaaaaatgccagctaagtag

SEQ ID NO: 75334 - DNA, 1780 bp, Artificial Sequence
  derived and/or modified sequence
ctctttgaggctttctgatgcctagagtgagctcaactcaaaggtttccagcctcacactcgcctcacattcccccacagtcacattgcgctctgtgattctgaggaatacagtgtgccagcatccgatccagtctcctttcacctgcaggtgttccagaaacttcaaaatgcgtctggaagaactgaaaagattgcagaatcctctagaacaagttaatgatggaaaatattcatttgaaaacattcagcgagcatggcgagagtacctgcagcggcaggagcccctggggaagaggagcccgtccccaccctctgtctcctcagagaagctgagcagctctgtcagcatgaacaccttctccgacagcagcacacccgattaccgagaggatgggatggatctaggcagtgacgccggcagcagcagcagcagcagccgcgccagttcacagtccaactccaccaaagtgaccccttgctccgagtgcaaatcttcatcgtcgccggggggcagcctggacttggtgtctgccctggaggactatgaggagcccttcccggtctaccagaagaaggtgattgatgagtgggcgccggaggaggacggggaggaggaggaagaggaggacgagcgcgaccagcgagggtaccgggatgaccgctctccggcccgggaaccgggggacgtaagcgccaggacccgcagcggcggcggcgggggcaggagcgccaccaccgccatgccgcccccggtgcccaacggcaacctccaccagcacgacccccaggacctcaggcacaatggcaacgtggtggtggctggccggccgagctgttcccggggcccccgccgggcgatccaaaagccccagccggctgggggccggcgcagtggccgcggcccggcggctggggggctctgccttcagcccccagacggcgggacgtgcgtccccgaagagcccccggtgccacctatggattgggaggcgctggagaagcatctggccgggctgcagttccgggagcaggaggtacggaaccagggccaggcgaggaccaactccacctccgcacagaaaaatgagagagagtctatcagacagaagttggcacttggaagcttctttgatgatggcccaggaatttataccagctgtagcaaaagtgggaagccaagcctttcctcccgactgcagagtgggatgaacttgcagatatgctttgtcaacgacagtggcagtgataaggacagtgatgctgatgacagtaagactgaaaccagcttggacacccccttgtctcccatgagcaaacagagttcttcctattctgatagagacactactgaagaggagtctgaatccttggatgacatggacttccttacaaggcaaaagaaattgcaagctgaagccaaaatggcccttgccatggccaaaccaatggccaaaatgcaagtagaagtggagaaacagaacaggaaaaagtctcccgtcgctgatcttctgccacacatgcctcatataagtgaatgcttgatgaaaagaagtttaaaacccaccgacctgagagacatgactattgggcagctacaagtgatagtcaatgatctccattcccagatagaaagcttgaatgaagagttggtccagctgcttctcatccgagatgagctgcacacagagcaggatgccatgctggtggacattgaagacttgaccagacatgctgaaagtcagcagaagcacatggcagagaaaatgcctgcaaagtga

SEQ ID NO: 75335 - protein, 281 aa, Artificial Sequence
  derived and/or modified sequence
MVLAPLPDPGPPSLAVAPEPCPQPLRSPSLDNPTPFPNLGPSENPLKRLLVPGEEWEFEVTAFYRGRQVFQQTISCPEGLRLVGSEVGDRTLPGWPVTLPDPGMSLTDRGVMSYVRHVLSCLGGGLALWRAGQWLWAQRLGHCHTYWAVSEELLPNSGHGPDGEVPKDKEGGVFDLGPFIVDLITFTEGSGRSPRYALWFCVGESWPQDQPWTKRLVMVKVVPTCLRALVEMARVGGASSLENTVDLHISNSHPLSLTSDQYKAYLQDLVEGMDFQGPGES

SEQ ID NO: 75336 - DNA, 1494 bp, Artificial Sequence
  derived and/or modified sequence
gagtttgagagctacccggagctccaagacaggggtgggttccagctgcccgcacgccccgaccttccatcgtaggtgcgtgcgacgacctgggacgctggaaacccggagctgcgcgctgggcggaaaggactcctagtgggcccggctgagaaggcggaggtggcgcgcgaggggcgggctcgtgccaacgctggtgggtggggctagaacgggaggggcggggctagccggatccgctgactgatggtggggcgcaagcagggttggagctgcagggttacgggaataaaaccgggaaagccggcctgggccgaggccactggtgcatatgttcccgggagggataagccagacctgccaacctggaagaggaatttccgctctgccctcaaccgcaaagaagggttgcgtttagcagaggaccggagcaaggaccctcacgacccacataaaatctacgagtttgtgaactcaggagttggggacttttcccagccagacacctctccggacaccaatggtggaggcagtacttctgatacccaggaagacattctggatgagttactgggtaacatggtgttggccccactcccagatccgggacccccaagcctggctgtagcccctgagccctgccctcagcccctgcggagccccagcttggacaatcccactcccttcccaaacctggggccctctgagaacccactgaagcggctgttggtgccgggggaagagtgggagttcgaggtgacagccttctaccggggccgccaagtcttccagcagaccatctcctgcccggagggcctgcggctggtggggtccgaagtgggagacaggacgctgcctggatggccagtcacactgccagaccctggcatgtccctgacagacaggggagtgatgagctacgtgaggcatgtgctgagctgcctgggtgggggactggctctctggcgggccgggcagtggctctgggcccagcggctggggcactgccacacatactgggcagtgagcgaggagctgctccccaacagcgggcatgggcctgatggcgaggtccccaaggacaaggaaggaggcgtgtttgacctggggcccttcattgtagatctgattaccttcacggaaggaagcggacgctcaccacgctatgccctctggttctgtgtgggggagtcatggccccaggaccagccgtggaccaagaggctcgtgatggtcaaggttgtgcccacgtgcctcagggccttggtagaaatggcccgggtagggggtgcctcctccctggagaatactgtggacctgcacatttccaacagccacccactctccctcacctccgaccagtacaaggcctacctgcaggacttggtggagggcatggatttccagggccctggggagagctgagccctcgctcctcatggtgtgcctccaacccccctgttccccaccacctcaaccaataaactggttcct

SEQ ID NO: 75337 - DNA, 1117 bp, Artificial Sequence
  derived and/or modified sequence
tgacgggaaagggggtgcgcagcctcgagtttgagagctacccggagctccaagacaggggtgggttccagctgcccgcacgccccgaccttccatcgtaggagttggggacttttcccagccagacacctctccggacaccaatggtggaggcagtacttctgatacccaggaagacattctggatgagttactgggtaacatggtgttggccccactcccagatccgggacccccaagcctggctgtagcccctgagccctgccctcagcccctgcggagccccagcttggacaatcccactcccttcccaaacctggggccctctgagaacccactgaagcggctgttggtgccgggggaagagtgggagttcgaggtgacagccttctaccggggccgccaagtcttccagcagaccatctcctgcccggagggcctgcggctggtggggtccgaagtgggagacaggacgctgcctggatggccagtcacactgccagaccctggcatgtccctgacagacaggggagtgatgagctacgtgaggcatgtgctgagctgcctgggtgggggactggctctctggcgggccgggcagtggctctgggcccagcggctggggcactgccacacatactgggcagtgagcgaggagctgctccccaacagcgggcatgggcctgatggcgaggtccccaaggacaaggaaggaggcgtgtttgacctggggcccttcattgtagatctgattaccttcacggaaggaagcggacgctcaccacgctatgccctctggttctgtgtgggggagtcatggccccaggaccagccgtggaccaagaggctcgtgatggtcaaggttgtgcccacgtgcctcagggccttggtagaaatggcccgggtagggggtgcctcctccctggagaatactgtggacctgcacatttccaacagccacccactctccctcacctccgaccagtacaaggcctacctgcaggacttggtggagggcatggatttccagggccctggggagagctgagccctcgctcctcatggtgtgcctccaacccccctgttccccaccacctcaaccaataaactggttcct

SEQ ID NO: 75338 - protein, 300 aa, Artificial Sequence
  derived and/or modified sequence
MGTPKPRILPWLVSQLDLGQLEGVAWVNKSRTRFRIPWKHGLRQDAQQEDFGIFQAWAEATGAYVPGRDKPDLPTWKRNFRSALNRKEGLRLAEDRSKDPHDPHKIYEFVNSGVGDFSQPDTSPDTNGGGSTSDTQEDILDELLGNMVLAPLPDPGPPSLAVAPEPCPQPLRSPSLDNPTPFPNLGPSENPLKRLLVPGEDLITFTEGSGRSPRYALWFCVGESWPQDQPWTKRLVMVKVVPTCLRALVEMARVGGASSLENTVDLHISNSHPLSLTSDQYKAYLQDLVEGMDFQGPGES

SEQ ID NO: 75339 - protein, 104 aa, Artificial Sequence
  derived and/or modified sequence
MGTPKPRILPWLVSQLDLGQLEGVAWVNKSRTRFRIPWKHGLRQDAQQEDFGIFQELGTFPSQTPLRTPMVEAVLLIPRKTFWMSYWVTWCWPHSQIRDPQAWL

SEQ ID NO: 75340 - protein, 154 aa, Artificial Sequence
  derived and/or modified sequence
MVLAPLPDPGPPSLAVAPEPCPQPLRSPSLDNPTPFPNLGPSENPLKRLLVPGEDLITFTEGSGRSPRYALWFCVGESWPQDQPWTKRLVMVKVVPTCLRALVEMARVGGASSLENTVDLHISNSHPLSLTSDQYKAYLQDLVEGMDFQGPGES

SEQ ID NO: 75341 - DNA, 903 bp, Artificial Sequence
  derived and/or modified sequence
atgggaacaccaaagccacgcatcttaccatggctcgttagtcagctagatctcgggcagctcgagggggtggcatgggtgaataagtctaggacacgctttagaatcccgtggaagcacgggctgcgccaggacgctcaacaagaggattttggcatttttcaggcttgggccgaggccacaggggcgtacgtgcctggtagagataaaccagacctcccgacttggaagagaaattttaggtctgccctgaaccgaaaagagggcctgaggctcgcagaggacagatcgaaggatccgcatgatccccacaagatctatgaattcgtcaacagcggtgtcggtgatttttcacaaccagacacctcccctgatacgaacggaggtggcagtacatctgatactcaggaggacattctggatgagctcttgggcaacatggtcttggctccactgccggatccgggccccccgagtctggcagtggctcccgaaccttgtccgcagcctctacgcagcccctctttagataacccaactccttttcccaatctgggcccctctgagaaccccctgaagaggctgttagtgcccggcgaggatctaataactttcactgaaggatccgggaggtccccacgatacgctttgtggttctgcgttggagagtcgtggccgcaggatcaaccctggaccaaacgcctggtcatggtcaaagtggtgcccacctgtctgagagccttggtagagatggccagggtgggcggggcgtctagtcttgaaaacacagtggacttgcacatatccaacagccatccactgtccttgactagtgaccagtacaaagcttatctgcaggacctggtggagggcatggactttcagggacctggagaaagttag

SEQ ID NO: 75342 - DNA, 315 bp, Artificial Sequence
  derived and/or modified sequence
atgggaacacccaaaccccgtatactcccttggctagttagccagctggatcttggacagttagaaggcgttgcatgggtgaacaagtcaagaaccagattcagaatcccatggaagcacggactccggcaggacgcacagcaggaggatttcgggatttttcaggaacttggcacattcccgagtcagaccccactgaggaccccgatggtcgaagcagtgttgttgatccccaggaaaactttttggatgtcctactgggtgacttggtgttggccacatagccagattcgagaccctcaggcttggctttag

SEQ ID NO: 75343 - DNA, 903 bp, Artificial Sequence
  derived and/or modified sequence
atgggcacaccaaaaccaaggatcttgccatggctcgtttcccagctggatctgggccagcttgaaggagtagcctgggttaacaagtcaagaactaggtttaggattccttggaaacatggactccggcaggacgcacagcaggaagacttcggtatatttcaggcctgggcagaagctaccggagcctacgttcctggcagagataagccagacttgcccacctggaagagaaacttccgctctgccctgaatcgcaaggagggactgagactggctgaggaccgctccaaggaccctcacgacccccacaagatctacgagtttgtaaactccggtgtgggcgacttcagtcagccagatacttctccggatacaaatgggggggggtctacctctgatactcaggaggatatcctggacgaactcctaggcaatatggttctggcccctctgccagatccagggcctccaagcctagccgtcgcacccgaaccttgcccacagccactgcggagcccttccctcgacaacccaaccccttttcctaatctggggccaagtgagaacccactgaagcgcctcctcgttccaggcgaggacttgatcactttcacagaaggatcagggagaagccctcggtatgctctgtggttctgcgtgggcgagagttggcctcaggatcagccttggacaaaaagactggtcatggtgaaagtggtgcctacatgtctgcgggcacttgtagaaatggccagagtcgggggcgcaagcagccttgaaaacacggtggaccttcatattagtaactctcacccattgtctctaacctctgaccagtacaaggcctacctccaggaccttgtggagggcatggattttcagggccccggggagtcatag

SEQ ID NO: 75344 - DNA, 903 bp, Artificial Sequence
  derived and/or modified sequence
atgggaaccccaaagccacggatcctgccctggctggtgtcgcagctggacctggggcaactggagggcgtggcctgggtgaacaagagccgcacgcgcttccgcatcccttggaagcacggcctacggcaggatgcacagcaggaggatttcggaatcttccaggcctgggccgaggccactggtgcatatgttcccgggagggataagccagacctgccaacctggaagaggaatttccgctctgccctcaaccgcaaagaagggttgcgtttagcagaggaccggagcaaggaccctcacgacccacataaaatctacgagtttgtgaactcaggagttggggacttttcccagccagacacctctccggacaccaatggtggaggcagtacttctgatacccaggaagacattctggatgagttactgggtaacatggtgttggccccactcccagatccgggacccccaagcctggctgtagcccctgagccctgccctcagcccctgcggagccccagcttggacaatcccactcccttcccaaacctggggccctctgagaacccactgaagcggctgttggtgccgggggaagatctgattaccttcacggaaggaagcggacgctcaccacgctatgccctctggttctgtgtgggggagtcatggccccaggaccagccgtggaccaagaggctcgtgatggtcaaggttgtgcccacgtgcctcagggccttggtagaaatggcccgggtagggggtgcctcctccctggagaatactgtggacctgcacatttccaacagccacccactctccctcacctccgaccagtacaaggcctacctgcaggacttggtggagggcatggatttccagggccctggggagagctga

SEQ ID NO: 75345 - DNA, 315 bp, Artificial Sequence
  derived and/or modified sequence
atgggaaccccaaagccacggatcctgccctggctggtgtcgcagctggacctggggcaactggagggcgtggcctgggtgaacaagagccgcacgcgcttccgcatcccttggaagcacggcctacggcaggatgcacagcaggaggatttcggaatcttccaggagttggggacttttcccagccagacacctctccggacaccaatggtggaggcagtacttctgatacccaggaagacattctggatgagttactgggtaacatggtgttggccccactcccagatccgggacccccaagcctggctgtag

SEQ ID NO: 75346 - DNA, 710 bp, Artificial Sequence
  derived and/or modified sequence
gagtttgagagctacccggagctccaagacaggggtgggttccagctgcccgcacgccccgaccttccatcgtaggagttggggacttttcccagccagacacctctccggacaccaatggtggaggcagtacttctgatacccaggaagacattctggatgagttactgggtaacatggtgttggccccactcccagatccgggacccccaagcctggctgtagcccctgagccctgccctcagcccctgcggagccccagcttggacaatcccactcccttcccaaacctggggccctctgagaacccactgaagcggctgttggtgccgggggaagatctgattaccttcacggaaggaagcggacgctcaccacgctatgccctctggttctgtgtgggggagtcatggccccaggaccagccgtggaccaagaggctcgtgatggtcaaggttgtgcccacgtgcctcagggccttggtagaaatggcccgggtagggggtgcctcctccctggagaatactgtggacctgcacatttccaacagccacccactctccctcacctccgaccagtacaaggcctacctgcaggacttggtggagggcatggatttccagggccctggggagagctgagccctcgctcctcatggtgtgcctccaacccccctgttccccaccacctcaaccaataaactggttcct

SEQ ID NO: 75347 - DNA, 1055 bp, Artificial Sequence
  derived and/or modified sequence
gagtttgagagctacccggagctccaagacaggggtgggttccagctgcccgcacgccccgaccttccatcgtaggccggaccatgggaaccccaaagccacggatcctgccctggctggtgtcgcagctggacctggggcaactggagggcgtggcctgggtgaacaagagccgcacgcgcttccgcatcccttggaagcacggcctacggcaggatgcacagcaggaggatttcggaatcttccaggcctgggccgaggccactggtgcatatgttcccgggagggataagccagacctgccaacctggaagaggaatttccgctctgccctcaaccgcaaagaagggttgcgtttagcagaggaccggagcaaggaccctcacgacccacataaaatctacgagtttgtgaactcaggagttggggacttttcccagccagacacctctccggacaccaatggtggaggcagtacttctgatacccaggaagacattctggatgagttactgggtaacatggtgttggccccactcccagatccgggacccccaagcctggctgtagcccctgagccctgccctcagcccctgcggagccccagcttggacaatcccactcccttcccaaacctggggccctctgagaacccactgaagcggctgttggtgccgggggaagatctgattaccttcacggaaggaagcggacgctcaccacgctatgccctctggttctgtgtgggggagtcatggccccaggaccagccgtggaccaagaggctcgtgatggtcaaggttgtgcccacgtgcctcagggccttggtagaaatggcccgggtagggggtgcctcctccctggagaatactgtggacctgcacatttccaacagccacccactctccctcacctccgaccagtacaaggcctacctgcaggacttggtggagggcatggatttccagggccctggggagagctgagccctcgctcctcatggtgtgcctccaacccccctgttccccaccacctcaaccaataaactggttcct

SEQ ID NO: 75348 - DNA, 882 bp, Artificial Sequence
  derived and/or modified sequence
gagtttgagagctacccggagctccaagacaggggtgggttccagctgcccgcacgccccgaccttccatcgtaggcctgggccgaggccactggtgcatatgttcccgggagggataagccagacctgccaacctggaagaggaatttccgctctgccctcaaccgcaaagaagggttgcgtttagcagaggaccggagcaaggaccctcacgacccacataaaatctacgagtttgtgaactcaggagttggggacttttcccagccagacacctctccggacaccaatggtggaggcagtacttctgatacccaggaagacattctggatgagttactgggtaacatggtgttggccccactcccagatccgggacccccaagcctggctgtagcccctgagccctgccctcagcccctgcggagccccagcttggacaatcccactcccttcccaaacctggggccctctgagaacccactgaagcggctgttggtgccgggggaagatctgattaccttcacggaaggaagcggacgctcaccacgctatgccctctggttctgtgtgggggagtcatggccccaggaccagccgtggaccaagaggctcgtgatggtcaaggttgtgcccacgtgcctcagggccttggtagaaatggcccgggtagggggtgcctcctccctggagaatactgtggacctgcacatttccaacagccacccactctccctcacctccgaccagtacaaggcctacctgcaggacttggtggagggcatggatttccagggccctggggagagctgagccctcgctcctcatggtgtgcctccaacccccctgttccccaccacctcaaccaataaactggttcct

SEQ ID NO: 75349 - DNA, 903 bp, Artificial Sequence
  derived and/or modified sequence
atgggcacccccaagccccgcatcctgccctggctggtgtcccagctggacctgggccagctggagggcgtggcctgggtgaacaagagcaggacccgcttccgcatcccctggaagcacggcctgcggcaggatgcccagcaggaggactttggcatcttccaggcctgggccgaggccactggagcctacgtgcccggccgggacaagccagacctgcccacctggaagaggaacttccgcagcgccctgaacaggaaggagggcctgcggctggccgaggacaggagcaaggacccccatgacccccacaagatctatgaatttgtgaacagcggcgtgggggacttcagccagcctgacaccagcccagacaccaatggaggcggcagcaccagtgacacccaggaggacatcctggatgagctgctgggcaacatggtgctggcccccctgcctgaccccggcccccccagcctggccgtggcccctgagccctgcccccagcccctgcggagccccagcctggacaaccccacccccttccccaacctgggccccagcgagaaccccctgaagaggctgctggtgcctggagaggacctgatcaccttcacagagggcagcggccgcagccccaggtatgccctgtggttctgtgtgggggagagctggccccaggaccagccctggaccaagaggctggtgatggtgaaggtggtgcccacctgcctgcgggccctggtggagatggcccgggtgggcggggccagcagcctggagaacacagtggacctgcacatcagcaacagccaccccctgagcctgaccagtgaccagtacaaggcctacctgcaggacctggtggagggcatggacttccagggccctggagagagctag

SEQ ID NO: 75350 - DNA, 315 bp, Artificial Sequence
  derived and/or modified sequence
atgggcacccccaagccccgcatcctgccctggctggtgtcccagctggacctgggccagctggagggcgtggcctgggtgaacaagagcaggacccgcttccgcatcccctggaagcacggcctgcggcaggatgcccagcaggaggactttggcatcttccaggagctgggcaccttccccagccagacccccctgcggacccccatggtggaggccgtgctgctgatccccaggaagaccttctggatgagctactgggtgacctggtgctggccccacagccagatccgggacccccaggcctggctgtag

SEQ ID NO: 75351 - DNA, 903 bp, Artificial Sequence
  derived and/or modified sequence
atgggcacccccaagccccggatcctgccctggctggtgagccagctggatcttgggcagttggaaggagttgcctgggtgaacaagtctaggacacggtttagaatcccctggaaacacgggttgaggcaggacgcacagcaggaggacttcggcatattccaggcctgggctgaggccacaggcgcgtacgtgccagggagagataagcccgatctgcctacctggaagcggaacttcaggtctgccctgaatcggaaagaagggctgagacttgcagaggatcggagcaaagatccacacgatccacacaaaatctatgagtttgtgaatagcggcgtaggcgatttctcccaacccgacacttctccagacacgaacggaggcggaagtacatccgacactcaggaggatatactagatgagctgctgggcaacatggttctggcccccttgcctgaccccgggccacctagcctcgccgtggcaccggaaccgtgcccccagccgctgaggtctccctctctggacaacccaacccccttcccgaacctaggacccagtgaaaatcccctgaagaggctgctagtgcccggagaggacttgattacctttactgagggaagtggccggtccccccgatacgcactttggttttgcgtcggcgaatcctggccacaggatcaaccttggacaaaaaggctggtcatggttaaagtagtgcctacgtgtctgcgggcattggtagaaatggcacgcgtagggggcgcgagcagccttgagaacaccgttgaccttcatatcagtaatagccaccctttgtccctcacctctgaccagtacaaggcatatctccaggacctggtggaaggaatggacttccagggacctggcgaaagttag

SEQ ID NO: 75352 - DNA, 315 bp, Artificial Sequence
  derived and/or modified sequence
atgggcacccccaagccccggatcctgccctggctggtgagccagttagatctcgggcagctcgagggtgtggcctgggtgaacaaatccagaacacgatttcgcataccttggaaacacggcttgaggcaggacgcacagcaggaggattttggcattttccaggagttaggaacctttccctcacaaacacccctgaggactcccatggtggaggccgtgttactgatccctcgcaagactttttggatgtcctactgggtgacttggtgctggccgcacagtcagatcagagatccacaggcgtggctctag

SEQ ID NO: 75353 - DNA, 903 bp, Artificial Sequence
  derived and/or modified sequence
atgggcacccccaagccccggatcctgccctggctggtgagccagctggacctgggacagctcgaaggagtggcttgggtgaacaaatcaaggacacgcttccgaattccctggaaacacggcctccgccaggatgcgcagcaggaggacttcggtattttccaggcttgggctgaagctacgggggcctacgtccccggacgggataaaccggacctcccgacttggaaaaggaactttcggtctgctctgaataggaaggaaggactgcggctcgcagaggaccgctctaaggatcctcacgatccacataagatttatgagtttgttaactcgggggtgggagacttttcccagccggacacttcccccgataccaacggaggcggctccactagcgacacacaggaggatatcctggatgaattgctgggtaatatggtacttgctccattaccagacccgggccctccgagtttagccgtggcacccgagccatgcccccagcctctgcgctccccaagtttagataacccaacaccctttcctaacctgggccccagcgagaacccactaaagcgcctgctggtgccaggtgaggacctgatcaccttcaccgagggatctgggcggagccctaggtacgccttgtggttctgtgtgggagagagttggcctcaggaccagccgtggaccaagaggctggttatggtgaaagtcgtgcctacttgccttcgagctctggtggaaatggcccgggtgggcggcgcttcctctctcgagaacacagtcgatctgcatatatctaatagtcatccactaagcttaacaagtgaccaatacaaggcctatttgcaggacttggtagagggcatggattttcaggggccaggagaaagctag

SEQ ID NO: 75354 - DNA, 903 bp, Artificial Sequence
  derived and/or modified sequence
atgggcaccccgaagccgcgtatcctgccgtggctggtttcccagctggatctcggtcaactggaaggcgtggcttgggtgaacaagtccagaactcgcttcagaataccctggaagcacggcctcagacaggacgcccaacaggaagacttcggtatttttcaggcttgggccgaagccaccggggcttacgtgccaggaagggacaagcctgatctccccacatggaagcggaattttcggtcagcgctcaatcgcaaggaggggctgaggctggccgaagaccggagtaaggacccgcacgaccctcacaaaatctacgaattcgtgaattcaggcgtcggagacttcagccagccagacaccagccctgatacaaatggtggaggcagtacatctgatacccaggaagacatactggacgagttgctcggtaatatggtgttagccccacttcccgatcccggtcccccaagtctggccgttgcgcctgaaccttgtccccagccattacgttccccgagcttggacaatcctacacccttccctaatctgggaccttcagaaaacccactgaagagactgctggtgcctggcgaggacttgatcacctttaccgaaggtagcgggaggagccccagatacgctctgtggttctgtgtgggagagtcctggccgcaagatcagccgtggacaaagcgcctggtaatggttaaagtggtgcccacctgtttgagagctctggtcgaaatggctcgagttgggggagcctcaagtttggaaaacacagtggatcttcacatctccaacagtcatccactgtccctgacttccgaccagtacaaggcctatctacaggatcttgtggagggcatggacttccaggggcctggggagtcctag

SEQ ID NO: 75355 - DNA, 315 bp, Artificial Sequence
  derived and/or modified sequence
atgggaactcccaagccgaggatcctcccatggctggtgtcccagctggacctgggccagctcgaaggcgtggcgtgggtgaataagtcacggactagatttcgcattccctggaaacacggactgaggcaggacgctcagcaggaggactttggcatttttcaagagctcggcacatttccatcgcagacacctctccgcactccgatggtggaggctgtcctcctcatacccaggaaaactttttggatgtcctattgggtcacttggtgttggccccacagccagatcagagaccctcaggcctggctttag

SEQ ID NO: 75356 - DNA, 903 bp, Artificial Sequence
  derived and/or modified sequence
atgggtacccccaagcccagaatattgccgtggctcgtgagccagctggacttaggccaactcgaaggagtagcatgggttaataaatcccgtactcgtttcagaattccttggaagcacggactccgccaagatgctcagcaggaggactttgggatattccaagcctgggcagaagctactggagcttatgtgccaggacgggacaaacccgaccttcctacctggaaaaggaattttagatctgcactcaatcgcaaggaggggctacgcttggccgaggacagaagcaaggacccacatgatccccacaagatatacgagttcgtcaatagtggagtcggggacttctcccagcccgataccagtcccgacaccaacggcggagggagcacgtctgacacgcaggaggatattctggacgagcttctgggcaacatggttctggcccctctacctgaccccggacccccatcactggccgtcgccccagagccttgccctcagccgttgaggagcccatcactcgacaaccctacaccgtttcccaacttgggcccttccgagaaccctttgaagagactgcttgtacccggtgaagacctgattactttcactgaaggctcagggagatcacccaggtatgctctgtggttttgtgtgggagagtcttggccacaggatcaaccttggactaaacggctggtgatggttaaagtcgtgcctacctgtctcagagctctggtcgagatggccagggtcgggggtgcgtcttctctggaaaatacagtcgacctgcacattagcaacagccacccactgtcactgactagcgatcaatacaaagcctacctgcaagacctcgtcgagggtatggactttcaaggcccaggggaaagctag

SEQ ID NO: 75357 - DNA, 903 bp, Artificial Sequence
  derived and/or modified sequence
atgggcacccccaagcccagaatcctgccctggctggtgagccagctggacctgggccagctggagggcgtggcctgggtgaacaagagcagaaccagattcagaatcccctggaagcacggcctgagacaggacgcccagcaggaggacttcggcatcttccaggcctgggccgaggccaccggcgcctacgtgcccggcagagacaagcccgacctgcccacctggaagagaaacttcagaagcgccctgaacagaaaggagggcctgagactggccgaggacagaagcaaggacccccacgacccccacaagatctacgagttcgtgaacagcggcgtgggcgacttcagccagcccgacaccagccccgacaccaacggcggcggcagcaccagcgacacccaggaggacatcctggacgagctgctgggcaacatggtgctggcccccctgcccgaccccggcccccccagcctggccgtggcccccgagccctgcccccagcccctgagaagccccagcctggacaaccccacccccttccccaacctgggccccagcgagaaccccctgaagagactgctggtgcccggcgaggacctgatcaccttcaccgagggcagcggcagaagccccagatacgccctgtggttctgcgtgggcgagagctggccccaggaccagccctggaccaagagactggtgatggtgaaggtggtgcccacctgcctgagagccctggtggagatggccagagtgggcggcgccagcagcctggagaacaccgtggacctgcacatcagcaacagccaccccctgagcctgaccagcgaccagtacaaggcctacctgcaggacctggtggagggcatggacttccagggccccggcgagagctag

SEQ ID NO: 75358 - DNA, 315 bp, Artificial Sequence
  derived and/or modified sequence
atgggcacccccaagcccagaatcctgccctggctggtgagccagctggacctgggccagctggagggcgtggcctgggtgaacaagagcagaaccagattcagaatcccctggaagcacggcctgagacaggacgcccagcaggaggacttcggcatcttccaggagctgggcaccttccccagccagacccccctgagaacccccatggtggaggccgtgctgctgatccccagaaagaccttctggatgagctactgggtgacctggtgctggccccacagccagatcagagacccccaggcctggctgtag

SEQ ID NO: 75359 - DNA, 846 bp, Artificial Sequence
  derived and/or modified sequence
atggtactggcgcccctgcctgatccaggcccgccttctctggctgtggccccagaaccttgcccccaacccctgcgaagtccttctctggataatcctacgccattcccaaatctcggcccaagcgaaaacccactcaagagattactggtgcctggagaagaatgggaattcgaggtgaccgctttttaccgcggtaggcaggtgtttcagcagaccatctcctgccccgagggacttagactggtcggttctgaggtgggcgacagaaccctgccaggctggcccgtgacattgcctgaccccggcatgagcctgaccgaccgcggtgttatgtcctacgtgcggcacgtgctgtcatgtctgggcggaggtctggcactgtggcgggccggtcagtggttatgggcccaacgacttggccattgccacacttactgggcggtttccgaagagttacttcctaattcagggcatggcccagatggagaagttcctaaagataaggagggcggcgtgttcgatttgggcccgttcattgtggacctgatcacgtttacagagggatccggcagatcccctagatatgctctatggttctgtgtgggcgagtcctggccgcaagatcagccctggactaagcgcctggttatggtgaaagttgtgccgacctgtctgagggcacttgtcgagatggcaagggtgggcggagcctccagccttgaaaatactgttgacctccacatttctaatagccaccctctgtctctcacatcagatcagtacaaagcctatcttcaggacctcgtggagggtatggacttccaaggacctggcgagtcttag

SEQ ID NO: 75360 - DNA, 846 bp, Artificial Sequence
  derived and/or modified sequence
atggtgctcgcccctcttcccgaccctggccccccatccctggccgtggcccctgagccatgtccccagcccctccgatcacctagtctggataatccaacccccttcccaaatttgggccccagcgagaaccctttgaaacgcctgctggtgcctggagaggaatgggagttcgaggttactgcgttctacagagggaggcaggtatttcagcaaacaatctcgtgtcctgaagggcttagactggtaggaagcgaagtaggagatcgcacgctcccagggtggcccgtcactcttccggatccaggcatgagcctgaccgataggggagttatgagctacgttaggcacgtgcttagttgcctggggggaggcctcgccctgtggcgcgcggggcagtggttatgggcgcagcgacttggccattgtcatacctactgggctgtctccgaagaactccttcctaacagtggccacggtcctgacggagaagttccaaaggataaggagggtggcgtattcgacttgggcccattcattgttgacctgattacttttactgagggctctggacgctcaccgcgttatgctttgtggttctgcgtcggggaaagctggccccaagatcagccgtggacgaagagacttgttatggtcaaggtcgtgcccacttgtctgcgagctttggtcgagatggcgagagtgggtggagcctcatcactggagaacaccgtcgacttgcacatatctaactcccatccactgtcactgacgagcgatcaatacaaagcttatctccaggacctagtggagggcatggactttcaaggacccggggaatcttag

SEQ ID NO: 75361 - DNA, 846 bp, Artificial Sequence
  derived and/or modified sequence
atggtgctggcccccctgcctgaccccggcccccccagcctggccgtggcccctgagccctgcccccagcccctgcggagccccagcctggacaaccccacccccttccccaacctgggccccagcgagaaccccctgaagaggctgctggtgcctggagaggagtgggagtttgaggtgacagccttctaccggggccggcaggtgttccagcagaccatcagctgcccagagggcctgcggctggtgggcagcgaggtgggggacaggaccctgcccggctggcctgtgaccctgcctgaccccggcatgagcctgacagaccggggcgtgatgtcctatgtgagacatgtgctgagctgcctgggcggcggcctggccctgtggagggctggccagtggctgtgggcccagaggctgggccactgccacacctactgggccgtgtctgaggagctgctgcccaacagcggccacggcccagatggagaggtgcccaaggacaaggagggcggcgtgtttgacctgggccccttcatcgtggacctgatcaccttcacagagggcagcggccgcagccccaggtatgccctgtggttctgtgtgggggagagctggccccaggaccagccctggaccaagaggctggtgatggtgaaggtggtgcccacctgcctgcgggccctggtggagatggcccgggtgggcggggccagcagcctggagaacacagtggacctgcacatcagcaacagccaccccctgagcctgaccagtgaccagtacaaggcctacctgcaggacctggtggagggcatggacttccagggccctggagagagctag

SEQ ID NO: 75362 - DNA, 846 bp, Artificial Sequence
  derived and/or modified sequence
atggtgctggcccccctgcccgaccccggcccccccagcctggccgtcgcccccgagccctgtcctcagccccttagaagcccctccttggataatcctactccgtttccaaacctgggcccatccgaaaatccactgaagcgcctgctggtgccgggtgaggagtgggaattcgaagtgactgccttctaccggggccgacaggtgttccagcagactatttcctgcccagagggattacgcctggtggggtcagaagtcggggatcggaccctgccggggtggccagtcacacttccggaccccggaatgtcactcactgatcgaggcgtgatgagctatgtccgccacgttctgagttgcctgggcgggggtctggccctctggagagctggacaatggttgtgggcccagcgtttggggcattgccacacttactgggcagtctctgaggaattgctgccaaattccggccatggccctgatggggaggtgccaaaggacaaggaaggtggcgtttttgatctgggacccttcattgtggaccttattactttcacagagggttccggacgatccccgagatacgcgctgtggttctgcgtgggtgaaagctggccacaggatcagccgtggacaaaacggctcgtgatggtgaaggtggtgcccacctgtctcagagcactggtcgagatggccagagtcggcggcgctagcagtctggagaacacagtcgatctgcacatttcaaattcccatccactttccctgacttctgatcagtataaagcttacttgcaggacttagtcgaggggatggacttccaaggaccaggtgaatcctag

SEQ ID NO: 75363 - DNA, 846 bp, Artificial Sequence
  derived and/or modified sequence
atggtgctggcccccctgcccgaccccggcccccccagcctggccgttgcccccgagccctgcccacagcccctcagatccccctctctcgacaatccaaccccattccccaatctcgggccatctgaaaacccgctaaaacgactgctcgtccctggcgaggagtgggaattcgaggttactgcattttatcggggccgccaggtcttccaacagactatttcttgtcctgagggactccgactcgtgggctctgaagtgggggaccgaacccttcccggatggccagtcacacttcccgacccgggcatgtccctgaccgaccggggagttatgtcatatgtgagacatgtcctttcctgcctcggtgggggacttgcattgtggcgggctggtcagtggctgtgggcccagcgacttggacattgtcacacctactgggccgtgtcagaggagctccttccgaactctggccatggccctgacggcgaggtaccaaaggataaagagggtggcgtattcgacttaggcccttttatcgtggatcttatcacatttaccgaaggaagcggacgttccccacgctatgccctttggttctgtgttggggaaagctggccccaagaccaaccttggacaaagcgcctggtgatggtgaaggtagtgccgacctgtcttagagctctggttgagatggctcgggtaggtggcgccagtagtctcgagaatactgtggatctccatatctccaacagccatcccctgtctctcacaagtgatcagtataaagcgtatttgcaggacctcgtggaaggaatggactttcagggccccggggagtcttag

SEQ ID NO: 75364 - DNA, 846 bp, Artificial Sequence
  derived and/or modified sequence
atggtcctcgcgccattgccggatccaggaccaccttctttggcggtggcaccggaaccttgtccacagcctctccgctccccgtccctcgataatccgacaccctttcccaatctcgggccttctgagaaccctttaaagcgcctcctggtgccaggcgaagagtgggaatttgaagtgacagccttttaccgaggtaggcaggtttttcagcaaacaatctcctgcccagaaggcctgaggctcgttggtagcgaggtcggagatcgcacactgcccggatggcctgtgactctacccgaccccggaatgagtctaacagaccgcggagtgatgtcatacgtgcgacacgtactctcttgcctgggtgggggtctggccctttggcgcgctggtcagtggctgtgggctcagagactcggtcattgtcacacatactgggccgtgtcggaggagctgctcccgaattcaggccacgggccagacggtgaggtgccaaaagataaggagggtggagttttcgacctcgggccttttatcgttgacttaatcacctttaccgaggggtctggcagatcccccagatacgcactgtggttttgcgtaggcgagtcttggccccaggatcagccatggacaaagcggcttgtgatggttaaggtcgtcccgacgtgtttgcgtgctttggttgagatggctcgggtcggtggagcgtcaagtctcgaaaataccgtcgatctgcacatttccaatagtcaccctctgtctttaacctccgaccagtataaggcttacttgcaggatttggttgaagggatggactttcagggacctggagaatcatag

SEQ ID NO: 75365 - DNA, 846 bp, Artificial Sequence
  derived and/or modified sequence
atggtgctagcccctttgcccgatcccggaccacctagtctggcagtggccccagagccatgtccgcagccgctcaggtctccctctctcgacaatcccacaccctttcccaaccttggaccctctgaaaatcctcttaagagactgctggtccccggagaggaatgggagttcgaggtgacggcattttatcgtgggaggcaggttttccaacaaacgataagctgccccgagggactgagactcgtggggagtgaagtgggagaccgtactttgcccggatggccagtgacacttcctgatcccggaatgtccctcaccgacaggggcgtgatgtcttacgtgagacacgtcctgagttgcctcggaggtggactggccctgtggagggcaggacagtggttgtgggctcaaagactgggccactgccatacctactgggcagtgtcagaggagcttcttcctaactccgggcatggtcctgatggagaagtcccaaaggataaagaggggggagtgttcgatctgggcccatttatagtcgacctgatcacctttacagaaggctccggcaggtcgcctcggtacgctctgtggttctgcgtaggggagtcttggcctcaggaccagccttggacaaagagattggtcatggtaaaggtcgtgcctacctgcctgcgggctctggtggaaatggcccgtgtcgggggagccagcagcctggagaatactgtggacctgcacatatcaaacagtcatcccctgagtctgaccagtgaccagtacaaagcctacctacaggatctggtagaaggaatggactttcagggcccaggagaaagttag

SEQ ID NO: 75366 - DNA, 846 bp, Artificial Sequence
  derived and/or modified sequence
atggtgctggcccccctgcccgaccccggcccccccagcctggccgtggcccccgagccctgcccccagcccctgagaagccccagcctggacaaccccacccccttccccaacctgggccccagcgagaaccccctgaagagactgctggtgcccggcgaggagtgggagttcgaggtgaccgccttctacagaggcagacaggtgttccagcagaccatcagctgccccgagggcctgagactggtgggcagcgaggtgggcgacagaaccctgcccggctggcccgtgaccctgcccgaccccggcatgagcctgaccgacagaggcgtgatgagctacgtgagacacgtgctgagctgcctgggcggcggcctggccctgtggagagccggccagtggctgtgggcccagagactgggccactgccacacctactgggccgtgagcgaggagctgctgcccaacagcggccacggccccgacggcgaggtgcccaaggacaaggagggcggcgtgttcgacctgggccccttcatcgtggacctgatcaccttcaccgagggcagcggcagaagccccagatacgccctgtggttctgcgtgggcgagagctggccccaggaccagccctggaccaagagactggtgatggtgaaggtggtgcccacctgcctgagagccctggtggagatggccagagtgggcggcgccagcagcctggagaacaccgtggacctgcacatcagcaacagccaccccctgagcctgaccagcgaccagtacaaggcctacctgcaggacctggtggagggcatggacttccagggccccggcgagagctag

SEQ ID NO: 75367 - DNA, 465 bp, Artificial Sequence
  derived and/or modified sequence
atggtcctagccccactacctgatcctggacccccctcgctcgccgttgccccagaaccgtgccctcagcccctgagaagtccctctcttgacaaccctacaccatttcctaacctcggcccctctgaaaacccccttaagcgactcttggtgcctggggaggacctaatcacgttcactgaaggtagcgggcgaagtccccggtacgcgctgtggttctgtgtgggcgaaagctggcctcaggatcagccgtggaccaagcggctggttatggtgaaggtcgtgcccacatgcctgcgggcactggtggagatggctcgagttggtggcgcttcctctcttgagaatacggtggatctccatatttccaacagtcacccgctaagcctcactagtgaccagtacaaggcttatttacaggacctcgtggagggtatggacttccagggaccgggtgagagctag

SEQ ID NO: 75368 - DNA, 465 bp, Artificial Sequence
  derived and/or modified sequence
atggtgttagccccgctgccagaccccgggcctccgtctctcgccgtggctccagagccttgcccccagccactgcggagtccgtcgcttgataatccaactcccttcccgaatctgggaccgtccgagaatcccctgaagcggctcctggtgccgggcgaggacctcatcactttcactgagggttcgggtagaagcccccgatacgctttgtggttctgtgtcggggaatcttggccccaggatcagccttggacgaagcgtttggtgatggtcaaagtcgtgccaacctgtctgcgggcacttgtagagatggcccgcgtgggtggggcctcatcgttagagaatacagtggatttacatatttccaactcacaccccctcagtctcacctctgaccagtacaaagcatacttgcaagatttggtagaggggatggacttccagggtcccggggagtcctag

SEQ ID NO: 75369 - DNA, 465 bp, Artificial Sequence
  derived and/or modified sequence
atggtgctggcccccctgcctgaccccggcccccccagcctggccgtggcccctgagccctgcccccagcccctgcggagccccagcctggacaaccccacccccttccccaacctgggccccagcgagaaccccctgaagaggctgctggtgcctggagaggacctgatcaccttcacagagggcagcggccgcagccccaggtatgccctgtggttctgtgtgggggagagctggccccaggaccagccctggaccaagaggctggtgatggtgaaggtggtgcccacctgcctgcgggccctggtggagatggcccgggtgggcggggccagcagcctggagaacacagtggacctgcacatcagcaacagccaccccctgagcctgaccagtgaccagtacaaggcctacctgcaggacctggtggagggcatggacttccagggccctggagagagctag

SEQ ID NO: 75370 - DNA, 465 bp, Artificial Sequence
  derived and/or modified sequence
atggtgctggcccccctgcccgaccccggcccccccagcctggccgtggcgcctgagccgtgcccacagccattgagaagcccatccctggacaatccaaccccctttcctaatcttgggccttccgaaaaccctctaaagcggttgctagtgcccggggaagatctgatcaccttcaccgaagggtctgggaggtctccccgctatgcattgtggttctgtgttggtgagtcatggcctcaggaccagccatggacaaaaaggctcgtcatggtcaaggtggttcccacatgtctgcgcgcccttgttgaaatggccagagtagggggtgcatcctctctggaaaatacagtggatcttcacatttcaaatagccaccctctgtctctgacctcagatcagtataaggcctaccttcaggacctggtagagggaatggacttccagggacctggcgagagttag

SEQ ID NO: 75371 - DNA, 465 bp, Artificial Sequence
  derived and/or modified sequence
atggtgctggcccccctgcccgaccccggcccccccagcctggccgtagctcctgagccctgcccccagccactgcgatctcccagtctggataacccaactccttttccgaatctcggcccttctgagaaccctttgaagcgcttgctggttcccggggaagatcttattacattcacagaaggatctgggagatctccacgatatgcattatggttctgcgttggggaaagttggccgcaggaccagccctggacgaaaaggctggttatggtgaaagtggttcctacgtgccttcgcgcgcttgtagaaatggctagagtgggtggcgcctcatcactggagaataccgtcgacctacacatttcaaatagccatccactcagtctcacctccgatcaatataaggcatatcttcaggatctggtcgaggggatggacttccaggggccgggtgagagttag

SEQ ID NO: 75372 - DNA, 465 bp, Artificial Sequence
  derived and/or modified sequence
atggtccttgccccacttcccgatcctggccctcccagtctcgccgtcgcccctgaaccatgcccgcagccactacgttcaccttcccttgataacccaacccccttccctaatttaggcccatccgagaaccccctgaagcgcctgttggttcctggtgaggacctcattaccttcactgagggttccggaaggagcccacgctacgccctgtggttttgcgtcggcgaatcctggccccaggatcaaccctggacaaagcgcctggtgatggtgaaggtggtcccaacctgtctcagagcgcttgtcgaaatggctagagtaggcggagcatcctctttggagaatacagttgatctccatattagtaatagccaccctctttcattaacaagcgatcagtacaaggcttatctccaggaccttgtagagggaatggacttccagggtccaggcgaatcatag

SEQ ID NO: 75373 - DNA, 465 bp, Artificial Sequence
  derived and/or modified sequence
atggtactggcgcctctgcccgacccaggccctccgtctctggctgtcgcgcctgaaccgtgcccgcagcccctgaggtcccctagcttggacaatcccactcctttccccaacctcggcccatctgagaatcctcttaagcgcttgttagtaccaggagaggacttgataacttttacggaaggttcagggagatcccccagatacgcattgtggttctgcgtcggggaatcctggcctcaagatcaaccctggaccaaacgactcgtgatggtgaaggtggtccccacttgcctgcgggcactcgtcgagatggccagagttggaggggctagctccctggagaatactgtggacttgcatatctctaattcccaccccctcagcctgactagtgaccagtataaagcatatctgcaggatctggtggagggcatggatttccagggacccggtgagagctag

SEQ ID NO: 75374 - DNA, 465 bp, Artificial Sequence
  derived and/or modified sequence
atggtgctggcccccctgcccgaccccggcccccccagcctggccgtggcccccgagccctgcccccagcccctgagaagccccagcctggacaaccccacccccttccccaacctgggccccagcgagaaccccctgaagagactgctggtgcccggcgaggacctgatcaccttcaccgagggcagcggcagaagccccagatacgccctgtggttctgcgtgggcgagagctggccccaggaccagccctggaccaagagactggtgatggtgaaggtggtgcccacctgcctgagagccctggtggagatggccagagtgggcggcgccagcagcctggagaacaccgtggacctgcacatcagcaacagccaccccctgagcctgaccagcgaccagtacaaggcctacctgcaggacctggtggagggcatggacttccagggccccggcgagagctag

SEQ ID NO: 75375 - protein, 378 aa, Artificial Sequence
  derived and/or modified sequence
MDSVRSGAFGHLFRPDNFIFGQSGAGNNWAKGHYTEGAELVDSVLDVVRKECENCDCLQGFQLTHSLGGGTGSGMGTLLISKVREEYPDRIMNTFSVVPSPKVSDTVVEPYNATLSIHQLVENTDETYCIDNEALYDICFRTLKLATPTYGDLNHLVSATMSGVTTSLRFPGQLNADLRKLAVNMVPFPRLHFFMPGFAPLTARGSQQYRALTVPELTQQMFDAKNMMAACDPRHGRYLTVATVFRGRMSMKEVDEQMLAIQSKNSSYFVEWIPNNVKVAVCDIPPRGLKMSSTFIGNSTAIQELFKRISEQFTAMFRRKAFLHWYTGEGMDEMEFTEAESNMNDLVSEYQQYQDATAEEEGEMYEDDEEESEAQGPK

SEQ ID NO: 75376 - DNA, 1137 bp, Artificial Sequence
  derived and/or modified sequence
atggacagtgtgcgtagtggtgcctttgggcacttgttccggccagataattttatcttcggccaaagcggcgcaggcaataattgggctaaggggcactatactgaaggcgccgagctggtggattctgtgctcgatgtagtgcgaaaggaatgtgaaaactgcgattgtttacaggggtttcagctgacccatagcctcgggggcggcactgggtctggaatgggcaccttgctgatcagtaaagtgcgcgaggagtacccagataggatcatgaacactttttcggtcgttccatctccaaaagtgagtgataccgtggtggaaccgtataacgcaaccctgagcatccatcagctggtagaaaataccgatgaaacttattgcattgacaacgaagccctctatgatatttgttttcggacactcaaactcgccactcctacctatggggatctgaaccatctcgtttccgctacaatgtctggcgtgaccacatctcttcgtttccccggacagctgaatgctgatctcaggaagttggcagtaaacatggtcccattcccacgcctccatttctttatgccaggctttgccccactgacagcaaggggatcccagcagtacagggccctcactgttccagagctaactcagcagatgttcgatgccaagaacatgatggccgcatgtgatccgaggcacggtaggtacctgactgtggccacagtctttcgagggcggatgtctatgaaagaagttgatgagcaaatgctagctatacaaagtaagaactcgagttatttcgtggagtggattccaaataatgtaaaggtggcagtctgtgacatccctccacgcgggctgaaaatgtccagtacatttattggaaacagcactgccatccaggaactgtttaagcgaatcagtgaacagtttacggcgatgttccggcggaaggctttcttacactggtacactggagaaggcatggacgagatggagtttaccgaagctgaatcgaacatgaatgatctcgtcagcgaataccagcaatatcaggacgctaccgcagaggaagaaggggagatgtatgaagacgacgaggaggagagcgaggcacaaggacccaagtag

SEQ ID NO: 75377 - DNA, 1137 bp, Artificial Sequence
  derived and/or modified sequence
atggattctgtgcgcagcggggccttcggccacctgttccggccagacaacttcatcttcggccagagcggggccggcaacaactgggccaagggccactacacagaaggagctgagctggtggacagcgtgctggatgtggtgaggaaagaatgtgagaactgtgactgcctgcagggcttccagctgacccacagcctgggcggcggcactggaagtggcatgggcaccctgctgatcagcaaggtgcgggaggagtacccagaccgcatcatgaacaccttctctgtggtgcccagccccaaggtgtctgacacagtggtggagccctacaatgccaccctgagcatccaccagctggtggagaacacagatgagacctactgcatcgacaatgaggccctgtatgacatctgcttccgcaccctgaagctggccacccccacctacggggacctgaaccacctggtgtctgccaccatgtctggagtgaccaccagcctgcgcttccctggccagctgaatgctgacctgaggaagctggccgtgaacatggtgcccttcccccggctgcacttcttcatgcctggctttgcccccctgacagcccggggcagccagcagtaccgggccctgactgtgcctgagctgacccagcagatgtttgatgccaagaacatgatggccgcctgtgaccccaggcatggccgctacctgactgtggccaccgtcttccggggccgcatgtccatgaaggaggtggatgagcagatgctggccatccagagcaagaacagcagctactttgtggagtggatccccaacaacgtgaaggtggccgtgtgtgacatccccccccggggcctgaagatgagcagcaccttcatcggcaacagcacagccatccaggagctgttcaagaggatcagcgagcagttcaccgccatgttccggaggaaggccttcctgcactggtacacaggagagggcatggatgagatggagttcacagaagctgagagcaacatgaatgacctggtgtctgagtaccagcagtaccaggatgccacagctgaggaggagggggagatgtatgaagatgatgaggaggagagcgaggcccagggccccaagtag

SEQ ID NO: 75378 - DNA, 1137 bp, Artificial Sequence
  derived and/or modified sequence
atggacagcgtgcggagcggcgccttcggccacctgttccggcccgataattttattttcggtcaaagcggagctggcaataactgggccaagggacattacacagaaggagccgagctggtcgactcagtccttgatgtggtgcgaaaggagtgcgagaactgtgattgtctccaagggttccaattgacacactctctgggtggaggaacgggctcaggtatgggcaccctcttaatctcaaaagttagggaggagtatccagatcgaataatgaacacgttctcagtcgtccccagtcctaaagtttctgatactgttgtagagccttataatgctacactgagcatccaccagctcgtggagaataccgacgaaacttactgtatcgataatgaggcactgtacgatatttgtttccgcacgcttaaactggcaactcccacctatggcgacctgaatcatttagtgagcgctaccatgagtggcgtcaccactagccttcgatttccaggccagctgaatgcggacctgcggaagttagccgtgaacatggtgcctttcccacgcttgcacttttttatgccaggctttgccccgctcaccgcaagaggaagtcagcagtatcgcgccctcacagtgcctgagctgacccagcagatgttcgatgccaaaaacatgatggccgcttgtgatcctagacatggaagatatctcacagtggctactgtgttcaggggtcggatgtctatgaaggaggtcgatgaacagatgcttgcaatccagtcaaaaaattcaagctacttcgtggagtggattcccaataatgtgaaggtcgctgtgtgtgatattccacctaggggtcttaagatgtcttcaacattcatagggaatagcacagcaatccaggagttgttcaaaaggatttccgaacagtttacagccatgttccgtcggaaggccttcctgcactggtatacaggcgaaggaatggatgaaatggagttcacggaagccgagagcaatatgaacgatctggtgagcgagtatcagcagtaccaggatgccactgccgaggaggaaggggagatgtatgaggacgatgaggaagagtccgaggcccagggacccaagtag

SEQ ID NO: 75379 - DNA, 1137 bp, Artificial Sequence
  derived and/or modified sequence
atggactctgtacgctctggtgcctttgggcaccttttcagacccgataactttattttcggacagagcggggctggcaacaactgggctaagggacactatactgaaggagcagagcttgtggatagcgttctggacgtcgtaaggaaagaatgtgaaaactgcgactgcctccaggggttccagctgacccactcgctcggaggcggtaccggatccggaatgggtaccctcttgatatccaaggtgagagaggaatatcctgatagaattatgaacacattctccgttgtgccctctccaaaggtctcagacactgtagttgaaccatataacgcaacactgtcgatacatcagctggtggagaacaccgacgagacatactgcatagacaatgaagcgctgtacgatatctgtttcaggacattaaagctggccaccccaacttacggcgacctgaaccatctggtgagcgccacaatgtccggtgtcacgactagcctgagattccccggacagcttaatgccgacctgagaaagctggctgtaaacatggtgcctttccctcggctccatttcttcatgccgggatttgcacctctgactgcccgtggctctcagcagtacagggcgctcactgtgcctgaactgacacagcaaatgttcgacgctaaaaacatgatggctgcttgcgatcctaggcatggcaggtacctgaccgtggctactgtgtttaggggcaggatgtcaatgaaagaagtggatgaacagatgctcgccatccagtccaagaacagttcttacttcgtggaatggattcccaacaatgtgaaggttgctgtatgcgatattcctcctaggggtctgaaaatgagttcgacattcatcggaaattccactgccattcaggagctgttcaaacgaatttcggaacagttcacagcgatgtttcggaggaaagcctttctgcactggtacacaggtgaagggatggacgagatggaatttacagaagcggagtccaacatgaacgatctggtttccgagtatcagcagtaccaggacgccaccgccgaggaggaaggggagatgtatgaagacgacgaagaggaatccgaagcccagggtcctaagtag

SEQ ID NO: 75380 - DNA, 1137 bp, Artificial Sequence
  derived and/or modified sequence
atggacagcgtgagaagcggcgccttcggccacctgttcagacccgacaacttcatcttcggccagagcggcgccggcaacaactgggccaagggccactacaccgagggcgccgagctggtggacagcgtgctggacgtggtgagaaaggagtgcgagaactgcgactgcctgcagggcttccagctgacccacagcctgggcggcggcaccggcagcggcatgggcaccctgctgatcagcaaggtgagagaggagtaccccgacagaatcatgaacaccttcagcgtggtgcccagccccaaggtgagcgacaccgtggtggagccctacaacgccaccctgagcatccaccagctggtggagaacaccgacgagacctactgcatcgacaacgaggccctgtacgacatctgcttcagaaccctgaagctggccacccccacctacggcgacctgaaccacctggtgagcgccaccatgagcggcgtgaccaccagcctgagattccccggccagctgaacgccgacctgagaaagctggccgtgaacatggtgcccttccccagactgcacttcttcatgcccggcttcgcccccctgaccgccagaggcagccagcagtacagagccctgaccgtgcccgagctgacccagcagatgttcgacgccaagaacatgatggccgcctgcgaccccagacacggcagatacctgaccgtggccaccgtgttcagaggcagaatgagcatgaaggaggtggacgagcagatgctggccatccagagcaagaacagcagctacttcgtggagtggatccccaacaacgtgaaggtggccgtgtgcgacatcccccccagaggcctgaagatgagcagcaccttcatcggcaacagcaccgccatccaggagctgttcaagagaatcagcgagcagttcaccgccatgttcagaagaaaggccttcctgcactggtacaccggcgagggcatggacgagatggagttcaccgaggccgagagcaacatgaacgacctggtgagcgagtaccagcagtaccaggacgccaccgccgaggaggagggcgagatgtacgaggacgacgaggaggagagcgaggcccagggccccaagtag

SEQ ID NO: 75381 - DNA, 1137 bp, Artificial Sequence
  derived and/or modified sequence
atggacagtgtccgcagtggcgcattcggccacctgttccgccccgacaatttcatattcggtcagtctggggcgggcaataactgggctaaaggccactacacagagggagcggaactcgttgattcggtcctcgacgttgttagaaaagagtgcgaaaattgtgattgcctccagggatttcagctcactcacagcctaggagggggaacagggagcggtatgggtacattgttaatctcgaaagtgagagaggagtaccccgaccggatcatgaacacatttagcgtggttccctcaccaaaagtgagtgacaccgtggtggaaccctacaatgctaccctttcgatccaccaactggtggagaatacagacgagacctattgtatagacaacgaggcattgtatgacatttgttttcgtacgttgaagttggccactcctacttacggagatctgaatcatctcgtttctgcaacaatgtcaggagtgacaacgagccttcgatttcccggacagctaaatgcagatctgcgtaagttggccgtgaacatggtgcctttcccacggcttcatttctttatgcctggattcgcaccgttaactgccaggggttcccagcaatacagagcccttacggtcccagagttgacacagcaaatgttcgatgccaagaacatgatggctgcctgcgacccccgccatggcagatatctgaccgttgctactgttttccgaggccgtatgtctatgaaagaggtcgacgaacagatgcttgctatccagagcaagaatagctcgtacttcgtcgagtggatcccaaacaacgtcaaggtggccgtttgcgacataccaccccggggactcaaaatgagctctacctttattggcaacagtacagccatacaagaactttttaagagaatatcagaacagtttaccgctatgtttaggcgcaaggcttttttgcattggtatacaggggagggaatggacgaaatggagtttacagaagccgagtccaacatgaatgacctggtgtctgaatatcagcaataccaggatgctacggccgaggaggagggcgagatgtacgaagacgacgaggaagagtcagaggctcaggggcccaaatag

SEQ ID NO: 75382 - DNA, 1137 bp, Artificial Sequence
  derived and/or modified sequence
atggacagcgtgcggagcggcgccttcggccacctgttccggcccgataactttatcttcggccaaagcggggctggcaacaattgggctaagggtcactacactgaaggggccgaactagtggatagtgtgctagacgttgtgcgtaaggaatgtgagaactgtgactgcctgcagggattccagctgacccactccctgggagggggtactggatctggcatggggaccctactgatcagcaaggtcagggaagagtacccagacaggattatgaacactttttcagtcgtcccgtctcccaaggtttccgacaccgtggtcgagccatacaacgccactctgtccatacaccagctagttgagaacacagatgaaacctattgcatcgataacgaggcattatatgatatctgttttagaaccctaaagctggcaactcccacatacggcgaccttaaccacctcgtttctgccacaatgagcggtgttacaaccagcctgcgatttccaggacaactcaacgccgacctgcggaaactggcagttaacatggtcccattccctaggctgcatttcttcatgcctggcttcgcgccgctcacagctcggggatcgcagcagtatagggccctaacggttccggaactaacacagcaaatgttcgacgcaaaaaacatgatggcggcatgcgacccccggcatggtcgatacttgacagtggccaccgtgtttcgcggacgcatgagcatgaaggaggtagacgagcagatgttggccattcagtctaaaaactcctcctacttcgtcgaatggattccaaacaatgtaaaggtagccgtttgtgacatacctcctcggggccttaaaatgtcctccacctttataggaaattccacagcaattcaggaactttttaaaaggatttccgagcagtttacggcaatgtttcgcaggaaggcatttctgcattggtataccggggaggggatggacgagatggaatttaccgaggctgaaagcaatatgaatgatcttgtgtcagagtaccagcagtaccaagacgctactgccgaggaggagggagagatgtacgaggacgacgaagaagagagtgaagcccaaggcccgaagtag

SEQ ID NO: 75383 - DNA, 1137 bp, Artificial Sequence
  derived and/or modified sequence
atggacagtgttcggagtggagcattcggccacttgtttaggcccgataacttcatcttcggccaaagcggagcaggaaacaactgggctaagggacattacactgagggcgctgaactcgtcgactccgttttagatgtcgttaggaaggaatgcgagaattgtgactgtctacagggctttcaactgacacactcactggggggaggtactgggagtggcatgggtacgcttttaatcagtaaggtacgagaggagtaccctgaccgcatcatgaacaccttctccgtcgtccccagccctaaagtgtccgacacagtggtggagccgtacaacgccaccctctccatccatcagctcgtggagaatactgacgagacatattgcattgacaatgaggccctgtatgatatttgttttcgtactctgaagcttgcgacccctacatatggggacctgaatcatctcgtcagtgctactatgagcggcgtaacgacctcacttagatttccaggacagctcaatgccgacctgagaaaacttgctgtcaatatggtccctttccctaggctacatttcttcatgccaggcttcgcccctctcaccgcccgtggcagccagcagtatcgcgcactcactgtccccgagctgactcaacagatgtttgacgccaaaaatatgatggctgcgtgtgatcccaggcatggacgctacctcaccgtggcgaccgtatttcgagggagaatgtctatgaaggaggtcgatgagcagatgctggcgatccagagtaagaatagctcctactttgtagagtggatccccaacaacgtgaaagtagctgtttgtgatattcccccaagaggcctgaaaatgtccagtacgtttatcgggaactcaaccgccattcaggagctgttcaaacgcatcagtgagcagtttaccgctatgtttagacgcaaggcctttctgcactggtacacaggggaggggatggacgaaatggaatttactgaggccgaatcgaatatgaatgacctggtgtccgagtatcagcagtatcaggatgccactgccgaggaggaaggggagatgtatgaggatgacgaagaggaatcagaagcgcaggggccaaaatag

SEQ ID NO: 75384 - protein, 219 aa, Artificial Sequence
  derived and/or modified sequence
MAQQTSPDTLTVPEVDNPHCPNPWLNEDLVKSLRENLLQHEKSKTARKSVSPKLSPVISPRNSPRLLRRMLLSSNIPKQRRFTVAHTCFDVDNGTSAGRSPLDPMTSPGSGLILQANFVHSQRRESFLYRSDSDYDLSPKSMSRNSSIASDIHGDDLIVTPFAQVLASLRTVRNNFAALTNLQDRAPSKRSPMCNQPSINKATITGSWMELNPYTLLDM

SEQ ID NO: 75385 - protein, 745 aa, Artificial Sequence
  derived and/or modified sequence
MAQQTSPDTLTVPEVDNPHCPNPWLNEDLVKSLRENLLQHEKSKTARKSVSPKLSPVISPRNSPRLLRRMLLSSNIPKQRRFTVAHTCFDVDNGTSAGRSPLDPMTSPGSGLILQANFVHSQRRESFLYRSDSDYDLSPKSMSRNSSIASDIHGDDLIVTPFAQVLASLRTVRNNFAALTNLQDRAPSKRSPMCNQPSINKATITEEAYQKLASETLEELDWCLDQLETLQTRHSVSEMASNKFKRMLNRELTHLSEMSRSGNQVSEFISNTFLDKQHEVEIPSPTQKEKEKKKRPMSQISGVKKLMHSSSLTNSSIPRFGVKTEQEDVLAKELEDVNKWGLHVFRIAELSGNRPLTVIMHTIFQERDLLKTFKIPVDTLITYLMTLEDHYHADVAYHNNIHAADVVQSTHVLLSTPALEAVFTDLEILAAIFASAIHDVDHPGVSNQFLINTNSELALMYNDSSVLENHHLAVGFKLLQEENCDIFQNLTKKQRQSLRKMVIDIVLATDMSKHMNLLADLKTMVETKKVTSSGVLLLDNYSDRIQVLQNMVHCADLSNPTKPLQLYRQWTDRIMEEFFRQGDRERERGMEISPMCDKHNASVEKSQVGFIDYIVHPLWETWADLVHPDAQDILDTLEDNREWYQSTIPQSPSPAPDDPEEGRQGQTEKFQFELTLEEDGESDTEKDSGSQVEEDTSCSDSKTLCTQDSESTEIPLDEQVEEEAVGEEEESQPEACVIDDRSPDT

SEQ ID NO: 75386 - DNA, 660 bp, Artificial Sequence
  derived and/or modified sequence
atggcgcaacagaccagtcccgacacccttacagttcccgaagtggataatcctcattgccccaacccatggctgaatgaagatctggtcaagtcacttcgagaaaatctcctccaacacgaaaagtccaaaaccgccagaaaatccgtgtcccccaagctaagccctgtcatcagtccccggaacagccctcggttgctgagacggatgttgttatcgagcaatattcctaagcaaagaaggtttactgttgcccacacttgcttcgacgtggacaatggcacgtcagccggacgaagccctctcgacccaatgacatcacccgggtcaggtctgatacttcaagccaattttgtacatagccagcgacgggaaagctttctctacaggtctgactctgactacgatctgtcccctaaaagcatgagcaggaactcaagcatagcttccgacatacatggagatgacctgatagtgacgcccttcgcacaggtcctggcttctttgagaaccgtccgcaacaacttcgctgctctgactaaccttcaggaccgagccccatctaaacgcagcccgatgtgtaaccagccttcaataaataaagccacaataaccggctcttggatggaacttaacccatacaccctgctggatatgtag

SEQ ID NO: 75387 - DNA, 2238 bp, Artificial Sequence
  derived and/or modified sequence
atggctcagcaaacctcaccggacactctgaccgtgcccgaagtggacaaccctcactgtccaaatccttggctgaacgaggatctggttaaaagtctgagagagaatctgctccaacatgagaagtcaaaaaccgcaagaaaatctgtgtcgccaaagctgagcccagtgatttcccctcggaactcacctaggctgctgcgccgcatgttgctttcctctaatattccaaaacagcgccgctttaccgtggcccatacgtgctttgatgttgataatggcacatctgctggacgcagtcccctggatcccatgacctctcccggctctggacttattctgcaggccaactttgtgcattcgcagagacgtgagagttttctctatcgtagcgattctgactatgatctgtcacctaaaagtatgtcccgaaactcgagcatcgcaagtgacattcacggtgatgatctaattgttaccccatttgctcaggtcctggcaagcctgcggaccgtccggaacaactttgccgcccttaccaacttgcaggatagggcccccagcaagaggagtcccatgtgcaatcagccttctatcaacaaagcaacaatcaccgaggaagcctaccagaagctggcttcagaaactctggaggagctggactggtgtcttgaccagctcgagacacttcaaacaagacatagtgtttcagagatggcaagcaataaattcaagagaatgctgaatcgcgagttaacccacctatctgagatgtctaggtccggcaatcaggtgagtgagttcattagtaacacgtttcttgataagcagcacgaagtcgagattccaagccccactcagaaggagaaggaaaaaaagaagagacctatgagccagatcagtggagttaaaaaactgatgcactcttcctctctgactaactcgtcgatccccagattcggggtgaagacggaacaggaggacgtactagctaaagaactcgaagatgtgaacaaatggggcttgcacgtgtttaggattgcagagctctccggcaaccggcccctaactgtaataatgcacacaatctttcaggaaagagatctgttaaagacatttaagattccagtggacaccctgatcacgtaccttatgaccctagaagaccactaccacgcagatgtggcataccataataacatccacgcggccgacgtggtgcagtcaacacacgtactgctgagtaccccagccctcgaggccgtcttcaccgacctagagattctcgccgctatctttgcctccgctattcatgatgtggatcatccaggggtgtcaaatcagtttcttatcaacaccaattcagagctggcattaatgtataacgacagttctgtgctggaaaatcaccacttggccgttggatttaaactgcttcaggaggagaactgtgacattttccagaatctcacgaaaaagcagcgtcaaagcctgcggaagatggtgatagacatagtgctggcgacagatatgagcaagcatatgaaccttctagcagacctgaaaacaatggtggaaacgaaaaaagtaacttcatctggggttctcctcttagataactatagtgaccggattcaggtattgcagaacatggtgcattgcgcagaccttagcaacccaaccaaaccactccagctttatcggcagtggactgacagaattatggaagagttctttaggcaaggagacagagagagagaaagaggcatggagataagtcctatgtgtgacaagcacaacgctagcgtcgaaaagtcccaagtggggtttatcgattatattgtgcatccactgtgggaaacctgggctgatctggtgcaccctgacgcacaggacattcttgatacactggaggacaacagggaatggtatcaatcaacgattcctcagtcaccatccccagcaccagatgacccggaagaaggaaggcagggacagaccgagaagttccaattcgagctgactctggaagaagacggggagagtgatactgaaaaagattccggaagtcaggtagaagaagacactagttgtagtgactccaagacactatgtacacaggactccgagtccacagagatcccgctggacgagcaagtcgaggaggaagcggtcggcgaggaggaggagagtcagccagaagcttgcgtgattgacgatagatcacctgatacttag

SEQ ID NO: 75388 - DNA, 660 bp, Artificial Sequence
  derived and/or modified sequence
atggcccagcagaccagcccagacaccctgactgtgcctgaggtggacaacccccactgccccaacccctggctgaatgaagacctggtgaagagcctgcgggagaacctgctgcagcacgagaagagcaagacagccaggaagtctgtgagccccaagctgagccctgtgatcagccccaggaacagcccccggctgctgcggaggatgctgctgagcagcaacatccccaagcagaggcgcttcaccgtggcccacacctgctttgatgtggacaatggcaccagcgctggccgcagccccctggaccccatgaccagccctggcagcggcctcatcctgcaggccaactttgtgcacagccagaggcgggagagcttcctgtacagaagtgacagcgactatgacctgagccccaagtccatgagcaggaacagcagcatcgccagtgacatccatggagatgacctgattgtgaccccatttgcccaggtgctggccagcctgaggacagtgaggaacaactttgctgccctgaccaacctgcaggaccgggcccccagcaagaggagccccatgtgcaaccagcccagcatcaacaaggccaccatcaccggctcctggatggagctgaacccctacaccctgctggacatgtag

SEQ ID NO: 75389 - DNA, 2238 bp, Artificial Sequence
  derived and/or modified sequence
atggcccagcagaccagcccagacaccctgactgtgcctgaggtggacaacccccactgccccaacccctggctgaatgaagacctggtgaagagcctgcgggagaacctgctgcagcacgagaagagcaagacagccaggaagtctgtgagccccaagctgagccctgtgatcagccccaggaacagcccccggctgctgcggaggatgctgctgagcagcaacatccccaagcagaggcgcttcaccgtggcccacacctgctttgatgtggacaatggcaccagcgctggccgcagccccctggaccccatgaccagccctggcagcggcctcatcctgcaggccaactttgtgcacagccagaggcgggagagcttcctgtacagaagtgacagcgactatgacctgagccccaagtccatgagcaggaacagcagcatcgccagtgacatccatggagatgacctgattgtgaccccatttgcccaggtgctggccagcctgaggacagtgaggaacaactttgctgccctgaccaacctgcaggaccgggcccccagcaagaggagccccatgtgcaaccagcccagcatcaacaaggccaccatcacagaggaggcctaccagaagctggccagcgagaccctggaggagctggactggtgcctggaccagctggagaccctgcagaccaggcacagcgtgtctgagatggccagcaacaagttcaagaggatgctgaaccgggagctgacccacctgtctgagatgagccgcagcggcaaccaggtgtctgagttcatcagcaacaccttcctggacaagcagcacgaggtggagatccccagccccacccagaaggagaaggagaagaagaagaggcccatgagccagatctctggagtgaagaagctgatgcacagcagcagcctgaccaacagcagcatcccccgcttcggcgtgaagacagagcaggaggatgtgctggccaaggagctggaggatgtgaacaagtggggcctgcacgtgttcagaattgctgagctgagcggcaaccggcccctgaccgtcatcatgcacaccatcttccaggagcgggacctgctgaagaccttcaagatccctgtggacaccctcatcacctacctgatgaccctggaggaccactaccacgcagatgtggcctaccacaacaacatccatgctgctgatgtggtgcagagcacccacgtgctgctgagcaccccagccctggaggccgtgttcacagacctggagatcctggccgccatctttgccagcgccatccatgatgtggaccaccctggggtgagcaaccagttcctgatcaacaccaacagcgagctggccctgatgtacaatgacagctctgtgctggagaaccaccacctggccgtgggcttcaagctgctgcaggaggagaactgtgacatcttccagaacctgaccaagaagcagaggcagagcctgaggaagatggtgattgatattgtgctggccacagacatgagcaagcacatgaacctgctggccgacctgaagaccatggtggagaccaagaaggtgaccagcagtggagtgctgctgctggacaactacagcgaccgcatccaggtgctgcagaacatggtgcactgtgccgacctgagcaaccccaccaagcccctgcagctgtaccggcagtggacagaccgcatcatggaggagttcttccggcagggcgaccgggagcgggagcggggcatggagatcagccccatgtgtgacaagcacaatgcctctgtggagaagagccaggtgggcttcatcgactacatcgtgcaccccctgtgggagacctgggccgacctggtgcacccagatgcccaggacatcctggacaccctggaggacaaccgggagtggtaccagagcaccatcccccagagccccagccctgccccagatgatcctgaggagggccggcagggccagacagagaagttccagtttgagctgaccctggaggaggatggagagagtgacacagagaaggacagcggcagccaggtggaggaggacaccagctgcagcgacagcaagaccctgtgcacccaggacagcgagagcacagagatccccctggatgagcaggtggaggaggaggccgtgggggaggaggaggagagccagcctgaggcctgtgtgattgatgacaggagcccagacacctag

SEQ ID NO: 75390 - DNA, 660 bp, Artificial Sequence
  derived and/or modified sequence
atggcccagcagaccagccccgacaccctgaccgtgcccgaggtggataaccctcattgcccaaatccttggctcaatgaagaccttgtaaagagcctacgggagaacctactccagcatgagaagtcaaaaaccgccagaaagtccgtttctcccaaactgagccccgtgatttcccccagaaacagcccaagactcctcagacggatgctgcttagttcgaacatccccaaacaaagaaggttcactgtcgctcacacttgcttcgacgtggataacggcaccagtgctggccggagcccgttggaccctatgacaagccccgggtccggactgattctgcaagccaatttcgtgcactctcaacgcagagaaagctttctttacagaagtgacagcgattatgacctctctcccaagagcatgtcccgcaatagttctattgcttctgatatccatggggatgatttgatcgttacaccatttgcacaagtgcttgcatcactccgaactgttcggaacaacttcgcagcactgactaacttacaggaccgggcccccagcaaacgatccccaatgtgcaaccaaccttctattaacaaagccacaataactgggtcatggatggaacttaacccctacaccttgctggatatgtag

SEQ ID NO: 75391 - DNA, 2238 bp, Artificial Sequence
  derived and/or modified sequence
atggcccagcagaccagccccgacaccctgaccgtgcccgaggtggacaaccctcattgccccaacccatggctgaatgaggatctcgtgaaatcgctgagagaaaacctgctgcagcatgaaaagagcaagaccgcacgcaagagcgtgtctcctaagctgtctccagtaatctccccccggaattctccaaggcttctgaggcggatgttgctgagctctaatattcccaaacagcggcgcttcactgttgcccatacatgctttgacgtggacaacggtacaagcgctgggagatcccccctggacccgatgacaagccctggcagcggccttatactgcaggccaacttcgtccatagtcagcggagggagtcatttttgtacagatccgattccgactatgacctcagtcccaaatccatgtcaagaaactccagtatcgcaagcgacattcatggtgacgacctcatcgtgacgcccttcgctcaggtactcgcgtctctgagaacggtgcgcaataacttcgccgccttgacaaatttacaggatagagctccgtcaaaacgctcccccatgtgcaatcagccctctataaataaagccacaattacggaggaagcataccagaagctcgcctccgagacgctcgaagagttagactggtgcttagaccagttggagactctccagacacggcatagtgtgtctgagatggcctctaataagttcaagcgcatgcttaacagagaattaacacacctgtctgaaatgtcccgctctggtaaccaggtgtctgagttcatctccaatacctttctagataagcagcacgaagtggagattccttcaccgacccaaaaggaaaaagaaaagaaaaaacggcccatgtcccaaatcagtggcgtgaaaaaactgatgcacagctctagcttgaccaacagttccatccctcgctttggtgtgaagacagaacaggaggacgtgttggccaaggaattggaggatgtcaacaagtggggtctgcacgtcttcagaattgctgaattatcagggaacaggcccctaaccgttatcatgcacaccatttttcaggaacgggacctgctgaaaacatttaagattcctgtagatactctcatcacatatctgatgacgctggaggatcactaccacgcagatgtcgcttaccacaacaacatccatgctgcagacgtggtgcagagtacacacgttctgctcagcacacccgcgctcgaggccgtgttcaccgatttagaaatcctggccgccatatttgcaagcgccattcacgacgtcgaccacccaggagtaagcaatcagtttctgatcaacacaaactcagagttagctctgatgtacaacgactcctcagtcctggagaatcatcatctcgctgttggcttcaaattactccaggaagaaaactgtgatatcttccagaacctgactaaaaagcagcgccagtccctcaggaagatggttattgacattgtactggctacagacatgagcaagcacatgaacctgctggccgatctaaaaactatggttgagactaagaaagtcaccagttcaggtgtactgctgcttgacaattactctgaccggattcaggtgttacaaaacatggtacactgcgcggatcttagtaatccaaccaaaccactacaactgtaccgccagtggacagatcgtattatggaggaattcttccggcagggggatcgggagagggagaggggtatggagatttcaccaatgtgcgacaagcacaacgcgtccgttgagaaaagccaggtggggtttatcgattatatcgttcatccgttatgggaaacttgggctgatctcgttcatcccgatgcacaggacatcttagataccttagaggataatagggagtggtaccagtcgacgataccccagtctcctagtcctgcaccggatgacccagaagagggcagacagggtcagaccgagaagttccaattcgaattgacgctagaagaagacggcgagtctgataccgaaaaagacagtgggagtcaggtggaagaagacacatcatgctccgactcaaaaactctctgcacacaggatagtgagtctacggaaatccctttagatgagcaggttgaggaagaggccgtgggggaggaggaggagtctcagcccgaggcctgtgtgatcgacgacaggtcccctgacacttag

SEQ ID NO: 75392 - DNA, 1040 bp, Artificial Sequence
  derived and/or modified sequence
gaggcaggcgactgaatgcactaacagcagcaggctcagacctgcttccctggacatttccgggaccgtgagcgagggaaccacgttgccctggattcttgccagctgtacaaagttgaccaggaaaatggctcagcagacaagcccggacactttaacagtacctgaagtggataatccgcattgtccaaacccgtggctgaacgaagaccttgtgaaatccttgcgagaaaacctgttgcagcatgagaagtccaagacagcgaggaaatcggtttctcccaagctctctccagtgatctctccgagaaattcccccaggcttctgcgcagaatgcttctcagcagcaacatccccaaacagcggcgtttcacggtggcacatacatgttttgatgtggacaatggcacatctgcgggacggagtcccttggatcccatgaccagcccaggatccgggctaattctccaagcaaattttgtccacagtcaacgacgggagtccttcctgtatcgatccgacagcgattatgacctctctccaaagtctatgtcccggaactcctccattgccagtgatatacacggagatgacttgattgtgactccatttgctcaggtcttggccagtctgcgaactgtacgaaacaactttgctgcattaactaatttgcaagatcgagcacctagcaaaagatcacccatgtgcaaccaaccatccatcaacaaagccaccataacaggatcctggatggaattgaacccatatacgttacttgacatgtgaaacacgtgtgaccctggcagatgatttggctgaccttgaaaactacagctgtttagtcactttgaaaacaatgcaatacaagtgatttactaggcttcagttttaaccattttatgctgactggtggaaattctaacccttcagaaagaaaaaaaaattgtgaagcaatggaaatgtaccatcctgggtattaatgtcattaattttcaatacattttctcacaaaaagtataaagaagtctttgcttgacct

SEQ ID NO: 75393 - DNA, 3350 bp, Artificial Sequence
  derived and/or modified sequence
agagagactgaggcaggcgactgaatgcactaacagcagcaggctcagacctgcttccctggacatttccgggaccgtgagcgagggaaccacgttgccctggattcttgccagctgtacaaagttgaccaggaaaatggctcagcagacaagcccggacactttaacagtacctgaagtggataatccgcattgtccaaacccgtggctgaacgaagaccttgtgaaatccttgcgagaaaacctgttgcagcatgagaagtccaagacagcgaggaaatcggtttctcccaagctctctccagtgatctctccgagaaattcccccaggcttctgcgcagaatgcttctcagcagcaacatccccaaacagcggcgtttcacggtggcacatacatgttttgatgtggacaatggcacatctgcgggacggagtcccttggatcccatgaccagcccaggatccgggctaattctccaagcaaattttgtccacagtcaacgacgggagtccttcctgtatcgatccgacagcgattatgacctctctccaaagtctatgtcccggaactcctccattgccagtgatatacacggagatgacttgattgtgactccatttgctcaggtcttggccagtctgcgaactgtacgaaacaactttgctgcattaactaatttgcaagatcgagcacctagcaaaagatcacccatgtgcaaccaaccatccatcaacaaagccaccataacagaggaggcctaccagaaactggccagcgagaccctggaggagctggactggtgtctggaccagctagagaccctacagaccaggcactccgtcagtgagatggcctccaacaagtttaaaaggatgcttaatcgggagctcacccatctctctgaaatgagtcggtctggaaatcaagtgtcagagtttatatcaaacacattcttagataagcaacatgaagtggaaattccttctccaactcagaaggaaaaggagaaaaagaaaagaccaatgtctcagatcagtggagtcaagaaattgatgcacagctctagtctgactaattcaagtatcccaaggtttggagttaaaactgaacaagaagatgtccttgccaaggaactagaagatgtgaacaaatggggtcttcatgttttcagaatagcagagttgtctggtaaccggcccttgactgttatcatgcacaccatttttcaggaacgggatttattaaaaacatttaaaattccagtagatactttaattacatatcttatgactctcgaagaccattaccatgctgatgtggcctatcacaacaatatccatgctgcagatgttgtccagtctactcatgtgctattatctacacctgctttggaggctgtgtttacagatttggagattcttgcagcaatttttgccagtgcaatacatgatgtagatcatcctggtgtgtccaatcaatttctgatcaatacaaactctgaacttgccttgatgtacaatgattcctcagtcttagagaaccatcatttggctgtgggctttaaattgcttcaggaagaaaactgtgacattttccagaatttgaccaaaaaacaaagacaatctttaaggaaaatggtcattgacatcgtacttgcaacagatatgtcaaaacacatgaatctactggctgatttgaagactatggttgaaactaagaaagtgacaagctctggagttcttcttcttgataattattccgataggattcaggttcttcagaatatggtgcactgtgcagatctgagcaacccaacaaagcctctccagctgtaccgccagtggacggaccggataatggaggagttcttccgccaaggagaccgagagagggaacgtggcatggagataagccccatgtgtgacaagcacaatgcttccgtggaaaaatcacaggtgggcttcatagactatattgttcatcccctctgggagacatgggcagacctcgtccaccctgacgcccaggatattttggacactttggaggacaatcgtgaatggtaccagagcacaatccctcagagcccctctcctgcacctgatgacccagaggagggccggcagggtcaaactgagaaattccagtttgaactaactttagaggaagatggtgagtcagacacggaaaaggacagtggcagtcaagtggaagaagacactagctgcagtgactccaagactctttgtactcaagactcagagtctactgaaattccccttgatgaacaggttgaagaggaggcagtaggggaagaagaggaaagccagcctgaagcctgtgtcatagatgatcgttctcctgacacgtaacagtgcaaaaactttcatgccttttttttttttaagtagaaaaattgtttccaaagtgcatgtcacatgccacaaccacggtcacacctcactgtcatctgccaggacgtttgttgaacaaaactgaccttgactactcagtccagcgctcaggaatatcgtaaccagttttttcacctccatgtcatccgagcaaggtggacatcttcacgaacagcgtttttaacaagatttcagcttggtagagctgacaaagcagataaaatctactccaaattattttcaagagagtgtgactcatcaggcagcccaaaagtttattggacttggggtttctattcctttttatttgtttgcaatattttcagaagaaaggcattgcacagagtgaacttaatggacgaagcaacaaatatgtcaagaacaggacatagcacgaatctgttaccagtaggaggaggatgagccacagaaattgcataattttctaatttcaagtcttcctgatacatgactgaatagtgtggttcagtgagctgcactgacctctacattttgtatgatatgtaaaacagattttttgtagagcttacttttattattaaatgtattgaggtattatatttaaaaaaaactatgttcagaacttcatctgccactggttatttttttctaaggagtaacttgcaagttttcagtacaaatctgtgctacactggataaaaatctaatttatgaattttacttgcaccttatagttcatagcaattaactgatttgtagtgattcattgtttgttttatataccaatgacttccatattttaaaagagaaaaacaactttatgttgcaggaaaccctttttgtaagtctttattatttactttgcattttgtttcactctttccagataagcagagttgctcttcaccagtgtttttcttcatgtgcaaagtgactatttgttctataatac

SEQ ID NO: 75394 - DNA, 660 bp, Artificial Sequence
  derived and/or modified sequence
atggctcaacagaccagccccgacaccctcactgtccctgaggttgataaccctcactgtcccaacccatggctgaacgaggacctggtcaagagcctgcgggaaaacctgctgcaacacgagaagagcaaaacggcaaggaagtctgtgagccccaagttgagtccggtaatctccccccgtaatagtcccaggctattgcgcaggatgcttctatcttccaatatccccaaacagcgcaggtttacggtggcccacacatgttttgacgtcgacaacgggactagcgcaggcagatcccccctggatcctatgacatccccaggatctgggctgattctccaggcaaacttcgtacacagccagcgtcgcgaatcttttctgtatcgcagcgattctgattatgacctgtcccctaagagcatgagcaggaattcttcaattgcttccgacattcacggcgacgatctaatagtcacgccattcgcccaagtcctggcttccctgcgcactgtgcgcaacaatttcgccgcactaacaaatctgcaagaccgggctccttccaaacggagccctatgtgcaatcagccgtccatcaacaaggcaacaatcacgggttcctggatggagctaaatccgtatacattgctggacatgtag

SEQ ID NO: 75395 - DNA, 2238 bp, Artificial Sequence
  derived and/or modified sequence
atggctcagcaaacctcccccgacacacttaccgtccccgaggttgacaacccacactgcccaaacccctggctaaacgaggacctggtaaaaagtctcagggaaaatctgctgcagcacgaaaaatctaagactgcgagaaaatcagtaagcccaaaactctcccctgtgatcagccccaggaacagccccagactgctgagacgtatgctgttgtcttccaacatccccaaacaacgtcgcttcaccgttgcccatacgtgcttcgacgtagataacgggacgtccgctgggaggagcccacttgatcctatgacttcacccggtagcggcctaattcttcaggctaacttcgtccattcacagcgcagagagtcttttctgtaccgatctgattccgactacgacctgagtcccaagtcaatgtcaaggaacagctctatcgcctccgatatccatggcgacgacttgattgtgacaccattcgcccaggtattggcgtcgctgcgtacggtgagaaacaacttcgcagcattaacaaatcttcaggaccgggcacccagtaaacgcagtcccatgtgtaaccaaccatccataaacaaggctacaatcaccgaagaggcatatcagaaactggcctcagagacccttgaagagttagactggtgcctcgaccaattggagactctgcagacccggcattctgtgagcgaaatggcatccaacaagttcaagcgcatgttgaaccgggaacttacccatttgtcagaaatgagtaggtcaggtaatcaggtgtccgaatttattagcaacacgtttctagacaagcagcatgaggtggaaattcccagcccaactcaaaaggagaaggagaagaagaagcgcccaatgagccagatctccggagtgaaaaaattgatgcattctagctctctaaccaattcctccatcccccgattcggagtgaagactgagcaggaggatgtgttagcgaaggagttagaggacgtgaataagtggggcttgcacgtgttccggatcgcagaactgagcgggaatcggcctctaactgtgataatgcacactatttttcaggagagagatctcttaaagacattcaagataccagtggacactctaatcacatacctcatgaccctggaggaccattaccacgcggacgttgcttaccacaacaacatccacgccgcagacgtggtacagagtactcatgtgctgctaagcacccctgccctggaggctgtgttcaccgacttggaaatcctggccgctatctttgcctccgccatccatgatgttgaccacccaggggtgtccaatcagttcttaataaatacaaattcagaattagccttaatgtataacgactctagcgtactagaaaatcaccacctggccgtgggtttcaagcttctgcaggaggagaattgcgacatatttcagaacttgacaaaaaagcagcgccagagcctgcgcaaaatggtgattgacatcgtcttggccacggatatgtcgaaacacatgaacctgctcgcagacctgaaaaccatggttgagaccaagaaggtgacatctagcggtgtacttttgctggataactattctgacaggatacaggtgttacagaacatggttcattgtgcagacctgagtaatcccaccaagcccctgcagctttacagacaatggaccgaccggataatggaagagttcttcagacagggggaccgcgagcgcgaacgaggaatggagattagcccaatgtgtgacaagcataatgctagcgtcgaaaaatcacaggtcgggtttattgactacattgtgcacccattgtgggagacttgggcagatctggtgcatcccgacgcccaggatatcttggataccttggaagacaatagggagtggtaccagagtactatcccacagagcccatcaccggcacctgatgacccggaggaaggcaggcagggccaaaccgagaagttccagtttgagctgaccctcgaagaggacggggagagtgataccgaaaaagacagtggttcccaggtggaggaggataccagctgctccgatagcaaaaccttatgcacccaggactccgagtcaaccgagattcctctagacgagcaggtggaagaggaagcagtcggggaggaggaggagtcacagccggaagcatgtgtaatcgacgacagatcacctgacacatag

SEQ ID NO: 75396 - DNA, 660 bp, Artificial Sequence
  derived and/or modified sequence
atggcccagcagaccagccccgacaccctgaccgtgcccgaggtggacaacccccactgccccaacccctggctgaacgaggacctggtgaagagcctgagagagaacctgctgcagcacgagaagagcaagaccgccagaaagagcgtgagccccaagctgagccccgtgatcagccccagaaacagccccagactgctgagaagaatgctgctgagcagcaacatccccaagcagagaagattcaccgtggcccacacctgcttcgacgtggacaacggcaccagcgccggcagaagccccctggaccccatgaccagccccggcagcggcctgatcctgcaggccaacttcgtgcacagccagagaagagagagcttcctgtacagaagcgacagcgactacgacctgagccccaagagcatgagcagaaacagcagcatcgccagcgacatccacggcgacgacctgatcgtgacccccttcgcccaggtgctggccagcctgagaaccgtgagaaacaacttcgccgccctgaccaacctgcaggacagagcccccagcaagagaagccccatgtgcaaccagcccagcatcaacaaggccaccatcaccggcagctggatggagctgaacccctacaccctgctggacatgtag

SEQ ID NO: 75397 - DNA, 2238 bp, Artificial Sequence
  derived and/or modified sequence
atggcccagcagaccagccccgacaccctgaccgtgcccgaggtggacaacccccactgccccaacccctggctgaacgaggacctggtgaagagcctgagagagaacctgctgcagcacgagaagagcaagaccgccagaaagagcgtgagccccaagctgagccccgtgatcagccccagaaacagccccagactgctgagaagaatgctgctgagcagcaacatccccaagcagagaagattcaccgtggcccacacctgcttcgacgtggacaacggcaccagcgccggcagaagccccctggaccccatgaccagccccggcagcggcctgatcctgcaggccaacttcgtgcacagccagagaagagagagcttcctgtacagaagcgacagcgactacgacctgagccccaagagcatgagcagaaacagcagcatcgccagcgacatccacggcgacgacctgatcgtgacccccttcgcccaggtgctggccagcctgagaaccgtgagaaacaacttcgccgccctgaccaacctgcaggacagagcccccagcaagagaagccccatgtgcaaccagcccagcatcaacaaggccaccatcaccgaggaggcctaccagaagctggccagcgagaccctggaggagctggactggtgcctggaccagctggagaccctgcagaccagacacagcgtgagcgagatggccagcaacaagttcaagagaatgctgaacagagagctgacccacctgagcgagatgagcagaagcggcaaccaggtgagcgagttcatcagcaacaccttcctggacaagcagcacgaggtggagatccccagccccacccagaaggagaaggagaagaagaagagacccatgagccagatcagcggcgtgaagaagctgatgcacagcagcagcctgaccaacagcagcatccccagattcggcgtgaagaccgagcaggaggacgtgctggccaaggagctggaggacgtgaacaagtggggcctgcacgtgttcagaatcgccgagctgagcggcaacagacccctgaccgtgatcatgcacaccatcttccaggagagagacctgctgaagaccttcaagatccccgtggacaccctgatcacctacctgatgaccctggaggaccactaccacgccgacgtggcctaccacaacaacatccacgccgccgacgtggtgcagagcacccacgtgctgctgagcacccccgccctggaggccgtgttcaccgacctggagatcctggccgccatcttcgccagcgccatccacgacgtggaccaccccggcgtgagcaaccagttcctgatcaacaccaacagcgagctggccctgatgtacaacgacagcagcgtgctggagaaccaccacctggccgtgggcttcaagctgctgcaggaggagaactgcgacatcttccagaacctgaccaagaagcagagacagagcctgagaaagatggtgatcgacatcgtgctggccaccgacatgagcaagcacatgaacctgctggccgacctgaagaccatggtggagaccaagaaggtgaccagcagcggcgtgctgctgctggacaactacagcgacagaatccaggtgctgcagaacatggtgcactgcgccgacctgagcaaccccaccaagcccctgcagctgtacagacagtggaccgacagaatcatggaggagttcttcagacagggcgacagagagagagagagaggcatggagatcagccccatgtgcgacaagcacaacgccagcgtggagaagagccaggtgggcttcatcgactacatcgtgcaccccctgtgggagacctgggccgacctggtgcaccccgacgcccaggacatcctggacaccctggaggacaacagagagtggtaccagagcaccatcccccagagccccagccccgcccccgacgaccccgaggagggcagacagggccagaccgagaagttccagttcgagctgaccctggaggaggacggcgagagcgacaccgagaaggacagcggcagccaggtggaggaggacaccagctgcagcgacagcaagaccctgtgcacccaggacagcgagagcaccgagatccccctggacgagcaggtggaggaggaggccgtgggcgaggaggaggagagccagcccgaggcctgcgtgatcgacgacagaagccccgacacctag

SEQ ID NO: 75398 - protein, 687 aa, Artificial Sequence
  derived and/or modified sequence
MAFVWDPLGATVPGPSTRAKSRLRFSKSYSFDVDNGTSAGRSPLDPMTSPGSGLILQANFVHSQRRESFLYRSDSDYDLSPKSMSRNSSIASDIHGDDLIVTPFAQVLASLRTVRNNFAALTNLQDRAPSKRSPMCNQPSINKATITEEAYQKLASETLEELDWCLDQLETLQTRHSVSEMASNKFKRMLNRELTHLSEMSRSGNQVSEFISNTFLDKQHEVEIPSPTQKEKEKKKRPMSQISGVKKLMHSSSLTNSSIPRFGVKTEQEDVLAKELEDVNKWGLHVFRIAELSGNRPLTVIMHTIFQERDLLKTFKIPVDTLITYLMTLEDHYHADVAYHNNIHAADVVQSTHVLLSTPALEAVFTDLEILAAIFASAIHDVDHPGVSNQFLINTNSELALMYNDSSVLENHHLAVGFKLLQEENCDIFQNLTKKQRQSLRKMVIDIVLATDMSKHMNLLADLKTMVETKKVTSSGVLLLDNYSDRIQVLQNMVHCADLSNPTKPLQLYRQWTDRIMEEFFRQGDRERERGMEISPMCDKHNASVEKSQVGFIDYIVHPLWETWADLVHPDAQDILDTLEDNREWYQSTIPQSPSPAPDDPEEGRQGQTEKFQFELTLEEDGESDTEKDSGSQVEEDTSCSDSKTLCTQDSESTEIPLDEQVEEEAVGEEEESQPEACVIDDRSPDT

SEQ ID NO: 75399 - DNA, 2064 bp, Artificial Sequence
  derived and/or modified sequence
atggcgttcgtatgggatcccttaggcgcaactgtgcctgggccatctactcgggccaaaagcagactgcggttttctaaaagctactcttttgatgttgacaatgggactagcgccggcaggagtccccttgaccccatgacttccccagggagcggactgatccttcaagctaattttgtccactcccagaggcgcgagtcctttttgtaccggtcagatagtgattatgacttatcccccaaatctatgtctagaaactccagcatcgccagcgacatccatggagacgacttgatcgttactccctttgctcaggtcctcgcctccctacgcaccgtacggaacaacttcgccgcattgaccaacctgcaggacagagcgccgtcgaagcggtctccaatgtgcaatcagcctagtattaataaagcgaccatcacagaggaggcgtatcagaagctagcgtccgaaacactagaagagctggattggtgtctcgatcagctagagacactgcaaacccgacactcagtttccgagatggcctctaacaagttcaagagaatgctgaacagggagctgacccatctgagcgaaatgtcaagatcggggaaccaggtttctgagttcatttcaaatacattcctcgataagcagcatgaagtggaaataccctcaccaacacagaaagagaaagaaaaaaagaagaggcccatgtctcaaatcagcggtgtcaaaaagctcatgcacagctcttctcttaccaactcctcaatcccacgcttcggtgtcaaaaccgagcaggaggatgtcctggctaaggaactggaggacgtgaataagtgggggttgcacgtgtttcgcattgctgagctgagcggtaaccgccctctgaccgtcattatgcacacgatctttcaagagcgcgatcttctcaaaactttcaagattcctgtggacactctgatcacctatcttatgacactcgaggaccactaccatgcggatgtcgcttaccacaataacatacacgccgctgacgtggtacagagtacccatgtgctgctgtctacgcccgcgctggaggctgtgtttactgacctagaaatcttggccgccatctttgcttccgccatccatgatgtggatcaccccggcgtgagtaatcagttcctgatcaatactaacagcgagctagctctgatgtacaacgatagttcggtactcgaaaaccatcacctagccgtgggcttcaaactcctgcaggaagaaaactgtgacatcttccagaatttgactaaaaagcagcgccagagtctgcggaagatggtgatcgacatcgtacttgccacagatatgtccaaacacatgaacctcctggccgacttgaagaccatggtagaaacaaagaaggtgaccagtagcggcgtgcttttgctggacaattatagtgataggatccaggtcctccagaatatggtgcattgcgctgacttgtccaacccaacaaagccacttcaactgtaccgccaatggacagataggatcatggaagagttcttcagacagggagacagggaacgcgaaaggggaatggagatttctcctatgtgcgacaagcataatgcctcagtcgagaagagccaggtcggctttatcgactacatcgtccaccctctatgggagacttgggctgacctcgtgcaccccgacgctcaggacattttggataccctcgaggataacagagaatggtaccagtctacgataccccagagtccatcccctgctcctgatgaccccgaggagggacggcaagggcaaactgagaagttccagttcgagctgacgctggaggaggatggggagtccgacacagagaaagattccggctctcaggtcgaggaggatacttcatgctcagactctaaaactctgtgcactcaggattcagaaagtactgagatccctttagatgaacaggtggaggaggaggccgtcggagaggaggaggaaagccagccagaggcttgcgtgatagacgatcggtcccccgatacatag

SEQ ID NO: 75400 - DNA, 2064 bp, Artificial Sequence
  derived and/or modified sequence
atggcctttgtgtgggaccccctgggcgccaccgtgcccggccccagcacccgggccaagagccggctgcgcttcagcaagagctacagctttgatgtggacaatggcaccagcgctggccgcagccccctggaccccatgaccagccctggcagcggcctcatcctgcaggccaactttgtgcacagccagaggcgggagagcttcctgtacagaagtgacagcgactatgacctgagccccaagtccatgagcaggaacagcagcatcgccagtgacatccatggagatgacctgattgtgaccccatttgcccaggtgctggccagcctgaggacagtgaggaacaactttgctgccctgaccaacctgcaggaccgggcccccagcaagaggagccccatgtgcaaccagcccagcatcaacaaggccaccatcacagaggaggcctaccagaagctggccagcgagaccctggaggagctggactggtgcctggaccagctggagaccctgcagaccaggcacagcgtgtctgagatggccagcaacaagttcaagaggatgctgaaccgggagctgacccacctgtctgagatgagccgcagcggcaaccaggtgtctgagttcatcagcaacaccttcctggacaagcagcacgaggtggagatccccagccccacccagaaggagaaggagaagaagaagaggcccatgagccagatctctggagtgaagaagctgatgcacagcagcagcctgaccaacagcagcatcccccgcttcggcgtgaagacagagcaggaggatgtgctggccaaggagctggaggatgtgaacaagtggggcctgcacgtgttcagaattgctgagctgagcggcaaccggcccctgaccgtcatcatgcacaccatcttccaggagcgggacctgctgaagaccttcaagatccctgtggacaccctcatcacctacctgatgaccctggaggaccactaccacgcagatgtggcctaccacaacaacatccatgctgctgatgtggtgcagagcacccacgtgctgctgagcaccccagccctggaggccgtgttcacagacctggagatcctggccgccatctttgccagcgccatccatgatgtggaccaccctggggtgagcaaccagttcctgatcaacaccaacagcgagctggccctgatgtacaatgacagctctgtgctggagaaccaccacctggccgtgggcttcaagctgctgcaggaggagaactgtgacatcttccagaacctgaccaagaagcagaggcagagcctgaggaagatggtgattgatattgtgctggccacagacatgagcaagcacatgaacctgctggccgacctgaagaccatggtggagaccaagaaggtgaccagcagtggagtgctgctgctggacaactacagcgaccgcatccaggtgctgcagaacatggtgcactgtgccgacctgagcaaccccaccaagcccctgcagctgtaccggcagtggacagaccgcatcatggaggagttcttccggcagggcgaccgggagcgggagcggggcatggagatcagccccatgtgtgacaagcacaatgcctctgtggagaagagccaggtgggcttcatcgactacatcgtgcaccccctgtgggagacctgggccgacctggtgcacccagatgcccaggacatcctggacaccctggaggacaaccgggagtggtaccagagcaccatcccccagagccccagccctgccccagatgatcctgaggagggccggcagggccagacagagaagttccagtttgagctgaccctggaggaggatggagagagtgacacagagaaggacagcggcagccaggtggaggaggacaccagctgcagcgacagcaagaccctgtgcacccaggacagcgagagcacagagatccccctggatgagcaggtggaggaggaggccgtgggggaggaggaggagagccagcctgaggcctgtgtgattgatgacaggagcccagacacctag

SEQ ID NO: 75401 - DNA, 2064 bp, Artificial Sequence
  derived and/or modified sequence
atggccttcgtgtgggaccccctgggcgccaccgtgcccggcccctcgacacgcgccaaaagcaggctgagattctccaagagctactcctttgacgtcgacaatggaacctctgccggccgcagccctttggatccaatgacctcaccaggctcagggctgattcttcaggccaacttcgtgcactcacagcgtcgcgaaagcttcctctatcgtagcgattcagactatgacctgtcgcctaagtctatgtcacgcaatagctctattgcatccgatatccatggcgacgaccttatagtgacaccatttgcccaggttctggcctccttacgcaccgtgaggaacaactttgccgctcttactaatttacaggacagggctccgtctaagaggtctcccatgtgcaatcagccttccattaataaagctaccattactgaggaagcttaccaaaagttagcaagtgaaacgttggaagagttggattggtgtctggaccagctggagacgctccagacgagacattccgtctctgagatggccagcaataagttcaagagaatgctaaatcgggaactaacgcatctctctgaaatgtcgagatctgggaatcaggtgagcgagttcatctccaacacgttcttagacaagcagcatgaggttgagattcctagcccaactcaaaaggagaaggagaagaagaaaaggcctatgtctcaaatctccggagtcaagaaactaatgcatagcagttcactcacaaatagttcaatcccccgatttggggtgaagacagagcaagaggatgtgttggccaaagaactcgaggatgtgaacaagtgggggcttcacgttttcagaatcgctgagctgtcgggaaaccggcccctgaccgtcatcatgcacacaattttccaggagcgcgatctgttaaagaccttcaaaatcccagtcgatacactcatcacgtatcttatgaccctcgaagatcactaccacgctgatgtcgcatatcacaacaacatacatgctgctgacgtggtgcagtctacgcatgttctactatcaactcccgctcttgaggctgtctttacagatttggaaattctcgccgcaattttcgcaagcgcgattcatgatgtggaccaccccggtgtgtcgaatcagttccttatcaacacaaactctgaactggctctgatgtataacgactcttctgtacttgagaaccaccacttggctgtgggatttaaactgctgcaagaggagaattgcgatattttccaaaatctcactaaaaagcagcgtcagagtttgaggaaaatggtgattgatattgtgctggcaacagatatgagcaagcatatgaatctgctggcagacctgaagacaatggtggagaccaaaaaagttacatcgagtggtgtcttgcttctggacaactactccgatcgaatccaggtgcttcaaaacatggtccattgcgccgatttaagcaatcccacaaaacccctccaactgtaccgccagtggacagatcggatcatggaggaattctttagacagggggacagggaacgcgaacgtgggatggaaattagcccaatgtgcgacaaacataacgcttctgttgaaaaaagccaagtgggatttatcgattatattgtacacccactgtgggaaacttgggccgatcttgtacatcccgacgctcaggatatcctggatacgctggaagacaatcgtgaatggtaccagagcacgattccacagtctccatcacccgcccccgacgacccagaagaggggagacaggggcaaacagaaaagtttcaattcgaactcactttggaggaagacggtgaaagcgacactgagaaagattctgggtcccaggtggaggaggacactagttgcagcgattctaagactctgtgtacccaagatagtgagtccactgaaattccattggacgagcaggtcgaagaagaggctgtgggggaggaggaggagtctcaacccgaagcctgtgttatcgatgaccgcagtcccgatacctag

SEQ ID NO: 75402 - DNA, 2294 bp, Artificial Sequence
  derived and/or modified sequence
actgcacaaaggaaatgccctcactcagctacaagtgcctcctgctccgtgcggggcctcagggccccagagccccgcaccagctctgacttctcgtggttcctggggatcttggcatcgtccttaaaaatggcttttgtttgggatcctctgggagccacggtgccaggaccatctacaagagccaaatcaagattgcgtttctcaaagtcctacagttttgatgtggacaatggcacatctgcgggacggagtcccttggatcccatgaccagcccaggatccgggctaattctccaagcaaattttgtccacagtcaacgacgggagtccttcctgtatcgatccgacagcgattatgacctctctccaaagtctatgtcccggaactcctccattgccagtgatatacacggagatgacttgattgtgactccatttgctcaggtcttggccagtctgcgaactgtacgaaacaactttgctgcattaactaatttgcaagatcgagcacctagcaaaagatcacccatgtgcaaccaaccatccatcaacaaagccaccataacagaggaggcctaccagaaactggccagcgagaccctggaggagctggactggtgtctggaccagctagagaccctacagaccaggcactccgtcagtgagatggcctccaacaagtttaaaaggatgcttaatcgggagctcacccatctctctgaaatgagtcggtctggaaatcaagtgtcagagtttatatcaaacacattcttagataagcaacatgaagtggaaattccttctccaactcagaaggaaaaggagaaaaagaaaagaccaatgtctcagatcagtggagtcaagaaattgatgcacagctctagtctgactaattcaagtatcccaaggtttggagttaaaactgaacaagaagatgtccttgccaaggaactagaagatgtgaacaaatggggtcttcatgttttcagaatagcagagttgtctggtaaccggcccttgactgttatcatgcacaccatttttcaggaacgggatttattaaaaacatttaaaattccagtagatactttaattacatatcttatgactctcgaagaccattaccatgctgatgtggcctatcacaacaatatccatgctgcagatgttgtccagtctactcatgtgctattatctacacctgctttggaggctgtgtttacagatttggagattcttgcagcaatttttgccagtgcaatacatgatgtagatcatcctggtgtgtccaatcaatttctgatcaatacaaactctgaacttgccttgatgtacaatgattcctcagtcttagagaaccatcatttggctgtgggctttaaattgcttcaggaagaaaactgtgacattttccagaatttgaccaaaaaacaaagacaatctttaaggaaaatggtcattgacatcgtacttgcaacagatatgtcaaaacacatgaatctactggctgatttgaagactatggttgaaactaagaaagtgacaagctctggagttcttcttcttgataattattccgataggattcaggttcttcagaatatggtgcactgtgcagatctgagcaacccaacaaagcctctccagctgtaccgccagtggacggaccggataatggaggagttcttccgccaaggagaccgagagagggaacgtggcatggagataagccccatgtgtgacaagcacaatgcttccgtggaaaaatcacaggtgggcttcatagactatattgttcatcccctctgggagacatgggcagacctcgtccaccctgacgcccaggatattttggacactttggaggacaatcgtgaatggtaccagagcacaatccctcagagcccctctcctgcacctgatgacccagaggagggccggcagggtcaaactgagaaattccagtttgaactaactttagaggaagatggtgagtcagacacggaaaaggacagtggcagtcaagtggaagaagacactagctgcagtgactccaagactctttgtactcaagactcagagtctactgaaattccccttgatgaacaggttgaagaggaggcagtaggggaagaagaggaaagccagcctgaagcctgtgtcatagatgatcgttctcctgacacgtaacagtgcaaaaactttcatgccttttttttttttaagtagaaaaattgtttccaaagtgcatgtcacatgccacaaccacggtcacacctcactgtcatctg

SEQ ID NO: 75403 - DNA, 2064 bp, Artificial Sequence
  derived and/or modified sequence
atggccttcgtttgggaccctttgggagcaaccgtgcctgggccaagcacaagagccaagagccgcctgcgtttctcgaaatcttacagcttcgacgtggataatggtaccagtgcagggaggagtcctctggaccccatgacctcgcccggttccggattgatactccaggcaaacttcgttcattcccagcgccgagagagctttctctataggagcgattcagattacgacctgtcacccaagagcatgtccagaaactcatcaatcgcatcggacatccatggagacgaccttattgtcacccctttcgcacaggttttggcatctctaaggacagtcaggaataattttgctgcgctgaccaacttgcaagatagagcaccttccaagaggtcacccatgtgcaatcagccctccattaataaagccactatcactgaggaggcttatcagaagcttgcttcggagaccctggaagaactggactggtgtctggaccagctggagactctgcagactcgtcactctgtctcagaaatggcctccaacaaattcaagcggatgttgaatagagaactcacccatctctcagagatgtccagatcaggcaatcaggtgtccgaattcatctccaatacattcctcgataaacaacacgaagtcgaaatcccaagtcccacacaaaaagaaaaagagaagaaaaaacgacctatgtctcaaatttccggagtcaagaaactgatgcacagctcctccttaaccaattcatccatacctagatttggggtcaaaactgagcaagaggatgtgctcgccaaagagttagaggacgtgaacaagtggggtctgcacgttttccggattgcggagctctcaggcaaccggccactcacagtgatcatgcatactattttccaggagcgagatcttctgaaaactttcaaaatccctgtggacactttaattacttacttgatgacactcgaggatcactaccatgccgacgtcgcatatcacaataacatccacgcagcagacgtggttcagtctacacacgttctgctctcgacccccgctctggaggctgtgtttactgaccttgaaattctcgcagccatcttcgcctcggctatccacgacgtggaccacccgggtgtgtctaaccagtttctgattaataccaactccgaactggctctgatgtacaacgactcaagcgtacttgagaatcatcacctcgcagttggctttaagctgctgcaagaggagaactgcgacattttccaaaatctcaccaagaagcaaagacagtctctacgaaagatggtgatcgacatagtgttagccacagacatgtccaagcacatgaatctgctggcggaccttaagactatggtagagactaagaaagtcacgagttcaggggtgttgctcctggacaactacagcgacaggattcaagttctgcagaatatggtgcactgcgctgatcttagtaatcctacgaagcctctgcaactgtatcgacagtggacggaccggattatggaagagtttttccggcagggggatcgcgagagggagcgcggaatggaaatcagccccatgtgtgataaacacaacgcctccgttgagaagagccaggtgggattcatcgactacatcgtgcacccactgtgggagacctgggcagacttggtgcaccctgatgctcaggacattctggatacgcttgaagataatcgggagtggtatcaatctactattccacagtctccctccccggctcccgacgatccagaggagggaaggcaaggccagacagaaaaattccaatttgaactgaccttagaggaagacggcgaaagcgacactgaaaaagattccgggagccaggttgaagaggataccagctgcagcgacagcaaaacattgtgcacccaggatagcgagtcgacggaaattccactggatgagcaggttgaggaggaggctgtcggcgaggaggaagagtcacagccagaagcatgcgtcattgacgatcggagcccagatacgtag

SEQ ID NO: 75404 - DNA, 2064 bp, Artificial Sequence
  derived and/or modified sequence
atggccttcgtgtgggaccccctgggcgccaccgtgcccggccccagcaccagagccaagagcagactgagattcagcaagagctacagcttcgacgtggacaacggcaccagcgccggcagaagccccctggaccccatgaccagccccggcagcggcctgatcctgcaggccaacttcgtgcacagccagagaagagagagcttcctgtacagaagcgacagcgactacgacctgagccccaagagcatgagcagaaacagcagcatcgccagcgacatccacggcgacgacctgatcgtgacccccttcgcccaggtgctggccagcctgagaaccgtgagaaacaacttcgccgccctgaccaacctgcaggacagagcccccagcaagagaagccccatgtgcaaccagcccagcatcaacaaggccaccatcaccgaggaggcctaccagaagctggccagcgagaccctggaggagctggactggtgcctggaccagctggagaccctgcagaccagacacagcgtgagcgagatggccagcaacaagttcaagagaatgctgaacagagagctgacccacctgagcgagatgagcagaagcggcaaccaggtgagcgagttcatcagcaacaccttcctggacaagcagcacgaggtggagatccccagccccacccagaaggagaaggagaagaagaagagacccatgagccagatcagcggcgtgaagaagctgatgcacagcagcagcctgaccaacagcagcatccccagattcggcgtgaagaccgagcaggaggacgtgctggccaaggagctggaggacgtgaacaagtggggcctgcacgtgttcagaatcgccgagctgagcggcaacagacccctgaccgtgatcatgcacaccatcttccaggagagagacctgctgaagaccttcaagatccccgtggacaccctgatcacctacctgatgaccctggaggaccactaccacgccgacgtggcctaccacaacaacatccacgccgccgacgtggtgcagagcacccacgtgctgctgagcacccccgccctggaggccgtgttcaccgacctggagatcctggccgccatcttcgccagcgccatccacgacgtggaccaccccggcgtgagcaaccagttcctgatcaacaccaacagcgagctggccctgatgtacaacgacagcagcgtgctggagaaccaccacctggccgtgggcttcaagctgctgcaggaggagaactgcgacatcttccagaacctgaccaagaagcagagacagagcctgagaaagatggtgatcgacatcgtgctggccaccgacatgagcaagcacatgaacctgctggccgacctgaagaccatggtggagaccaagaaggtgaccagcagcggcgtgctgctgctggacaactacagcgacagaatccaggtgctgcagaacatggtgcactgcgccgacctgagcaaccccaccaagcccctgcagctgtacagacagtggaccgacagaatcatggaggagttcttcagacagggcgacagagagagagagagaggcatggagatcagccccatgtgcgacaagcacaacgccagcgtggagaagagccaggtgggcttcatcgactacatcgtgcaccccctgtgggagacctgggccgacctggtgcaccccgacgcccaggacatcctggacaccctggaggacaacagagagtggtaccagagcaccatcccccagagccccagccccgcccccgacgaccccgaggagggcagacagggccagaccgagaagttccagttcgagctgaccctggaggaggacggcgagagcgacaccgagaaggacagcggcagccaggtggaggaggacaccagctgcagcgacagcaagaccctgtgcacccaggacagcgagagcaccgagatccccctggacgagcaggtggaggaggaggccgtgggcgaggaggaggagagccagcccgaggcctgcgtgatcgacgacagaagccccgacacctag

SEQ ID NO: 75405 - protein, 679 aa, Artificial Sequence
  derived and/or modified sequence
MSIIMKPRSRSTSSLRTAEAVCFDVDNGTSAGRSPLDPMTSPGSGLILQANFVHSQRRESFLYRSDSDYDLSPKSMSRNSSIASDIHGDDLIVTPFAQVLASLRTVRNNFAALTNLQDRAPSKRSPMCNQPSINKATITEEAYQKLASETLEELDWCLDQLETLQTRHSVSEMASNKFKRMLNRELTHLSEMSRSGNQVSEFISNTFLDKQHEVEIPSPTQKEKEKKKRPMSQISGVKKLMHSSSLTNSSIPRFGVKTEQEDVLAKELEDVNKWGLHVFRIAELSGNRPLTVIMHTIFQERDLLKTFKIPVDTLITYLMTLEDHYHADVAYHNNIHAADVVQSTHVLLSTPALEAVFTDLEILAAIFASAIHDVDHPGVSNQFLINTNSELALMYNDSSVLENHHLAVGFKLLQEENCDIFQNLTKKQRQSLRKMVIDIVLATDMSKHMNLLADLKTMVETKKVTSSGVLLLDNYSDRIQVLQNMVHCADLSNPTKPLQLYRQWTDRIMEEFFRQGDRERERGMEISPMCDKHNASVEKSQVGFIDYIVHPLWETWADLVHPDAQDILDTLEDNREWYQSTIPQSPSPAPDDPEEGRQGQTEKFQFELTLEEDGESDTEKDSGSQVEEDTSCSDSKTLCTQDSESTEIPLDEQVEEEAVGEEEESQPEACVIDDRSPDT

SEQ ID NO: 75406 - DNA, 2040 bp, Artificial Sequence
  derived and/or modified sequence
atgagcattatcatgaaacctagaagtcggtctacatctagtctgcgaaccgccgaggcggtatgctttgacgtcgataatggcacctctgcagggcgcagtcctctcgatccaatgacttcccccggcagtggccttatcctgcaggccaactttgtgcacagtcagcggagggaatcctttctatataggtcagattccgattatgatctatccccaaagtctatgtctcgcaacagttcaatcgccagtgacatccacggcgatgatctgatcgtgactccttttgctcaagttctggcaagtctccgaacggttcgtaataactttgccgctttgaccaatctccaagacagagcaccttctaaacgcagccccatgtgtaatcagccctccataaacaaggcaacaattacagaggaggcataccagaaactggcatccgagacattagaagagttagactggtgtttggatcagctggagactctccagaccaggcattcggtttctgagatggcatctaacaagttcaagaggatgctaaacagagagctgacccatctgagcgaaatgtcaaggagcgggaaccaagttagtgagtttattagcaatacctttctggataaacagcacgaggtggaaatccccagtccaacgcagaaagagaaagagaaaaagaaacggccgatgagtcagatttctggagtgaaaaagctaatgcactcatccagcttgactaactcttctattcccagatttggtgtgaagactgaacaagaagacgtgctcgcaaaggaactggaggatgttaataagtggggactgcatgtgtttcgtatagctgaactgtccggtaaccgccccttgactgttattatgcacacgatctttcaggaaagggatctgctgaagacgtttaaaattcctgtcgatacacttatcacgtaccttatgacgctggaggaccactatcacgcagatgtggcttaccataacaatattcatgccgccgacgtggtccagtctacccatgtgctccttagtacaccagccttggaagcagtctttaccgatctggagatcctcgcagcaatcttcgccagcgccattcatgacgttgaccacccaggtgtctctaatcagttcttaatcaacactaattcagagcttgcattgatgtacaacgactcctctgtcctcgagaatcaccacttagctgtgggattcaagctcctccaagaggaaaactgcgacatcttccagaatcttactaaaaagcagcgccagtccctgaggaagatggtcattgacatcgtgctagccaccgacatgagcaagcacatgaatctgctggcggatctcaaaaccatggtggagacgaagaaggtgacctcttcaggcgtgctgctgctggataactattctgatcgcatccaggtacttcagaacatggtgcactgcgcggatttgtccaatccaacgaagcccctccagctgtaccgacagtggacggatcgcattatggaggagttctttcggcaaggagatcgcgagcgagaacgcggaatggagatctcgcccatgtgcgacaagcataatgcatcagtcgagaagtcgcaagtcggatttattgactacatcgtccatcccctctgggagacgtgggcggacttggtgcacccagacgcccaggatattcttgacactctggaagacaaccgagagtggtaccagtcaacaatcccgcagagcccttcccctgctcctgatgacccagaagaggggcgccagggccagaccgaaaagttccagttcgagctcactttagaggaagacggggagagcgatactgaaaaagacagcggcagccaggttgaagaagatacgtcctgctctgattccaagaccctgtgcacccaggatagcgagagtacagagatccctctagacgaacaggtagaggaagaggccgttggcgaggaggaggagtctcagcctgaggcctgcgtcatcgatgataggtctccagatacctag

SEQ ID NO: 75407 - DNA, 2040 bp, Artificial Sequence
  derived and/or modified sequence
atgagcatcatcatgaagcccaggagccgcagcaccagcagcctgaggacagctgaggccgtgtgctttgatgtggacaatggcaccagcgctggccgcagccccctggaccccatgaccagccctggcagcggcctcatcctgcaggccaactttgtgcacagccagaggcgggagagcttcctgtacagaagtgacagcgactatgacctgagccccaagtccatgagcaggaacagcagcatcgccagtgacatccatggagatgacctgattgtgaccccatttgcccaggtgctggccagcctgaggacagtgaggaacaactttgctgccctgaccaacctgcaggaccgggcccccagcaagaggagccccatgtgcaaccagcccagcatcaacaaggccaccatcacagaggaggcctaccagaagctggccagcgagaccctggaggagctggactggtgcctggaccagctggagaccctgcagaccaggcacagcgtgtctgagatggccagcaacaagttcaagaggatgctgaaccgggagctgacccacctgtctgagatgagccgcagcggcaaccaggtgtctgagttcatcagcaacaccttcctggacaagcagcacgaggtggagatccccagccccacccagaaggagaaggagaagaagaagaggcccatgagccagatctctggagtgaagaagctgatgcacagcagcagcctgaccaacagcagcatcccccgcttcggcgtgaagacagagcaggaggatgtgctggccaaggagctggaggatgtgaacaagtggggcctgcacgtgttcagaattgctgagctgagcggcaaccggcccctgaccgtcatcatgcacaccatcttccaggagcgggacctgctgaagaccttcaagatccctgtggacaccctcatcacctacctgatgaccctggaggaccactaccacgcagatgtggcctaccacaacaacatccatgctgctgatgtggtgcagagcacccacgtgctgctgagcaccccagccctggaggccgtgttcacagacctggagatcctggccgccatctttgccagcgccatccatgatgtggaccaccctggggtgagcaaccagttcctgatcaacaccaacagcgagctggccctgatgtacaatgacagctctgtgctggagaaccaccacctggccgtgggcttcaagctgctgcaggaggagaactgtgacatcttccagaacctgaccaagaagcagaggcagagcctgaggaagatggtgattgatattgtgctggccacagacatgagcaagcacatgaacctgctggccgacctgaagaccatggtggagaccaagaaggtgaccagcagtggagtgctgctgctggacaactacagcgaccgcatccaggtgctgcagaacatggtgcactgtgccgacctgagcaaccccaccaagcccctgcagctgtaccggcagtggacagaccgcatcatggaggagttcttccggcagggcgaccgggagcgggagcggggcatggagatcagccccatgtgtgacaagcacaatgcctctgtggagaagagccaggtgggcttcatcgactacatcgtgcaccccctgtgggagacctgggccgacctggtgcacccagatgcccaggacatcctggacaccctggaggacaaccgggagtggtaccagagcaccatcccccagagccccagccctgccccagatgatcctgaggagggccggcagggccagacagagaagttccagtttgagctgaccctggaggaggatggagagagtgacacagagaaggacagcggcagccaggtggaggaggacaccagctgcagcgacagcaagaccctgtgcacccaggacagcgagagcacagagatccccctggatgagcaggtggaggaggaggccgtgggggaggaggaggagagccagcctgaggcctgtgtgattgatgacaggagcccagacacctag

SEQ ID NO: 75408 - DNA, 2040 bp, Artificial Sequence
  derived and/or modified sequence
atgagcatcatcatgaagccccggagccggagcaccagcagcctgcggacggctgaggccgtgtgctttgatgttgataatgggacaagtgccggtcgtagtccactggacccaatgacctcacctggctccggcctcattctgcaggcaaattttgttcatagccagaggcgagaaagcttcttatacagatccgacagcgattacgacctatccccaaagagcatgtcccgtaactcctcaatcgcttcggatatccacggtgatgacttaatcgttactccctttgcccaggtgctggcatctctgaggaccgttcggaataatttcgcggccctcaccaatttgcaggaccgggccccttccaagagatcccctatgtgcaaccagccctcaataaataaggccactataacagaggaggcctaccaaaaactcgcttccgagaccttggaggagcttgattggtgtttagaccaactcgaaacgctacagacccgtcattctgtgtctgagatggccagtaacaagttcaagaggatgctgaatcgggagctgactcacctgtctgaaatgagcaggtcagggaatcaggtctcagaattcatcagcaacaccttcctcgacaagcagcatgaagtggaaattccttcacctacacagaaggaaaaggagaagaagaaaagaccaatgtcacaaatttccggagtaaaaaagttaatgcactctagttccctgacaaatagtagtattcctaggtttggagttaagactgagcaggaggacgtcttagctaaggaactggaggacgtcaataagtgggggttacacgtgtttaggatcgcggagttgtctggaaataggccactcactgtcattatgcacaccatctttcaagagcgggacctgcttaagacattcaaaattcctgttgacacgctgattacctacctaatgactttagaagaccattaccacgccgatgtcgcataccataataatatccatgccgcagatgtggttcaatcaacgcatgtgctcctgtctacacccgctctggaagcagtgtttaccgacttggagattctggctgcgatatttgcatccgccatacacgacgtggaccatcctggtgtaagcaatcagtttctgattaatactaacagcgagctcgctctcatgtataatgatagtagcgtcttggaaaaccaccatctggcagtcgggtttaagctattgcaggaggaaaactgtgacatcttccagaacttgactaagaagcagcggcagtccttgagaaaaatggtcatcgatattgtgttggcaacagacatgtcgaagcatatgaatctgctggccgacctcaaaaccatggtggagacgaaaaaggtgaccagctccggcgtgttacttttggacaactacagcgatcgcattcaagttctgcaaaatatggtgcactgtgcggacctgagtaacccaaccaaacctctgcagctgtatagacagtggaccgaccgcattatggaagagttctttaggcaaggcgacagagagcgggaaaggggtatggagataagtcctatgtgtgacaaacacaacgcgtccgtggaaaagagtcaagtggggttcatcgattatatcgtccaccctctgtgggagacatgggctgatttggtccatcctgacgcgcaggacatcctcgacacccttgaggataaccgcgagtggtatcagagcaccattccccagtcacctagccccgcccccgacgaccctgaggaagggcgacagggccagactgagaaattccagtttgagcttaccctagaagaggacggtgagtccgacaccgaaaaggacagcggcagccaggtggaggaggatacatcatgcagcgatagtaaaactctgtgtacacaggactctgaatctaccgagatcccgctggatgaacaggtcgaggaggaggccgtgggcgaggaggaagaatcccaaccagaggcctgtgtgatcgacgacaggtcgccagacacttag

SEQ ID NO: 75409 - DNA, 2860 bp, Artificial Sequence
  derived and/or modified sequence
ttctcactgccctgcggtgttttgaactgccttcttacagacgtcatacagcccttgaggaatagtttctgcctggtgagattgaatgatagttctcattcacaaaaccctggattctaagcagggacacacagaaattactttcgcaggtaaatcagcccacccagccaaagtgtggagagatttgttccttggctgacttctttgctccacggagaggagtgttttcctgtgcttgccctgaaatggaacttccttgacagctctcccgtgttacagtacctcccggtcattttctttttctctctctctacctgcgctcttcgagtgtcagaaacctttaaagctgttactatggaattgcaaaaaagagatcaagtgactctttcactatgctggtttcccttgtgacccagatgaagaatcaattcagaattcagttcctcccttggcattgcaagacacagaagaaactgtcacttcctaacagcctagtactggagtaaattcagtatgaaggaagaaagcgctcctgcgtgttagaaccttgcccatgagctggaccgaggacaggagatggactccaggaaaattggatttcttcaagcagcctcccttggaaatggaatatctttaaaatcttctttgcagaaagacagttagaatgtattaatcagaatagttgaagacttattttcctttttattttttttcaaaatgagcattattatgaagccaagatcccgatctacaagttccctaaggactgcagaggcagtttgttttgatgtggacaatggcacatctgcgggacggagtcccttggatcccatgaccagcccaggatccgggctaattctccaagcaaattttgtccacagtcaacgacgggagtccttcctgtatcgatccgacagcgattatgacctctctccaaagtctatgtcccggaactcctccattgccagtgatatacacggagatgacttgattgtgactccatttgctcaggtcttggccagtctgcgaactgtacgaaacaactttgctgcattaactaatttgcaagatcgagcacctagcaaaagatcacccatgtgcaaccaaccatccatcaacaaagccaccataacagaggaggcctaccagaaactggccagcgagaccctggaggagctggactggtgtctggaccagctagagaccctacagaccaggcactccgtcagtgagatggcctccaacaagtttaaaaggatgcttaatcgggagctcacccatctctctgaaatgagtcggtctggaaatcaagtgtcagagtttatatcaaacacattcttagataagcaacatgaagtggaaattccttctccaactcagaaggaaaaggagaaaaagaaaagaccaatgtctcagatcagtggagtcaagaaattgatgcacagctctagtctgactaattcaagtatcccaaggtttggagttaaaactgaacaagaagatgtccttgccaaggaactagaagatgtgaacaaatggggtcttcatgttttcagaatagcagagttgtctggtaaccggcccttgactgttatcatgcacaccatttttcaggaacgggatttattaaaaacatttaaaattccagtagatactttaattacatatcttatgactctcgaagaccattaccatgctgatgtggcctatcacaacaatatccatgctgcagatgttgtccagtctactcatgtgctattatctacacctgctttggaggctgtgtttacagatttggagattcttgcagcaatttttgccagtgcaatacatgatgtagatcatcctggtgtgtccaatcaatttctgatcaatacaaactctgaacttgccttgatgtacaatgattcctcagtcttagagaaccatcatttggctgtgggctttaaattgcttcaggaagaaaactgtgacattttccagaatttgaccaaaaaacaaagacaatctttaaggaaaatggtcattgacatcgtacttgcaacagatatgtcaaaacacatgaatctactggctgatttgaagactatggttgaaactaagaaagtgacaagctctggagttcttcttcttgataattattccgataggattcaggttcttcagaatatggtgcactgtgcagatctgagcaacccaacaaagcctctccagctgtaccgccagtggacggaccggataatggaggagttcttccgccaaggagaccgagagagggaacgtggcatggagataagccccatgtgtgacaagcacaatgcttccgtggaaaaatcacaggtgggcttcatagactatattgttcatcccctctgggagacatgggcagacctcgtccaccctgacgcccaggatattttggacactttggaggacaatcgtgaatggtaccagagcacaatccctcagagcccctctcctgcacctgatgacccagaggagggccggcagggtcaaactgagaaattccagtttgaactaactttagaggaagatggtgagtcagacacggaaaaggacagtggcagtcaagtggaagaagacactagctgcagtgactccaagactctttgtactcaagactcagagtctactgaaattccccttgatgaacaggttgaagaggaggcagtaggggaagaagaggaaagccagcctgaagcctgtgtcatagatgatcgttctcctgacacgtaacagtgcaaaaactttcatgccttttttttttttaagtagaaaaattgtttccaaagtgcatgtcacatgccacaaccacggtcacacctcactgtcatctgcc

SEQ ID NO: 75410 - DNA, 2040 bp, Artificial Sequence
  derived and/or modified sequence
atgagtatcattatgaagccacggagccggtcgacatcatcccttcggacagctgaggcggtgtgcttcgatgtagacaacggaacaagcgcaggtcgtagccctctcgacccaatgactagtcctggaagcggcctcatattgcaggctaatttcgtgcatagccagaggcgcgagtcatttctttatcgatctgattccgactacgatctgtcgccaaagtctatgagcaggaattcatctatcgcttccgacatccatggggacgacttaattgtgaccccgtttgcacaggtgcttgcttctcttcgcacagttcgaaataacttcgccgcactcacaaatctacaggaccgtgccccaagcaagcggtccccaatgtgtaatcagccttcaatcaacaaagccacaattacagaggaggcttatcagaagctagccagcgaaactctcgaggaacttgattggtgtctggaccagcttgaaactcttcagactcgacactcagtttccgagatggctagcaacaagtttaagagaatgctgaatagagagttgacccatttaagtgaaatgagcagatcaggaaatcaggtgtcggagttcatttctaatacttttcttgataagcagcacgaggtggagattccgagtcccacacaaaaagagaaggaaaaaaaaaagagacccatgtcccagattagtggcgtgaaaaaactgatgcattcatcctctctgaccaattcctccattccacggtttggagtcaagactgagcaggaggacgtactggccaaggagcttgaagatgtaaataagtgggggcttcatgtgttccggattgcagaactgtctgggaatagaccattgacagttatcatgcacacaatcttccaggagcgggacctgctcaagacttttaaaattcctgttgataccctcattacctacctgatgacattggaggatcactaccatgctgacgtagcataccataacaatatccacgccgctgacgtggtacaaagtacccatgtgttactctctactcctgccctggaggctgtgtttactgatctggagatcctagccgcaattttcgcctccgctattcatgacgtagatcatcccggagtaagcaaccagtttctcatcaataccaacagtgagcttgccttgatgtataacgattcctcagtattggaaaatcatcacctagctgtgggctttaagctgctgcaggaagaaaattgcgacatctttcagaacttgacaaaaaaacagcgccagtccttacgcaaaatggtcatcgatatcgtgctggccactgatatgtccaaacatatgaacctgctggccgaccttaagacaatggtggagactaaaaaagtgacctcaagcggcgtcctgttgcttgacaattatagtgatcgtatccaagtcctacaaaatatggtacattgtgctgatttatcgaatcctaccaagccattgcagctctatagacagtggaccgacaggattatggaggagttctttcggcagggtgatcgcgaaagggaacgcggaatggagatttcaccaatgtgcgacaaacataacgccagtgtggagaagtcccaagtggggttcattgattacatcgttcaccccctctgggaaacatgggctgaccttgtgcatccggatgcgcaggacatacttgataccctggaagataatcgagagtggtaccagtccaccataccccagagcccttccccagcccctgacgatccagaggaagggagacagggccagactgagaaatttcagttcgaactgaccctggaggaggatggtgaatcagataccgaaaaggactctgggtcccaagttgaagaggacacatcttgctccgatagcaagacactgtgtacacaggattccgagtccaccgagattcctttggacgaacaggtcgaagaagaagccgttggggaggaggaggagtcacaacccgaagcatgcgtgatcgatgaccgcagccctgatacctag

SEQ ID NO: 75411 - DNA, 2040 bp, Artificial Sequence
  derived and/or modified sequence
atgagcatcatcatgaagcccagaagcagaagcaccagcagcctgagaaccgccgaggccgtgtgcttcgacgtggacaacggcaccagcgccggcagaagccccctggaccccatgaccagccccggcagcggcctgatcctgcaggccaacttcgtgcacagccagagaagagagagcttcctgtacagaagcgacagcgactacgacctgagccccaagagcatgagcagaaacagcagcatcgccagcgacatccacggcgacgacctgatcgtgacccccttcgcccaggtgctggccagcctgagaaccgtgagaaacaacttcgccgccctgaccaacctgcaggacagagcccccagcaagagaagccccatgtgcaaccagcccagcatcaacaaggccaccatcaccgaggaggcctaccagaagctggccagcgagaccctggaggagctggactggtgcctggaccagctggagaccctgcagaccagacacagcgtgagcgagatggccagcaacaagttcaagagaatgctgaacagagagctgacccacctgagcgagatgagcagaagcggcaaccaggtgagcgagttcatcagcaacaccttcctggacaagcagcacgaggtggagatccccagccccacccagaaggagaaggagaagaagaagagacccatgagccagatcagcggcgtgaagaagctgatgcacagcagcagcctgaccaacagcagcatccccagattcggcgtgaagaccgagcaggaggacgtgctggccaaggagctggaggacgtgaacaagtggggcctgcacgtgttcagaatcgccgagctgagcggcaacagacccctgaccgtgatcatgcacaccatcttccaggagagagacctgctgaagaccttcaagatccccgtggacaccctgatcacctacctgatgaccctggaggaccactaccacgccgacgtggcctaccacaacaacatccacgccgccgacgtggtgcagagcacccacgtgctgctgagcacccccgccctggaggccgtgttcaccgacctggagatcctggccgccatcttcgccagcgccatccacgacgtggaccaccccggcgtgagcaaccagttcctgatcaacaccaacagcgagctggccctgatgtacaacgacagcagcgtgctggagaaccaccacctggccgtgggcttcaagctgctgcaggaggagaactgcgacatcttccagaacctgaccaagaagcagagacagagcctgagaaagatggtgatcgacatcgtgctggccaccgacatgagcaagcacatgaacctgctggccgacctgaagaccatggtggagaccaagaaggtgaccagcagcggcgtgctgctgctggacaactacagcgacagaatccaggtgctgcagaacatggtgcactgcgccgacctgagcaaccccaccaagcccctgcagctgtacagacagtggaccgacagaatcatggaggagttcttcagacagggcgacagagagagagagagaggcatggagatcagccccatgtgcgacaagcacaacgccagcgtggagaagagccaggtgggcttcatcgactacatcgtgcaccccctgtgggagacctgggccgacctggtgcaccccgacgcccaggacatcctggacaccctggaggacaacagagagtggtaccagagcaccatcccccagagccccagccccgcccccgacgaccccgaggagggcagacagggccagaccgagaagttccagttcgagctgaccctggaggaggacggcgagagcgacaccgagaaggacagcggcagccaggtggaggaggacaccagctgcagcgacagcaagaccctgtgcacccaggacagcgagagcaccgagatccccctggacgagcaggtggaggaggaggccgtgggcgaggaggaggagagccagcccgaggcctgcgtgatcgacgacagaagccccgacacctag

SEQ ID NO: 75412 - DNA, 1524 bp, Artificial Sequence
  derived and/or modified sequence
atggcttctaacaagtttaaaagaatgcttaaccgagaactcacccacctgagcgagatgtcacgcagtggtaaccaggtgtctgaattcatctctaatacctttctggataagcaacatgaggtggaaatccctagtccgactcagaaggagaaagaaaaaaagaaaagacccatgtctcagattagcggcgtgaagaaactaatgcactcgtctagcctgaccaactcgagtattccccggtttggagtgaagactgagcaagaggatgtcctggcgaaagagctggaagatgtgaacaagtggggtctgcacgtgtttaggatcgctgagctgtctggaaaccggccattaaccgtgatcatgcacacaatttttcaggaaagagatctcttaaaaacatttaagatacccgtcgacacattaatcacctacctgatgacactggaagaccactaccacgccgacgtcgcctatcataataacattcatgctgctgacgtggtccagagtacacatgtactgttgtcgactcctgcgttggaagcggtgtttaccgacttggaaatcctggctgccatcttcgcgtcagctatacacgatgtggatcatcctggagtatccaaccaattcctgataaatacaaactcagaactggctctaatgtataacgattctagcgttctggagaaccatcaccttgctgtggggttcaagctcctgcaggaggagaactgtgacatcttccaaaatctgacgaagaagcagagacagagtctaagaaaaatggtgattgacatcgtccttgcgactgacatgtcaaaacatatgaacctcctggctgacttgaaaacaatggtggaaaccaaaaaggtgacgtcgagcggcgtgttgttactggacaactacagtgatcgcatccaagtgctgcaaaatatggttcactgtgctgacctctcgaaccccaccaagcctttacaactatatcgccagtggaccgaccggattatggaggaatttttccgtcagggagacagggaaagagagaggggcatggaaattagccctatgtgcgacaagcataatgccagtgttgagaagagccaggtcggcttcattgattacattgtgcatccactgtgggagacatgggctgatctggtccaccctgatgcccaagacatactggatacactcgaggataacagggagtggtaccagtccactattccacagtctcccagccctgctcccgacgatcccgaagagggtagacagggacagacggagaaattccaatttgaactgactttggaagaggatggtgagagcgacacagaaaaagatagcgggtctcaggtcgaggaagataccagctgctccgactccaagaccttgtgcacccaggactcggagtcaaccgaaatcccgctggacgaacaggtggaagaggaggctgtcggagaagaagaagagagccagcccgaagcttgtgtcatcgacgatagatcaccagatacttag

SEQ ID NO: 75413 - DNA, 1269 bp, Artificial Sequence
  derived and/or modified sequence
atggcttccaacaaattcaaacggatgctgaatcgggaactgacacatctgtctgagatgagccggtcggggaaccaagtgagcgaatttatcagtaatacttttttagacaaacagcacgaagtcgaaatcccctctcccacccaaaaggagaaggagaaaaaaaaacgccctatgagccaaatctcaggcgttaaaaagctaatgcattcctcaagcttgactaactccagtatcccgagattcggggtgaagacagaacaggaggacgttttagccaaagagttggaggacgttaataagtggggactgcacgtgtttcgcattgctgagctttccggcaataggcccctgacagtaatcatgcacaccatttttcaagaacgagatttactgaaaacttttaagatccccgttgacacactgattacttatttgatgacactcgaagaccactaccatgctgacgtcgcttaccacaataatatccatgccgccgacgttgttcaatctacacatgtgctcctatctacccccgccttagaagctgtgttcacggatctggagattctcgctgcaatcttcgcatctgctattcatgacgttgaccatcccggcgtatctaaccagttcctcatcaatactaacagcgagctagccctcatgtacaacgactcctctgttctggagaaccaccatctagccgtagggttcaagctgcttcaagaagagaattgcgatatctttcaaaatctgacaaagaaacagcggcagtctctgagaaaaatggtaatcgacatcgtactcgccactgatatgtccaagcatatgaacctgcttgcggatttgaagacaatggtggagacaaaaaaagtgacatcaagtggcgtgctgctgctggacaattattctgaccgcattcaggtgctccaaaatatggttcattgtgcggacctcagcaacccaacaaagccgctccagttgtaccgccagtggacggaccgaatcatggaagagttcttcaggcaaggggaccgggagcgtgagagaggcatggaaatctcacccatgtgtgataaacacaatgcaagtgtggaaaaaagccaggtggggttcattgattatatcgtgcatccactgtgggaaacttgggcagacctggtgcacccagatgctcaagacatattggacaccctcgaggacaatcgcgaatggtaccagagtaccatcccacagagcccttcccctgccccagatgacccagagtag

SEQ ID NO: 75414 - DNA, 1524 bp, Artificial Sequence
  derived and/or modified sequence
atggccagcaacaagttcaagaggatgctgaaccgggagctgacccacctgtctgagatgagccgcagcggcaaccaggtgtctgagttcatcagcaacaccttcctggacaagcagcacgaggtggagatccccagccccacccagaaggagaaggagaagaagaagaggcccatgagccagatctctggagtgaagaagctgatgcacagcagcagcctgaccaacagcagcatcccccgcttcggcgtgaagacagagcaggaggatgtgctggccaaggagctggaggatgtgaacaagtggggcctgcacgtgttcagaattgctgagctgagcggcaaccggcccctgaccgtcatcatgcacaccatcttccaggagcgggacctgctgaagaccttcaagatccctgtggacaccctcatcacctacctgatgaccctggaggaccactaccacgcagatgtggcctaccacaacaacatccatgctgctgatgtggtgcagagcacccacgtgctgctgagcaccccagccctggaggccgtgttcacagacctggagatcctggccgccatctttgccagcgccatccatgatgtggaccaccctggggtgagcaaccagttcctgatcaacaccaacagcgagctggccctgatgtacaatgacagctctgtgctggagaaccaccacctggccgtgggcttcaagctgctgcaggaggagaactgtgacatcttccagaacctgaccaagaagcagaggcagagcctgaggaagatggtgattgatattgtgctggccacagacatgagcaagcacatgaacctgctggccgacctgaagaccatggtggagaccaagaaggtgaccagcagtggagtgctgctgctggacaactacagcgaccgcatccaggtgctgcagaacatggtgcactgtgccgacctgagcaaccccaccaagcccctgcagctgtaccggcagtggacagaccgcatcatggaggagttcttccggcagggcgaccgggagcgggagcggggcatggagatcagccccatgtgtgacaagcacaatgcctctgtggagaagagccaggtgggcttcatcgactacatcgtgcaccccctgtgggagacctgggccgacctggtgcacccagatgcccaggacatcctggacaccctggaggacaaccgggagtggtaccagagcaccatcccccagagccccagccctgccccagatgatcctgaggagggccggcagggccagacagagaagttccagtttgagctgaccctggaggaggatggagagagtgacacagagaaggacagcggcagccaggtggaggaggacaccagctgcagcgacagcaagaccctgtgcacccaggacagcgagagcacagagatccccctggatgagcaggtggaggaggaggccgtgggggaggaggaggagagccagcctgaggcctgtgtgattgatgacaggagcccagacacctag

SEQ ID NO: 75415 - DNA, 1269 bp, Artificial Sequence
  derived and/or modified sequence
atggccagcaacaagttcaagaggatgctgaaccgggagctgacccacctgtctgagatgagccgcagcggcaaccaggtgtctgagttcatcagcaacaccttcctggacaagcagcacgaggtggagatccccagccccacccagaaggagaaggagaagaagaagaggcccatgagccagatctctggagtgaagaagctgatgcacagcagcagcctgaccaacagcagcatcccccgcttcggcgtgaagacagagcaggaggatgtgctggccaaggagctggaggatgtgaacaagtggggcctgcacgtgttcagaattgctgagctgagcggcaaccggcccctgaccgtcatcatgcacaccatcttccaggagcgggacctgctgaagaccttcaagatccctgtggacaccctcatcacctacctgatgaccctggaggaccactaccacgcagatgtggcctaccacaacaacatccatgctgctgatgtggtgcagagcacccacgtgctgctgagcaccccagccctggaggccgtgttcacagacctggagatcctggccgccatctttgccagcgccatccatgatgtggaccaccctggggtgagcaaccagttcctgatcaacaccaacagcgagctggccctgatgtacaatgacagctctgtgctggagaaccaccacctggccgtgggcttcaagctgctgcaggaggagaactgtgacatcttccagaacctgaccaagaagcagaggcagagcctgaggaagatggtgattgatattgtgctggccacagacatgagcaagcacatgaacctgctggccgacctgaagaccatggtggagaccaagaaggtgaccagcagtggagtgctgctgctggacaactacagcgaccgcatccaggtgctgcagaacatggtgcactgtgccgacctgagcaaccccaccaagcccctgcagctgtaccggcagtggacagaccgcatcatggaggagttcttccggcagggcgaccgggagcgggagcggggcatggagatcagccccatgtgtgacaagcacaatgcctctgtggagaagagccaggtgggcttcatcgactacatcgtgcaccccctgtgggagacctgggccgacctggtgcacccagatgcccaggacatcctggacaccctggaggacaaccgggagtggtaccagagcaccatcccccagagccccagccctgccccagatgatcctgagtag

SEQ ID NO: 75416 - DNA, 1524 bp, Artificial Sequence
  derived and/or modified sequence
atggccagcaacaagttcaagcggatgctgaaccgggagctgacccacctttcagagatgtctcggagcggaaaccaggtctccgagttcatttccaatacgtttctcgataaacagcacgaagtggagatcccatcgccaactcagaaggaaaaggaaaagaaaaagcggccgatgtctcagatttctggagtgaagaagctgatgcactcatcatccctgacaaacagcagcataccccggttcggcgtgaaaaccgagcaggaggacgtgctggccaaggaacttgaagacgtgaacaaatggggcctgcacgtgttcagaattgctgaactcagcgggaaccggccactgaccgtcattatgcacacaatatttcaggaacgggacctcttaaagaccttcaaaatccccgttgacacccttatcacctacctgatgacactcgaagatcattatcatgcagacgtagcctatcacaacaatattcatgctgctgacgtcgtccagtctactcatgtgttgttatctaccccggcactggaagctgtgttcaccgacctggaaattctcgcagctatctttgcctccgctatccatgacgtggaccatcctggagtcagtaaccagttcttgattaacaccaatagtgaacttgctctgatgtacaatgacagttcagtgttagagaaccaccatctggctgttggtttcaagctgcttcaggaagagaattgtgatatatttcaaaatctcactaagaagcagaggcagtccttgcgcaaaatggtcatcgacatcgtgctggccaccgacatgagtaaacacatgaaccttctcgcagatctgaagactatggtggagaccaagaaggtgacttccagtggcgtgctcctgctggacaattactcagacagaatacaggtactccagaatatggtgcactgtgccgatctgtcaaaccctaccaaacctctacaactatatagacaatggactgacagaataatggaggagttcttccggcagggagatcgggaacgcgaacgggggatggaaatttcgcccatgtgtgataagcacaacgcgagtgttgaaaaatcccaggttgggttcatcgactacatcgttcatcccctgtgggaaacctgggcggatctggttcatcctgacgcacaggacattctggatacactggaggataacagggaatggtaccagtcgaccatcccgcagtcacccagcccggcacccgatgatcctgaagaaggccgccagggtcagaccgagaaattccagttcgagttgaccctggaggaagacggcgagtctgataccgaaaaggattcaggctcccaggtggaagaggacacttcatgctcagactctaagactctgtgtacacaggacagtgagtccaccgagattcctctggatgagcaggtcgaagaagaagcagttggcgaggaggaggagagccagccggaagcttgtgtaatagacgacaggtcccctgacacttag

SEQ ID NO: 75417 - DNA, 1269 bp, Artificial Sequence
  derived and/or modified sequence
atggccagcaacaagttcaagcggatgctgaaccgggagctgacccacctgtccgagatgagccgatctggaaaccaggtgtcagagttcatctccaacacgttcttggacaaacagcatgaggtagaaattccaagccccacccagaaagaaaaagagaaaaaaaagagaccgatgagtcagattagcggcgttaaaaagctcatgcattcctcttcattgacaaattcaagtataccgcgtttcggcgtaaaaacagagcaggaagatgtgctggcaaaagagctggaagatgtcaataagtgggggctacacgtatttagaatagcagagctgtccggaaatcggccactgaccgtcattatgcacacaatctttcaggagagagatcttctcaagaccttcaagatccctgtggatactcttatcacataccttatgaccctggaggatcactaccatgccgacgtagcataccataacaatatccacgcggcggatgtcgtgcagagcacacacgttctgctttccacccctgccttagaagccgtgtttactgacctggagatcttagctgctatcttcgccagcgctatccacgacgtcgaccatcccggcgtttctaaccagttccttattaataccaatagcgagcttgccctcatgtataacgatagctccgtgctggagaatcaccacctggccgttggcttcaaactgttgcaggaggaaaactgcgacatctttcagaacttgacgaaaaaacaacggcagagcctgagaaagatggtgatcgacattgttctcgccaccgatatgagtaagcacatgaacctcctggccgatctcaaaactatggttgagaccaagaaggttacctcctcgggagtgctccttttggacaactattctgatagaatccaggtcctgcagaatatggttcattgcgccgacctgtctaatccaaccaagccccttcaactgtaccgtcagtggaccgaccggatcatggaagaattctttaggcagggtgatcgtgagagagagcgcggtatggaaatttcgccgatgtgcgacaaacacaacgcaagcgtagagaaatcgcaggtcggcttcatcgattacattgtccaccccctgtgggagacttgggcagacctggtgcacccagatgcccaggacattctggacacactggaggacaatagggagtggtatcagtcaaccatcccccagtcccccagcccggctccagacgatccagagtag

SEQ ID NO: 75418 - DNA, 1524 bp, Artificial Sequence
  derived and/or modified sequence
atggcttccaacaagtttaaaaggatgctcaatcgcgagctgacacacctgagtgaaatgtctagaagtggcaatcaggtgtcggagtttatcagcaatacctttctggataaacagcacgaggtggagattcccagcccgacccagaaggagaaagaaaaaaaaaaaagacccatgtcacagatatctggcgtgaagaagctcatgcattcatcaagtctgacaaacagttccatccccaggttcggggttaagacagaacaggaagatgtgcttgcgaaggagctcgaggacgtgaacaagtgggggctgcacgtgttccgaatcgccgaactgtctggcaaccgacccctcaccgtgataatgcacaccatttttcaggagagggatttactaaagacatttaaaatcccagtggacaccctgattacatatcttatgaccctagaagatcactaccatgcggatgtagcctatcacaataatattcacgccgctgacgttgtacagagcacccacgtgctgctgagcacaccggctctggaggcagtgtttactgacttagaaatcctggctgctattttcgcgtccgctatccatgacgtcgatcaccccggagtttctaatcagttcctgattaacactaacagcgagctggccctaatgtataatgattccagcgtcctggaaaatcatcatctcgcagttgggtttaagctgctccaggaggagaactgtgacatttttcagaacctgaccaagaagcagcgacaatctctgcggaagatggtgattgacatagttctggccactgacatgagcaaacatatgaacctgcttgcggacctgaagacaatggtggagaccaagaaggtcacatccagcggagtgctgctgctggacaattattctgaccgtatccaggtcttgcagaacatggttcactgcgcagatctctctaatcccaccaaaccgctgcagctgtaccgtcagtggacagaccgtatcatggaagagttcttcaggcaaggcgaccgggagcgagaacggggaatggagatctcacccatgtgtgataagcataacgccagcgttgaaaagagccaagtcggattcattgactacattgtgcatcccctctgggagacctgggctgacctcgtgcacccagatgcacaagacatcctcgatacactggaggacaacagggaatggtaccaaagcacaataccccaatcaccctctcccgcaccagacgaccccgaagaggggagacagggccagacagagaagtttcagtttgagcttacattagaggaagacggagaaagtgacaccgagaaggacagtggatcccaagtggaagaggatacctcctgtagcgattccaagacattgtgtactcaggactcagaaagtaccgaaattcctctggatgagcaagtagaggaagaagccgttggtgaagaggaagagtcgcaaccagaggcatgcgtcatcgatgatcgcagccctgatacatag

SEQ ID NO: 75419 - DNA, 1269 bp, Artificial Sequence
  derived and/or modified sequence
atggccagcaacaaatttaagcgcatgctgaaccgcgaattgacccacctttctgagatgagccgtagtgggaaccaggtatctgagttcatctccaatacctttcttgacaaacagcatgaggtggagataccatcccccacccaaaaggaaaaggagaaaaagaagcgtcccatgtcccagatttccggtgtgaaaaaacttatgcactcctctagcctgaccaacagctcgattcctcgatttggcgtgaagacagaacaggaagacgtattagccaaagagcttgaggatgtgaataaatggggtcttcacgtctttcgcatcgctgaactgtcaggaaatcgaccacttaccgtaattatgcataccatctttcaggagcgggacctcctcaagacattcaaaattcctgttgatacactgattacatacctgatgacactggaggaccattatcatgccgacgtggcgtatcataataatatacacgctgccgatgtggtgcagagcactcacgtacttctgagtacgccagccctcgaagctgtgttcaccgatctggaaatcctggctgctatattcgcctccgccatccacgatgtggatcatcccggagtctctaaccagttcctgatcaacaccaattccgagctggccttgatgtataacgattctagcgtgctggaaaatcatcatctggccgtggggttcaagctgttgcaggaagagaactgcgatatatttcagaacctgactaagaagcagcgccagagcctgcgcaagatggtaattgatatcgtactagcaaccgacatgtccaagcatatgaatcttctggctgacctcaaaaccatggtggagactaagaaggttacctcttctggtgtcctactcttagataattattcggacaggatacaggttctccagaacatggtgcattgcgccgacctgtctaatcctacaaaaccgctccagctgtatcgccagtggacagatcggataatggaggagtttttcagacagggagaccgcgagcgagagcgtggtatggaaatcagccctatgtgtgataaacacaacgccagcgtcgaaaagtcccaggttggtttcatagattacattgtccacccactgtgggagacctgggctgatctcgtccaccccgatgcacaagacatccttgacacactggaggataatagagagtggtatcagtccactattccccagtccccatcacctgccccagacgaccccgagtag

SEQ ID NO: 75420 - DNA, 1524 bp, Artificial Sequence
  derived and/or modified sequence
atggccagcaacaagttcaagagaatgctgaacagagagctgacccacctgagcgagatgagcagaagcggcaaccaggtgagcgagttcatcagcaacaccttcctggacaagcagcacgaggtggagatccccagccccacccagaaggagaaggagaagaagaagagacccatgagccagatcagcggcgtgaagaagctgatgcacagcagcagcctgaccaacagcagcatccccagattcggcgtgaagaccgagcaggaggacgtgctggccaaggagctggaggacgtgaacaagtggggcctgcacgtgttcagaatcgccgagctgagcggcaacagacccctgaccgtgatcatgcacaccatcttccaggagagagacctgctgaagaccttcaagatccccgtggacaccctgatcacctacctgatgaccctggaggaccactaccacgccgacgtggcctaccacaacaacatccacgccgccgacgtggtgcagagcacccacgtgctgctgagcacccccgccctggaggccgtgttcaccgacctggagatcctggccgccatcttcgccagcgccatccacgacgtggaccaccccggcgtgagcaaccagttcctgatcaacaccaacagcgagctggccctgatgtacaacgacagcagcgtgctggagaaccaccacctggccgtgggcttcaagctgctgcaggaggagaactgcgacatcttccagaacctgaccaagaagcagagacagagcctgagaaagatggtgatcgacatcgtgctggccaccgacatgagcaagcacatgaacctgctggccgacctgaagaccatggtggagaccaagaaggtgaccagcagcggcgtgctgctgctggacaactacagcgacagaatccaggtgctgcagaacatggtgcactgcgccgacctgagcaaccccaccaagcccctgcagctgtacagacagtggaccgacagaatcatggaggagttcttcagacagggcgacagagagagagagagaggcatggagatcagccccatgtgcgacaagcacaacgccagcgtggagaagagccaggtgggcttcatcgactacatcgtgcaccccctgtgggagacctgggccgacctggtgcaccccgacgcccaggacatcctggacaccctggaggacaacagagagtggtaccagagcaccatcccccagagccccagccccgcccccgacgaccccgaggagggcagacagggccagaccgagaagttccagttcgagctgaccctggaggaggacggcgagagcgacaccgagaaggacagcggcagccaggtggaggaggacaccagctgcagcgacagcaagaccctgtgcacccaggacagcgagagcaccgagatccccctggacgagcaggtggaggaggaggccgtgggcgaggaggaggagagccagcccgaggcctgcgtgatcgacgacagaagccccgacacctag

SEQ ID NO: 75421 - DNA, 1269 bp, Artificial Sequence
  derived and/or modified sequence
atggccagcaacaagttcaagagaatgctgaacagagagctgacccacctgagcgagatgagcagaagcggcaaccaggtgagcgagttcatcagcaacaccttcctggacaagcagcacgaggtggagatccccagccccacccagaaggagaaggagaagaagaagagacccatgagccagatcagcggcgtgaagaagctgatgcacagcagcagcctgaccaacagcagcatccccagattcggcgtgaagaccgagcaggaggacgtgctggccaaggagctggaggacgtgaacaagtggggcctgcacgtgttcagaatcgccgagctgagcggcaacagacccctgaccgtgatcatgcacaccatcttccaggagagagacctgctgaagaccttcaagatccccgtggacaccctgatcacctacctgatgaccctggaggaccactaccacgccgacgtggcctaccacaacaacatccacgccgccgacgtggtgcagagcacccacgtgctgctgagcacccccgccctggaggccgtgttcaccgacctggagatcctggccgccatcttcgccagcgccatccacgacgtggaccaccccggcgtgagcaaccagttcctgatcaacaccaacagcgagctggccctgatgtacaacgacagcagcgtgctggagaaccaccacctggccgtgggcttcaagctgctgcaggaggagaactgcgacatcttccagaacctgaccaagaagcagagacagagcctgagaaagatggtgatcgacatcgtgctggccaccgacatgagcaagcacatgaacctgctggccgacctgaagaccatggtggagaccaagaaggtgaccagcagcggcgtgctgctgctggacaactacagcgacagaatccaggtgctgcagaacatggtgcactgcgccgacctgagcaaccccaccaagcccctgcagctgtacagacagtggaccgacagaatcatggaggagttcttcagacagggcgacagagagagagagagaggcatggagatcagccccatgtgcgacaagcacaacgccagcgtggagaagagccaggtgggcttcatcgactacatcgtgcaccccctgtgggagacctgggccgacctggtgcaccccgacgcccaggacatcctggacaccctggaggacaacagagagtggtaccagagcaccatcccccagagccccagccccgcccccgacgaccccgagtag

SEQ ID NO: 75422 - DNA, 2969 bp, Artificial Sequence
  derived and/or modified sequence
gtggtggccgcgcacccggccgcggctgattcattcacttcaagtgccgtgcagaaggctcggcaggcggggcgggcgtggggccgcggctccgggttggggaccgaggagatccggctgtggaccagacgctcctctgcggggcgggcacccaagcgcgctcgccaccccctcgccatccgctagagccgggctcctggactgggactcgggcccgccgcacagttgaaaagtcgcatagtggtttttccgctcgcgtcgctgtgtgaaagttggctcgccgctctttgcacgccctccctggaggccgacccgagacgccaagctggagagaccgtgcctccccgaggccggccgccccgcgagcacagcctccgcccccgttgcactgccgggctgggcaatatgaaggagcagccctcatgtgccggcaccgggcatccgagcatggcgggaggaggcctaccagaaactggccagcgagaccctggaggagctggactggtgtctggaccagctagagaccctacagaccaggcactccgtcagtgagatggcctccaacaagtttaaaaggatgcttaatcgggagctcacccatctctctgaaatgagtcggtctggaaatcaagtgtcagagtttatatcaaacacattcttagataagcaacatgaagtggaaattccttctccaactcagaaggaaaaggagaaaaagaaaagaccaatgtctcagatcagtggagtcaagaaattgatgcacagctctagtctgactaattcaagtatcccaaggtttggagttaaaactgaacaagaagatgtccttgccaaggaactagaagatgtgaacaaatggggtcttcatgttttcagaatagcagagttgtctggtaaccggcccttgactgttatcatgcacaccatttttcaggaacgggatttattaaaaacatttaaaattccagtagatactttaattacatatcttatgactctcgaagaccattaccatgctgatgtggcctatcacaacaatatccatgctgcagatgttgtccagtctactcatgtgctattatctacacctgctttggaggctgtgtttacagatttggagattcttgcagcaatttttgccagtgcaatacatgatgtagatcatcctggtgtgtccaatcaatttctgatcaatacaaactctgaacttgccttgatgtacaatgattcctcagtcttagagaaccatcatttggctgtgggctttaaattgcttcaggaagaaaactgtgacattttccagaatttgaccaaaaaacaaagacaatctttaaggaaaatggtcattgacatcgtacttgcaacagatatgtcaaaacacatgaatctactggctgatttgaagactatggttgaaactaagaaagtgacaagctctggagttcttcttcttgataattattccgataggattcaggttcttcagaatatggtgcactgtgcagatctgagcaacccaacaaagcctctccagctgtaccgccagtggacggaccggataatggaggagttcttccgccaaggagaccgagagagggaacgtggcatggagataagccccatgtgtgacaagcacaatgcttccgtggaaaaatcacaggtgggcttcatagactatattgttcatcccctctgggagacatgggcagacctcgtccaccctgacgcccaggatattttggacactttggaggacaatcgtgaatggtaccagagcacaatccctcagagcccctctcctgcacctgatgacccagaggagggccggcagggtcaaactgagaaattccagtttgaactaactttagaggaagatggtgagtcagacacggaaaaggacagtggcagtcaagtggaagaagacactagctgcagtgactccaagactctttgtactcaagactcagagtctactgaaattccccttgatgaacaggttgaagaggaggcagtaggggaagaagaggaaagccagcctgaagcctgtgtcatagatgatcgttctcctgacacgtaacagtgcaaaaactttcatgccttttttttttttaagtagaaaaattgtttccaaagtgcatgtcacatgccacaaccacggtcacacctcactgtcatctgccaggacgtttgttgaacaaaactgaccttgactactcagtccagcgctcaggaatatcgtaaccagttttttcacctccatgtcatccgagcaaggtggacatcttcacgaacagcgtttttaacaagatttcagcttggtagagctgacaaagcagataaaatctactccaaattattttcaagagagtgtgactcatcaggcagcccaaaagtttattggacttggggtttctattcctttttatttgtttgcaatattttcagaagaaaggcattgcacagagtgaacttaatggacgaagcaacaaatatgtcaagaacaggacatagcacgaatctgttaccagtaggaggaggatgagccacagaaattgcataattttctaatttcaagtcttcctgatacatgactgaatagtgtggttcagtgagctgcactgacctctacattttgtatgatatgtaaaacagattttttgtagagcttacttttattattaaatgtattgaggtattatatttaaaaaaaactatgttcagaacttcatctgccactggttatttttttctaaggagtaacttgcaagttttcagtacaaatctgtgctacactggataaaaatctaatttatgaattttacttgcaccttatagttcatagcaattaactgatttgtagtgattcattgtttgttttatataccaatgacttccatattttaaaagagaaaaacaactttatgttgcaggaaaccctttttgtaagtctttattatttactttgcatt

SEQ ID NO: 75423 - protein, 518 aa, Artificial Sequence
  derived and/or modified sequence
MPEANYLLSVSWGYIKFKRMLNRELTHLSEMSRSGNQVSEFISNTFLDKQHEVEIPSPTQKEKEKKKRPMSQISGVKKLMHSSSLTNSSIPRFGVKTEQEDVLAKELEDVNKWGLHVFRIAELSGNRPLTVIMHTIFQERDLLKTFKIPVDTLITYLMTLEDHYHADVAYHNNIHAADVVQSTHVLLSTPALEAVFTDLEILAAIFASAIHDVDHPGVSNQFLINTNSELALMYNDSSVLENHHLAVGFKLLQEENCDIFQNLTKKQRQSLRKMVIDIVLATDMSKHMNLLADLKTMVETKKVTSSGVLLLDNYSDRIQVLQNMVHCADLSNPTKPLQLYRQWTDRIMEEFFRQGDRERERGMEISPMCDKHNASVEKSQVGFIDYIVHPLWETWADLVHPDAQDILDTLEDNREWYQSTIPQSPSPAPDDPEEGRQGQTEKFQFELTLEEDGESDTEKDSGSQVEEDTSCSDSKTLCTQDSESTEIPLDEQVEEEAVGEEEESQPEACVIDDRSPDT

SEQ ID NO: 75424 - DNA, 1557 bp, Artificial Sequence
  derived and/or modified sequence
atgccggaggctaactatcttttgtcagtgagctggggttacatcaaatttaaaaggatgctcaaccgtgagctcacacatctcagcgagatgtcccgctcgggcaatcaggtgtccgagtttatcagcaacacatttctcgacaaacaacacgaggtcgaaatacccagtcccactcagaaggagaaggagaagaaaaaacgcccaatgtcccagatttccggagtgaaaaaacttatgcactcctcttccttgacaaattcctccataccacggttcggcgtcaagactgaacaggaggatgtgttggcaaaggaactggaagacgttaataagtggggattacacgtgtttaggatcgccgaactgtcaggaaacagaccactgacagtgatcatgcacaccatcttccaggaaagggatctgctgaagacctttaagatccccgtcgacactctgataacatacctcatgacattggaagaccactatcacgccgatgtggcctaccataacaacatccatgctgctgatgtggttcagtcaacacatgtgctgctgtctactccagctctcgaagctgtgtttacggatttggaaatcttggccgccatttttgcaagtgctatacatgacgtggaccacccgggagtgtcaaatcaattcttgattaacacaaactccgagctggcgcttatgtataatgattcgagtgtgctggagaaccatcatctagctgtcggctttaagctgttgcaggaggaaaactgtgacatctttcagaacttgacaaagaagcagagacagtccctgaggaagatggtcattgatattgtcctcgccaccgacatgagtaaacacatgaatctgttagcagatttaaaaaccatggtggagaccaagaaagttacgtcttccggagttttactgctggataattattccgacaggatacaagtgctgcaaaacatggtgcactgcgccgatttgtctaatccaacgaagccactgcaactctatcggcagtggaccgatagaattatggaggaattcttccggcagggggatagggagcgcgagcgaggcatggaaatctctccaatgtgtgacaaacataacgcatctgtggagaagagtcaggtagggttcatcgattacattgtgcaccccttgtgggagacctgggccgacttggtacaccccgacgcccaggatattttagataccctagaggataatcgcgaatggtaccaaagcacaattccacaatccccttctcccgctcccgatgacccggaggaagggcgtcaaggtcagaccgagaagttccagttcgaactaactctagaagaagatggtgagagcgacaccgaaaaggattcaggatctcaggtcgaggaagacacgtcctgctccgattccaagactctgtgcactcaggatagtgagtctacagagattcccctcgatgagcaagtagaagaagaggcggtgggcgaggaggaggagtcacagcctgaggcctgcgttatcgatgacagatctccagatacatag

SEQ ID NO: 75425 - DNA, 1557 bp, Artificial Sequence
  derived and/or modified sequence
atgcctgaggccaactacctgctgtctgtgtcctggggctacatcaagttcaagaggatgctgaaccgggagctgacccacctgtctgagatgagccgcagcggcaaccaggtgtctgagttcatcagcaacaccttcctggacaagcagcacgaggtggagatccccagccccacccagaaggagaaggagaagaagaagaggcccatgagccagatcagcggcgtgaagaagctgatgcacagcagcagcctgaccaacagcagcatccccaggtttggagtgaagacagagcaggaggatgtgctggccaaggagctggaggatgtgaacaagtggggcctgcacgtgttcagaattgctgagctgagcggcaaccggcccctgaccgtcatcatgcacaccatcttccaggagcgggacctgctgaagaccttcaagatccctgtggacaccctcatcacctacctgatgaccctggaggaccactaccacgcagatgtggcctaccacaacaacatccacgccgcagatgtggtgcagagcacccacgtgctgctgagcaccccagccctggaggccgtgttcacagacctggagatcctggccgccatctttgccagcgccatccatgatgtggaccaccctggggtgagcaaccagttcctgatcaacaccaacagcgagctggccctgatgtacaatgacagctctgtgctggagaaccaccacctggccgtgggcttcaagctgctgcaggaggagaactgtgacatcttccagaacctgaccaagaagcagaggcagagcctgaggaagatggtgattgacatcgtgctggccacagacatgagcaagcacatgaacctgctggccgacctgaagaccatggtggagaccaagaaggtgaccagcagcggcgtgctgctgctggacaactacagcgaccgcatccaggtgctgcagaacatggtgcactgtgccgacctgagcaaccccaccaagcccctgcagctgtaccggcagtggacagaccgcatcatggaggagttcttccggcagggcgaccgggagcgggagcggggcatggagatcagccccatgtgtgacaagcacaatgcctctgtggagaagagccaggtgggcttcatcgactacatcgtgcaccccctgtgggagacctgggccgacctggtgcacccagatgcccaggacatcctggacaccctggaggacaaccgggagtggtaccagagcaccatcccccagagccccagccctgccccagatgatcctgaggagggccggcagggccagacagagaagttccagtttgagctgaccctggaggaggatggagagagtgacacagagaaggacagcggcagccaggtggaggaggacaccagctgcagcgacagcaagaccctgtgcacccaggacagcgagagcacagagatccccctggatgagcaggtggaggaggaggccgtgggggaggaggaggagagccagcctgaggcctgtgtgattgatgacaggagcccagacacctag

SEQ ID NO: 75426 - DNA, 1557 bp, Artificial Sequence
  derived and/or modified sequence
atgcccgaggccaactacctgctgagcgtgagctggggctacatcaaatttaaacgtatgctaaaccgggagttgacacatctctccgagatgtcccgcagcggtaaccaggtgagcgagtttattagcaacaccttcctggataaacagcacgaggttgagatcccatccccaactcagaaggagaaggaaaagaagaaaagacccatgagtcaaatctctggggtcaagaaattgatgcactcctccagtctcaccaattcttcaattccccgatttggcgtgaagactgagcaggaggacgtcctggccaaagaactggaggatgtcaataaatggggcttacatgtattccgaattgctgaactgtctggaaacagaccccttacggtgattatgcataccattttccaggaacgggacctacttaaaacttttaagatacctgtcgacaccctgatcacttacttaatgacactcgaggatcattaccacgccgacgtcgcctatcacaacaacatacacgctgcggatgtggtgcagagcactcatgtgctcttgtccacccctgccctcgaagccgtttttactgatctggagatattggccgctatcttcgcaagcgccatccatgatgtggaccaccccggggtcagcaaccaatttctgataaataccaactctgagctcgcacttatgtataacgactccagcgttcttgagaaccatcatctggcagtgggcttcaagctgctgcaggaagagaattgcgatatcttccaaaacctgaccaaaaagcagaggcagagcctccgcaaaatggtcattgacattgtcttagccacggatatgtcaaagcacatgaatcttttggcggatcttaagaccatggttgagacaaagaaagtaacttcatctggggtgttgctactcgacaactatagtgacaggattcaggtcctgcaaaacatggtgcactgcgcagacctaagtaatcctacaaagcctctgcagctgtatagacaatggacagatcgcattatggaggagttttttagacagggcgacagagaaagagagagggggatggaaatcagcccaatgtgcgacaaacataacgccagcgtcgaaaagagtcaagtgggatttatcgattatatcgtacacccactgtgggaaacctgggccgatctcgttcatcctgacgctcaggatatactggacactctggaggacaaccgggagtggtaccagagtacaattccacagtcccccagccctgcgcccgatgacccagaggagggacgacagggccagaccgaaaagtttcaatttgaactgacgttggaggaggatggcgagagcgataccgagaaggactctggctcacaagtggaagaagacacttcgtgtagcgatagtaaaacgctgtgtacgcaggattcggaatctactgagattccgctagacgaacaggttgaagaggaggccgttggcgaggaagaggaaagtcagcccgaagcctgtgtaattgatgatagatcgcccgacacttag

SEQ ID NO: 75427 - DNA, 2599 bp, Artificial Sequence
  derived and/or modified sequence
agttccttatttggtagcttttgacaggactagcctttcttgcaactaagcatcttgacatacattattcattaagccctggagctcgggagagaaagatgcagacccttagatctttagatattcctttatcacgtggattttctttattcagaatagttgctgaattttgtgccattctggagtcttacaaatggcatgtattcgatgggaagacggctggatgggatttaatgcgaggctttcttatgtatacttaattaccaaaaatctttaaaaactcatactctgcgtggcttgtggaggttgttaaagtgtcgagattttgaagctaaatacattttagagcttactatatatatacatatatatatatatacatataatcaatcaaaaatgcctgaagcaaactatttactgtcagtgtcttggggctacataaagtttaaaaggatgcttaatcgggagctcacccatctctctgaaatgagtcggtctggaaatcaagtgtcagagtttatatcaaacacattcttagataagcaacatgaagtggaaattccttctccaactcagaaggaaaaggagaaaaagaaaagaccaatgtctcagatcagtggagtcaagaaattgatgcacagctctagtctgactaattcaagtatcccaaggtttggagttaaaactgaacaagaagatgtccttgccaaggaactagaagatgtgaacaaatggggtcttcatgttttcagaatagcagagttgtctggtaaccggcccttgactgttatcatgcacaccatttttcaggaacgggatttattaaaaacatttaaaattccagtagatactttaattacatatcttatgactctcgaagaccattaccatgctgatgtggcctatcacaacaatatccatgctgcagatgttgtccagtctactcatgtgctattatctacacctgctttggaggctgtgtttacagatttggagattcttgcagcaatttttgccagtgcaatacatgatgtagatcatcctggtgtgtccaatcaatttctgatcaatacaaactctgaacttgccttgatgtacaatgattcctcagtcttagagaaccatcatttggctgtgggctttaaattgcttcaggaagaaaactgtgacattttccagaatttgaccaaaaaacaaagacaatctttaaggaaaatggtcattgacatcgtacttgcaacagatatgtcaaaacacatgaatctactggctgatttgaagactatggttgaaactaagaaagtgacaagctctggagttcttcttcttgataattattccgataggattcaggttcttcagaatatggtgcactgtgcagatctgagcaacccaacaaagcctctccagctgtaccgccagtggacggaccggataatggaggagttcttccgccaaggagaccgagagagggaacgtggcatggagataagccccatgtgtgacaagcacaatgcttccgtggaaaaatcacaggtgggcttcatagactatattgttcatcccctctgggagacatgggcagacctcgtccaccctgacgcccaggatattttggacactttggaggacaatcgtgaatggtaccagagcacaatccctcagagcccctctcctgcacctgatgacccagaggagggccggcagggtcaaactgagaaattccagtttgaactaactttagaggaagatggtgagtcagacacggaaaaggacagtggcagtcaagtggaagaagacactagctgcagtgactccaagactctttgtactcaagactcagagtctactgaaattccccttgatgaacaggttgaagaggaggcagtaggggaagaagaggaaagccagcctgaagcctgtgtcatagatgatcgttctcctgacacgtaacagtgcaaaaactttcatgccttttttttttttaagtagaaaaattgtttccaaagtgcatgtcacatgccacaaccacggtcacacctcactgtcatctgccaggacgtttgttgaacaaaactgaccttgactactcagtccagcgctcaggaatatcgtaaccagttttttcacctccatgtcatccgagcaaggtggacatcttcacgaacagcgtttttaacaagatttcagcttggtagagctgacaaagcagataaaatctactccaaattattttcaagagagtgtgactcatcaggcagcccaaaagtttattggacttggggtttctattcctttttatttgtttgcaatattttcagaagaaaggcattgcacagagtgaacttaatggacgaagcaacaaatatgtcaagaacaggacatagcacgaatctgttaccagtaggaggaggatgagccacagaaattgcataattttctaatttcaagtcttcctgatacatgactgaatagtgtggttcagtgagctgcactgacctctacattttgtatgatatgtaaaacagattttttgtagagcttacttttattattaaatgtattgaggtattatatttaaaaaaaactatgttcagaa

SEQ ID NO: 75428 - DNA, 1557 bp, Artificial Sequence
  derived and/or modified sequence
atgcctgaagcaaactacctgctgtccgtcagttggggatatatcaaatttaaacggatgcttaaccgcgagttgacccacctgtcagaaatgagcagatcaggcaatcaagtcagcgagtttatctcaaataccttcctggataaacagcacgaggttgagatcccatcccccactcagaaggagaaagagaagaaaaagcggccaatgtcccagatatctggagtcaagaagctcatgcacagctcaagtctgaccaatagttccatcccacggttcggcgtgaaaactgagcaggaggacgtccttgcgaaggagctcgaagatgtgaataagtgggggcttcatgtctttcgtatcgctgagctgagtgggaaccgcccactgacagtgattatgcacacaattttccaagagcgggatttgctgaaaacattcaagattcctgttgatactctgattacttacctgatgactctggaggaccactaccacgccgatgtggcttatcacaataatatccacgccgctgatgtcgtgcaaagtacccacgtgctgctgtctaccccagctttagaagcagtcttcacggacctggaaatcttagctgccatattcgcgagcgcgattcatgacgtcgatcaccctggggtttcaaatcagtttttgatcaatacaaattctgagcttgctctcatgtataacgatagcagcgtgctggagaaccaccatctggccgtgggatttaagttgctgcaggaagaaaactgtgacatctttcagaatttaaccaagaagcagaggcagagccttagaaaaatggtcattgatatcgtgctggcaaccgacatgtctaagcacatgaatctgctagcagacttgaaaactatggtagaaaccaagaaggtgacctcatctggggtccttctgttagacaattattccgaccgaattcaggtcctgcagaacatggtccactgtgcagacctgtcaaatcccacgaagccactgcagctgtatagacagtggacagaccggattatggaagagttttttcgacaaggagacagagagcgcgagagaggtatggagatctcacctatgtgcgacaaacataacgccagtgtagagaaaagccaggtcggatttatcgactacattgttcaccctctgtgggaaacatgggccgatctagttcacccagatgcacaggatattctggatacactggaggacaaccgggaatggtatcagtcaacaatcccccagtccccaagccctgccccagatgatccagaggaggggagacaagggcagaccgagaaattccagttcgaactcactctggaggaagatggggagtccgacactgagaaagattccggtagtcaggtggaggaggatacctcatgcagcgatagcaagaccctttgcacccaggatagtgagtcgactgagatccctctcgacgagcaggtggaagaggaggctgtgggtgaagaagaggaatcccagcccgaagcttgcgtgatcgacgatcggtcacccgacacctag

SEQ ID NO: 75429 - DNA, 1557 bp, Artificial Sequence
  derived and/or modified sequence
atgcccgaggccaactacctgctgagcgtgagctggggctacatcaagttcaagagaatgctgaacagagagctgacccacctgagcgagatgagcagaagcggcaaccaggtgagcgagttcatcagcaacaccttcctggacaagcagcacgaggtggagatccccagccccacccagaaggagaaggagaagaagaagagacccatgagccagatcagcggcgtgaagaagctgatgcacagcagcagcctgaccaacagcagcatccccagattcggcgtgaagaccgagcaggaggacgtgctggccaaggagctggaggacgtgaacaagtggggcctgcacgtgttcagaatcgccgagctgagcggcaacagacccctgaccgtgatcatgcacaccatcttccaggagagagacctgctgaagaccttcaagatccccgtggacaccctgatcacctacctgatgaccctggaggaccactaccacgccgacgtggcctaccacaacaacatccacgccgccgacgtggtgcagagcacccacgtgctgctgagcacccccgccctggaggccgtgttcaccgacctggagatcctggccgccatcttcgccagcgccatccacgacgtggaccaccccggcgtgagcaaccagttcctgatcaacaccaacagcgagctggccctgatgtacaacgacagcagcgtgctggagaaccaccacctggccgtgggcttcaagctgctgcaggaggagaactgcgacatcttccagaacctgaccaagaagcagagacagagcctgagaaagatggtgatcgacatcgtgctggccaccgacatgagcaagcacatgaacctgctggccgacctgaagaccatggtggagaccaagaaggtgaccagcagcggcgtgctgctgctggacaactacagcgacagaatccaggtgctgcagaacatggtgcactgcgccgacctgagcaaccccaccaagcccctgcagctgtacagacagtggaccgacagaatcatggaggagttcttcagacagggcgacagagagagagagagaggcatggagatcagccccatgtgcgacaagcacaacgccagcgtggagaagagccaggtgggcttcatcgactacatcgtgcaccccctgtgggagacctgggccgacctggtgcaccccgacgcccaggacatcctggacaccctggaggacaacagagagtggtaccagagcaccatcccccagagccccagccccgcccccgacgaccccgaggagggcagacagggccagaccgagaagttccagttcgagctgaccctggaggaggacggcgagagcgacaccgagaaggacagcggcagccaggtggaggaggacaccagctgcagcgacagcaagaccctgtgcacccaggacagcgagagcaccgagatccccctggacgagcaggtggaggaggaggccgtgggcgaggaggaggagagccagcccgaggcctgcgtgatcgacgacagaagccccgacacctag

SEQ ID NO: 75430 - protein, 208 aa, Artificial Sequence
  derived and/or modified sequence
MRYACSSSEDWPPPLDISSDGDVDATVLRELYPDSPPGVSLSRLRWSAMMYTGSFTYWVRSMLSRHKLDAILGRLGYTATLESEFSLVQAISKENVKQMVFKIFLVRVSCEAVLRTAGTRMLEPGTEKLARTHSRHSSEKRLVKPCSCLEGVQPGPGSGGPQQGPSEGVGSETALAEGTAGQRSLPMALSPSEVSTAPNSLPSGSPVL

SEQ ID NO: 75431 - DNA, 627 bp, Artificial Sequence
  derived and/or modified sequence
atgagatacgcctgcagcagcagcgaggactggcccccccccctggacatcagcagcgacggcgacgtggacgccaccgtgctgagagagctgtaccccgacagcccccccggcgtgagcctgagcagactgagatggagcgccatgatgtacaccggcagcttcacctactgggtgagaagcatgctgagcagacacaagctggacgccatcctgggcagactgggctacaccgccaccctggagagcgagttcagcctggtgcaggccatcagcaaggagaacgtgaagcagatggtgttcaagatcttcctggtgagagtgagctgcgaggccgtgctgagaaccgccggcaccagaatgctggagcccggcaccgagaagctggccagaacccacagcagacacagcagcgagaagagactggtgaagccctgcagctgcctggagggcgtgcagcccggccccggcagcggcggcccccagcagggccccagcgagggcgtgggcagcgagaccgccctggccgagggcaccgccggccagagaagcctgcccatggccctgagccccagcgaggtgagcaccgcccccaacagcctgcccagcggcagccccgtgctgtag

SEQ ID NO: 75432 - DNA, 627 bp, Artificial Sequence
  derived and/or modified sequence
atgagatacgcttgcagcagctccgaggattggccaccaccactcgacatttctagtgacggggacgtggatgctaccgttttgagggagctgtacccagactctccccccggagtaagcctttccagactgcgctggtctgccatgatgtacacggggagtttcacttactgggtcagaagcatgctgtcacgccacaaactagatgctatcctgggacgattggggtatacagcaaccctcgaaagcgaattctcccttgtgcaggcaatctcgaaggaaaacgtcaagcagatggtcttcaaaatttttctcgtacgcgtctcttgtgaggcagtcctaagaacggctggtactcgcatgctggagcctggcaccgaaaaactcgcccggactcactcccgacattctagtgagaagcgcctggtgaagccctgctcgtgcctggagggcgtgcaaccaggccccggcagcgggggacctcagcagggcccctccgagggcgtaggctctgaaaccgctttggctgaaggaacagccgggcaacgaagcctgcccatggccctttcgcccagcgaggtctccactgctcccaatagcctgccttccggatcgcccgttttatag

SEQ ID NO: 75433 - DNA, 627 bp, Artificial Sequence
  derived and/or modified sequence
atgagatatgcctgcagcagcagcgaggactggcccccacccctggacatcagcagtgatggagatgtggatgccaccgtgctgcgggagctgtacccagacagccccccaggagtgtccctgagccggctgcgctggagcgccatgatgtacacaggcagcttcacctactgggtgcgctccatgctgagccgccacaagctggatgccatcctgggccgcctgggctacacagccaccctggagagcgagttcagcctggtgcaggccatcagcaaagaaaatgtgaagcagatggtgttcaagatcttcctggtgcgggtgtcctgtgaggccgtgctgaggacagctggcaccaggatgctggagcccggcacagagaagctggcccggacccacagccgccacagcagcgagaagaggctggtgaagccctgcagctgcctggagggcgtgcagcccggccctggcagcggcggcccccagcagggccccagcgagggcgtgggcagcgagacagccctggccgagggcacagctggccagaggagcctgcccatggccctgagccccagcgaggtgtccacagcccccaacagcctgcccagcggcagccctgtgctgtag

SEQ ID NO: 75434 - DNA, 627 bp, Artificial Sequence
  derived and/or modified sequence
atgcggtacgcctgcagcagcagcgaggactggcccccccccctggatatctcctctgatggcgacgttgacgccactgtcctgagggagctgtacccagactcccctccgggcgtgtccctgagccgcctcagatggagcgctatgatgtacaccggctcattcacttattgggttaggagcatgctctcccgacacaagttggatgccattctcggtcggcttggctatacagcaacccttgagtcggagtttagcctggtgcaggccatctcaaaagagaacgtgaaacagatggtttttaaaattttcttagtccgtgttagttgcgaggcggtgttgcgcacagccggaacaagaatgctggagcctggcacggagaaattagctcgaacgcactctagacacagttctgaaaagagactggtgaaaccctgttcctgtctggaaggtgtgcagcctggccctggaagcggtggaccacaacagggtccgtctgagggggtagggtcagaaactgccctggctgaaggcacggcaggccagcggtctctgccgatggctttgtccccgtcagaggtgagcaccgcacccaactcactgccaagcgggagcccggtgctgtag

SEQ ID NO: 75435 - DNA, 627 bp, Artificial Sequence
  derived and/or modified sequence
atgaggtacgcatgttcctcctcggaggactggcccccaccgctggatataagttccgacggcgacgtggacgctacagttttgagagaactgtatcccgatagcccacccggagtgagcctgtctagattgcggtggtctgccatgatgtatacaggctcctttacatactgggtgaggagcatgctgagtaggcacaaactggatgcaatcttgggcaggcttggctacacggcgaccctagagtcggagttttctctcgtgcaggccatttctaaggagaatgtgaagcaaatggtgtttaagatatttttggtgcgagtgtcttgtgaggctgtactcagaacagccggaacgcggatgctggagcccggaaccgagaaattggccaggacccatagtcggcatagcagcgagaaaaggttggtcaagccctgctcatgcctcgaaggggtgcagcctgggcctgggagtggagggcctcagcagggacccagtgagggagtgggctcagagacagccctggctgaagggacagcaggacaaaggagcctgccgatggctctgtctccttccgaggtttccacggcccctaactccctgcccagcgggtcaccagtcttatag

SEQ ID NO: 75436 - DNA, 1078 bp, Artificial Sequence
  derived and/or modified sequence
ctggagccgaagctggagccggcactgcggcgcacggagcggagcgctgcagccaagccgatagcacgatacaaccgcaccagctacttctaccccacattctcagagagctcggagcacagccatctgctcgtgtcccccgtgctggtggcgagtgccgtcataggtgtggtcatcatcctctcctgcatcaccatcattgtgggcagcatccgcagggacaggcaggcccggcttcagcggcaccgccaccgccaccaccgccaccaccaccaccatcatcaccaccgccggcgtcgacaccgagagtacgagcacggctacgtgtcggacgagcacacatacagccgctcaagccgcaggatgcgctatgcctgcagctcctcagaggactggcccccacccttggacatcagctctgacggggacgtggatgccacggtgctcagggagctgtacccagattctccaccaggggtctcactcagtcgcctacgctggagtgcaatgatgtacactgggagctttacctactgggtgcgatctatgctttccagacacaaactggacgccatcctgggcaggctgggctacacggccaccttggagtctgagttctcactggtccaggccatcagcaaagagaatgtcaagcagatggtgttcaagatcttcctggtgagggtctcatgtgaagccgttctcagaaccgcgggcacacggatgcttgagccgggcacagagaaactcgctaggacccacagcaggcacagctcagagaaaaggctggtgaagccctgcagctgcctcgagggggttcagccaggcccaggttccgggggaccacagcaaggtccctcagaaggggtggggtccgagacggccctggcagagggcactgctggccagagatctctgcccatggctctgagcccatctgaggtctcaacagcccccaacagcctccccagtggctctccagtcctctagggcccccagtgccatggcagcacatgcctggacagtgaggaggtcctgccttgcttcagtgaccctgtcttacactggatgccctggt

SEQ ID NO: 75437 - DNA, 1401 bp, Artificial Sequence
  derived and/or modified sequence
atggaagtgcggtggttccggtcgcagttctctccagcagtgttcgtgtataaagggggacgcgagagaaccgaagagcagatggaggaatacagggggcgcaccaccttcgttagcaaggatatttccagggggtctgtggccctggtcatccacaatataacagcacaggagaatggcacgtatcgctgttatttccaggaaggccgatcttacgatgaagccatcctccatctagttgtcgccggtcttgggtctaagccccttattagcatgagagggcatgaggacggagggattcggttggaatgtatttcacgcggctggtaccccaagcctctgaccgtctggagagacccttacgggggtgtagcacctgccctgaaagaagtgagtatgcctgatgctgacgggctgtttatggtgacaaccgccgtcatcatccgtgacaaatcagtacggaacatgtcgtgctccataaataatacgcttttaggccagaaaaaggagagtgtcatatttatacctgaaagctttatgccaagcgttagtccatgtgccgtggcattgccaatcattgtcgtgatcctgatgattccaatagctgtttgtatctactggattaacaaacttcagaaggagaagaagatactatctggggagaaggaattcgaacgcgagacgagagaaatcgctttgaaggagctcgagaaagagcgcgtgcagaaggaggaggaacttcaggttaaggagaaacttcaggaggagttgcggtggaggcgtactttcctgcatgccgtagacgtagtgctagatcccgatactgcccacccagatctgttcctatctgaagacagaaggagcgttcgacgctgtccattccgccatctgggagaaagtgtgcctgataacccagagcggtttgatagccagccttgtgtcctcggccgtgagagttttgcaagcgggaagcattactgggaggtcgaagttgaaaatgtcatcgagtggacggtgggcgtttgcagagattctgttgaacgcaagggagaagttctgcttatccctcaaaatggcttctggacactagagatgcataagggccagtatcgagcagtgagctcacccgacaggatcctccctctgaaggaaagcctatgtcgggtaggcgtcttcttggactacgaagctggcgatgtttccttctacaacatgcgcgatagaagtcacatctacacttgtcctcgcagtgcttttagcgtgccggtgcggccctttttccggttgggatgcgaggactcacctattttcatctgcccagccctcactggggccaatggggtcactgtccccgaggaaggactcaccctacatagagtgggcacccaccagagtttgtag

SEQ ID NO: 75438 - DNA, 1401 bp, Artificial Sequence
  derived and/or modified sequence
atggaggtgcgctggttccgcagccagttcagccctgctgtgtttgtgtacaagggcggccgggagaggacagaggagcagatggaggagtaccggggccgcaccacctttgtgtccaaggacatcagccggggctctgtggccctggtgatccacaacatcacagcccaggagaatggcacctaccgctgctacttccaggagggccgctcctatgatgaggccatcctgcacctggtggtggccggcctgggcagcaagcccctcatctccatgaggggccatgaagatggcggcatccggctggagtgcatcagccggggctggtaccccaagcccctgactgtgtggagggacccctatggaggagtggccccagccctgaaggaggtgtccatgccagatgctgatggcctcttcatggtgaccacagctgtgatcatccgggacaagtctgtgaggaacatgagctgcagcatcaacaacaccctgctgggccagaagaaggagagcgtcatcttcatccctgagagcttcatgcccagcgtgagcccctgtgctgtggccctgcccatcatcgtggtgatcctgatgatccccatcgctgtgtgcatctactggatcaacaagctgcagaaggagaagaagatcctgtctggagagaaggagtttgagcgggagacccgggagatcgccctgaaggagctggagaaggagcgggtgcagaaggaggaggagctgcaggtgaaggagaagctgcaggaggagctgcgctggaggaggaccttcctgcatgctgtggatgtggtgctggaccctgacacagcccacccagacctcttcctgtctgaggaccggcgctctgtgcggcgctgccccttccgccacctgggggagagcgtgcctgacaaccctgagagatttgacagccagccctgtgtgctgggccgggagagctttgccagcggcaagcactactgggaggtggaggtggagaatgtgattgagtggacagtgggcgtgtgccgggacagcgtggagaggaaaggagaggtgctgctgatcccccagaatggcttctggaccctggagatgcacaagggccagtacagagctgtgagcagcccagaccgcatcctgcccctgaaggagagcctgtgccgggtgggcgtcttcctggactatgaagctggagatgtgtccttctacaacatgagggacaggagccacatctacacctgccccaggtctgccttctctgtgcctgtgcggcccttcttccggctgggctgtgaggacagccccatcttcatctgcccagccctgactggagccaacggggtgacagtgcctgaggagggcctgaccctgcaccgggtgggcacccaccagagcctgtag

SEQ ID NO: 75439 - DNA, 1401 bp, Artificial Sequence
  derived and/or modified sequence
atggaggtgcggtggttccggagccagttcagccccgccgtgttcgtctacaaggggggcagggagcgcaccgaggaacagatggaggagtaccgcggcaggaccacattcgtgtcaaaggacatttcacgaggatccgtcgctcttgtgatccataatatcacagctcaggagaacggcacctatcgttgctatttccaggaaggacggagctacgatgaagcaatcctgcacctcgtggtggccggtcttggcagtaaaccactgataagcatgcgtggccatgaggatggcggcattcggctggaatgtatatcaagaggctggtaccctaaaccactgaccgtgtggagagatccctacggtggagtggctcccgcattgaaggaagtgtccatgccagatgcggatggcctgtttatggttactaccgctgtgattatccgcgacaaatcagtcaggaacatgagttgtagcattaacaacaccctcctcgggcaaaagaaagaaagcgtgatttttatccctgaaagctttatgccaagcgtttcaccctgtgccgtcgcgctgcctatcattgtagtgattctcatgatccctatcgccgtctgcatttactggatcaataaactgcagaaggaaaagaaaattctctcaggggagaaagagtttgaacgcgagacccgcgaaatcgcacttaaggagctggagaaggagagggtccaaaaagaggaggagctgcaggtcaaagagaagcttcaggaggaactccgctggaggcggaccttcttgcatgccgtagatgtggttctcgacccggatacagcacatcccgacttgttcctttcagaggacaggcgatcagtgaggaggtgtccattccggcatttaggggagtccgtccccgataaccccgagagatttgatagtcaaccttgcgttcttggacgagaaagctttgcctccggtaagcactattgggaagtagaagtggaaaacgtcatcgagtggacagtaggcgtgtgtcgcgatagcgttgagaggaaaggggaagttcttctcattccccaaaatggtttctggaccctggaaatgcacaaggggcagtatcgcgccgtatcaagcccagatcgaattctgccactgaaggagtccctgtgcagagtgggtgtttttctagactacgaggccggcgatgttagcttttataacatgagagatcggagccacatctatacttgtcctagatccgcattcagcgtgccagtgcgcccctttttccgacttggctgtgaggacagccctatattcatctgcccagccctcactggggccaacggagttactgtcccagaggaaggcctaactttgcacagggtgggcacacaccagtcactgtag

SEQ ID NO: 75440 - DNA, 1401 bp, Artificial Sequence
  derived and/or modified sequence
atggaagtgaggtggtttagatcacagttctcccctgccgtttttgtctacaagggtggcagggaacgtactgaagagcaaatggaggagtaccgcggacggacaacatttgtgagtaaggatatttccagaggatcggtggccttagtgatacacaatatcactgcccaggagaacggaacctataggtgctactttcaagaaggcagaagctatgatgaggccattctgcatctggtagtggccggtttggggagcaaacctctgattagcatgagagggcacgaggatgggggaatccggctggaatgcatttccagaggctggtatcccaagcctctgaccgtgtggcgagatccatacggaggagtagcacctgctctgaaggaggtgtcaatgccagatgcggacgggctatttatggtgactactgcagtgatcatccgagacaaatccgtgcgcaacatgtcctgtagcatcaacaatacccttctgggtcagaagaaagagtcagtaattttcattcccgagtcttttatgccgtccgtgagcccttgcgcagttgctcttcctattatcgtcgtcatactgatgattccgattgccgtgtgcatttactggattaataagcttcagaaggaaaagaaaatccttagcggggaaaaagaatttgaaagggaaaccagagaaattgctctgaaggaattggagaaggaacgcgtgcagaaagaagaggagttgcaggtgaaagaaaagctgcaagaggaactgcgatggcgacggaccttcctgcatgccgttgacgtggtcctcgaccctgataccgcacacccagacctctttctgtctgaagatcgaagatctgtgcgccgatgtcctttccggcacttgggtgaatccgttccagataatcctgagcggtttgacagtcagccctgtgtcctcggcagggaatcgttcgcttcaggtaagcattattgggaggtcgaggtggagaacgtgatcgaatggaccgtcggagtctgtcgagatagtgtggagcgaaagggtgaagtcctgcttataccgcagaacggcttctggactctggaaatgcacaagggtcagtatcgggctgtatcatcacccgaccgcattttgccactcaaggaatccctgtgtcgggtgggcgtgttcttggactacgaagccggtgatgtgtcattttataacatgagagaccgatctcatatctacacttgccctaggtccgccttttcggtacccgtaaggccattctttcgactcggatgcgaggattctcctattttcatctgtcccgctctgacaggcgctaacggagttacggtacctgaggaagggctcacactgcatcgcgtgggtacacaccagagcctttag

SEQ ID NO: 75441 - DNA, 1401 bp, Artificial Sequence
  derived and/or modified sequence
atggaggtgagatggttcagaagccagttcagccccgccgtgttcgtgtacaagggcggcagagagagaaccgaggagcagatggaggagtacagaggcagaaccaccttcgtgagcaaggacatcagcagaggcagcgtggccctggtgatccacaacatcaccgcccaggagaacggcacctacagatgctacttccaggagggcagaagctacgacgaggccatcctgcacctggtggtggccggcctgggcagcaagcccctgatcagcatgagaggccacgaggacggcggcatcagactggagtgcatcagcagaggctggtaccccaagcccctgaccgtgtggagagacccctacggcggcgtggcccccgccctgaaggaggtgagcatgcccgacgccgacggcctgttcatggtgaccaccgccgtgatcatcagagacaagagcgtgagaaacatgagctgcagcatcaacaacaccctgctgggccagaagaaggagagcgtgatcttcatccccgagagcttcatgcccagcgtgagcccctgcgccgtggccctgcccatcatcgtggtgatcctgatgatccccatcgccgtgtgcatctactggatcaacaagctgcagaaggagaagaagatcctgagcggcgagaaggagttcgagagagagaccagagagatcgccctgaaggagctggagaaggagagagtgcagaaggaggaggagctgcaggtgaaggagaagctgcaggaggagctgagatggagaagaaccttcctgcacgccgtggacgtggtgctggaccccgacaccgcccaccccgacctgttcctgagcgaggacagaagaagcgtgagaagatgccccttcagacacctgggcgagagcgtgcccgacaaccccgagagattcgacagccagccctgcgtgctgggcagagagagcttcgccagcggcaagcactactgggaggtggaggtggagaacgtgatcgagtggaccgtgggcgtgtgcagagacagcgtggagagaaagggcgaggtgctgctgatcccccagaacggcttctggaccctggagatgcacaagggccagtacagagccgtgagcagccccgacagaatcctgcccctgaaggagagcctgtgcagagtgggcgtgttcctggactacgaggccggcgacgtgagcttctacaacatgagagacagaagccacatctacacctgccccagaagcgccttcagcgtgcccgtgagacccttcttcagactgggctgcgaggacagccccatcttcatctgccccgccctgaccggcgccaacggcgtgaccgtgcccgaggagggcctgaccctgcacagagtgggcacccaccagagcctgtag

SEQ ID NO: 75442 - protein, 330 aa, Artificial Sequence
  derived and/or modified sequence
MESAAALHFSRPASLLLLLLSLCALVSAQFIVVGPTDPILATVGENTTLRCHLSPEKNAEDMEVRWFRSQFSPAVFVYKGGRERTEEQMEEYRGRTTFVSKDISRGSVALVIHNITAQENGTYRCYFQEGRSYDEAILHLVVAGLGSKPLISMRGHEDGGIRLECISRGWYPKPLTVWRDPYGGVAPALKEVSMPDADGLFMVTTAVIIRDKSVRNMSCSINNTLLGQKKESVIFIPESFMPSVSPCAVALPIIVVILMIPIAVCIYWINKLQKEKKILSGEKEFERETREIALKELEKERVQKEEELQVKEKLQEELRWRRTFLHAGPV

SEQ ID NO: 75443 - DNA, 993 bp, Artificial Sequence
  derived and/or modified sequence
atggagtctgccgctgcacttcacttttctcggcccgcttccctcctgctgttgttgctttcactctgcgcactcgtatcagcacagttcattgtcgtgggtccaactgaccccatcctggcgaccgttggggaaaacaccacactcaggtgccatcttagccctgaaaaaaacgccgaggatatggaggtccgctggtttaggagccagttcagtcccgcagtgttcgtttataagggagggagggaaaggaccgaagaacagatggaggaatatagggggcgaacaactttcgtctcaaaagatatctccaggggctctgtggcactcgttattcacaacatcacagcccaggaaaatggcacctacaggtgttatttccaggagggccggtcctacgacgaggcaatcctgcacttggtagtcgcaggacttggctctaagcccctgatctccatgcgagggcatgaggacggcggaatccggcttgagtgcatttctcggggatggtatcccaagcccttaacagtgtggcgggacccctatggcggggtggcccccgccctgaaggaggtcagcatgcccgatgcagatggtttgtttatggtaacaaccgctgtgataattagggataaatcagtgcgaaacatgagctgttcaatcaacaataccctgctgggacagaaaaaggaaagtgtcatcttcatcccagagagtttcatgccctcagtatcgccttgtgccgttgcattacccattatcgttgttattctaatgattccaatcgcagtttgcatatattggatcaataaattacagaaggagaaaaagattttgagcggtgaaaaagagtttgagcgagagacaagagagattgccctgaaagagctggaaaaagaacgtgtgcagaaggaagaggaactgcaagtgaaggaaaaactacaagaggagctccgatggcgccggactttcctgcacgccggcccggtgtag

SEQ ID NO: 75444 - DNA, 993 bp, Artificial Sequence
  derived and/or modified sequence
atggagagcgctgctgccctgcacttcagcaggcctgccagcctgctgctgctgctgctgagcctgtgtgccctggtgtctgcccagttcatcgtggtgggccccacagaccccatcctggccaccgtgggggagaacaccaccctgcgctgccacctgagccctgagaagaatgctgaggacatggaggtgcgctggttccgcagccagttctccccagctgtgtttgtgtacaagggcggccgggagaggacagaggagcagatggaggagtaccggggccgcaccacctttgtgtccaaggacatcagccggggctctgtggccctggtgatccacaacatcacagcccaggagaatggcacctaccgctgctacttccaggagggccgctcctatgatgaggccatcctgcacctggtggtggccggcctgggcagcaagcccctcatctccatgaggggccatgaagatggcggcatccggctggagtgcatcagccggggctggtaccccaagcccctgactgtgtggagggacccctacggcggcgtggccccagccctgaaggaggtgtccatgccagatgctgatggcctcttcatggtgaccacagctgtgatcatccgggacaagtctgtgaggaacatgagctgcagcatcaacaacaccctgctgggccagaagaaggagagcgtcatcttcatccctgagagcttcatgcccagcgtgagcccctgtgctgtggccctgcccatcatcgtggtgatcctgatgatccccatcgctgtgtgcatctactggatcaacaagctgcagaaggagaagaagatcctgagcggggagaaggagtttgagcgggagacccgggagatcgccctgaaggagctggagaaggagcgggtgcagaaggaggaggagctgcaggtgaaggagaagctgcaggaggagctgcgctggaggaggaccttcctgcatgctggccctgtgtag

SEQ ID NO: 75445 - DNA, 993 bp, Artificial Sequence
  derived and/or modified sequence
atggagagcgccgccgccctgcacttcagccggcccgccagcctgttgctgctcctactgagcctgtgcgcactggtgtcagctcagttcattgtggtaggaccaaccgatcctatactcgcgacagttggtgaaaacaccacgctgagatgtcacctttctcctgagaagaacgccgaggatatggaagtgcgctggtttagatcacaattcagccccgctgtattcgtttacaaaggtggacgcgagaggactgaagagcaaatggaagaatacagggggcggaccactttcgtgagtaaggacataagccgaggaagcgtggctcttgtgatacacaatattaccgcgcaggagaatggcacatacagatgttatttccaggaagggcggtcatacgacgaggctatactgcacctggttgtagcgggactaggctctaagccactcattagcatgcgcgggcacgaggacggtggaatccggctggagtgcatttctagggggtggtacccaaagccacttaccgtttggagggacccatatggcggtgtagcaccagctttaaaggaggtgagtatgcccgatgccgatggactcttcatggtaacgactgctgtcattattcgggacaaatctgtccgaaatatgtcttgttcgatcaataacactctattaggtcagaaaaaggagtcagtaatttttatccccgagtcttttatgcctagcgtttcgccttgtgcagtcgccctcccgattatcgtggtgatacttatgattcccattgcggtgtgcatctactggatcaacaagttacaaaaagagaaaaagatcttgagtggtgaaaaggaatttgaacgcgaaacccgggagatcgcgctgaaagaacttgagaaggagcgcgtgcagaaggaagaggagcttcaagtgaaagagaagttacaagaggagttgaggtggcgcagaaccttcctgcacgcgggccctgtctag

SEQ ID NO: 75446 - DNA, 993 bp, Artificial Sequence
  derived and/or modified sequence
atggaaagcgccgctgcactacacttctctcggccagccagcctcttgcttttactgctatccctgtgcgctctagtcagcgctcaattcatcgtcgtaggtcccacagatcccatcctggctaccgttggtgaaaacacaactctgaggtgccatttgtcacctgaaaagaacgccgaggacatggaagtccgctggttcaggtcccagttcagtcctgcggtctttgtgtacaaaggaggcagagagagaacggaagaacagatggaagagtacagaggccgaacaactttcgtgagcaaagacatttctcgcggttcagtggcgttagtaatccataatataacagcccaggagaacggcacatataggtgttactttcaggaggggcgatcctacgatgaggcaatcctgcacctcgtagtagccggtttgggttccaagcccctgatcagtatgcggggacatgaagatggtggcatcaggctcgaatgtatttcccggggatggtacccaaaaccactcacggtatggcgcgacccctacggaggtgtcgccccagctctgaaggaggtctccatgcctgatgccgacgggctgtttatggtaacgactgcagtaatcataagagataaatccgtacgtaacatgagctgtagcatcaacaataccttgcttggacagaaaaaggagagcgtcatttttatcccagaatccttcatgcccagcgtcagcccctgcgcagtggctctaccaatcattgtcgtcattctgatgatccctatcgccgtctgtatttactggataaataagctgcagaaggagaagaagattctgtctggggaaaaggagttcgaacgggagacacgtgagattgccctgaaggaactggaaaaggagagagtccaaaaggaagaggaactgcaagtgaaggagaaactccaagaggaactgaggtggcgcaggaccttcttacacgccggtcccgtgtag

SEQ ID NO: 75447 - DNA, 1687 bp, Artificial Sequence
  derived and/or modified sequence
tgcatctccaaacatggcgacctaggagaaggggaagaacaattttttctcctcttttgggaaggtttgtgtctagtagtgcctgtgcccctgggcagattggagagaagagggacgactggagaatcgtcgagaaccagcggagaaaagaaaaagcaacgtttaattctagaaggcctcctgtccctgcctgctctgggtgctcatggaatcagctgctgccctgcacttctcccggccagcctccctcctcctcctcctcctcagcctgtgtgcactggtctcagcccagtttattgtcgtggggcccactgatcccatcttggccacggttggagaaaacactacgttacgctgccatctgtcacccgagaaaaatgctgaggacatggaggtgcggtggttccggtctcagttctcccccgcagtgtttgtgtataaaggtggcagagagagaacagaggagcagatggaggagtaccgaggaagaaccacctttgtgagcaaagacatcagcaggggcagcgtggccctggtcatacacaacatcacagcccaggaaaacggcacctaccgctgttacttccaagaaggcaggtcctacgatgaggccatcctgcacctcgtagtggcaggactaggctctaagcccctcatttcaatgaggggccatgaagacgggggcatccggctggagtgcatatctagagggtggtacccaaagcccctcacagtgtggagggacccctacggtggggttgcgcctgccctgaaagaggtctccatgcctgatgcagacggcctcttcatggtcaccacggctgtgatcatcagagacaagtctgtgaggaacatgtcctgctctatcaacaacaccctgctcggccagaagaaagaaagtgtcatttttattccagaatcctttatgcccagtgtgtctccctgtgcagtggccctgcctatcattgtggttattctgatgatacccattgccgtatgcatctattggatcaacaaactccaaaaggaaaaaaagattctgtcaggggaaaaggagtttgaacgggaaacaagagaaattgctctaaaggaactggagaaagaacgtgtgcaaaaagaggaagaacttcaagtaaaagagaaacttcaagaagaattgcgatggagaagaacattcttacatgctgggccagtttgaagctttatatatcatttaccaaacttagggtggtgagtgggtgctgatggcagcctggtttgaaaatctccactggagagaagacacagcaggattcagatgcaaatgaccagagcactccaagttggaaagaactgctgagcgggtctgtagagcccatcgctctctcctgtctattcatcagctaggctgaagctcctgacagactcacaccagtatcttgctgctccagaaaggtcgaagatggcagttttcccaaactccggcttgcccagatgtctgctcaccctcattcttctccagctgcccaagctggtttcagataggtctctctctctggcctgcagagttaaaacatctcaataaatataaagtataaaaagaagctggagcccaaccacttcggcacatgttcacaggatctcggggctgtgtcacaagccactgggcactcatatctggctgagaataaatctcttgcaatatttt

SEQ ID NO: 75448 - DNA, 993 bp, Artificial Sequence
  derived and/or modified sequence
atggagagcgccgccgccctgcacttcagcagacccgccagcctgctgctgctgctgctgagcctgtgcgccctggtgagcgcccagttcatcgtggtgggccccaccgaccccatcctggccaccgtgggcgagaacaccaccctgagatgccacctgagccccgagaagaacgccgaggacatggaggtgagatggttcagaagccagttcagccccgccgtgttcgtgtacaagggcggcagagagagaaccgaggagcagatggaggagtacagaggcagaaccaccttcgtgagcaaggacatcagcagaggcagcgtggccctggtgatccacaacatcaccgcccaggagaacggcacctacagatgctacttccaggagggcagaagctacgacgaggccatcctgcacctggtggtggccggcctgggcagcaagcccctgatcagcatgagaggccacgaggacggcggcatcagactggagtgcatcagcagaggctggtaccccaagcccctgaccgtgtggagagacccctacggcggcgtggcccccgccctgaaggaggtgagcatgcccgacgccgacggcctgttcatggtgaccaccgccgtgatcatcagagacaagagcgtgagaaacatgagctgcagcatcaacaacaccctgctgggccagaagaaggagagcgtgatcttcatccccgagagcttcatgcccagcgtgagcccctgcgccgtggccctgcccatcatcgtggtgatcctgatgatccccatcgccgtgtgcatctactggatcaacaagctgcagaaggagaagaagatcctgagcggcgagaaggagttcgagagagagaccagagagatcgccctgaaggagctggagaaggagagagtgcagaaggaggaggagctgcaggtgaaggagaagctgcaggaggagctgagatggagaagaaccttcctgcacgccggccccgtgtag

SEQ ID NO: 75449 - protein, 523 aa, Artificial Sequence
  derived and/or modified sequence
MEPAAALHFSLPASLLLLLLLLLLSLCALVSAQFTVVGPANPILAMVGENTTLRCHLSPEKNAEDMEVRWFRSQFSPAVFVYKGGRERTEEQMEEYRGRITFVSKDINRGSVALVIHNVTAQENGIYRCYFQEGRSYDEAILRLVVAGLGSKPLIEIKAQEDGSIWLECISGGWYPEPLTVWRDPYGEVVPALKEVSIADADGLFMVTTAVIIRDKYVRNVSCSVNNTLLGQEKETVIFIPESFMPSASPWMVALAVILTASPWMVSMTVILAVFIIFMAVSICCIKKLQREKKILSGEKKVEQEEKEIAQQLQEELRWRRTFLHAADVVLDPDTAHPELFLSEDRRSVRRGPYRQRVPDNPERFDSQPCVLGWESFASGKHYWEVEVENVMVWTVGVCRHSVERKGEVLLIPQNGFWTLEMFGNQYRALSSPERILPLKESLCRVGVFLDYEAGDVSFYNMRDRSHIYTCPRSAFTVPVRPFFRLGSDDSPIFICPALTGASGVMVPEEGLKLHRVGTHQSL

SEQ ID NO: 75450 - DNA, 1572 bp, Artificial Sequence
  derived and/or modified sequence
atggagcccgccgccgcactgcacttctctctgcccgccagtttgctactactcttgctcctgctgctcctctccctttgcgctttggttagtgcgcagttcactgtcgtaggacctgccaatcccattctggccatggtaggggagaataccacactgcgatgccacctatcgcccgaaaagaatgctgaggatatggaagtgagatggttcagaagccagtttagtcccgctgttttcgtctacaagggaggtcgagaacgcactgaggaacagatggaagagtacagagggcgcatcacttttgttagtaaggatatcaatcgcgggtctgtggccctcgtgatccacaatgtcactgctcaagagaatggcatttacagatgctacttccaggagggccgatcctatgatgaggcgatcctaaggttagtggtggccggcctggggtctaaacccctcatcgagattaaggctcaagaagacggttccatctggctggagtgcattagcggcggctggtaccccgaacccctgactgtgtggcgcgacccatacggggaggttgtacctgcgctgaaagaggtgagcattgcggatgccgatgggctctttatggtgaccaccgccgtgattatacgcgataaatatgtgcgaaacgtgagctgctccgtgaataatacactcctaggtcaggaaaaggaaactgtgatcttcatccccgaaagttttatgcctagcgctagtccgtggatggtcgccctcgccgtcatcctgaccgcgagcccgtggatggtgtccatgacagtgatccttgccgtatttattatatttatggccgtgtccatctgttgtatcaaaaagctccagagggaaaaaaagatcctctccggagagaagaaggtcgaacaggaagaaaaagaaattgcacagcagctccaggaagaactgcggtggcggagaaccttcctgcacgctgctgacgtggtccttgatcccgacactgcgcatcctgagctttttctgtcagaggaccggcgttccgttcgccggggaccttaccgccagagggtcccagataaccccgaacggttcgactcccagccttgtgtcctgggctgggaatcattcgcatctggcaaacactattgggaagtcgaagtagagaacgtcatggtgtggaccgttggggtgtgccgtcacagtgtcgagcggaagggcgaggtactgctcatcccccaaaatggattttggactctggaaatgttcggtaaccaatacagggcactgtcaagtcctgaaaggattctgccattgaaggagtcactgtgccgcgttggggtattcctggactacgaggctggagacgtctctttttataacatgagggaccggtcccatatctatacatgtcctagatctgccttcaccgtgccagttagaccattcttcaggcttggatccgacgattcacctatctttatttgtcccgctctgaccggagcgtcaggagtaatggttcccgaagaggggctgaagctgcacagggtcggcacacatcagagcctgtag

SEQ ID NO: 75451 - DNA, 1572 bp, Artificial Sequence
  derived and/or modified sequence
atggagccagctgctgccctgcacttctctttgccagctagcctactactgttactgctcctactcttgctatccctctgcgctttagtgtccgcccagttcaccgtggtcggaccagcaaatcccattcttgctatggttggcgaaaatacaacgttgcgatgtcatctgtctcccgaaaaaaacgcagaagatatggaagttcgctggttccgtagccagtttagtccagccgtcttcgtgtataaaggtggaagggagcgtacagaggagcagatggaggagtatcgaggccgcattaccttcgtcagcaaagatatcaaccgagggtcggtggccctggtgatccataacgtgacagcccaggagaatggaatctaccgctgctatttccaggaagggagaagctatgatgaagcaatactgcgtctggtagtggccggactcggtagcaaaccattgatagaaatcaaagctcaagaggacggcagtatctggttagagtgcatcagcggaggctggtacccggagcctctgacagtatggcgtgatccatatggcgaggtcgttcccgctctgaaggaggtgtcaattgctgacgccgacggtcttttcatggtgactaccgccgtgatcatacgggataagtatgtcagaaatgttagttgtagcgtgaacaacactctgctgggtcaggaaaaggagactgtcatctttatccccgagtcctttatgccttccgccagcccgtggatggtggcactggctgtgattttgacagcatcaccctggatggtgtcgatgacggtaattctggccgtgtttattatcttcatggcagtatctatatgctgcattaagaagctgcagagggagaaaaaaattctgtccggggaaaagaaagtcgagcaggaagagaaagaaattgcacagcaactgcaggaagagctgcgctggcgtagaaccttcctgcatgctgctgatgttgttctggatcctgatacagctcaccctgagttattcctttctgaggaccggagatcagtgcgtcggggcccataccggcaacgggttcctgataatcccgagagatttgactctcagccctgtgttcttgggtgggaatcgttcgcaagtggtaagcattattgggaggtagaggttgagaatgttatggtttggaccgtgggcgtgtgtagacactctgttgagcgaaagggcgaagtgctcctcatcccacagaatggtttttggaccctggaaatgttcggcaatcagtaccgcgccttgtcgtctccagagagaatccttcctctgaaagaaagtctgtgtagagtcggggtcttcctggattatgaagccggcgacgtgagtttctacaatatgcgtgatcggagtcacatttatacatgtcctagaagcgcctttactgtccccgtgagaccattctttagactgggcagtgatgatagtcccatctttatatgccctgcactgacaggagcctccggtgtcatggttcctgaagaaggcctcaagctgcacagagttggcacacatcagagcctgtag

SEQ ID NO: 75452 - DNA, 1572 bp, Artificial Sequence
  derived and/or modified sequence
atggagcctgctgctgccctgcacttcagcctgcctgccagcctgctgctgctgctgctgctgctgctgctgagcctgtgtgccctggtgtctgcccagttcaccgtggtgggccctgccaaccccatcctggccatggtgggggagaacaccaccctgcgctgccacctgagccctgagaagaatgctgaggacatggaggtgcgctggttccgcagccagttctccccagctgtgtttgtgtacaagggcggccgggagaggacagaggagcagatggaggagtaccggggccgcatcacctttgtgtccaaggacatcaacagaggctctgtggccctggtgatccacaacgtgacagcccaggagaatggcatctaccgctgctacttccaggagggccgctcctatgatgaggccatcctgcggctggtggtggccggcctgggcagcaagcccctgattgagatcaaggcccaggaggatggcagcatctggctggagtgcatcagcggcggctggtacccagagcccctgactgtgtggagggacccctacggggaggtggtgcctgccctgaaggaggtgtccattgctgatgctgatggcctcttcatggtgaccacagctgtgatcatccgggacaagtatgtgagaaatgtgtcctgcagcgtgaacaacaccctgctgggccaggagaaggagaccgtcatcttcatccctgagagcttcatgcccagcgccagcccctggatggtggccctggccgtcatcctgacagccagcccctggatggtgtccatgaccgtcatcctggccgtgttcatcatcttcatggctgtgtccatctgctgcatcaagaagctgcagcgggagaagaagatcctgtctggagagaagaaggtggagcaggaggagaaggagatcgcccagcagctgcaggaggagctgcgctggaggaggaccttcctgcacgccgcagatgtggtgctggaccctgacacagcccaccctgagctgttcctgtctgaggaccggcgctctgtgcggcggggcccctaccggcagagggtgcctgacaaccctgagagatttgacagccagccctgtgtgctgggctgggagagctttgccagcggcaagcactactgggaggtggaggtggagaatgtgatggtgtggacagtgggcgtgtgccgccacagcgtggagaggaagggggaggtgctgctgatcccccagaatggcttctggaccctggagatgtttggaaaccagtaccgggccctgagcagccctgagcgcatcctgcccctgaaggagagcctgtgccgggtgggcgtcttcctggactatgaggccggagatgtgtccttctacaacatgagggacaggagccacatctacacctgccccaggtctgccttcaccgtgcctgtgcggcccttcttccggctgggcagtgatgacagccccatcttcatctgcccagccctgaccggggccagcggcgtgatggtgcctgaggagggcctgaagctgcaccgggtgggcacccaccagagcctgtag

SEQ ID NO: 75453 - DNA, 1572 bp, Artificial Sequence
  derived and/or modified sequence
atggagcccgccgccgccctgcacttcagcctgcccgccagcctgctgctcctgctgctactgctgttattaagcttatgcgcattggtatctgcgcagttcaccgttgtgggccctgccaatcctattctagcaatggtgggcgagaatactacactgaggtgccacctcagccccgagaagaacgccgaggatatggaggttaggtggttccggagccagttttctccggcagtgtttgtgtacaaaggaggccgagagcgaacagaggaacaaatggaagaatatcgcggcaggataactttcgtatccaaagatattaaccgcggaagcgtcgcactggtgatccacaacgtgactgcacaagaaaatgggatctacaggtgctacttccaggagggccgctcttatgacgaagccattctgcgtttagtagtcgccggcctgggcagtaaacccctcatcgaaatcaaagcccaagaggatgggtcaatttggcttgagtgcatcagcggtgggtggtacccagaaccattaacggtttggcgcgacccttatggagaggttgttccagccctgaaggaggtgtcaatcgccgatgcagacggactgttcatggtgacgaccgccgtgattatccgtgataaatacgtgcgtaatgtatcctgctccgttaacaatacgctgcttggccaggaaaaagaaactgtgattttcattcccgagagcttcatgccttccgccagcccatggatggtggcactcgcagttatcctgacagcatccccttggatggtcagtatgacagtcattctagccgtcttcatcattttcatggctgtgtcaatctgctgtatcaaaaaactccaacgggagaaaaagatactcagtggcgagaagaaagtggaacaagaagaaaaggaaatcgcacagcagcttcaggaagaactgagatggcgcaggacattcttacacgccgcagatgtggttctggaccccgataccgctcatcccgagcttttcctgtctgaggacagacgcagcgtccgacgaggcccttaccgccagcgggtgccagacaaccctgagcggtttgactcccagccttgtgtgctgggctgggaatctttcgcctccggaaagcactactgggaagtggaagtggagaacgtgatggtctggaccgtgggcgtttgcaggcacagcgtggaaaggaaaggggaggtgctgctgatcccgcagaatggattctggacacttgagatgttcggcaaccagtatcgcgctctctcctccccagagaggatcttgccattgaaagagtcactgtgcagagtcggcgtgtttttggattacgaggcaggggacgtgagcttttacaatatgcgcgaccgaagtcacatttacacttgtccgcgctcagctttcactgtaccagtgaggcctttctttcgtttgggaagcgatgatagtcctatattcatatgtccagccttgacaggcgccagcggagtgatggtgcccgaagagggcctgaaactgcatagagtaggtacgcaccagagtctgtag

SEQ ID NO: 75454 - DNA, 1572 bp, Artificial Sequence
  derived and/or modified sequence
atggagcccgccgccgccctgcacttcagcctgcccgccagcctgctgcttttactccttcttctcttgctgtctttatgcgcactggtcagcgcacaattcaccgtcgtgggacccgcaaaccctattttggcgatggtcggagagaataccactctacgctgtcacttgagcccagagaagaacgctgaagatatggaggtccggtggttcagatcccaattctcgccagccgtttttgtgtataaggggggcagagaaaggaccgaagagcaaatggaagagtacagagggcggatcacttttgtctccaaggacattaacagaggctccgtagcccttgtcatccataacgtcaccgcacaagagaacggcatttatcggtgctattttcaagagggaagaagttatgatgaggctatcctccgattagtcgtggctgggctcggctcaaagcccttgatagaaattaaagcccaagaggacggcagtatttggctggagtgtatttccggcgggtggtacccggagcctctgacagtttggcgcgatccatatggagaagtagtccccgcgctgaaagaggtatcaatagccgacgccgacggactgttcatggtgaccaccgcagttataattcgggataaatacgtgcggaacgtttcttgcagcgtgaataacaccctgctggggcaggaaaaggagaccgttatcttcattcccgagtcattcatgccttcggcctccccatggatggtggccctggccgttattctgaccgcatctccatggatggtcagcatgactgtgattctggccgtgtttattatcttcatggcagtgagcatctgttgcatcaagaagctgcaacgggaaaagaagattcttagtggagagaaaaaggtggagcaggaggagaaagagattgcccagcagttgcaggaagagttgcggtggcgtcgcacttttctgcacgccgcagatgtcgtcctggaccccgacaccgcacaccctgagctgttcctatccgaggaccgaagatcagtgcgacggggtccctataggcagcgcgtacccgataaccccgagagattcgactctcagccctgtgttctgggatgggagtcctttgccagtggcaagcactattgggaggtggaagtcgagaacgtgatggtgtggacagtcggggtatgtcggcattctgttgaacgcaagggggaagtactgctcataccgcagaatggattctggaccctcgagatgtttggcaaccagtatcgggccttgagctctccggagcgcatccttccgttgaaggaaagcctgtgtagggtaggagtcttcctagactatgaggcaggcgacgtctctttctacaatatgagagatagatcccatatctatacatgtccacgatcggctttcactgtgcctgtcaggcctttctttcgcctcgggagtgacgactcccccatcttcatttgtcccgcactgacaggcgctagcggcgttatggttcccgaagagggcctgaaactgcatcgcgtaggcacccaccagtctctgtag

SEQ ID NO: 75455 - DNA, 1572 bp, Artificial Sequence
  derived and/or modified sequence
atggagccagctgccgctctgcatttctcacttccagcgagcctcttgctcctgctcttactgctgttgctctccttgtgtgccctcgtgagcgctcagttcactgtagttggcccagccaaccctatcctggccatggtgggcgagaacaccaccctgcggtgccacctgagccccgaaaaaaatgcggaggacatggaggtgagatggttccgcagtcagttctcacctgcagtcttcgtgtacaagggcggtcgagaaaggaccgaggaacagatggaggaatatagaggtagaattaccttcgtgtcaaaagacatcaatagggggagcgtcgccctcgtgatacataatgtaacagcccaggagaatggcatctacagatgttattttcaggaggggagatcttatgacgaggcaatcctgcgtcttgtcgtcgccggacttggatcaaagcctctcatcgaaataaaggctcaggaggacggatcaatctggcttgaatgtatctcaggagggtggtatccagagccccttaccgtgtggcgggacccctatggagaagtcgtgcccgctctgaaggaggtgagcatcgccgacgccgacggcctgtttatggtcaccacagcagtcattataagggacaagtacgtcaggaacgtgagttgcagcgtcaacaacacactccttggccaggaaaaagagactgtcattttcatccctgaatccttcatgccctcagcgagcccatggatggtagcgctggccgtgatccttaccgcgtctccatggatggtgagtatgacggtgatattagccgtgttcatcatttttatggccgtatctatctgctgcatcaagaaactgcaaagagagaagaagatactgtccggtgaaaaaaaggtagagcaggaggaaaaggagatcgcacagcagctccaggaggagcttcgatggcgacgtacctttctccacgctgctgatgttgttctggatcccgatacagcacatcctgagctcttccttagcgaggatcgcaggtcagtccgtaggggcccttaccggcaacgtgtgccagacaatcccgaacgtttcgactctcaaccctgcgttttgggttgggagtcttttgcctctggaaagcactattgggaggttgaagttgagaacgtgatggtgtggactgtgggcgtatgtcggcacagcgtcgaacgcaaaggggaagtccttttaattccgcaaaatggcttctggaccctggagatgttcggcaatcagtaccgggcactttcttctccagaacggattctgcctctgaaggagtccttatgtcgggtcggggtgtttctcgattacgaggcaggcgatgtgagtttctacaatatgagagatcgaagtcatatctatacgtgcccgcgttctgcttttaccgtgccagtcagaccttttttcaggttgggttccgacgatagtccaatctttatttgtccagcgttgactggcgcttccggagtgatggttccggaggagggccttaagctgcaccgtgtagggacgcaccagagcttatag

SEQ ID NO: 75456 - DNA, 1572 bp, Artificial Sequence
  derived and/or modified sequence
atggagcccgctgccgctctacacttttctctcccagcttccctcctcctcctgctgctactgctgctcttgtcactgtgcgctcttgtttcagcgcagttcaccgtagtgggccctgccaaccctattctggctatggttggggaaaacaccacactgagatgccacctcagcccagaaaaaaatgccgaagatatggaggtgagatggttccggagccagtttagcccggcagtgttcgtttacaaaggcggtcgggaaaggacagaagaacaaatggaggaatatcggggtcgaatcaccttcgtgtccaaggacataaatcggggaagtgtagcattagtgatccataacgttactgctcaggagaacggtatttacaggtgttacttccaggagggcaggagttatgatgaagcaattttgaggcttgtggtcgccggtctgggatccaagcctctcattgagatcaaagcccaagaagacgggagcatctggctcgagtgcatatcaggtggctggtatccagaaccactgacagtctggagagacccttacggggaggttgtcccagccctcaaggaggtgagtatcgctgatgcagacggattatttatggtgactacagcagtaataatccgagataagtatgtgcgcaatgtgagttgctcagttaataacactctgctgggccaggagaaagagaccgtcatcttcatcccggaaagctttatgccatcagcgtctccttggatggtggcactggccgttatccttactgcatcaccgtggatggtgagcatgaccgttatcctcgcggtgtttattatctttatggccgtcagcatatgctgtatcaaaaagctccagagggagaaaaaaattttgagcggagagaaaaaagttgagcaagaggaaaaggaaatagcacagcaactgcaggaggagctccgatggaggaggacattcctccacgcagcggacgtcgtacttgatcccgacaccgcccaccccgaactctttctttccgaggaccgaaggagcgttagacgcggtccatatagacagcgggtgcccgacaacccagagcgttttgactctcagccgtgcgtgttaggatgggagtcattcgcatccggcaaacattattgggaagtggaggtggagaatgtaatggtatggacagttggagtctgccggcactcggtggaaaggaaaggggaggtgctcctgataccccagaacggtttctggacattagaaatgtttggaaaccagtaccgtgctcttagctcacctgaacgcatcctgccactgaaagagtctctgtgcagggtgggggtctttttagattacgaggctggtgatgtgtctttctataatatgagggatcggtctcacatctatacatgcccgagatcagcgttcaccgtgcctgtaaggccattcttcagattgggcagcgatgactctcccatctttatctgccctgccctcaccggcgctagtggggtgatggtgcccgaggagggcctgaaactgcaccgggtagggactcaccagtctctctag

SEQ ID NO: 75457 - DNA, 3590 bp, Artificial Sequence
  derived and/or modified sequence
aaatcttgggactttttggacacccagagaacaggtcccagataccgagtccgcaactccaaacatcgcgattaataggaggcctctggtctctgcctgccctgggtgctcatggaaccagctgctgctctgcacttctccctgccagcctccctcctcctcctcctgctcctcctccttctcagcctgtgtgcactggtctcagcccagtttactgtcgtggggccagctaatcccatcctggccatggtgggagaaaacactacattacgctgccatctgtcacccgagaaaaatgctgaggacatggaggtgcggtggttccggtctcagttctcccccgcagtgtttgtgtataagggtgggagagagagaacagaggagcagatggaggagtaccggggaagaatcacctttgtgagcaaagacatcaacaggggcagcgtggccctggtcatacataacgtcacagcccaggagaatgggatctaccgctgttacttccaagaaggcaggtcctacgatgaggccatcctacgcctcgtggtggcaggccttgggtctaagcccctcattgaaatcaaggcccaagaggatgggagcatctggctggagtgcatatctggagggtggtacccagagcccctcacagtgtggagggacccctacggtgaggttgtgcccgccctgaaggaggtttccatcgctgatgctgacggcctcttcatggtcaccacagctgtgatcatcagagacaagtatgtgaggaatgtgtcctgctctgtcaacaacaccctgctcggccaggagaaggaaactgtcatttttattccagaatcctttatgcccagcgcatctccctggatggtggccctagctgtcatcctgaccgcatctccctggatggtgtccatgactgtcatcctggctgttttcatcatcttcatggctgtcagcatctgttgcatcaagaaacttcaaagggaaaaaaagattctgtcaggggaaaagaaagttgaacaagaggaaaaagaaattgcacagcaacttcaagaagaattgcgatggagaagaacattcttacatgctgctgatgtggtcctggatccagacaccgctcatcccgagctcttcctgtcagaggaccggagaagtgtgaggcggggcccctacaggcagagagtgcctgacaacccagagagattcgacagtcagccttgtgtcctgggatgggagagcttcgcctcagggaaacattactgggaggtggaggtggaaaacgtgatggtgtggactgtgggggtctgcagacacagtgttgagaggaaaggggaggtcctgctgattcctcagaatggcttctggaccctggagatgtttggaaaccaataccgggccctgtcctcccctgagaggattctccctttgaaggagtccctttgccgggtgggcgtcttcctggactatgaagctggagatgtctccttctacaacatgagggacagatcgcacatctacacatgtccccgttcagcctttactgtgcctgtgaggcccttcttcaggttagggtctgatgacagccccatcttcatctgccctgcactcacaggagccagtggggtcatggtgcctgaagagggcctgaaacttcacagagtggggacccaccagagcctatagaatcaattccttggactcacagccatgcagataagccctggccatctcagcagccaccgcacaacccccctaatgaaagacacgccctcctcccctctggtcacgtaagagaacatcttccagctgcctttttcacacccactccagccctctgccccagttttctcctcctcactagtctgtggctttagtagttcctttgcttgtaattatgggatgggatccaggcatagggaactagttgtttcatagctcccagtcaaaaagaaagtgagagaagctgttgggcagcgaacctactgtttaaaatcaggataaccacattaagcccaatatgccagttggcaccagatgctgtggacttggaatgaggccaacagggttcaccaggatgagagaggagagaggaatccacaggaccaccagaagggagagggaaccagatatgcagatcagagatagaggaagtggaaccagagagctgggagggaccaaggttgtaaggatggctaagtcccaccataagagctaaagggtcctgggagatgatggctcatttccacccaaccccaggatttccacagcacacacccacaggcctggacctgggatgaagatgaatgaagaacatggactcatgtggatgtggtttggctcagatgtccctgcaataaacaaggggtcagtacttagtccctgagtgtggttgaggtttgaggtcctggtcgagcagggcagtactggaccaggtctacgtcagcattcaggttcaatggggacaccagtggcttcaaacttcctgatctaattatgtttttagacacttagaagttattgaggactttaaagagcttttgtttatttgggttaatatttatgacatttgacattgaaacaaaaatttaaaatgttatcttttaatttatgttaaaatagcattaataaatcagttataggttaatgtagataggatgttttgtgaaaaagcaatctattgtgtccaaataaaaaaacaaaaagtgtgacactggttaactttttccagatctcatgtctggcttaataagagatatttgtattatcatatctgcctttgtattaaacctattggtatatcataggtcatgttagctcaaaaaaactttactgcacactactgagagaatgagatgaaaaacgattaatgtttcattattattattgtgaaaatattattaacactggggactccttaagagtacatcagagttctctctaggaatcccaaaaccacattttgaaactagaatagtggatcctggaagttaatccatgtgctggttaattttagatgtcaacctgactggattaaggaatacctagacagctggtacaacattatttctgggtgtgtctgtgagtgtgtttccagaagagattggcaagtgagtcagtgggaaattctctccttctgttggctgggtgcccaatacaacaaaaaggcagaggaaaggcaaattcttctctcctctggagctgagacactcttcttcttctgcccttggacatcagaactcctggctctccggcctttgaacttcaggacttgtaccaggaggccctgggttctcaggcctttggctttggactgagagttacacaatcagcttccctggttctgaggctttcagacttaaactgagccatgctaccagcatcccagggtctccagcctacagatgagctgttgtgcgatttcttagcctccataatcacatgagccaatctccttaataaatgcctgctcatagatctgtatctacatctatatctgtatgtgcatctatatctatgcctatatctatatctatatcatattgattttgtctctctggagaaccctgactaataaaatgaggcatctaaaa

SEQ ID NO: 75458 - DNA, 2733 bp, Artificial Sequence
  derived and/or modified sequence
gggatgctttgttgtctggtggtgactgtgcccatgggtgagttgtatcggaaaatcgtcatgtgaggatcagaggggaaaagaaaacagaggttagttctagaaggcctctggtctctgcctgccctgggtgctcatggaaccagctgctgctctgcacttctccctgccagcctccctcctcctcctcctgctcctcctccttctcagcctgtgtgcactggtctcagcccagtttactgtcgtggggccagctaatcccatcctggccatggtgggagaaaacactacattacgctgccatctgtcacccgagaaaaatgctgaggacatggaggtgcggtggttccggtctcagttctcccccgcagtgtttgtgtataagggtgggagagagagaacagaggagcagatggaggagtaccggggaagaatcacctttgtgagcaaagacatcaacaggggcagcgtggccctggtcatacataacgtcacagcccaggagaatgggatctaccgctgttacttccaagaaggcaggtcctacgatgaggccatcctacgcctcgtggtggcaggccttgggtctaagcccctcattgaaatcaaggcccaagaggatgggagcatctggctggagtgcatatctggagggtggtacccagagcccctcacagtgtggagggacccctacggtgaggttgtgcccgccctgaaggaggtttccatcgctgatgctgacggcctcttcatggtcaccacagctgtgatcatcagagacaagtatgtgaggaatgtgtcctgctctgtcaacaacaccctgctcggccaggagaaggaaactgtcatttttattccagaatcctttatgcccagcgcatctccctggatggtggccctagctgtcatcctgaccgcatctccctggatggtgtccatgactgtcatcctggctgttttcatcatcttcatggctgtcagcatctgttgcatcaagaaacttcaaagggaaaaaaagattctgtcaggggaaaagaaagttgaacaagaggaaaaagaaattgcacagcaacttcaagaagaattgcgatggagaagaacattcttacatgctgctgatgtggtcctggatccagacaccgctcatcccgagctcttcctgtcagaggaccggagaagtgtgaggcggggcccctacaggcagagagtgcctgacaacccagagagattcgacagtcagccttgtgtcctgggatgggagagcttcgcctcagggaaacattactgggaggtggaggtggaaaacgtgatggtgtggactgtgggggtctgcagacacagtgttgagaggaaaggggaggtcctgctgattcctcagaatggcttctggaccctggagatgtttggaaaccaataccgggccctgtcctcccctgagaggattctccctttgaaggagtccctttgccgggtgggcgtcttcctggactatgaagctggagatgtctccttctacaacatgagggacagatcgcacatctacacatgtccccgttcagcctttactgtgcctgtgaggcccttcttcaggttagggtctgatgacagccccatcttcatctgccctgcactcacaggagccagtggggtcatggtgcctgaagagggcctgaaacttcacagagtggggacccaccagagcctatagaatcaattccttggactcacagccatgcagataagccctggccatctcagcagccaccgcacaacccccctaatgaaagacacgccctcctcccctctggtcacgtaagagaacatcttccagctgcctttttcacacccactccagccctctgccccagttttctcctcctcactagtctgtggctttagtagttcctttgcttgtaattatgggatgggatccaggcatagggaactagttgtttcatagctcccagtcaaaaagaaagtgagagaagctgttgggcagcgaacctactgtttaaaatcaggataaccacattaagcccaatatgccagttggcaccagatgctgtggacttggaatgaggccaacagggttcaccaggatgagagaggagagaggaatccacaggaccaccagaagggagagggaaccagatatgcagatcagagatagaggaagtggaaccagagagctgggagggaccaaggttgtaaggatggctaagtcccaccataagagctaaagggtcctgggagatgatggctcatttccacccaaccccaggatttccacagcacacacccacaggcctggacctgggatgaagatgaatgaagaacatggactcatgtggatgtggtttggctcagatgtccctgcaataaacaaggggtcagtacttagtccctgagtgtggttgaggtttgaggtcctggtcgagcagggcagtactggaccaggtctacgtcagcattcaggttcaatggggacaccagtggcttcaaacttcctgatctaattatgtttttagacacttagaagttattgaggactttaaagagcttttgtttatttgggttaatatttatgacatttgacattgaaacaaaaatttaaaatgttatcttttaatttatgttaaaatagcattaataaatcagttataggttaatgtagataggatgttttgtgaaaaagcaatctattgtgtccaaataaaaaaacaaaaagtgtga

SEQ ID NO: 75459 - DNA, 1572 bp, Artificial Sequence
  derived and/or modified sequence
atggagcccgccgccgccctgcacttcagcctgcccgccagcctgctgctgctgctgctgctgctgctgctgagcctgtgcgccctggtgagcgcccagttcaccgtggtgggccccgccaaccccatcctggccatggtgggcgagaacaccaccctgagatgccacctgagccccgagaagaacgccgaggacatggaggtgagatggttcagaagccagttcagccccgccgtgttcgtgtacaagggcggcagagagagaaccgaggagcagatggaggagtacagaggcagaatcaccttcgtgagcaaggacatcaacagaggcagcgtggccctggtgatccacaacgtgaccgcccaggagaacggcatctacagatgctacttccaggagggcagaagctacgacgaggccatcctgagactggtggtggccggcctgggcagcaagcccctgatcgagatcaaggcccaggaggacggcagcatctggctggagtgcatcagcggcggctggtaccccgagcccctgaccgtgtggagagacccctacggcgaggtggtgcccgccctgaaggaggtgagcatcgccgacgccgacggcctgttcatggtgaccaccgccgtgatcatcagagacaagtacgtgagaaacgtgagctgcagcgtgaacaacaccctgctgggccaggagaaggagaccgtgatcttcatccccgagagcttcatgcccagcgccagcccctggatggtggccctggccgtgatcctgaccgccagcccctggatggtgagcatgaccgtgatcctggccgtgttcatcatcttcatggccgtgagcatctgctgcatcaagaagctgcagagagagaagaagatcctgagcggcgagaagaaggtggagcaggaggagaaggagatcgcccagcagctgcaggaggagctgagatggagaagaaccttcctgcacgccgccgacgtggtgctggaccccgacaccgcccaccccgagctgttcctgagcgaggacagaagaagcgtgagaagaggcccctacagacagagagtgcccgacaaccccgagagattcgacagccagccctgcgtgctgggctgggagagcttcgccagcggcaagcactactgggaggtggaggtggagaacgtgatggtgtggaccgtgggcgtgtgcagacacagcgtggagagaaagggcgaggtgctgctgatcccccagaacggcttctggaccctggagatgttcggcaaccagtacagagccctgagcagccccgagagaatcctgcccctgaaggagagcctgtgcagagtgggcgtgttcctggactacgaggccggcgacgtgagcttctacaacatgagagacagaagccacatctacacctgccccagaagcgccttcaccgtgcccgtgagacccttcttcagactgggcagcgacgacagccccatcttcatctgccccgccctgaccggcgccagcggcgtgatggtgcccgaggagggcctgaagctgcacagagtgggcacccaccagagcctgtag

SEQ ID NO: 75460 - protein, 336 aa, Artificial Sequence
  derived and/or modified sequence
MEPAAALHFSLPASLLLLLLLLLLSLCALVSAQFTVVGPANPILAMVGENTTLRCHLSPEKNAEDMEVRWFRSQFSPAVFVYKGGRERTEEQMEEYRGRITFVSKDINRGSVALVIHNVTAQENGIYRCYFQEGRSYDEAILRLVVAGLGSKPLIEIKAQEDGSIWLECISGGWYPEPLTVWRDPYGEVVPALKEVSIADADGLFMVTTAVIIRDKYVRNVSCSVNNTLLGQEKETVIFIPESFMPSASPWMVALAVILTASPWMVSMTVILAVFIIFMAVSICCIKKLQREKKILSGEKKVEQEEKEIAQQLQEELRWRRTFLHADVNLTGLRNT

SEQ ID NO: 75461 - protein, 239 aa, Artificial Sequence
  derived and/or modified sequence
MEPAAALHFSLPASLLLLLLLLLLSLCALVSAQFTVVGPANPILAMVGENTTLRCHLSPEKNAEDMEVRWFRSQFSPAVFVYKGGRERTEEQMEEYRGRITFVSKDINRGSVALVIHNVTAQENGIYRCYFQEGRSYDEAILRLVVAGLGSKPLIEIKAQEDGSIWLECISGGWYPEPLTVWRDPYGEVVPALKEVSIADADGLFMVTTAVIIRDKYVRNVSCSVNNTLLGQEKETVIF

SEQ ID NO: 75462 - protein, 96 aa, Artificial Sequence
  derived and/or modified sequence
MEPAAALHFSLPASLLLLLLLLLLSLCALVSAQFTVVGPANPILAMVGENTTLRCHLSPEKNAEDMEVRWFRSQFSPAVFVYKGGRERTEEQMEEY

SEQ ID NO: 75463 - DNA, 1011 bp, Artificial Sequence
  derived and/or modified sequence
atggaacctgcggccgcgctgcactttagtcttcctgcgtccttgctgctgctgctgctgctcctcctcttgtctttgtgcgcactcgtgtcggcccagtttacggtagtggggcccgcgaacccaattctagctatggtgggagaaaacacaaccttgcgttgtcatttaagccctgaaaaaaacgcagaggatatggaagtgcgctggtttcggagtcagttttccccagccgtatttgtctacaagggggggcgggagaggaccgaggagcagatggaagaatatagagggcgcatcacgttcgtgtctaaggacatcaataggggtagtgttgccctggtgatccataacgtgacagcacaggaaaatggcatctaccgatgctatttccaagaaggtagaagctatgatgaggccattttgcgcttggttgtcgctggcctcgggagcaaaccactgattgagatcaaggctcaggaggatggcagcatttggctggagtgtatatccgggggatggtacccagagccactgaccgtctggagagacccttatggggaagtggtgccagcacttaaagaagtgtctatcgctgacgcagatggcttgttcatggtgacaacagctgtgatcatccgggacaaatatgttagaaacgtgtcatgttcagtcaataacacactgctgggccaggagaaggaaaccgttattttcattcccgagtcctttatgccatctgcaagcccctggatggttgccctggcagtgattttgaccgcgtccccctggatggtctccatgacagttattctggccgtttttattattttcatggctgtgtccatctgctgcattaagaagctgcagcgagaaaagaaaattctgtccggcgagaagaaagtggaacaagaggagaaggaaatcgcccaacagttacaggaagagttacggtggcggaggaccttcctgcatgccgatgttaacctcaccggcctgcgcaacacctag

SEQ ID NO: 75464 - DNA, 333 bp, Artificial Sequence
  derived and/or modified sequence
atggagcctgcggcagccctgcatttctccctgccagcatctctcctcctcctcctcctgctcctgctcctgtctttgtgcgccctggtgtccggtctgggctctaagccactgatagagatcaaggcccaggaagatggttcaatctggctggaatgcattagtggtggatggtaccctgaaccgctgaccgtttggagagacccttacggagaagttgtacctgctctcaaggaagttagcatagcagatgcagatgggcttttcatggttactactgctgtgatcatacgggataagtatgtccgcaatgtgagctgctcagtaaactag

SEQ ID NO: 75465 - DNA, 555 bp, Artificial Sequence
  derived and/or modified sequence
atggaacccgccgccgcactacattttagcctccccgctagtctgctgctgctcctacttttgctgctgctctccctgtgtgcactggtttcagggctgggctctaaacctctcatcgagattaaagctcaggaggatggctctatctggttggaatgtatttccggtggatggtaccccgaacctctcactgtgtggagggacccctacggagaagtagtgccagctcttaaggaagttagtatcgctgacgcagatggccttttcatggtgacaactgctgtgatcattagagacaagtacgtacggaacgtttcttgtagcgtgaataataccttacttggacaggagaaagagactgttatttttatccctgagtcattcatgccttctgcttctccttggatggtcgccctcgctgttatcttgacggccagcccctggatggtttctatgacagttatactcgcagtgttcattatatttatggcggtgagcatttgttgtatcaaaaagcttcaacgggaaaaaaaaattctgtctggggagaagtag

SEQ ID NO: 75466 - DNA, 720 bp, Artificial Sequence
  derived and/or modified sequence
atggaacccgccgccgcactccatttttccctgcccgccagcctccttcttttgcttctcctgttgctgctcagtctttgcgccttagtgtcagcccaatttactgtcgtgggtcctgccaatccgatcctcgctatggttggtgagaatactactctccggtgccacttaagccctgagaagaatgcagaggatatggaggttaggtggtttcgctctcaattcagccccgcggtgtttgtgtataagggcggcagagagagaacagaggaacagatggaagaatatagaggccgaattacatttgttagcaaggacatcaaccgggggagcgtggccctggtaatccataatgtcaccgcccaggaaaacgggatttaccggtgctacttccaggagggaaggagttacgatgaagccattctccgactagtagttgcaggactaggttcgaagcccctaatcgaaatcaaggctcaggaggacggatcgatctggctggaatgcatttcgggtggctggtatcccgagcccttaacagtgtggcgcgatccatatggggaagttgttcccgcgttgaaagaagtgtcaattgctgacgccgatggcctcttcatggtgactacagcggtcatcattcgagataagtatgtaaggaacgttagttgcagcgtgaataatacgctgctaggacaggaaaaagagaccgtgatcttttag

SEQ ID NO: 75467 - DNA, 1011 bp, Artificial Sequence
  derived and/or modified sequence
atggagcctgctgctgccctgcacttcagcctgcctgccagcctgctgctgctgctgctgctgctgctgctgagcctgtgtgccctggtgtctgcccagttcaccgtggtgggccctgccaaccccatcctggccatggtgggggagaacaccaccctgcgctgccacctgagccctgagaagaatgctgaggacatggaggtgcgctggttccgcagccagttctccccagctgtgtttgtgtacaagggcggccgggagaggacagaggagcagatggaggagtaccggggccgcatcacctttgtgtccaaggacatcaacagaggctctgtggccctggtgatccacaacgtgacagcccaggagaatggcatctaccgctgctacttccaggagggccgctcctatgatgaggccatcctgcggctggtggtggccggcctgggcagcaagcccctgattgagatcaaggcccaggaggatggcagcatctggctggagtgcatcagcggcggctggtacccagagcccctgactgtgtggagggacccctacggggaggtggtgcctgccctgaaggaggtgtccattgctgatgctgatggcctcttcatggtgaccacagctgtgatcatccgggacaagtatgtgagaaatgtgtcctgcagcgtgaacaacaccctgctgggccaggagaaggagaccgtcatcttcatccctgagagcttcatgcccagcgccagcccctggatggtggccctggccgtcatcctgacagccagcccctggatggtgtccatgaccgtcatcctggccgtgttcatcatcttcatggctgtgtccatctgctgcatcaagaagctgcagcgggagaagaagatcctgtctggagagaagaaggtggagcaggaggagaaggagatcgcccagcagctgcaggaggagctgcgctggaggaggaccttcctgcacgcagatgtgaacctgaccggcctgaggaacacctag

SEQ ID NO: 75468 - DNA, 333 bp, Artificial Sequence
  derived and/or modified sequence
atggagcctgctgctgccctgcacttcagcctgcctgccagcctgctgctgctgctgctgctgctgctgctgagcctgtgtgccctggtgtctggcctgggcagcaagcccctgattgagatcaaggcccaggaggatggcagcatctggctggagtgcatcagcggcggctggtacccagagcccctgactgtgtggagggacccctacggggaggtggtgcctgccctgaaggaggtgtccattgctgatgctgatggcctcttcatggtgaccacagctgtgatcatccgggacaagtatgtgagaaatgtgtcctgcagcgtgaactag

SEQ ID NO: 75469 - DNA, 555 bp, Artificial Sequence
  derived and/or modified sequence
atggagcctgctgctgccctgcacttcagcctgcctgccagcctgctgctgctgctgctgctgctgctgctgagcctgtgtgccctggtgtctggcctgggcagcaagcccctgattgagatcaaggcccaggaggatggcagcatctggctggagtgcatcagcggcggctggtacccagagcccctgactgtgtggagggacccctacggggaggtggtgcctgccctgaaggaggtgtccattgctgatgctgatggcctcttcatggtgaccacagctgtgatcatccgggacaagtatgtgagaaatgtgtcctgcagcgtgaacaacaccctgctgggccaggagaaggagaccgtcatcttcatccctgagagcttcatgcccagcgccagcccctggatggtggccctggccgtcatcctgacagccagcccctggatggtgtccatgaccgtcatcctggccgtgttcatcatcttcatggctgtgtccatctgctgcatcaagaagctgcagcgggagaagaagatcctgtctggagagaagtag

SEQ ID NO: 75470 - DNA, 720 bp, Artificial Sequence
  derived and/or modified sequence
atggagcctgctgctgccctgcacttcagcctgcctgccagcctgctgctgctgctgctgctgctgctgctgagcctgtgtgccctggtgtctgcccagttcaccgtggtgggccctgccaaccccatcctggccatggtgggggagaacaccaccctgcgctgccacctgagccctgagaagaatgctgaggacatggaggtgcgctggttccgcagccagttctccccagctgtgtttgtgtacaagggcggccgggagaggacagaggagcagatggaggagtaccggggccgcatcacctttgtgtccaaggacatcaacagaggctctgtggccctggtgatccacaacgtgacagcccaggagaatggcatctaccgctgctacttccaggagggccgctcctatgatgaggccatcctgcggctggtggtggccggcctgggcagcaagcccctgattgagatcaaggcccaggaggatggcagcatctggctggagtgcatcagcggcggctggtacccagagcccctgactgtgtggagggacccctacggggaggtggtgcctgccctgaaggaggtgtccattgctgatgctgatggcctcttcatggtgaccacagctgtgatcatccgggacaagtatgtgagaaatgtgtcctgcagcgtgaacaacaccctgctgggccaggagaaggagaccgtcatcttctag

SEQ ID NO: 75471 - DNA, 1011 bp, Artificial Sequence
  derived and/or modified sequence
atggagcccgccgccgccctgcacttcagcctgcccgccagcctgctgttgctattgcttctgctcctcctgagtctgtgcgcattggttagtgcccaattcacagtggttggacctgctaatcctatcttggccatggtcggtgagaacactaccttgagatgccaccttagtccagagaagaacgctgaggatatggaagtccgctggtttcggtctcagttctcacccgctgtctttgtatataaaggcggaagggaacgtacagaagagcaaatggaggagtatagggggcgcatcacttttgtgtcaaaggatattaaccgcggatctgtggcccttgtaattcataacgtgactgctcaggagaatggaatataccgctgctactttcaggaaggacgcagctatgacgaagcaattcttagattggtcgtggccggactgggatccaagccccttatcgagatcaaagcacaggaggatggcagcatctggcttgagtgtatttcagggggctggtatccggagcctctgactgtgtggcgggatccctatggcgaggttgtgccagcattgaaagaggtatcaatcgccgacgccgacggtctgttcatggtaactactgcagtgattattcgggacaaatacgtcaggaatgtttcatgctctgtcaataacacgctactcgggcaagaaaaggagacagtgatcttcattccagagagcttcatgccaagtgccagcccttggatggtcgcattagccgtgattctgaccgcttcaccatggatggttagtatgacggtcatcctggccgtgttcattatcttcatggctgtcagcatctgctgcattaagaaactacagagagagaaaaaaattctgagcggtgagaagaaggtcgagcaggaggaaaaggagatcgcacagcaactgcaggaggaattacggtggaggcgaactttcttgcatgccgatgttaacctcacagggctgagaaacacatag

SEQ ID NO: 75472 - DNA, 333 bp, Artificial Sequence
  derived and/or modified sequence
atggagcccgccgccgccctgcacttcagcctgcccgccagcctgctactcctgctactgctgctcctactgtccctgtgtgctttagtgtccggtctcggcagtaaacccctgatagaaattaaagcccaggaagacggctccatttggctggagtgtatatcaggaggctggtaccctgaaccactgacagtgtggagggacccatatggggaagttgtcccggcactgaaggaggtaagcatcgcggacgcagatggcctgtttatggtgacaaccgctgtgatcattagggataagtacgtgcgcaacgtcagctgcagcgtcaactag

SEQ ID NO: 75473 - DNA, 555 bp, Artificial Sequence
  derived and/or modified sequence
atggagcccgccgccgccctgcacttcagcctgcccgccagcctgctgctacttctgctcctcctactgctgtccctctgcgccctcgtgagtggccttggctccaagccgttaattgagataaaggctcaggaagatggctccatctggctcgaatgtatctctggtggctggtatcctgagcctctgaccgtctggagagatccctacggggaagttgtccctgcactcaaggaagtcagcatcgcagacgctgatgggctgttcatggtcactacggctgtcattattcgggacaaatatgtgcgaaacgtgtcttgttcggtgaacaacactttgctcgggcaggagaaggagaccgtcatcttcattcctgaatcttttatgccaagcgctagtccgtggatggtggccttggccgttatcctcaccgccagcccttggatggtgagcatgactgtgattcttgccgtgttcatcatctttatggccgtgtcaatatgttgcattaaaaagttgcagcgcgaaaaaaaaattttatccggcgagaagtag

SEQ ID NO: 75474 - DNA, 720 bp, Artificial Sequence
  derived and/or modified sequence
atggagcccgccgccgccctgcacttcagcctgcccgccagcctgcttctgctgctgctgttgctcttgctcagcctgtgcgcgctcgtaagtgcccagtttactgtggtagggcctgccaatccaattttggcaatggtgggcgagaacacaacattgcgctgccacctgtcccctgagaagaatgcggaagatatggaggtacggtggtttagatcccagttttctccagccgtgtttgtgtacaagggcggcagagaacggaccgaagaacagatggaagagtatcgcgggcggattacctttgtgagtaaggacatcaatagaggttctgtcgcactagtcattcacaatgtgactgcacaagaaaatggcatctatcgctgttacttccaagagggccgaagctatgacgaagccatcttgcgccttgtggtcgccggcctgggatctaagcccctgattgagataaaagcccaggaagacggttctatttggctggaatgtatttcaggcggatggtacccggaaccacttaccgtttggcgagacccgtacggcgaagtggtgccagccttgaaggaggtcagcatcgccgatgccgatgggctgtttatggtgactacagcagtcatcattcgggataaatatgtgcgaaacgtgagctgctccgtgaataataccctcctcggtcaggagaaggagaccgtgattttttag

SEQ ID NO: 75475 - DNA, 1011 bp, Artificial Sequence
  derived and/or modified sequence
atggagcccgctgcagccctccatttcagtctcccagcatccttgctgctccttctcctgctgctgctgctttctctttgtgcactggtatccgcacaattcaccgtcgttggacccgcaaatccgattctggctatggtgggtgagaacacgaccctgagatgtcacttgagcccagaaaagaacgccgaggacatggaagtacgctggttccgctcacagttcagtccagccgtgttcgtttataaggggggaagagagaggacggaagagcagatggaagagtatcgaggtaggattactttcgtttctaaggacattaaccgcggaagtgttgccctcgtcattcataatgtcacagctcaggagaatgggatttacaggtgctattttcaggagggtagatcctatgatgaggctattctgagattggtggttgcaggactaggcagcaaacctttgatagagatcaaggctcaggaggacggctcgatttggctcgaatgcatctctggtgggtggtacccagaaccacttacggtatggcgcgacccatatggtgaggtcgtaccagctctgaaggaggtgtctatcgcagatgcagacggacttttcatggtgaccacagctgttatcatacgtgataaatatgtgcgaaatgtctcctgcagcgtgaacaacactctgctgggccaggagaaagagacagtgatctttataccggagtctttcatgccgtctgcatccccgtggatggtggcattagcggtgattctcactgcctcaccttggatggtgtctatgacagtaatcctcgccgtgttcatcatcttcatggccgtatctatctgctgtattaagaaacttcaaagggagaaaaaaattctgtccggcgagaagaaggtggagcaggaagaaaaggaaatcgctcagcaactccaagaggaactccggtggaggcggaccttcctgcacgctgatgttaatctgaccggcctgcgcaacacctag

SEQ ID NO: 75476 - DNA, 333 bp, Artificial Sequence
  derived and/or modified sequence
atggagcctgcagcggcactgcacttctcgctcccagcctcactgctgctgctgctgcttttgctgttgctctccctgtgtgctctggtctcaggccttgggtccaagcccctcatcgagattaaggcgcaggaagatggcagtatctggctggagtgcatatccgggggatggtaccccgagcctctgacagtttggcgcgacccttatggggaggtcgtgcccgctctgaaggaggtgtctatcgccgatgctgacgggctgttcatggttactaccgcagtgattataagagataagtacgttcgaaatgtctcttgcagcgttaattag

SEQ ID NO: 75477 - DNA, 555 bp, Artificial Sequence
  derived and/or modified sequence
atggagccagccgctgccctgcatttttccctgccggcttccctcctgctacttctgttgctcttactgctgtcactctgtgccctcgtttcgggtctaggctcaaagcctctgattgaaattaaagcccaggaggatgggtccatctggctcgaatgtatctctggaggctggtaccccgagccactgacagtctggcgtgacccatacggagaagtggtgccggcattaaaagaggttagtatagcggatgccgacggactgtttatggtgaccacggccgtgatcatcagagacaaatatgtgaggaacgtgagctgttcagtaaataacacactcttagggcaggagaaagagacggtcatttttatcccagaaagctttatgcccagtgcctctccctggatggtggccctggccgttatccttacggcgagcccctggatggtgtcaatgaccgtgatccttgcagtatttatcatattcatggcggtgagcatctgttgtatcaagaaactgcagagggaaaaaaagatactgagtggagagaaatag

SEQ ID NO: 75478 - DNA, 720 bp, Artificial Sequence
  derived and/or modified sequence
atggagcccgcagctgcattgcactttagccttcctgcaagccttctcctccttttgcttcttctactcttgtccctgtgcgccctggtaagcgctcaatttaccgtcgtaggcccagctaacccaatactcgcgatggtcggcgaaaacaccacactgaggtgccacctgtccccagagaaaaatgcggaagacatggaagttaggtggtttcggagccaattctctcccgcagtctttgtctacaagggaggaagggagcgtacagaagaacaaatggaagagtacaggggaaggatcacctttgtatccaaggacatcaaccggggtagcgttgccctcgtgatccacaatgtcaccgctcaggagaatggcatttacagatgttattttcaggaaggcagaagctatgatgaagctatcctccgcctcgtggtggccggactgggatccaagccactaattgagatcaaggcccaggaggatggctccatttggctcgagtgtatctccggcggttggtatccagaacctctgacggtctggcgtgacccatacggcgaagttgtgcccgcattgaaagaagtatcaatcgccgacgccgacggccttttcatggtaaccaccgccgtaataattcgcgataagtacgttcgcaatgttagttgttctgtgaataataccctgctgggacaggaaaaggagaccgttattttttag

SEQ ID NO: 75479 - DNA, 1790 bp, Artificial Sequence
  derived and/or modified sequence
agtggaaatcttgggactttttggacacccagagaacaggtcccagataccgagtccgcaactccaaacatcgcgattaataggaggtgaacacagcttttctcttctctttgggatgctttgttgtctggtggtgactgtgcccatgggtgagttgtatcggaaaatcgtcatgtgaggatcagaggggaaaagaaaacagaggcctctggtctctgcctgccctgggtgctcatggaaccagctgctgctctgcacttctccctgccagcctccctcctcctcctcctgctcctcctccttctcagcctgtgtgcactggtctcagcccagtttactgtcgtggggccagctaatcccatcctggccatggtgggagaaaacactacattacgctgccatctgtcacccgagaaaaatgctgaggacatggaggtgcggtggttccggtctcagttctcccccgcagtgtttgtgtataagggtgggagagagagaacagaggagcagatggaggagtaccggggaagaatcacctttgtgagcaaagacatcaacaggggcagcgtggccctggtcatacataacgtcacagcccaggagaatgggatctaccgctgttacttccaagaaggcaggtcctacgatgaggccatcctacgcctcgtggtggcaggccttgggtctaagcccctcattgaaatcaaggcccaagaggatgggagcatctggctggagtgcatatctggagggtggtacccagagcccctcacagtgtggagggacccctacggtgaggttgtgcccgccctgaaggaggtttccatcgctgatgctgacggcctcttcatggtcaccacagctgtgatcatcagagacaagtatgtgaggaatgtgtcctgctctgtcaacaacaccctgctcggccaggagaaggaaactgtcatttttattccagaatcctttatgcccagcgcatctccctggatggtggccctagctgtcatcctgaccgcatctccctggatggtgtccatgactgtcatcctggctgttttcatcatcttcatggctgtcagcatctgttgcatcaagaaacttcaaagggaaaaaaagattctgtcaggggaaaagaaagttgaacaagaggaaaaagaaattgcacagcaacttcaagaagaattgcgatggagaagaacattcttacatgctgatgtcaacctgactggattaaggaatacctagacagctggtacaacattatttctgggtgtgtctgtgagtgtgtttccagaagagattggcaagtgagtcagtgggaaattctctccttctgttggctgggtgcccaatacaacaaaaaggcagaggaaaggcaaattcttctctcctctggagctgagacactcttcttcttctgcccttggacatcagaactcctggctctccggcctttgaacttcaggacttgtaccaggaggccctgggttctcaggcctttggctttggactgagagttacacaatcagcttccctggttctgaggctttcagacttaaactgagccatgctaccagcatcccagggtctccagcctacagatgagctgttgtgcgatttcttagcctccataatcacatgagccaatctccttaataaatgcctgctcatagatctgtatctacatctatatctgtatgtgcatctatatctatgcctatatctatatctatatcatattgattttgtctctctggagaaccctgactaataaaatgaggcatctaaaa

SEQ ID NO: 75480 - DNA, 535 bp, Artificial Sequence
  derived and/or modified sequence
agagaacaggtcccagataccgagtccgcaactccaaacatcgcgattaataggaggtgaacacagcttttctcttctctttgggatgctttgttgtctggtggtgactgtgcccatgggtgagttgtatcggaaaatcgtcatgtgaggatcagaggggaaaagaaaacagaggcctctggtctctgcctgccctgggtgctcatggaaccagctgctgctctgcacttctccctgccagcctccctcctcctcctcctgctcctcctccttctcagcctgtgtgcactggtctcaggccttgggtctaagcccctcattgaaatcaaggcccaagaggatgggagcatctggctggagtgcatatctggagggtggtacccagagcccctcacagtgtggagggacccctacggtgaggttgtgcccgccctgaaggaggtttccatcgctgatgctgacggcctcttcatggtcaccacagctgtgatcatcagagacaagtatgtgaggaatgtgtcctgctctgtcaaca

SEQ ID NO: 75481 - DNA, 942 bp, Artificial Sequence
  derived and/or modified sequence
ctggtggggaggcgcagcctcgcctggctttacctcgagtgtcccgacctgggtctcggggagggggaagtggagggacgagggtgtgaaagaatccagggacaactgaagaaaccggactgtggcccgagaagtgggaagaggaaggaggaaaacggcccccttgatctctgcattgatggcttacttatggaatgtttacggaatccctctttcggagatacctgagccttgagatgcaagcgactcccagaagttggggcaccgatgagacctacttgagtgacaggagaggttgggcccgaccagcactgaggtgccaagactcctaggctgattctcctcctctgtaaccctaggcctctggtctctgcctgccctgggtgctcatggaaccagctgctgctctgcacttctccctgccagcctccctcctcctcctcctgctcctcctccttctcagcctgtgtgcactggtctcaggccttgggtctaagcccctcattgaaatcaaggcccaagaggatgggagcatctggctggagtgcatatctggagggtggtacccagagcccctcacagtgtggagggacccctacggtgaggttgtgcccgccctgaaggaggtttccatcgctgatgctgacggcctcttcatggtcaccacagctgtgatcatcagagacaagtatgtgaggaatgtgtcctgctctgtcaacaacaccctgctcggccaggagaaggaaactgtcatttttattccagaatcctttatgcccagcgcatctccctggatggtggccctagctgtcatcctgaccgcatctccctggatggtgtccatgactgtcatcctggctgttttcatcatcttcatggctgtcagcatctgttgcatcaagaaacttcaaagggaaaaaaagattctgtcaggggaaaaga

SEQ ID NO: 75482 - DNA, 881 bp, Artificial Sequence
  derived and/or modified sequence
tttttggacacccagagaacaggtcccagataccgagtccgcaactccaaacatcgcgattaataggaggtgaacacagcttttctcttctctttgggatgctttgttgtctggtggtgactgtgcccatgggcctctggtctctgcctgccctgggtgctcatggaaccagctgctgctctgcacttctccctgccagcctccctcctcctcctcctgctcctcctccttctcagcctgtgtgcactggtctcagcccagtttactgtcgtggggccagctaatcccatcctggccatggtgggagaaaacactacattacgctgccatctgtcacccgagaaaaatgctgaggacatggaggtgcggtggttccggtctcagttctcccccgcagtgtttgtgtataagggtgggagagagagaacagaggagcagatggaggagtaccggggaagaatcacctttgtgagcaaagacatcaacaggggcagcgtggccctggtcatacataacgtcacagcccaggagaatgggatctaccgctgttacttccaagaaggcaggtcctacgatgaggccatcctacgcctcgtggtggcaggccttgggtctaagcccctcattgaaatcaaggcccaagaggatgggagcatctggctggagtgcatatctggagggtggtacccagagcccctcacagtgtggagggacccctacggtgaggttgtgcccgccctgaaggaggtttccatcgctgatgctgacggcctcttcatggtcaccacagctgtgatcatcagagacaagtatgtgaggaatgtgtcctgctctgtcaacaacaccctgctcggccaggagaaggaaactgtcatttttat

SEQ ID NO: 75483 - DNA, 1011 bp, Artificial Sequence
  derived and/or modified sequence
atggagcccgccgccgccctgcacttcagcctgcccgccagcctgctgctgctgctgctgctgctgctgctgagcctgtgcgccctggtgagcgcccagttcaccgtggtgggccccgccaaccccatcctggccatggtgggcgagaacaccaccctgagatgccacctgagccccgagaagaacgccgaggacatggaggtgagatggttcagaagccagttcagccccgccgtgttcgtgtacaagggcggcagagagagaaccgaggagcagatggaggagtacagaggcagaatcaccttcgtgagcaaggacatcaacagaggcagcgtggccctggtgatccacaacgtgaccgcccaggagaacggcatctacagatgctacttccaggagggcagaagctacgacgaggccatcctgagactggtggtggccggcctgggcagcaagcccctgatcgagatcaaggcccaggaggacggcagcatctggctggagtgcatcagcggcggctggtaccccgagcccctgaccgtgtggagagacccctacggcgaggtggtgcccgccctgaaggaggtgagcatcgccgacgccgacggcctgttcatggtgaccaccgccgtgatcatcagagacaagtacgtgagaaacgtgagctgcagcgtgaacaacaccctgctgggccaggagaaggagaccgtgatcttcatccccgagagcttcatgcccagcgccagcccctggatggtggccctggccgtgatcctgaccgccagcccctggatggtgagcatgaccgtgatcctggccgtgttcatcatcttcatggccgtgagcatctgctgcatcaagaagctgcagagagagaagaagatcctgagcggcgagaagaaggtggagcaggaggagaaggagatcgcccagcagctgcaggaggagctgagatggagaagaaccttcctgcacgccgacgtgaacctgaccggcctgagaaacacctag

SEQ ID NO: 75484 - DNA, 333 bp, Artificial Sequence
  derived and/or modified sequence
atggagcccgccgccgccctgcacttcagcctgcccgccagcctgctgctgctgctgctgctgctgctgctgagcctgtgcgccctggtgagcggcctgggcagcaagcccctgatcgagatcaaggcccaggaggacggcagcatctggctggagtgcatcagcggcggctggtaccccgagcccctgaccgtgtggagagacccctacggcgaggtggtgcccgccctgaaggaggtgagcatcgccgacgccgacggcctgttcatggtgaccaccgccgtgatcatcagagacaagtacgtgagaaacgtgagctgcagcgtgaactag

SEQ ID NO: 75485 - DNA, 555 bp, Artificial Sequence
  derived and/or modified sequence
atggagcccgccgccgccctgcacttcagcctgcccgccagcctgctgctgctgctgctgctgctgctgctgagcctgtgcgccctggtgagcggcctgggcagcaagcccctgatcgagatcaaggcccaggaggacggcagcatctggctggagtgcatcagcggcggctggtaccccgagcccctgaccgtgtggagagacccctacggcgaggtggtgcccgccctgaaggaggtgagcatcgccgacgccgacggcctgttcatggtgaccaccgccgtgatcatcagagacaagtacgtgagaaacgtgagctgcagcgtgaacaacaccctgctgggccaggagaaggagaccgtgatcttcatccccgagagcttcatgcccagcgccagcccctggatggtggccctggccgtgatcctgaccgccagcccctggatggtgagcatgaccgtgatcctggccgtgttcatcatcttcatggccgtgagcatctgctgcatcaagaagctgcagagagagaagaagatcctgagcggcgagaagtag

SEQ ID NO: 75486 - DNA, 720 bp, Artificial Sequence
  derived and/or modified sequence
atggagcccgccgccgccctgcacttcagcctgcccgccagcctgctgctgctgctgctgctgctgctgctgagcctgtgcgccctggtgagcgcccagttcaccgtggtgggccccgccaaccccatcctggccatggtgggcgagaacaccaccctgagatgccacctgagccccgagaagaacgccgaggacatggaggtgagatggttcagaagccagttcagccccgccgtgttcgtgtacaagggcggcagagagagaaccgaggagcagatggaggagtacagaggcagaatcaccttcgtgagcaaggacatcaacagaggcagcgtggccctggtgatccacaacgtgaccgcccaggagaacggcatctacagatgctacttccaggagggcagaagctacgacgaggccatcctgagactggtggtggccggcctgggcagcaagcccctgatcgagatcaaggcccaggaggacggcagcatctggctggagtgcatcagcggcggctggtaccccgagcccctgaccgtgtggagagacccctacggcgaggtggtgcccgccctgaaggaggtgagcatcgccgacgccgacggcctgttcatggtgaccaccgccgtgatcatcagagacaagtacgtgagaaacgtgagctgcagcgtgaacaacaccctgctgggccaggagaaggagaccgtgatcttctag

SEQ ID NO: 75487 - protein, 313 aa, Artificial Sequence
  derived and/or modified sequence
MEPAAALHFSLPASLLLLLLLLLLSLCALVSESFMPSASPWMVALAVILTASPWMVSMTVILAVFIIFMAVSICCIKKLQREKKILSGEKKVEQEEKEIAQQLQEELRWRRTFLHAADVVLDPDTAHPELFLSEDRRSVRRGPYRQRVPDNPERFDSQPCVLGWESFASGKHYWEVEVENVMVWTVGVCRHSVERKGEVLLIPQNGFWTLEMFGNQYRALSSPERILPLKESLCRVGVFLDYEAGDVSFYNMRDRSHIYTCPRSAFTVPVRPFFRLGSDDSPIFICPALTGASGVMVPEEGLKLHRVGTHQSL

SEQ ID NO: 75488 - DNA, 942 bp, Artificial Sequence
  derived and/or modified sequence
atggagcccgctgcggctttgcacttctctctgcctgcgtcccttctactgctgctcctcctcctccttttgagcctctgtgctctggtaagcgagtccttcatgcccagcgccagcccatggatggtcgcactcgctgtgattctcacagccagtccttggatggtatcaatgacagtgatactggccgtgttcataattttcatggccgtttctatctgctgtataaagaagcttcaacgggaaaaaaagatcctctccggcgagaagaaggtggagcaggaggaaaaggagatcgcccagcaactccaagaggaactgcgttggcgaagaacttttctccatgccgccgatgtggtcctggaccctgatacggcacacccggagctctttttaagtgaagaccgacgctcggtgagacgaggaccctacaggcagcgcgtacctgataaccctgagcgattcgactctcagccttgcgttctagggtgggagtctttcgcttccggtaagcactactgggaagtggaggtggaaaacgtcatggtgtggaccgtgggagtgtgcagacactccgtggaaaggaaaggggaggtcctgctgattccacaaaatggattttggaccctggaaatgttcggcaaccagtacagagccctgtcttccccggaaagaatcctgcccttgaaggagagtctgtgtagagtcggcgtgtttctcgactacgaagccggcgatgtgtccttctacaacatgcgcgacagatcccatatctacacgtgccccagatctgccttcacggttcccgtacggccctttttcagactgggaagtgatgatagcccgattttcatatgtcccgcactcactggcgcctcaggagtcatggtgcctgaggagggtctgaagctccatagagtgggaacacaccaatccctgtag

SEQ ID NO: 75489 - DNA, 942 bp, Artificial Sequence
  derived and/or modified sequence
atggagcctgctgctgccctgcacttcagcctgcctgccagcctgctgctgctgctgctgctgctgctgctgagcctgtgtgccctggtgtctgagagcttcatgcccagcgccagcccctggatggtggccctggccgtcatcctgacagccagcccctggatggtgtccatgaccgtcatcctggccgtgttcatcatcttcatggctgtgtccatctgctgcatcaagaagctgcagcgggagaagaagatcctgtctggagagaagaaggtggagcaggaggagaaggagatcgcccagcagctgcaggaggagctgcgctggaggaggaccttcctgcacgccgcagatgtggtgctggaccctgacacagcccaccctgagctgttcctgtctgaggaccggcgctctgtgcggcggggcccctaccggcagagggtgcctgacaaccctgagagatttgacagccagccctgtgtgctgggctgggagagctttgccagcggcaagcactactgggaggtggaggtggagaatgtgatggtgtggacagtgggcgtgtgccgccacagcgtggagaggaagggggaggtgctgctgatcccccagaatggcttctggaccctggagatgtttggaaaccagtaccgggccctgagcagccctgagcgcatcctgcccctgaaggagagcctgtgccgggtgggcgtcttcctggactatgaggccggagatgtgtccttctacaacatgagggacaggagccacatctacacctgccccaggtctgccttcaccgtgcctgtgcggcccttcttccggctgggcagtgatgacagccccatcttcatctgcccagccctgaccggggccagcggcgtgatggtgcctgaggagggcctgaagctgcaccgggtgggcacccaccagagcctgtag

SEQ ID NO: 75490 - DNA, 942 bp, Artificial Sequence
  derived and/or modified sequence
atggagcccgccgccgccctgcacttcagcctgcccgccagcctgctgctcctcctgcttctgctactcctttccctgtgtgcacttgttagcgaaagcttcatgccttcggccagcccatggatggttgcccttgcggtgatcctgaccgcctcaccatggatggtatcgatgaccgtgattttagctgtgttcattatctttatggctgtatcgatttgctgcattaagaaactccagagagagaagaaaatcctctccggcgagaaaaaagtcgagcaggaggaaaaagagattgcacaacaattacaggaagagctaagatggcgccgcacatttctccatgctgctgatgtggtactagaccctgatactgcacatcccgagctcttccttagcgaagatcgccgctctgtcaggaggggaccgtacagacagcgcgtccccgacaaccctgagaggttcgatagccagccttgtgtgctgggttgggaatcattcgcatctgggaagcactactgggaggtcgaagtcgaaaacgtaatggtctggactgtgggggtgtgtcgccacagtgttgagagaaaaggagaagtcctcctgatacctcagaacggattctggaccctggagatgtttggaaatcaatacagagctctgtctagtcctgagcgaatcttgccattaaaagagtccctttgcagggtgggagtgttccttgactatgaggcgggcgacgtgagcttctacaatatgagggatcgcagccacatctacacatgtccaagatctgcatttacagtgcctgtccgacctttcttcaggctgggatccgatgactccccgatatttatttgtccggccttaacaggggccagcggtgtgatggtgcctgaagagggccttaagctgcatcgcgttggaacccaccagtccctgtag

SEQ ID NO: 75491 - DNA, 942 bp, Artificial Sequence
  derived and/or modified sequence
atggagcccgctgcggcactgcatttctcgctgcctgcatcccttctgctgctcttattgctcctgctgctgagtttgtgtgccctggtcagcgaaagctttatgccatcagcatcaccctggatggtggcgcttgccgtgatcttaaccgcgtctccttggatggtatctatgactgttatactggcagtgttcataatctttatggccgtctcaatctgctgcatcaagaagcttcagagggagaagaagatactctccggagaaaagaaggtggaacaggaggaaaaggagatagcgcaacaactgcaagaagaactgcggtggcggagaacattcctgcacgccgcagatgttgtactagaccccgatacagcccacccggaactgttcctgtcagaggacaggcggtcagttcgaagaggaccttatcgccagcgggttcccgataatccagagcggttcgactcgcaaccctgcgtactcggctgggagtccttcgcatcaggtaagcattactgggaggtagaagttgagaacgtcatggtgtggaccgtgggggtctgtagacactctgtcgaaaggaagggtgaagttctactgattcctcaaaatggcttctggacactggaaatgttcggaaaccaataccgcgctctgagctcaccggagagaatcctaccacttaaggagtccctctgccgcgtgggagtctttctggattacgaagctggagacgtctccttctataacatgcgggacaggtcccacatctacacatgcccaagaagtgccttcactgtccctgtgcggcctttctttcgcctgggctccgacgattctccaatctttatctgcccagccctaactggcgcttcaggggtgatggtccccgaagaaggactcaagctgcacagggttggcactcatcagtccctatag

SEQ ID NO: 75492 - DNA, 1068 bp, Artificial Sequence
  derived and/or modified sequence
agagaacaggtcccagataccgagtccgcaactccaaacatcgcgattaataggaggcctctggtctctgcctgccctgggtgctcatggaaccagctgctgctctgcacttctccctgccagcctccctcctcctcctcctgctcctcctccttctcagcctgtgtgcactggtctcagaatcctttatgcccagcgcatctccctggatggtggccctagctgtcatcctgaccgcatctccctggatggtgtccatgactgtcatcctggctgttttcatcatcttcatggctgtcagcatctgttgcatcaagaaacttcaaagggaaaaaaagattctgtcaggggaaaagaaagttgaacaagaggaaaaagaaattgcacagcaacttcaagaagaattgcgatggagaagaacattcttacatgctgctgatgtggtcctggatccagacaccgctcatcccgagctcttcctgtcagaggaccggagaagtgtgaggcggggcccctacaggcagagagtgcctgacaacccagagagattcgacagtcagccttgtgtcctgggatgggagagcttcgcctcagggaaacattactgggaggtggaggtggaaaacgtgatggtgtggactgtgggggtctgcagacacagtgttgagaggaaaggggaggtcctgctgattcctcagaatggcttctggaccctggagatgtttggaaaccaataccgggccctgtcctcccctgagaggattctccctttgaaggagtccctttgccgggtgggcgtcttcctggactatgaagctggagatgtctccttctacaacatgagggacagatcgcacatctacacatgtccccgttcagcctttactgtgcctgtgaggcccttcttcaggttagggtctgatgacagccccatcttcatctgccctgcactcacaggagccagtggggtcatggtgcctgaagagggcctgaaacttcacagagtggggacccaccagagcctatagaatcaattccttggactcacagccatgcagataagccctg

SEQ ID NO: 75493 - DNA, 942 bp, Artificial Sequence
  derived and/or modified sequence
atggagcccgccgccgccctgcacttcagcctgcccgccagcctgctgctgctgctgctgctgctgctgctgagcctgtgcgccctggtgagcgagagcttcatgcccagcgccagcccctggatggtggccctggccgtgatcctgaccgccagcccctggatggtgagcatgaccgtgatcctggccgtgttcatcatcttcatggccgtgagcatctgctgcatcaagaagctgcagagagagaagaagatcctgagcggcgagaagaaggtggagcaggaggagaaggagatcgcccagcagctgcaggaggagctgagatggagaagaaccttcctgcacgccgccgacgtggtgctggaccccgacaccgcccaccccgagctgttcctgagcgaggacagaagaagcgtgagaagaggcccctacagacagagagtgcccgacaaccccgagagattcgacagccagccctgcgtgctgggctgggagagcttcgccagcggcaagcactactgggaggtggaggtggagaacgtgatggtgtggaccgtgggcgtgtgcagacacagcgtggagagaaagggcgaggtgctgctgatcccccagaacggcttctggaccctggagatgttcggcaaccagtacagagccctgagcagccccgagagaatcctgcccctgaaggagagcctgtgcagagtgggcgtgttcctggactacgaggccggcgacgtgagcttctacaacatgagagacagaagccacatctacacctgccccagaagcgccttcaccgtgcccgtgagacccttcttcagactgggcagcgacgacagccccatcttcatctgccccgccctgaccggcgccagcggcgtgatggtgcccgaggagggcctgaagctgcacagagtgggcacccaccagagcctgtag

SEQ ID NO: 75494 - protein, 256 aa, Artificial Sequence
  derived and/or modified sequence
MEPAAALHFSLPASLLLLLLLLLLSLCALVSAQFTVVGPANPILAMVGENTTLRCHLSPEKNAEDMEVRWFRSQFSPAVFVYKGGRERTEEQMEEYRGRITFVSKDINRGSVALVIHNVTAQENGIYRCYFQEGRSYDEAILRLVVAESFMPSASPWMVALAVILTASPWMVSMTVILAVFIIFMAVSICCIKKLQREKKILSGEKKVEQEEKEIAQQLQEELRWRRTFLHAGYELPGIRGPSWKRPLHGEPPSAF

SEQ ID NO: 75495 - DNA, 771 bp, Artificial Sequence
  derived and/or modified sequence
atggagccagctgctgccctccacttcagcctcccagctagcttgctgttgctcttgttgctacttcttttgagcctttgcgcactggtctcagctcagtttactgttgtgggacccgccaacccaatcttagccatggtcggcgaaaatacaacattgcgttgccacttgagccctgagaaaaacgccgaagacatggaggtgaggtggttcaggtcgcagttttcccctgccgttttcgtatataagggcggacgcgaaaggacagaggaacaaatggaggagtataggggccgcattacatttgttagcaaagacatcaataggggctccgtcgccttggtcatacataacgtcactgctcaggagaacggaatataccgatgctactttcaggaaggaagaagctatgacgaagcaatcctgaggctcgtggttgctgagtcctttatgccgtccgcttctccttggatggtggcactggctgtcatcctcactgcatccccgtggatggtctcaatgacggttatcctggctgtattcatcatctttatggccgtgtcgatctgctgcatcaagaagctccaacgcgagaaaaaaatcctttcgggcgaaaagaaggtcgagcaggaagagaaagaaatcgctcagcaacttcaggaggaattgagatggaggagaacattcctccatgccggctacgagctccccgggatccgggggcctagctggaagaggcccctgcacggagagcctccttccgcgttctag

SEQ ID NO: 75496 - DNA, 291 bp, Artificial Sequence
  derived and/or modified sequence
atggagcccgccgccgccctgcacttcagccttcccgccagcctcctgttgctgctgctattgcttctgctctctctgtgcgctctggtttcagcccagttcactgtggttgggcccgccaatcctattctagccatggttggtgaaaatacaacactgcgctgtcatttgtctccagagaagaatgccgaagatatggaagtccggtggtttaggagccagtttagcccggccgtctttgtgtacaagggaggacgggagcgtacagaggaacagatggaggaatattag

SEQ ID NO: 75497 - DNA, 771 bp, Artificial Sequence
  derived and/or modified sequence
atggagcctgctgctgccctgcacttcagcctgcctgccagcctgctgctgctgctgctgctgctgctgctgagcctgtgtgccctggtgtctgcccagttcaccgtggtgggccctgccaaccccatcctggccatggtgggggagaacaccaccctgcgctgccacctgagccctgagaagaatgctgaggacatggaggtgcgctggttccgcagccagttctccccagctgtgtttgtgtacaagggcggccgggagaggacagaggagcagatggaggagtaccggggccgcatcacctttgtgtccaaggacatcaacagaggctctgtggccctggtgatccacaacgtgacagcccaggagaatggcatctaccgctgctacttccaggagggccgctcctatgatgaggccatcctgcggctggtggtggccgagagcttcatgcccagcgccagcccctggatggtggccctggccgtcatcctgacagccagcccctggatggtgtccatgaccgtcatcctggccgtgttcatcatcttcatggctgtgtccatctgctgcatcaagaagctgcagcgggagaagaagatcctgtctggagagaagaaggtggagcaggaggagaaggagatcgcccagcagctgcaggaggagctgcgctggaggaggaccttcctgcacgccggctatgagctgcccggcatccggggccccagctggaagaggcccctgcatggagagccccccagcgccttctag

SEQ ID NO: 75498 - DNA, 291 bp, Artificial Sequence
  derived and/or modified sequence
atggagcctgctgctgccctgcacttcagcctgcctgccagcctgctgctgctgctgctgctgctgctgctgagcctgtgtgccctggtgtctgcccagttcaccgtggtgggccctgccaaccccatcctggccatggtgggggagaacaccaccctgcgctgccacctgagccctgagaagaatgctgaggacatggaggtgcgctggttccgcagccagttctccccagctgtgtttgtgtacaagggcggccgggagaggacagaggagcagatggaggagtactag

SEQ ID NO: 75499 - DNA, 771 bp, Artificial Sequence
  derived and/or modified sequence
atggagcccgccgccgccctgcacttcagcctgcccgccagcctgttgctccttctactgttactattactcagcctgtgcgctctggttagcgcacaattcacagtcgtgggccccgccaatccaattttagccatggttggtgagaatacaactctgcggtgccacctgtccccagaaaagaacgccgaggacatggaagtgaggtggttccgtagtcaattcagcccagcagtttttgtgtacaaaggagggcgggagagaactgaagaacagatggaggagtacagaggccgtatcacattcgtctccaaagacattaaccgtggctccgtcgccctagtcatccacaatgtgacagcacaggagaacggtatttatcggtgctatttccaggagggccgaagctatgatgaggcgatcctgagattggtggtggccgagagtttcatgccgagcgccagcccctggatggttgccctcgccgtgatcttgaccgccagcccatggatggtgagcatgacagttatcctcgcggtcttcataatcttcatggccgtgtccatatgctgtattaagaaactacagcgtgaaaagaagattttaagcggtgagaagaaagtcgagcaagaggagaaagagattgcacaacagctgcaggaggagctacggtggcgaagaactttcctgcacgctggttacgagcttcctggaatccggggcccaagctggaaaagaccactgcacggggagccaccaagcgctttctag

SEQ ID NO: 75500 - DNA, 291 bp, Artificial Sequence
  derived and/or modified sequence
atggagcccgccgccgccctgcacttcagcctgcccgccagcctgctcctgcttctcctcctcctgttgctgagtctttgtgcgttggtatctgcacagttcactgttgtgggacctgcgaacccaatcctggctatggtaggcgaaaacacgacattgaggtgtcatctaagccccgagaagaatgccgaggatatggaagtgagatggtttcgcagccagttttcccctgctgtgtttgtgtacaagggcggcagggagcggaccgaggagcagatggaggagtactag

SEQ ID NO: 75501 - DNA, 771 bp, Artificial Sequence
  derived and/or modified sequence
atggagcctgctgccgctctgcatttctccttacccgcaagcctgctgctcctgctgttattattgctcctatctctttgtgcgttggtctcagctcagttcacggttgtcggacctgcaaaccccatcctggccatggtaggggagaataccacactgaggtgtcacctgagtccggagaaaaatgctgaggacatggaagtccgctggtttagaagccagttttcacctgcagtatttgtgtacaaggggggacgagagcggaccgaagaacagatggaagagtatagaggcagaatcacctttgtgtccaaagatatcaaccgaggctctgtggcacttgtaattcacaatgttactgcacaggagaacggtatctaccgttgctattttcaagaaggcagaagttacgacgaagccatactgcggttagtagtcgctgagtcttttatgccctcagcatctccatggatggtagccctggctgtgatcctaacagcaagcccctggatggtcagtatgaccgtcattttggcggtgtttattatctttatggcagttagtatttgctgtattaagaagttgcagagggaaaagaagattttaagcggagagaagaaggtcgaacaggaggaaaaagagattgctcaacagctgcaggaagaattacgctggcgacgtacattcctgcatgctggttacgagttgcccggtatccgtggcccttcatggaagaggccactacatggggaaccgccttctgctttctag

SEQ ID NO: 75502 - DNA, 291 bp, Artificial Sequence
  derived and/or modified sequence
atggagccagctgccgctctccatttctccctaccggcttctctgctgctgctgcttcttctgctgctactcagcctttgtgcccttgtaagcgcccagtttacggtggttgggcctgccaatcctattctggccatggttggcgagaacaccaccctccggtgccacctgtcccctgaaaaaaatgccgaggacatggaggtgaggtggtttcgcagtcagttttctcccgcagtattcgtctataaaggagggcgagagagaaccgaagagcagatggaggagtactag

SEQ ID NO: 75503 - DNA, 540 bp, Artificial Sequence
  derived and/or modified sequence
gttgtctggtggtgactgtgcccatgggtgagttgtatcggaaaatcgtcatgtgaggatcagaggggaaaagaaaacagagatacctgagccttgagatgcaagcgactcccagaagttggggcaccgatgagacctacttgagtgacaggagaggttgggcccgaccagcactgaggtgccaagactcctaggctgattctcctcctctgtaaccctaggcctctggtctctgcctgccctgggtgctcatggaaccagctgctgctctgcacttctccctgccagcctccctcctcctcctcctgctcctcctccttctcagcctgtgtgcactggtctcagcccagtttactgtcgtggggccagctaatcccatcctggccatggtgggagaaaacactacattacgctgccatctgtcacccgagaaaaatgctgaggacatggaggtgcggtggttccggtctcagttctcccccgcagtgtttgtgtataagggtgggagagagagaacagaggagcagatggaggagtacc

SEQ ID NO: 75504 - DNA, 771 bp, Artificial Sequence
  derived and/or modified sequence
atggagcccgccgccgccctgcacttcagcctgcccgccagcctgctgctgctgctgctgctgctgctgctgagcctgtgcgccctggtgagcgcccagttcaccgtggtgggccccgccaaccccatcctggccatggtgggcgagaacaccaccctgagatgccacctgagccccgagaagaacgccgaggacatggaggtgagatggttcagaagccagttcagccccgccgtgttcgtgtacaagggcggcagagagagaaccgaggagcagatggaggagtacagaggcagaatcaccttcgtgagcaaggacatcaacagaggcagcgtggccctggtgatccacaacgtgaccgcccaggagaacggcatctacagatgctacttccaggagggcagaagctacgacgaggccatcctgagactggtggtggccgagagcttcatgcccagcgccagcccctggatggtggccctggccgtgatcctgaccgccagcccctggatggtgagcatgaccgtgatcctggccgtgttcatcatcttcatggccgtgagcatctgctgcatcaagaagctgcagagagagaagaagatcctgagcggcgagaagaaggtggagcaggaggagaaggagatcgcccagcagctgcaggaggagctgagatggagaagaaccttcctgcacgccggctacgagctgcccggcatcagaggccccagctggaagagacccctgcacggcgagccccccagcgccttctag

SEQ ID NO: 75505 - DNA, 291 bp, Artificial Sequence
  derived and/or modified sequence
atggagcccgccgccgccctgcacttcagcctgcccgccagcctgctgctgctgctgctgctgctgctgctgagcctgtgcgccctggtgagcgcccagttcaccgtggtgggccccgccaaccccatcctggccatggtgggcgagaacaccaccctgagatgccacctgagccccgagaagaacgccgaggacatggaggtgagatggttcagaagccagttcagccccgccgtgttcgtgtacaagggcggcagagagagaaccgaggagcagatggaggagtactag

SEQ ID NO: 75506 - protein, 145 aa, Artificial Sequence
  derived and/or modified sequence
MSGRSVRAETRSRAKDDIKKVMAAIEKVRKWEKKWVTVGDTSLRIFKWVPVTDSKEKEKSKSNSSAAREPNGFPSDASANSSLLLEFQEPSLPSSEVADEPPTLTKEEPVPLETQVVEEEEDSGAPPLKRFCVDQPTVPQTASES

SEQ ID NO: 75507 - DNA, 438 bp, Artificial Sequence
  derived and/or modified sequence
atgtccggcaggtctgttcgcgccgagactaggtctcgagccaaggacgatatcaaaaaggtgatggcagccatcgaaaaagtgcggaaatgggagaaaaagtgggttaccgtcggcgacacgtcactcagaatctttaaatgggtgcccgttactgactcaaaagagaaagaaaaatctaagtccaactctagtgcggctagggaaccaaacggcttcccatctgatgctagcgccaattcgtccctcctactagaatttcaggaaccgtcactgccctcgtcagaagtggcagacgaacctccaacgctgaccaaagaagagccagtgccactggagacacaagtggtggaggaggaagaagactccggggcaccacctctgaagagattttgtgtggatcagcctaccgtccctcagacagcctcagaatcatag

SEQ ID NO: 75508 - DNA, 438 bp, Artificial Sequence
  derived and/or modified sequence
atgagcggccgctctgtgcgggcagagaccaggagccgggccaaggatgacatcaagaaggtgatggccgccatcgagaaggtgaggaagtgggagaagaagtgggtgacagtgggggacaccagcctgcgcatcttcaagtgggtgcctgtgacagacagcaaggagaaggagaagagcaagagcaacagcagcgctgcccgggagcccaacggcttccccagtgatgccagcgccaacagcagcctgctgctggagttccaggagcccagcctgcccagcagcgaggtggctgatgagccccccaccctgaccaaggaggagcctgtgcccctggagacccaggtggtggaggaggaggaggacagcggggccccacccctgaagcgcttctgtgtggaccagcccaccgtgccccagacagccagcgagagctag

SEQ ID NO: 75509 - DNA, 438 bp, Artificial Sequence
  derived and/or modified sequence
atgagcggccggagcgtgcgggccgagacccggagccgggccaaggacgatattaagaaggtcatggccgccatcgagaaggtgagaaaatgggagaaaaaatgggtcaccgtcggcgatacatcattgcgcatctttaagtgggtccccgtgaccgacagcaaggagaaagagaagtcaaaaagcaattcttcagccgctcgagagccgaacggcttcccatctgatgcatccgccaattctagcctcttattagaatttcaggaaccttcccttcctagctcagaggttgccgatgaacctcctaccctcaccaaagaagaaccagtcccactcgaaactcaagtagtggaggaggaagaggacagtggtgccccgccactcaagagattctgtgtggatcagcccactgttcctcagacagcttcagagtcttag

SEQ ID NO: 75510 - DNA, 438 bp, Artificial Sequence
  derived and/or modified sequence
atgagcggcaggagcgtgcgggctgagactcgctccagggctaaagatgacataaaaaaggtgatggcggctatagagaaggttcgaaaatgggagaaaaaatgggtgaccgtcggggacacatccctacggattttcaagtgggtgcccgttacagactctaaggaaaaggagaagtccaaaagcaattcaagcgccgctagggaacccaacgggtttccttctgacgcctcggctaattcatccctgctacttgaatttcaggagccctcgctgccatcttccgaggtggccgatgagccaccaaccctgacgaaggaggaaccagtgccgctggagacacaagtggtggaggaagaagaagacagcggggcaccacccttgaagaggttttgtgttgaccagccaactgttcctcagaccgccagcgagtcttag

SEQ ID NO: 75511 - DNA, 1458 bp, Artificial Sequence
  derived and/or modified sequence
tgcggcggcggcgggcgggcggcggcgcgtgaggcgcgcgatccccggtgtcttgggagcagtgccccggcccccgccgctcccgccgccgccatgtcgggccggtcggtccgggcggagacccgcagccgggccaaggacgacatcaagaaggtgatggcggccatcgagaaagtgcggaaatgggagaagaagtgggtgactgtgggtgacacgtccctgaggatatttaagtgggttcctgtgacagacagcaaggagaaagaaaagtcaaaatcgaacagttcagcagcccgagaacctaatggctttccttctgatgcctcagccaattcctctctccttcttgaattccaggagccctccctgccctcctcggaagttgctgatgaacctcctaccctcaccaaggaagaaccagttccactagagacacaggtcgttgaggaagaggaagactcaggtgccccgcccctgaagcgcttctgtgtggaccaacccacagtgccgcagacggcgtcagaaagctagcaccatcccggccctccgcctcctggccctgcctctatttattgcattctggttctggccgcgccgcgttgctggggtaagggcaagcactggggtcaagagcctgcacacatgagccttccgggctggaaggctggcgtaggacttggggctgtagcatcatcttcctgaccctggcacctgtgtctacttgctcccgagaagaggagcgctcatgtcttttttgcaccccaagttggctggagcatcggccaccccaagattcatctgtgacctccaggcagcagtctctgctccagaatctctggacggagctgctggcagcttctgcgagaagagagagatgtggaaggcaccttctagaagagagcgtgcctcaggttacttgaacttgaacggagactgtagactcccggactttcccctaggactgggggccctgtaggctgctgttggaggactgggtagagacattggagggaagggaagggcttttctccacacaagggcagagagtccgtctagatttcttgctgtcctgccagctctgcccatgcctgaggtggtcctacctctcacgggcaccctagctgctgacagccctttgtggccgccgtccccatcccctgccctcagcacacacatctgcacacacgcagctttgttctcacctctacctgtcattccagcatccctgcctcttgtcacaaactgccccagcaagaatttgaggttctgacaacagtacccatcccccacagtaccccttcagctcagtttctagaaagctcccttttctttgaaatctgcatgttgaattgaactttgtgattttattttttgtttcaaaaaagtttaagaaaatggaaatgggcaacagtgagtgaagacatattttagcactgaatagaatatttttaaaattaa

SEQ ID NO: 75512 - DNA, 438 bp, Artificial Sequence
  derived and/or modified sequence
atgagcggcagaagcgtgagagccgagaccagaagcagagccaaggacgacatcaagaaggtgatggccgccatcgagaaggtgagaaagtgggagaagaagtgggtgaccgtgggcgacaccagcctgagaatcttcaagtgggtgcccgtgaccgacagcaaggagaaggagaagagcaagagcaacagcagcgccgccagagagcccaacggcttccccagcgacgccagcgccaacagcagcctgctgctggagttccaggagcccagcctgcccagcagcgaggtggccgacgagccccccaccctgaccaaggaggagcccgtgcccctggagacccaggtggtggaggaggaggaggacagcggcgccccccccctgaagagattctgcgtggaccagcccaccgtgccccagaccgccagcgagagctag

SEQ ID NO: 75513 - protein, 334 aa, Artificial Sequence
  derived and/or modified sequence
MKMASSLAFLLLNFHVSLLLVQLLTPCSAQFSVLGPSGPILAMVGEDADLPCHLFPTMSAETMELKWVSSSLRQVVNVYADGKEVEDRQSAPYRGRTSILRDGITAGKAALRIHNVTASDSGKYLCYFQDGDFYEKALVELKVAALGSNLHVEVKGYEDGGIHLECRSTGWYPQPQIQWSNAKGENIPAVEAPVVADGVGLYEVAASVIMRGGSGEGVSCIIRNSLLGLEKTASISIADPFFRSAQPWIAALAGTLPILLLLLAGASYFLWRQQKEITALSSEIESEQEMKEMGYAATEREISLRESLQEELKRKKIQYLTRGEESSSDTNKSA

SEQ ID NO: 75514 - protein, 292 aa, Artificial Sequence
  derived and/or modified sequence
MVGEDADLPCHLFPTMSAETMELKWVSSSLRQVVNVYADGKEVEDRQSAPYRGRTSILRDGITAGKAALRIHNVTASDSGKYLCYFQDGDFYEKALVELKVAALGSNLHVEVKGYEDGGIHLECRSTGWYPQPQIQWSNAKGENIPAVEAPVVADGVGLYEVAASVIMRGGSGEGVSCIIRNSLLGLEKTASISIADPFFRSAQPWIAALAGTLPILLLLLAGASYFLWRQQKEITALSSEIESEQEMKEMGYAATEREISLRESLQEELKRKKIQYLTRGEESSSDTNKSA

SEQ ID NO: 75515 - protein, 319 aa, Artificial Sequence
  derived and/or modified sequence
MKMASSLAFLLLNFHVSLLLVQLLTPCSAQFSVLGPSGPILAMVGEDADLPCHLFPTMSAETMELKWVSSSLRQVVNVYADGKEVEDRQSAPYRGRTSILRDGITAGKAALRIHNVTASDSGKYLCYFQDGDFYEKALVELKVAALGSNLHVEVKGYEDGGIHLECRSTGWYPQPQIQWSNAKGENIPAVEAPVVADGVGLYEVAASVIMRGGSGEGVSCIIRNSLLGLEKTASISIADPFFRSAQPWIAALAGTLPILLLLLAGASYFLWRQQKEITALSSEIESEQEMKEMGYAATEREISLRESLQEELKRKKSST

SEQ ID NO: 75516 - DNA, 1005 bp, Artificial Sequence
  derived and/or modified sequence
atgaaaatggccagcagcctcgccttcctcctgctgaattttcacgtgtcactgctgctggtgcagctgttaacaccatgctccgcccaattctccgttttgggtccatccgggcctatccttgccatggtcggtgaggacgctgatttgccatgtcacctgttcccaaccatgagcgctgaaaccatggagctgaaatgggtgtcgtcttcactgagacaagtagtgaatgtctacgccgacggcaaagaagtggaggatagacagtccgcaccctacagaggtcgaacatcaatattgagggacggcatcactgctggaaaggcagcacttcgaatccataacgtcaccgccagtgatagcggtaaatatttgtgttattttcaggatggcgatttctatgaaaaagcactggtcgagctcaaggtagctgctttgggctccaatctgcatgtcgaggtcaaaggctacgaagacgggggcattcatttagagtgtcgctcgactggctggtacccccagccccaaatccagtggtcaaacgctaaaggtgagaacattcccgcggtggaagcccctgtggtggcggacggagttggattgtatgaggtggctgcttctgtcatcatgagagggggtagcggagagggcgtatcctgcatcatcaggaacagcctcctgggactggagaaaaccgccagtatttctattgccgaccctttctttagaagcgcccagccttggatcgccgccctggctgggacgctcccaattctgctgcttttattggccggcgcttcttacttcctgtggcgacaacagaaggagataacagccctgtccagcgaaattgagtccgagcaggaaatgaaggaaatggggtacgctgctacagagcgtgaaattagtctgagggagtccctccaggaggaacttaaacggaagaaaattcagtatctaacaaggggagaggagagtagcagtgataccaacaaaagcgcctag

SEQ ID NO: 75517 - DNA, 1005 bp, Artificial Sequence
  derived and/or modified sequence
atgaaaatggcatcctccctggcgtttttacttttgaactttcatgtgagcttactcctggtgcagctacttacgccttgcagtgcacaatttagtgtgctggggccaagcggcccaattctcgcgatggtgggcgaagatgccgacttgccatgtcacctttttcccacgatgagtgctgagaccatggagcttaagtgggtgtcatctagtctccggcaggtagttaacgtttacgcggacggaaaagaagtggaggaccggcagtctgcgccttatcgcgggcgaactagcattctgagagacggaataaccgcaggcaaagcagcacttcgcatccacaacgtgacagcttcagacagcggtaagtatctgtgctattttcaagacggggacttttacgagaaagctttggttgagctgaaagtggcagcactgggatcgaacttgcatgtcgaagtaaagggatacgaggatggtggaattcaccttgaatgcagaagcactggatggtacccccagccccagatccaatggtcaaatgcaaagggcgagaacatccccgctgtcgaggcgccagtggtggctgacggcgtgggtctgtatgaagtcgccgcgtccgttattatgaggggaggttcaggagagggcgtttcatgcatcattcgcaattctctgcttggattagaaaagacagccagcattagcattgccgacccattcttccgatccgctcagccatggatcgccgctcttgccgggactctaccgatcctgctgctgctgctcgcaggtgctagctatttcctgtggcgacagcaaaaggagatcaccgcattgagctcagaaattgaatctgaacaggagatgaaagagatgggctacgcagccactgaaagagagatatctcttcgggaaagcttgcaagaggagttaaagcgcaagaagatccagtacttgactcgcggagaggagtccagcagtgacaccaataagagtgcctag

SEQ ID NO: 75518 - DNA, 1005 bp, Artificial Sequence
  derived and/or modified sequence
atgaaaatggcatcttcactggcgtttctactcttgaattttcatgtgtcactgctactcgtccagctcctgacaccttgcagcgcacagttctcggtgctgggacccagtggaccaattttagcaatggtaggagaggacgcggatcttccttgtcatctgttccctacaatgagtgctgaaactatggagctgaagtgggtgtcgtcttctcttaggcaggtggtgaacgtttatgccgacggtaaggaggtggaagacagacagagtgccccttatagggggcggacaagcattttgagagatggcattaccgccggaaaagcagccctgagaatccataatgtaacagcctcagattctggaaagtatctctgctatttccaagacggcgatttctacgaaaaagccctggtggagcttaaggtcgccgccctgggctctaacctccacgttgaagtcaagggctatgaggatggcgggattcatctggaatgccggtccacggggtggtatccccagccacagatccagtggtctaacgccaagggggagaatattcccgcagtcgaagcaccagtggtggccgacggggtgggcctttacgaagttgcagcatccgtgatcatgagagggggctccggcgagggagtctcatgtattatccgaaactctctgctcggactggagaagactgcttcaatttcgatcgccgacccgttctttcggtctgcacagccctggatcgctgccctagccgggacccttccaattctgctactgttgctggcgggagcgtcctattttctatggagacagcagaaggagattacagcactgagttctgagatcgaatccgagcaggagatgaaagagatgggatatgccgccactgaaagggaaatttccctcagggaatcccttcaggaagagctgaagcgcaagaaaatccagtatttgactcgcggtgaagaatcatcttccgacaccaataaatccgcatag

SEQ ID NO: 75519 - DNA, 1005 bp, Artificial Sequence
  derived and/or modified sequence
atgaaaatggcctctagcctggccttcctcttgctgaatttccacgtgtcactcctgctggtacagctactgaccccttgcagcgctcagttttcggtgctgggcccttccggccctatcctggctatggtcggggaggatgctgacctcccctgtcacctctttccaacaatgtcggccgagaccatggagctgaagtgggtatcctcctctctgcgccaggtggtaaacgtctacgcggacggtaaagaggtcgaggaccggcagtcagctccttatcgggggcgtacaagtattctgcgggacggcataactgccggaaaagcagcactgcgcatccataatgttacagcaagcgacagcggcaagtacctatgttatttccaagatggggacttctatgagaaggctttggttgagctaaaggtggccgccttgggctctaatctgcatgttgaagtaaaaggttatgaggacggtgggattcacctcgaatgccggtcaacgggatggtacccgcagccccaaattcagtggtctaatgccaagggcgaaaatatccctgcggtagaggcaccagtagtggctgatggagtgggactctatgaagtcgccgcctccgtgatcatgcggggcgggtctggggagggtgtgagctgcatcatccggaactcactgctcggcttagaaaaaaccgccagcatttctatcgcggacccatttttcagatcagctcagccctggattgctgctctggcagggacactgccaattctgttgctgttgttggcgggggcatcctatttcctgtggagacaacagaaggagatcaccgcactatcttccgaaatcgaaagtgaacaggagatgaaagagatgggatacgccgcaaccgagagggagatatccctccgcgagtcattacaggaagagctcaaacggaaaaagatacagtatctgacaagaggcgaggaaagttcctctgatacaaacaaatctgcatag

SEQ ID NO: 75520 - DNA, 960 bp, Artificial Sequence
  derived and/or modified sequence
atgaaaatggcaagtagcctcgcgttcttattactcaacttccacgtttccctgttgctggtgcagctgctgaccccctgcagcgcacaattctccgtcctcggaccatcaggacctatcctggcgatggtcggggaagacgccgatttgccttgtcatctcttcccaacaatgagcgcagagactatggagctcaagtgggtgtcgtcttcacttcggcaggttgtgaacgtgtacgccgacgggaaggaggtcgaggaccggcagtctgcaccttacagggggcgaacaagtatcttgcgggacggaatcacagccggcaaggccgctctgcgaattcacaatgtcaccgcatcagattccgggaaatacttatgctactttcaggacggagacttctatgaaaaggctttggtggaacttaaggtggctgcacttggaagcaacctacacgtagaggtgaaaggctatgaggacggcggcattcacctggaatgccggagcaccgggtggtaccctcagcctcagattcaatggtcaaacgccaagggagagaatatccccgcagtggaggctccagtcgtcgcagatggcgtgggattatacgaggttgcggcatctgtcattatgagagggggttccggtgaaggggtttcatgcattataagaaattccttgctgggactagagaaaaccgctagcatttccatcgctgaccccttctttagatccgcacagccatggatcgctgccctggctggtaccttgccaattctgctgcttctgctagccggggcttcttacttcttgtggcggcagcagaaggagatcacggccctttcttctgagatcgaatcagagcaagagatgaaagaaatgggctacgccgccacggaacgcgaaatttcgttgagggagtctctgcaggaggagctgaagcgaaaaaaatctagtacatag

SEQ ID NO: 75521 - DNA, 1005 bp, Artificial Sequence
  derived and/or modified sequence
atgaagatggccagcagcctggccttcctgctgctgaacttccacgtgtccctgctgctggtgcagctgctgaccccctgcagcgcccagttctctgtgctgggccccagcggccccatcctggccatggtgggggaggatgctgacctgccctgccacctgttccccaccatgtctgctgagaccatggagctgaagtgggtgagcagcagcctgcggcaggtggtgaatgtgtatgcagatggcaaggaggtggaggaccggcagagcgccccctaccggggccgcaccagcatcctgagagatggcatcacagctgggaaggccgccctgcgcatccacaacgtgacagccagtgacagcggcaagtacctgtgctacttccaggatggagacttctatgagaaggccctggtggagctgaaggtggccgccctgggcagcaacctgcacgtggaggtgaagggctatgaagatggcggcatccacctggagtgccgcagcacaggctggtacccccagccccagatccagtggagcaatgccaagggggagaacatcccagctgtggaggcccctgtggtggctgatggagtgggcctgtatgaggtggccgccagcgtcatcatgaggggcggcagcggggagggcgtgtcctgcatcatccggaacagcctgctgggcctggagaagacagccagcatcagcattgctgaccccttcttccgcagcgcccagccctggattgctgccctggccggcaccctgcccatcctgctgctgctgctggccggggccagctacttcctgtggaggcagcagaaggagatcacagccctgagcagcgagattgagagcgagcaggagatgaaggagatgggctacgccgccacagagcgggagatcagcctgcgggagagcctgcaggaggagctgaagaggaagaagatccagtacctgaccagaggagaggagagcagcagtgacaccaacaagagcgcctag

SEQ ID NO: 75522 - DNA, 960 bp, Artificial Sequence
  derived and/or modified sequence
atgaagatggccagcagcctggccttcctgctgctgaacttccacgtgtccctgctgctggtgcagctgctgaccccctgcagcgcccagttctctgtgctgggccccagcggccccatcctggccatggtgggggaggatgctgacctgccctgccacctgttccccaccatgtctgctgagaccatggagctgaagtgggtgagcagcagcctgcggcaggtggtgaatgtgtatgcagatggcaaggaggtggaggaccggcagagcgccccctaccggggccgcaccagcatcctgagagatggcatcacagctgggaaggccgccctgcgcatccacaacgtgacagccagtgacagcggcaagtacctgtgctacttccaggatggagacttctatgagaaggccctggtggagctgaaggtggccgccctgggcagcaacctgcacgtggaggtgaagggctatgaagatggcggcatccacctggagtgccgcagcacaggctggtacccccagccccagatccagtggagcaatgccaagggggagaacatcccagctgtggaggcccctgtggtggctgatggagtgggcctgtatgaggtggccgccagcgtcatcatgaggggcggcagcggggagggcgtgtcctgcatcatccggaacagcctgctgggcctggagaagacagccagcatcagcattgctgaccccttcttccgcagcgcccagccctggattgctgccctggccggcaccctgcccatcctgctgctgctgctggccggggccagctacttcctgtggaggcagcagaaggagatcacagccctgagcagcgagattgagagcgagcaggagatgaaggagatgggctacgccgccacagagcgggagatcagcctgcgggagagcctgcaggaggagctgaagaggaagaagagcagcacctag

SEQ ID NO: 75523 - DNA, 1005 bp, Artificial Sequence
  derived and/or modified sequence
atgaagatggccagcagcctggccttcctgctgctgaacttccacgtttctctgctcctcgtgcagctgctgaccccttgcagcgctcagttctccgtcttgggaccctccggaccaatcctggcaatggtcggagaagatgcagacctcccctgtcatctttttcccaccatgtcagcagagaccatggaactgaagtgggtgtctagtagtctgcgacaggtggttaacgtatatgcagatggaaaagaagtcgaagatcgtcagtccgctccgtacagaggccgaacaagtatccttcgtgacggaatcacggcggggaaagctgcgctacgcatacacaatgtgactgcctcagattctggcaaatacctctgttattttcaagacggagatttctacgaaaaggccctggttgaactaaaagtggcagccttaggtagcaacctccacgtcgaagtcaaagggtatgaggatggcgggatacacctggagtgtcgctctacaggctggtatccccaacctcaaatacagtggagcaatgctaaaggggaaaacattccagcagtcgaagccccagttgtggccgatggggtcggcctgtacgaggtggccgcatctgtaataatgaggggcggtagcggagaaggggttagctgcatcattaggaactccctgctcggcctggaaaaaacggcatccatcagcatcgccgacccctttttcaggtcagcccagccgtggatcgctgcgctagctggcactcttcccatattgctcttgctgttggctggcgcatcttattttctatggaggcaacagaaggaaattaccgcgttgtcaagcgaaatcgaatctgaacaagagatgaaggagatgggatatgcagcaactgagagagagatcagcctcagggagtctcttcaagaagagttaaaaaggaagaagatacagtacctgactcgaggggaagagagcagttccgataccaacaagagtgcttag

SEQ ID NO: 75524 - DNA, 1005 bp, Artificial Sequence
  derived and/or modified sequence
atgaagatggccagcagcctggccttcctgctgctgaacttccacgtgagtctgctcctggtgcagctacttacaccctgtagcgcccagttctctgttctcggcccatcaggcccaatcttggcaatggtcggtgaggatgcagatcttccttgtcatctatttccaacaatgtccgctgaaaccatggaattgaaatgggtttcttcgagtttgcgtcaagtggtgaacgtatacgcggatggaaaggaagttgaggaccgacaatctgcaccttatcgcggaaggactagcatcctgcgtgatggcataacggccggaaaagcagcactcaggatccataacgtgaccgcctctgatagtggaaagtacctctgctatttccaggacggtgatttctatgagaaggccttggtggagctcaaagtggccgccctaggcagtaatcttcatgttgaagtgaaaggttacgaggacggcggcattcatttagagtgcaggtccacgggttggtacccccagccccagattcaatggagtaacgcaaagggagaaaacatcccggcagtggaggcgcccgtggtcgccgacggggtgggcctttacgaggtggcggccagtgtgattatgcgaggaggctccggcgagggagtaagctgcattatccgaaattctttgctcgggctcgaaaagactgcatctatctcaattgcagatcccttttttcgatcagcccagccttggattgccgcattagcagggaccctccctattttgttgttgctactcgcaggagcatcttattttttgtggaggcagcagaaagagattactgcgctgagttccgagatcgagtccgaacaggaaatgaaggaaatggggtatgccgctacagaacgggagatttctcttagggaaagccttcaggaagagctaaaaagaaagaaaatccagtacctgacacgaggcgaggagagctcttccgacacgaataaatcagcctag

SEQ ID NO: 75525 - DNA, 1005 bp, Artificial Sequence
  derived and/or modified sequence
atgaagatggccagcagcctggccttcctgctgctgaacttccacgtgagccttttgctcgtgcagcttctgactccttgtagcgctcagttctctgtactcggtcccagtggccctatcctggccatggtaggcgaagatgccgacctgccctgtcatctcttccccaccatgagcgcagagactatggagctgaaatgggtgagctcatcacttcggcaagtggtgaatgtttatgccgatggcaaagaagttgaagatcgacagagcgccccctaccgcggccggacctccatcctaagagacggcatcacggccggcaaggctgccttgcggatccataacgtcaccgcttccgactctggaaagtatctgtgttacttccaggatggggacttctacgaaaaagcccttgtcgagctcaaggtcgccgcactgggctccaatctgcacgtcgaggtgaagggctacgaagacggagggatccatctggagtgccgcagcactggatggtatccccagccccagatacaatggagcaacgccaaaggggaaaatattccagccgtggaggctccagtcgtggccgatggagtgggactatatgaggtcgctgcgagcgttataatgcgcggaggttccggggaaggcgtcagctgtattatcagaaattctttgctgggcctggaaaaaactgcctctatttctatcgctgacccattctttcgtagcgcccagccatggatcgccgcgctagcaggaaccctccctatcctgcttctgctactagcaggcgcaagctactttttatggcggcaacagaaggaaattacagccttgtctagcgaaatagagtcagagcaggaaatgaaggaaatggggtatgccgctacagaacgagagatttctctgcgcgagtccctgcaagaggagctgaagcggaaaaaaatccaatatctcacccgcggcgaggagtcctcatctgacactaacaaaagcgcttag

SEQ ID NO: 75526 - DNA, 1005 bp, Artificial Sequence
  derived and/or modified sequence
atgaagatggccagcagcctggccttcctgctgctgaacttccacgtttccctcttactcgtccagctcttgactccatgtagcgcacagttttcggtcctcggaccatcaggccccatcttagctatggtcggagaggatgcagatctgccctgtcacctctttccgactatgtcagcagagacaatggagcttaagtgggtgtccagttctctccggcaggttgtgaatgtctatgccgatggtaaagaggttgaggaccgacagtctgccccatacaggggacgaacaagtatcctgagggatgggatcaccgctgggaaagcagctctgagaatccacaatgtgactgctagcgactcaggaaagtacctgtgttattttcaggacggtgacttttacgagaaggccctcgtggaactgaaagtagccgctttaggctcaaatttgcatgtggaagtcaaggggtatgaggatggtggaatccatctggaatgtagatccactggttggtaccctcagccacagattcagtggagcaatgctaaaggtgagaacatacccgctgtggaggcacctgttgtggccgatggtgttgggctttatgaggtcgccgcgagtgtgattatgcggggtggcagcggggaaggcgtgtcttgcatcatcagaaacagtctgcttggattggaaaaaacagccagcatttctattgccgaccccttctttcgtagcgctcagccatggatcgccgctctggccgggaccctgcccatcctgttgctgttgttggcaggtgccagctacttcctgtggcggcagcaaaaagaaattacggctctgtcttctgaaatcgaatcagaacaagaaatgaaagagatgggctatgccgcaacggaacgcgaaatctcccttcgggagagtctgcaggaagagctgaagcggaagaagatacagtacttaacgcgcggagaggaatccagctccgatacaaataagagcgcttag

SEQ ID NO: 75527 - DNA, 960 bp, Artificial Sequence
  derived and/or modified sequence
atgaagatggccagcagcctggccttcctgctgctgaacttccacgtgtcattactcctcgtgcagctgctaacgccatgctcagcacaatttagcgtgttaggaccaagcggcccgattctggcaatggtgggcgaagacgctgatctgccatgtcaccttttcccaactatgtcagccgagaccatggaactcaagtgggtgagcagctcactccgccaggtagttaacgtgtacgctgacgggaaagaagtagaggaccggcaatcagccccttaccgtggacggacctctattctgcgtgacggcattactgctgggaaggccgctctgcgaatccacaatgtgaccgcttcagacagcgggaagtacttgtgctacttccaggatggcgatttctatgaaaaggccctggtggagttgaaggtcgccgctctgggatcaaatttacacgtggaagtaaaagggtatgaggatggcggcattcacctggaatgtcgatccacgggctggtatccgcagccccagatccagtggtccaatgccaagggtgaaaacatcccagccgtggaagcaccagtcgtggcggatggggtcggtctgtatgaggtggccgcctccgtaatcatgcgcggggggtcaggggaaggcgtcagctgcatcatccgcaacagcctgctggggttggagaagactgcatcaatttctatcgccgacccattttttcgatcagctcagccgtggatcgccgcactggccggaaccctgcctatcttgctgcttctcctggccggtgcctcttatttcttatggcggcagcagaaagagattacagcattatcttctgaaattgagagtgagcaggagatgaaggagatgggctacgccgccactgaaagggaaatttctctacgggagagcttacaggaggaactgaaacgtaagaaatccagcacctag

SEQ ID NO: 75528 - DNA, 1005 bp, Artificial Sequence
  derived and/or modified sequence
atgaaaatggccagctcactggctttcttactgctgaacttccacgtgagcctgctattggttcagctcttgaccccatgctcggcacagttttccgtgttgggtccatctgggcctatactggccatggtgggagaagacgcggatttaccgtgtcaccttttccctacaatgtccgccgagaccatggagttgaagtgggtctcgtcctccttacggcaagtggtcaacgtgtatgctgatgggaaggaagtcgaggacagacagtccgctccataccgcggaagaaccagcattctccgggatggcatcacggccggaaaggctgccttaaggatccacaatgtaacagccagcgacagcgggaagtacttgtgttacttccaggatggagatttttatgaaaaagccctggtagaactgaaagtggctgccctgggatcgaatcttcacgtggaggttaaaggctatgaggacggaggcattcatttggagtgccggtccaccggctggtatccacagccacagatccagtggtccaatgcgaagggagagaatattcccgcagtggaagcacccgtggtggccgatggagtgggcttatacgaagtggcagcctctgtgatcatgcgcggaggcagcggagagggcgtttcctgtattatccggaatagtctcctgggcctcgagaagaccgcctctatatccattgctgacccattcttccggagcgcgcagccctggattgctgctctcgctgggaccctccccatcctgctcttactgctggcgggagcttcttattttctatggcgccagcagaaggagatcaccgcactcagttcagagattgaatctgaacaggaaatgaaggaaatgggctacgcagccaccgagagggagatttcactccgagagagcttacaggaggaattgaaaaggaagaaaatccagtacctgactcgaggggaagagtcctccagcgatacaaacaaaagcgcatag

SEQ ID NO: 75529 - DNA, 1005 bp, Artificial Sequence
  derived and/or modified sequence
atgaaaatggccagcagtctggcattcttgttactgaatttccacgtatctctattgctggttcaactcttgacaccttgcagcgcacagttttccgtcttaggccctagtggccctatattagcgatggtgggagaggacgcggacctcccatgccacctgttccccaccatgagtgccgagactatggagctgaagtgggtctcaagcagccttagacaggtggttaacgtttatgcagatggtaaggaggttgaggataggcagtcagccccatacaggggccgtacttctatcctgagggacggtatcacagcagggaaggccgcacttcggatacacaatgtgaccgcttcagactctgggaagtatctgtgttattttcaggacggggatttctacgaaaaggccctcgtggaactgaaagtggccgctctagggagtaacctccacgtggaggtgaagggatatgaagacggaggcattcacctcgagtgcaggtcaactgggtggtatccacagcctcagattcaatggtcaaacgccaaaggcgaaaacatacccgctgtggaagccccagtagtggcagacggcgtcggactgtacgaagttgccgctagtgtcattatgcggggtggttctggggagggggtgtcatgtattatacggaactcgttgctgggtctcgagaagaccgctagcatttccattgcggacccattctttagatcagcccagccctggatcgcagcactggcgggtacgcttcccattctgttgttgctgcttgcgggagcctcgtatttcctgtggcgccagcagaaggaaatcacagccctcagcagcgaaatagaatccgagcaggagatgaaagaaatgggatatgccgcaacagagcgagagatctctctccgggagtcacttcaggaggagcttaagcgtaaaaaaatccagtacctgactagaggtgaagagtctagtagtgatacaaacaaatcagcttag

SEQ ID NO: 75530 - DNA, 1005 bp, Artificial Sequence
  derived and/or modified sequence
atgaaaatggcaagttctctggcattcctgctgctcaactttcatgtgtctttgctcctggtgcagctactgacaccatgcagtgctcagttcagcgtgcttggaccatccggccctattcttgcaatggtgggtgaagatgctgacctcccatgtcacttgtttcctactatgtcggcggagacaatggaacttaagtgggtgtcttccagtctcagacaggtggtgaatgtgtatgctgacgggaaagaagtggaggacaggcagagcgccccataccgcggacgcaccagcatcttgagggacgggatcactgcgggtaaggccgcactgcgcattcataacgtaaccgccagtgattccggtaagtatctatgttatttccaggacggagacttctatgagaaggctttggtggagctgaaggtcgcggcactggggtcaaacctacacgtcgaggttaaagggtacgaggatgggggaatccatctcgagtgtaggtccacaggttggtacccacagccacagattcagtggagtaacgccaaaggagaaaacatccctgcagtagaggccccagtggttgctgatggggtgggcctatacgaagtggcagccagtgtgattatgagaggcggttcaggcgagggtgtttcctgcatcataaggaactctctgctggggctggagaagacagcctctatttctatcgctgaccctttttttaggtccgctcagccgtggattgctgcactagcaggcactttacctatcctcctgctgcttctggccggagcaagctatttcctctggcggcagcaaaaagaaatcaccgccctctcttccgagatcgagagcgaacaggaaatgaaggagatgggatacgccgcaactgagcgcgagatctccctccgcgagtccctccaggaggagctcaagcgtaagaaaattcagtacctcacccggggtgaagaaagcagcagtgatacgaataaaagcgcttag

SEQ ID NO: 75531 - DNA, 1005 bp, Artificial Sequence
  derived and/or modified sequence
atgaagatggcctcctcactggcatttctccttctgaactttcacgtgtctttgttgctggtgcagctcctgacgccctgctccgcccagtttagcgttctaggaccgagtggcccaattctggccatggtgggggaagatgcggatctcccgtgtcatctcttcccaacaatgtccgcagaaaccatggaactgaaatgggtctcttcttcattacgacaggtggttaatgtgtacgctgatggtaaggaggtggaggatcgacaaagcgccccatatagaggacggacgagcatcctgcgcgacggcatcactgccggaaaggccgctctccgaatccataacgtgacggccagcgattcgggcaagtatctgtgttacttccaagacggcgacttctatgaaaaagctttggtcgagttgaaagtcgccgctttaggatctaacctacacgtggaggttaagggatatgaggatggcggtatacacctggagtgccggtccaccgggtggtacccacagccgcaaatacagtggagcaacgctaagggagaaaatatccccgcagtggaggcccctgtggtggcagacggtgtgggcctgtacgaggtcgccgctagtgtgattatgagaggtggttcgggggaaggtgtgagctgtatcattagaaattccctgcttgggctggagaagacagcttcaatctcaattgctgatccatttttccgtagcgcacagccctggatcgcagccttggcgggtacgctccccatcctattgctgctactcgctggggcaagttacttcctgtggcggcagcaaaaggagatcaccgcattgagctccgagatcgaaagcgagcaagagatgaaggaaatgggttacgctgctaccgagagagagatatctttgcgcgagagtctccaggaagagctaaaacggaagaaaatccagtacctgactcgcggtgaagaatcatcgtctgacacaaacaagtctgcgtag

SEQ ID NO: 75532 - DNA, 960 bp, Artificial Sequence
  derived and/or modified sequence
atgaagatggcatcatcattagctttcttgctcttgaacttccatgtcagcctattgctggtccaactgctcactccctgctcagcccagttttctgtgcttggtccatcaggacctatcttggccatggtgggcgaggacgccgatcttccctgccacctgttccctaccatgagcgctgagactatggagttaaagtgggtttcctctagcctgaggcaggttgtcaacgtgtacgccgatggcaaagaagtggaggatcgccagtcggctccatacagaggccgtacatccatcttgagagatggcatcaccgctggcaaagccgcattgagaatccataacgtcaccgcgtccgattccggaaaatacctgtgctacttccaagacggagacttttacgaaaaggctctggtcgagcttaaagtcgctgccctggggtctaatctccacgtggaggtgaagggctatgaggacgggggaatccacctggaatgtagatcaaccggctggtatccacagcctcagatccagtggagtaatgccaagggcgaaaacattcccgcagtcgaagcaccggtggtcgccgatggggtaggactgtacgaggttgcagcctctgtcattatgcggggaggctcgggggagggcgtgtcatgcatcatccgaaatagccttctggggcttgaaaaaaccgctagcattagcattgccgaccctttcttccgctcggcccagccatggattgccgctctagctggaaccctgcctattttgcttctcctgctcgccggagcctcctactttttgtggaggcagcagaaagaaatcactgcactatcatcggagattgagagcgagcaggaaatgaaggagatgggatacgccgctacggagagagaaattagcctccgggagagcctgcaggaggagctcaagagaaagaaatcatccacgtag

SEQ ID NO: 75533 - DNA, 1634 bp, Artificial Sequence
  derived and/or modified sequence
gaggctaagccataatagaaagaatggagaattattgattgaccgtctttattctgtgggctctgattctccaatgggaataccaagggatggttttccatactggaacccaaaggtaaagacactcaaggacagacatttttggcagagcatagatgaaaatggcaagttccctggctttccttctgctcaactttcatgtctccctcctcttggtccagctgctcactccttgctcagctcagttttctgtgcttggaccctctgggcccatcctggccatggtgggtgaagacgctgatctgccctgtcacctgttcccgaccatgagtgcagagaccatggagctgaagtgggtaagttccagcctaaggcaggtggtgaacgtgtatgcagatggaaaggaagtggaagacaggcagagtgcaccgtatcgagggagaacttcgattctgcgggatggcatcactgcagggaaggctgctctccgaatacacaacgtcacagcctctgacagtggaaagtacttgtgttatttccaagatggtgacttctatgaaaaagccctggtggagctgaaggttgcagcactgggttctaatcttcacgtcgaagtgaagggttatgaggatggagggatccatctggagtgcaggtccaccggctggtacccccaaccccaaatacagtggagcaacgccaagggagagaacatcccagctgtggaagcacctgtggttgcagatggagtgggcctatatgaagtagcagcatctgtgatcatgagaggcggctccggggagggtgtatcctgcatcatcagaaattccctcctcggcctggaaaagacagccagcatttccatcgcagaccccttcttcaggagcgcccagccctggatcgcagccctggcagggaccctgcctatcttgctgctgcttctcgccggagccagttacttcttgtggagacaacagaaggaaataactgctctgtccagtgagatagaaagtgagcaagagatgaaagaaatgggatatgctgcaacagagcgggaaataagcctaagagagagcctccaggaggaactcaagaggaaaaaaatccagtacttgactcgtggagaggagtcttcgtccgataccaataagtcagcctgatgctctaatggaaaaatggccctcttcaagcctggtgaggaaatgcttcagatgaggctccaccttgttaaataaattggatgtatggaaaaatagactgcagaaaaggggaactcatttagctcacgagtggtcgagtgaagattgaaaattaacctctgagggccagcacagcagctcatgcctgtaatcctagcactttggaaggctgaggagggcggatcacaaggtcaggagatcaagaccatcctggctaacacggtgaaaccccgtctctactaaaaatacaaaaaataaaaaattagccgggcatggtgacgggcacctgtagtcccagctactcgggaggctgaggcaggagaatggcatgaacccggaaggcagagcttgcagtgagccgagatcacgccactgcactccagcctgggagacagagcgagactctgtctcaagaaaaaaaaaaaaaaaaaaaaa

SEQ ID NO: 75534 - DNA, 1494 bp, Artificial Sequence
  derived and/or modified sequence
ggctaagccataatagaaagaatggagaattattgattgaccgtctttattctgtgggctctgattctccaatgggaataccaagggatggttttccatactggaacccaaaggtaaagacactcaaggacagacatttttggcagagcatagatgaaaatggcaagttccctggctttccttctgctcaactttcatgtctccctcctcttggtccagctgctcactccttgctcagctcagttttctgtgcttggaccctctgggcccatcctggccatggtgggtgaagacgctgatctgccctgtcacctgttcccgaccatgagtgcagagaccatggagctgaagtgggtaagttccagcctaaggcaggtggtgaacgtgtatgcagatggaaaggaagtggaagacaggcagagtgcaccgtatcgagggagaacttcgattctgcgggatggcatcactgcagggaaggctgctctccgaatacacaacgtcacagcctctgacagtggaaagtacttgtgttatttccaagatggtgacttctatgaaaaagccctggtggagctgaaggttgcagcactgggttctaatcttcacgtcgaagtgaagggttatgaggatggagggatccatctggagtgcaggtccaccggctggtacccccaaccccaaatacagtggagcaacgccaagggagagaacatcccagctgtggaagcacctgtggttgcagatggagtgggcctatatgaagtagcagcatctgtgatcatgagaggcggctccggggagggtgtatcctgcatcatcagaaattccctcctcggcctggaaaagacagccagcatttccatcgcagaccccttcttcaggagcgcccagccctggatcgcagccctggcagggaccctgcctatcttgctgctgcttctcgccggagccagttacttcttgtggagacaacagaaggaaataactgctctgtccagtgagatagaaagtgagcaagagatgaaagaaatgggatatgctgcaacagagcgggaaataagcctaagagagagcctccaggaggaactcaagaggaaaaaaatccagtacttgactcgtggagaggagtcttcgtccgataccaataagtcagcctgatgctctaatggaaaaatggccctcttcaagcctgggcctcccattggccaaacacagcagcaaaccagaggacaagggagcccagtggcactgtccatagaggacagattcctggggtccagaagagggtggagaaagctgaaggctggagagtgaatctagggcatataaggccccacacagagcccagcacagagacggccttgcagctatcaggaagatgaggagcttccttcatggcctgctgtgggctgagtaaataatatgattgccttctacagcgctagagattcatatgtttatccccatttttcaggtgaggaaatgcttcagatg

SEQ ID NO: 75535 - DNA, 1460 bp, Artificial Sequence
  derived and/or modified sequence
atttgctttctctttttcctttcttccggatgagaggctaagccataatagaaagaatggagaattattgattgaccgtctttattctgtgggctctgattctccaatgggaataccaagggatattatttttacagatggttttccatactggaacccaaaggtaaagacactcaaggacagacatttttggcagagatgaaaatggcaagttccctggctttccttctgctcaactttcatgtctccctcctcttggtccagctgctcactccttgctcagctcagttttctgtgcttggaccctctgggcccatcctggccatggtgggtgaagacgctgatctgccctgtcacctgttcccgaccatgagtgcagagaccatggagctgaagtgggtaagttccagcctaaggcaggtggtgaacgtgtatgcagatggaaaggaagtggaagacaggcagagtgcaccgtatcgagggagaacttcgattctgcgggatggcatcactgcagggaaggctgctctccgaatacacaacgtcacagcctctgacagtggaaagtacttgtgttatttccaagatggtgacttctatgaaaaagccctggtggagctgaaggttgcagcactgggttctaatcttcacgtcgaagtgaagggttatgaggatggagggatccatctggagtgcaggtccaccggctggtacccccaaccccaaatacagtggagcaacgccaagggagagaacatcccagctgtggaagcacctgtggttgcagatggagtgggcctatatgaagtagcagcatctgtgatcatgagaggcggctccggggagggtgtatcctgcatcatcagaaattccctcctcggcctggaaaagacagccagcatttccatcgcagaccccttcttcaggagcgcccagccctggatcgcagccctggcagggaccctgcctatcttgctgctgcttctcgccggagccagttacttcttgtggagacaacagaaggaaataactgctctgtccagtgagatagaaagtgagcaagagatgaaagaaatgggatatgctgcaacagagcgggaaataagcctaagagagagcctccaggaggaactcaagaggaaaaaaatccagtacttgactcgtggagaggagtcttcgtccgataccaataagtcagcctgatgctctaatggaaaaatggccctcttcaagcctgggcctcccattggccaaacacagcagcaaaccagaggacaagggagcccagtggcactgtccatagaggacagattcctggggtccagaagagggtggagaaagctgaaggctggagagtgaatctagggcatataaggccccacacagagcccagcacagagacggccttgcagctatcaggaagatgaggagcttccttcatggcctgctgtgggctgagt

SEQ ID NO: 75536 - DNA, 1149 bp, Artificial Sequence
  derived and/or modified sequence
tatttgctttctctttttcctttcttccggatgagaggctaagccataatagaaagaatggagaattattgattgaccgtctttattctgtgggctctgattctccaatgggaataccaagggatggttttccatactggaacccaaaggtaaagacactcaaggacagacatttttggcagagcatagatgaaaatggcaagttccctggctttccttctgctcaactttcatgtctccctcctcttggtccagctgctcactccttgctcagctcagttttctgtgcttggaccctctgggcccatcctggccatggtgggtgaagacgctgatctgccctgtcacctgttcccgaccatgagtgcagagaccatggagctgaagtgggtaagttccagcctaaggcaggtggtgaacgtgtatgcagatggaaaggaagtggaagacaggcagagtgcaccgtatcgagggagaacttcgattctgcgggatggcatcactgcagggaaggctgctctccgaatacacaacgtcacagcctctgacagtggaaagtacttgtgttatttccaagatggtgacttctatgaaaaagccctggtggagctgaaggttgcagcactgggttctaatcttcacgtcgaagtgaagggttatgaggatggagggatccatctggagtgcaggtccaccggctggtacccccaaccccaaatacagtggagcaacgccaagggagagaacatcccagctgtggaagcacctgtggttgcagatggagtgggcctatatgaagtagcagcatctgtgatcatgagaggcggctccggggagggtgtatcctgcatcatcagaaattccctcctcggcctggaaaagacagccagcatttccatcgcagaccccttcttcaggagcgcccagccctggatcgcagccctggcagggaccctgcctatcttgctgctgcttctcgccggagccagttacttcttgtggagacaacagaaggaaataactgctctgtccagtgagatagaaagtgagcaagagatgaaagaaatgggatatgctgcaacagagcgggaaataagcctaagagagagcctccaggaggaactcaagaggaaaaaatccagtacttga

SEQ ID NO: 75537 - DNA, 1005 bp, Artificial Sequence
  derived and/or modified sequence
atgaagatggccagcagcctggccttcctgctgctgaacttccacgtgagcctgctgctggtgcagctgctgaccccctgcagcgcccagttcagcgtgctgggccccagcggccccatcctggccatggtgggcgaggacgccgacctgccctgccacctgttccccaccatgagcgccgagaccatggagctgaagtgggtgagcagcagcctgagacaggtggtgaacgtgtacgccgacggcaaggaggtggaggacagacagagcgccccctacagaggcagaaccagcatcctgagagacggcatcaccgccggcaaggccgccctgagaatccacaacgtgaccgccagcgacagcggcaagtacctgtgctacttccaggacggcgacttctacgagaaggccctggtggagctgaaggtggccgccctgggcagcaacctgcacgtggaggtgaagggctacgaggacggcggcatccacctggagtgcagaagcaccggctggtacccccagccccagatccagtggagcaacgccaagggcgagaacatccccgccgtggaggcccccgtggtggccgacggcgtgggcctgtacgaggtggccgccagcgtgatcatgagaggcggcagcggcgagggcgtgagctgcatcatcagaaacagcctgctgggcctggagaagaccgccagcatcagcatcgccgaccccttcttcagaagcgcccagccctggatcgccgccctggccggcaccctgcccatcctgctgctgctgctggccggcgccagctacttcctgtggagacagcagaaggagatcaccgccctgagcagcgagatcgagagcgagcaggagatgaaggagatgggctacgccgccaccgagagagagatcagcctgagagagagcctgcaggaggagctgaagagaaagaagatccagtacctgaccagaggcgaggagagcagcagcgacaccaacaagagcgcctag

SEQ ID NO: 75538 - DNA, 960 bp, Artificial Sequence
  derived and/or modified sequence
atgaagatggccagcagcctggccttcctgctgctgaacttccacgtgagcctgctgctggtgcagctgctgaccccctgcagcgcccagttcagcgtgctgggccccagcggccccatcctggccatggtgggcgaggacgccgacctgccctgccacctgttccccaccatgagcgccgagaccatggagctgaagtgggtgagcagcagcctgagacaggtggtgaacgtgtacgccgacggcaaggaggtggaggacagacagagcgccccctacagaggcagaaccagcatcctgagagacggcatcaccgccggcaaggccgccctgagaatccacaacgtgaccgccagcgacagcggcaagtacctgtgctacttccaggacggcgacttctacgagaaggccctggtggagctgaaggtggccgccctgggcagcaacctgcacgtggaggtgaagggctacgaggacggcggcatccacctggagtgcagaagcaccggctggtacccccagccccagatccagtggagcaacgccaagggcgagaacatccccgccgtggaggcccccgtggtggccgacggcgtgggcctgtacgaggtggccgccagcgtgatcatgagaggcggcagcggcgagggcgtgagctgcatcatcagaaacagcctgctgggcctggagaagaccgccagcatcagcatcgccgaccccttcttcagaagcgcccagccctggatcgccgccctggccggcaccctgcccatcctgctgctgctgctggccggcgccagctacttcctgtggagacagcagaaggagatcaccgccctgagcagcgagatcgagagcgagcaggagatgaaggagatgggctacgccgccaccgagagagagatcagcctgagagagagcctgcaggaggagctgaagagaaagaagagcagcacctag

SEQ ID NO: 75539 - protein, 311 aa, Artificial Sequence
  derived and/or modified sequence
MGIPRAQFSVLGPSGPILAMVGEDADLPCHLFPTMSAETMELKWVSSSLRQVVNVYADGKEVEDRQSAPYRGRTSILRDGITAGKAALRIHNVTASDSGKYLCYFQDGDFYEKALVELKVAALGSNLHVEVKGYEDGGIHLECRSTGWYPQPQIQWSNAKGENIPAVEAPVVADGVGLYEVAASVIMRGGSGEGVSCIIRNSLLGLEKTASISIADPFFRSAQPWIAALAGTLPILLLLLAGASYFLWRQQKEITALSSEIESEQEMKEMGYAATEREISLRESLQEELKRKKIQYLTRGEESSSDTNKSA

SEQ ID NO: 75540 - DNA, 936 bp, Artificial Sequence
  derived and/or modified sequence
atgggcatacctagggctcagttttccgttctgggcccaagcgggcccatccttgctatggtaggggaggatgccgacctcccctgccacttgttcccaaccatgagcgccgagaccatggagttaaaatgggtgagctctagccttagacaggtggtcaacgtctatgcagacggaaaggaggtggaagaccgccagtctgctccatatagagggcggacaagtatcttacgggacggcatcaccgcggggaaagccgccttgcggatccataacgtcactgccagcgattctggcaagtatctgtgttatttccaagatggcgatttttacgaaaaggcactagtggaactgaaagtagcagccctcggatccaacctgcatgtggaagtcaagggctacgaagatggcggaatccaccttgaatgccgttccactggctggtatccacaaccgcagattcagtggagtaatgctaaaggtgagaatattcctgccgtggaggctccagtagtggcagacggagtgggcctctatgaggtggcggccagcgtgattatgcgaggggggtcaggagaaggagtctcatgtatcataagaaatagccttctgggcctggagaagacggcctccatcagcatcgccgacccgttctttagatcagcccagccttggatcgccgcgctggccgggacgcttcccattctgctgctgcttctagccggcgcaagctacttcctatggcggcaacagaaagaaatcaccgctctgtcctcagagatcgaatctgaacaggagatgaaggagatgggatatgctgctaccgaaagggagattagcctgagggagagcctacaggaagaacttaagagaaaaaaaattcagtaccttacaaggggcgaagagagctcatcagatacgaacaaatccgcctag

SEQ ID NO: 75541 - DNA, 936 bp, Artificial Sequence
  derived and/or modified sequence
atgggcatcccccgggcccagttctctgtgctgggccccagcggccccatcctggccatggtgggagaagatgctgacctgccctgccacctgttccccaccatgtctgctgagaccatggagctgaagtgggtgagcagcagcctgcggcaggtggtgaatgtgtatgcagatggcaaggaggtggaggaccggcagagcgccccctaccggggccgcaccagcatcctgagagatggcatcacagctgggaaggccgccctgcgcatccacaacgtgacagccagtgacagcggcaagtacctgtgctacttccaggatggagacttctatgagaaggccctggtggagctgaaggtggccgccctgggcagcaacctgcacgtggaggtgaagggctatgaagatggcggcatccacctggagtgccgcagcacaggctggtacccccagccccagatccagtggagcaatgccaagggggagaacatcccagctgtggaggcccctgtggtggctgatggagtgggcctgtatgaggtggccgccagcgtcatcatgagaggaggcagcggggagggcgtgtcctgcatcatccggaacagcctgctgggcctggagaagacagccagcatcagcattgctgaccccttcttccgcagcgcccagccctggattgctgccctggccggcaccctgcccatcctgctgctgctgctggccggggccagctacttcctgtggaggcagcagaaggagatcacagccctgagcagcgagattgaaagtgagcaggagatgaaggagatgggctatgctgccacagagcgggagatcagcctgcgggagagcctgcaggaggagctgaagaggaagaagatccagtacctgaccagaggagaggagagcagcagtgacaccaacaagagcgcctag

SEQ ID NO: 75542 - DNA, 936 bp, Artificial Sequence
  derived and/or modified sequence
atgggcatcccccgggcccagttcagcgtgctgggccccagcggccctattctggcaatggtcggagaggatgcagatctgccatgccacctcttccctacaatgagtgccgagacaatggagctgaaatgggtgagtagctctctccgccaggtcgttaatgtctacgctgatggcaaggaggtcgaggacaggcagagtgccccgtaccgcggtcgcacctcaattctgagagatggcataaccgcgggaaaagctgctctccgaatacacaacgtcactgccagtgatagcgggaaatacctgtgttatttccaagatggagacttctacgaaaaggcgctggttgagttgaaagtcgccgcactcgggtccaacctgcacgttgaagtcaaaggctatgaggatggaggtatccacctggagtgtcggagcactggttggtacccacagccacagatccagtggagcaacgctaagggagaaaatattcccgcagttgaggctccagtggtcgccgacggcgtaggcctctatgaagttgccgcgtccgtcatcatgaggggcggaagtggagagggcgtgagttgtattatacggaatagcctgttgggcctggagaaaactgcctcaattagtattgctgatccatttttccgcagcgcccagccctggatcgctgccctggccggaacactccccatccttctattgctcctggctggggccagctacttcttatggaggcagcagaaggagataaccgcactctcatccgagattgaatctgaacaagaaatgaaagagatgggctacgccgcgaccgagagagagatatcactcagagaaagtctgcaggaggaactgaagcgtaagaagatccagtacctgacgcgtggcgaggagagcagttcagacacaaacaagtcagcatag

SEQ ID NO: 75543 - DNA, 936 bp, Artificial Sequence
  derived and/or modified sequence
atgggtattccacgcgctcagttctccgtgttgggacctagcggccctatcttggcaatggtgggcgaggatgcagacttaccttgccacttgttccccaccatgtcagcggagaccatggaactgaaatgggtctccagctctctgcgccaggttgtgaatgtctacgccgatggcaaagaagtggaggacagacagtcagctccatatagaggtagaacaagcatcttgagagacggaattacggccggtaaagcggcactgagaatccacaatgtgaccgcctcagacagtgggaaatacctctgctatttccaggacggggacttttacgagaaggctcttgtagagctcaaagtggccgcactgggctcaaatctccacgtggaggtgaagggatatgaagacggcggtatccatctcgagtgcagatcaaccggatggtacccccagccacagatccagtggagcaatgccaaaggggagaacattcccgcagtggaagcacctgtcgtggcggatggggtgggactgtatgaagtcgctgcttccgtaattatgcgcggtggatcaggagagggcgtcagctgcattattcgaaattccttattgggcctcgagaaaacagcatcaattagtattgcggaccctttcttcaggtccgctcagccttggatcgcagcattggccggaacacttcctatcctgttactacttctggcaggcgctagctatttcctgtggcggcagcagaaggagatcacagccctctcatctgaaattgagtcagaacaagaaatgaaagagatgggatacgcagctacggagcgagagatctctctgcgcgaatccctccaagaagaactgaagagaaagaaaatccagtacctgacgaggggcgaggaaagtagttccgataccaacaaaagcgcttag

SEQ ID NO: 75544 - DNA, 1225 bp, Artificial Sequence
  derived and/or modified sequence
cctttcttccggatgagaggctaagccataatagaaagaatggagaattattgattgaccgtctttattctgtgggctctgattctccaatgggaataccaagggctcagttttctgtgcttggaccctctgggcccatcctggccatggtgggtgaagacgctgatctgccctgtcacctgttcccgaccatgagtgcagagaccatggagctgaagtgggtaagttccagcctaaggcaggtggtgaacgtgtatgcagatggaaaggaagtggaagacaggcagagtgcaccgtatcgagggagaacttcgattctgcgggatggcatcactgcagggaaggctgctctccgaatacacaacgtcacagcctctgacagtggaaagtacttgtgttatttccaagatggtgacttctatgaaaaagccctggtggagctgaaggttgcagcactgggttctaatcttcacgtcgaagtgaagggttatgaggatggagggatccatctggagtgcaggtccaccggctggtacccccaaccccaaatacagtggagcaacgccaagggagagaacatcccagctgtggaagcacctgtggttgcagatggagtgggcctatatgaagtagcagcatctgtgatcatgagaggcggctccggggagggtgtatcctgcatcatcagaaattccctcctcggcctggaaaagacagccagcatttccatcgcagaccccttcttcaggagcgcccagccctggatcgcagccctggcagggaccctgcctatcttgctgctgcttctcgccggagccagttacttcttgtggagacaacagaaggaaataactgctctgtccagtgagatagaaagtgagcaagagatgaaagaaatgggatatgctgcaacagagcgggaaataagcctaagagagagcctccaggaggaactcaagaggaaaaaaatccagtacttgactcgtggagaggagtcttcgtccgataccaataagtcagcctgatgctctaatggaaaaatggccctcttcaagcctggtgaggaaatgcttcagatgaggctccaccttgttaaataaattggatgtatggaaaaatagactgcagaaaaggggaactcatttagctcacgagtggtcgagtgaagattgaaaattaacctctgagggccagcacagcagctcatgcctgtaatcctagcact

SEQ ID NO: 75545 - DNA, 1512 bp, Artificial Sequence
  derived and/or modified sequence
ataatagaaagaatggagaattattgattgaccgtctttattctgtgggctctgattctccaatgggaataccaagggatggttttccatactggaacccaaaggtaaagacactcaaggacagacatttttggcagagctcagttttctgtgcttggaccctctgggcccatcctggccatggtgggtgaagacgctgatctgccctgtcacctgttcccgaccatgagtgcagagaccatggagctgaagtgggtaagttccagcctaaggcaggtggtgaacgtgtatgcagatggaaaggaagtggaagacaggcagagtgcaccgtatcgagggagaacttcgattctgcgggatggcatcactgcagggaaggctgctctccgaatacacaacgtcacagcctctgacagtggaaagtacttgtgttatttccaagatggtgacttctatgaaaaagccctggtggagctgaaggttgcagcactgggttctaatcttcacgtcgaagtgaagggttatgaggatggagggatccatctggagtgcaggtccaccggctggtacccccaaccccaaatacagtggagcaacgccaagggagagaacatcccagctgtggaagcacctgtggttgcagatggagtgggcctatatgaagtagcagcatctgtgatcatgagaggcggctccggggagggtgtatcctgcatcatcagaaattccctcctcggcctggaaaagacagccagcatttccatcgcagaccccttcttcaggagcgcccagccctggatcgcagccctggcagggaccctgcctatcttgctgctgcttctcgccggagccagttacttcttgtggagacaacagaaggaaataactgctctgtccagtgagatagaaagtgagcaagagatgaaagaaatgggatatgctgcaacagagcgggaaataagcctaagagagagcctccaggaggaactcaagaggaaaaaaatccagtacttgactcgtggagaggagtcttcgtccgataccaataagtcagcctgatgctctaatggaaaaatggccctcttcaagcctggtgaggaaatgcttcagatgaggctccaccttgttaaataaattggatgtatggaaaaatagactgcagaaaaggggaactcatttagctcacgagtggtcgagtgaagattgaaaattaacctctgagggccagcacagcagctcatgcctgtaatcctagcactttggaaggctgaggagggcggatcacaaggtcaggagatcaagaccatcctggctaacacggtgaaaccccgtctctactaaaaatacaaaaaataaaaaattagccgggcatggtgacgggcacctgtagtcccagctactcgggaggctgaggcaggagaatggcatgaacccggaaggcagagcttgcagtgagccgagatcacgccactgcactccagcctgggagacagagcgagactctgtctcaag

SEQ ID NO: 75546 - DNA, 936 bp, Artificial Sequence
  derived and/or modified sequence
atgggcatccccagagcccagttcagcgtgctgggccccagcggccccatcctggccatggtgggcgaggacgccgacctgccctgccacctgttccccaccatgagcgccgagaccatggagctgaagtgggtgagcagcagcctgagacaggtggtgaacgtgtacgccgacggcaaggaggtggaggacagacagagcgccccctacagaggcagaaccagcatcctgagagacggcatcaccgccggcaaggccgccctgagaatccacaacgtgaccgccagcgacagcggcaagtacctgtgctacttccaggacggcgacttctacgagaaggccctggtggagctgaaggtggccgccctgggcagcaacctgcacgtggaggtgaagggctacgaggacggcggcatccacctggagtgcagaagcaccggctggtacccccagccccagatccagtggagcaacgccaagggcgagaacatccccgccgtggaggcccccgtggtggccgacggcgtgggcctgtacgaggtggccgccagcgtgatcatgagaggcggcagcggcgagggcgtgagctgcatcatcagaaacagcctgctgggcctggagaagaccgccagcatcagcatcgccgaccccttcttcagaagcgcccagccctggatcgccgccctggccggcaccctgcccatcctgctgctgctgctggccggcgccagctacttcctgtggagacagcagaaggagatcaccgccctgagcagcgagatcgagagcgagcaggagatgaaggagatgggctacgccgccaccgagagagagatcagcctgagagagagcctgcaggaggagctgaagagaaagaagatccagtacctgaccagaggcgaggagagcagcagcgacaccaacaagagcgcctag

SEQ ID NO: 75547 - DNA, 879 bp, Artificial Sequence
  derived and/or modified sequence
atggtgggggaggacgcagaccttccctgccacctcttcccaacgatgagcgcggaaaccatggaactgaaatgggtttcctctagtctccgccaggtggtaaacgtgtatgccgatgggaaagaggtggaagaccgccagtctgcaccttacagagggcggacctctattctgagagacggcattacagcagggaaagctgcgctgaggattcataacgtcacggctagtgactccggcaagtacctgtgttacttccaagacggcgacttttacgaaaaagcattggtggaattgaaggtcgcagccctgggctccaacctccatgtggaagttaagggttatgaggacggagggatccacctcgaatgtcggtccacaggctggtacccccagccacagattcagtggtccaacgcaaagggcgagaacattcctgctgttgaggccccagtggttgcggatggagtgggcctgtacgaagtcgccgcctcggtaattatgagggggggctcaggtgagggtgtttcatgcataattaggaactctcttttgggactagaaaagaccgcctctatatctattgcggaccccttcttcagatctgcacagccctggattgcagccttggccgggaccttgcccatcttgcttctgctgttagccggagcctcttattttctgtggagacagcagaaggagattactgcgctgtcgtctgagatcgagagtgaacaggaaatgaaggagatggggtacgctgctactgaacgagaaatctcactacgcgagagtctccaggaggaactgaaacgaaagaagatccagtacctgacacgcggggaggaatcgagttccgacactaataaatctgcatag

SEQ ID NO: 75548 - DNA, 879 bp, Artificial Sequence
  derived and/or modified sequence
atggtgggggaggatgctgacctgccctgccacctgttccccaccatgtctgctgagaccatggagctgaagtgggtgagcagcagcctgcggcaggtggtgaatgtgtatgcagatggcaaggaggtggaggaccggcagagcgccccctaccggggccgcaccagcatcctgagagatggcatcacagctgggaaggccgccctgcgcatccacaacgtgacagccagtgacagcggcaagtacctgtgctacttccaggatggagacttctatgagaaggccctggtggagctgaaggtggccgccctgggcagcaacctgcacgtggaggtgaagggctatgaagatggcggcatccacctggagtgccgcagcacaggctggtacccccagccccagatccagtggagcaatgccaagggggagaacatcccagctgtggaggcccctgtggtggctgatggagtgggcctgtatgaggtggccgccagcgtcatcatgaggggcggcagcggggagggcgtgtcctgcatcatccggaacagcctgctgggcctggagaagacagccagcatcagcattgctgaccccttcttccgcagcgcccagccctggattgctgccctggccggcaccctgcccatcctgctgctgctgctggccggggccagctacttcctgtggaggcagcagaaggagatcacagccctgagcagcgagattgagagcgagcaggagatgaaggagatgggctacgccgccacagagcgggagatcagcctgcgggagagcctgcaggaggagctgaagaggaagaagatccagtacctgaccagaggagaggagagcagcagtgacaccaacaagagcgcctag

SEQ ID NO: 75549 - DNA, 879 bp, Artificial Sequence
  derived and/or modified sequence
atggtgggcgaggacgccgacctgccctgccacctgttccccaccatgagtgcagaaaccatggaattaaaatgggtgtcgagctccctacgccaggttgtgaatgtgtacgcagacggcaaagaggtagaggaccggcagtctgccccttatagaggccgaaccagcattctgcgggacggcatcaccgccggtaaggccgctctgagaattcacaatgtgaccgcaagcgattctggcaaatacctctgttattttcaggatggtgacttttatgagaaagcgctggttgaactgaaagtggcggcactgggcagcaacttgcacgtcgaggtaaaggggtatgaagatggcggcatccacctagagtgccgcagtaccggatggtatcctcagccacagattcagtggtctaatgctaaaggggagaacatccctgctgtagaagccccagtggtggctgacggtgttgggttgtacgaggttgcggcttcagttataatgagaggcggcagcggcgaaggggtgtcctgtatcatacggaattctctacttggacttgagaagactgcgagtatttccatcgctgatccctttttccggagcgcgcaaccatggatagctgcccttgccgggacactgcctatcctcctcctcctgttagccggggcttcctactttctctggcgccagcaaaaggaaattacagcactctcttccgaaattgagtcagaacaagagatgaaggagatgggctacgcagccacggaacgggaaattagtctccgcgagtcactgcaggaggagctcaagaggaaaaagatccaatacttaacccgtggggaggaaagctcctcagatactaataaaagtgcatag

SEQ ID NO: 75550 - DNA, 879 bp, Artificial Sequence
  derived and/or modified sequence
atggtgggcgaggatgctgatcttccctgtcatctgtttcctacaatgtcagctgagacaatggaactgaagtgggtctcctcttccctgaggcaggtggtgaatgtctacgccgatgggaaggaggtggaagacagacaaagcgctccttatagaggtagaacttccattctgagggatggcattaccgctgggaaagccgctctgcgcatacataatgtgacggcttccgactctggcaagtacttatgctactttcaggacggagacttttacgagaaggctctagtggagctgaaggtcgccgctctcggctctaaccttcacgtggaggtgaagggctacgaagacgggggaatccacttagagtgcagatcaaccggttggtatcctcagccccagatccaatggagcaatgctaagggcgaaaacatcccagcagttgaggcaccagtcgttgcggatggggtggggctgtacgaggtcgcagcatctgtcattatgagagggggttctggagaaggcgtgtcatgcatcatcaggaattccttgttgggcctcgagaagacagcctccatttctatagccgatcctttcttcaggtctgcacaaccctggattgcagccttagctggaacactacccatacttcttctgctcctggctggagcttcctactttctgtggcggcagcagaaggaaataactgccctgagcagtgagatcgaatccgaacaggagatgaaagagatggggtacgcagccacagaaagggaaatcagtttgcgggagagcttgcaagaggaactcaaaaggaagaaaatccagtacttaactcgaggagaagaatcttctagcgacaccaataagagcgcctag

SEQ ID NO: 75551 - DNA, 879 bp, Artificial Sequence
  derived and/or modified sequence
atggtgggcgaggacgccgacctgccctgccacctgttccccaccatgagcgccgagaccatggagctgaagtgggtgagcagcagcctgagacaggtggtgaacgtgtacgccgacggcaaggaggtggaggacagacagagcgccccctacagaggcagaaccagcatcctgagagacggcatcaccgccggcaaggccgccctgagaatccacaacgtgaccgccagcgacagcggcaagtacctgtgctacttccaggacggcgacttctacgagaaggccctggtggagctgaaggtggccgccctgggcagcaacctgcacgtggaggtgaagggctacgaggacggcggcatccacctggagtgcagaagcaccggctggtacccccagccccagatccagtggagcaacgccaagggcgagaacatccccgccgtggaggcccccgtggtggccgacggcgtgggcctgtacgaggtggccgccagcgtgatcatgagaggcggcagcggcgagggcgtgagctgcatcatcagaaacagcctgctgggcctggagaagaccgccagcatcagcatcgccgaccccttcttcagaagcgcccagccctggatcgccgccctggccggcaccctgcccatcctgctgctgctgctggccggcgccagctacttcctgtggagacagcagaaggagatcaccgccctgagcagcgagatcgagagcgagcaggagatgaaggagatgggctacgccgccaccgagagagagatcagcctgagagagagcctgcaggaggagctgaagagaaagaagatccagtacctgaccagaggcgaggagagcagcagcgacaccaacaagagcgcctag

SEQ ID NO: 75552 - DNA, 1707 bp, Artificial Sequence
  derived and/or modified sequence
atgaagcacttcctacaaaagctgatctcccagctgatggactgttgcgtggatatcaagagcaaggaggaggaaagtgtccacgtcacgcagcggaagactcattatagcatggactctctgtcaagctggtatatgactgtcacccaaaagaccgatccaaaaatgttgtctaagaaacggacaaccagcagccaatggcaatcacctccagtggtagtgatcctcaaagatatggagtctttcgccacaaaagttctgcaagacttcattattatttcttctcagcaccttcacgaattccctttgattctgatcttcgggatagccacatccccaattatcatacataggctattaccccatgcagtgagttcattattatgcattgagctgttccagtccctgtcttgtaaggaacatctaactacagtgctggacaagctcctgcttacaacccagttcccctttaagattaatgagaaagtgctccaagtgttaactaacattttcctgtatcatgacttttccgtgcagaactttattaaaggccttcagttgtctctgctggaacatttctattcccagcccctcagcgtcctgtgttgcaatttgcctgaggcaaagcgcaggatcaatttcctgagcaataaccagtgtgagaacattagacggctgccttcattccgcaggtatgtggaaaagcaggcatccgaaaaacaagtggccctgctcaccaacgaacggtacctaaaagaagagacacagctgctgctcgaaaacctgcatgtctatcacatgaactattttctggttcttaggtgcctgcataaattcacctcctcgctcccaaagtatccgctgggccgccaaatccgtgagctatattgcacttgccttgagaagaacatatgggacagtgaggaatatgcaagcgtgctgcaactgctccggatgctcgcaaaggacgagcttatgacaatcctggagaaatgcttcaaggtctttaaatcttactgcgagaaccatctaggctccacagcaaagaggatcgaggagttcttagctcagtttcagtcacttgatgaaactaaggaagaggaggatgcctccggcagccagcctaagggcctgcagaaaacagatctataccacctgcagaagtctttactggagatgaaagagttgcgacgatcgaaaaaacagaccaaatttgaggtactccgcgaaaacgtggtgaatttcatcgactgtttggttagggagtacctgcttccacctgagactcagcccctccatgaggtggtttacttcagcgcagcgcacgcactgcgcgagcacctaaacgcggcccctcggattgcactgcatacagccctcaataacccttactattatctcaaaaatgaggccctcaaatccgaggagggttgtatacctaacatcgcccctgatatctgtatcgcatacaagctacacctggagtgttcacggctgataaacctggtcgactggagcgaagctttcgccactgtcgtgactgctgccgagaaaatggacgccaacagcgccacctcagaggaaatgaatgaaatcattcacgctcgttttatcagggctgtgagtgaacttgagctgctggggtttatcaaacccaccaagcaaaaaactgaccacgttgcgaggctcacctggggcggctgttag

SEQ ID NO: 75553 - DNA, 1707 bp, Artificial Sequence
  derived and/or modified sequence
atgaagcacttcctgcagaagctgatcagccagctgatggactgctgcgtggacatcaagagcaaggaggaggagagcgtgcacgtgacccagaggaagacccactacagcatggacagcctgagctcctggtacatgacagtgacccagaagacagaccccaagatgctgagcaagaagaggaccaccagcagccagtggcagagcccccctgtggtggtgatcctgaaggacatggagagctttgccaccaaggtgctgcaggacttcatcatcatcagcagccagcacctgcacgagttccccctcatcctgatctttggaattgccaccagccccatcatcatccaccggctgctgccccatgctgtgagcagcctgctgtgcatcgagctgttccagagcctgagctgcaaggagcacctgaccaccgtgctggacaagctgctgctgaccacccagttccccttcaagatcaatgagaaggtgctgcaggtgctgaccaacatcttcctgtaccatgacttctctgtgcagaacttcatcaagggcctgcagctgagcctgctggagcacttctacagccagcccctgtctgtgctgtgctgcaacctgcctgaggccaagaggcgcatcaacttcctgagcaacaaccagtgtgagaacatccggcggctgcccagcttccgccgctacgtggagaagcaggccagcgagaagcaggtggccctgctgaccaatgaaagatacctgaaggaggagacccagctgctgctggagaacctgcacgtgtaccacatgaactacttcctggtgctgcgctgcctgcacaagttcaccagcagcctgcccaagtaccccctgggccggcagatccgggagctgtactgcacctgcctggagaagaacatctgggacagcgaggagtatgcctctgtgctgcagctgctgaggatgctggccaaggatgagctgatgaccatcctggagaagtgcttcaaggtgttcaagagctactgtgagaaccacctgggcagcacagccaagagaattgaggagttcctggcccagttccagagcctggatgagaccaaggaggaggaggatgccagcggcagccagcccaagggcctgcagaagacagacctgtaccacctgcagaagagcctgctggagatgaaggagctgcggcgcagcaagaagcagaccaagtttgaggtgctgcgggagaatgtggtgaacttcatcgactgcctggtgcgggagtacctgctgcccccagagacccagcccctgcacgaggtggtgtacttctctgctgcccacgccctgcgggagcacctgaatgctgccccccgcatcgccctgcacacagccctgaacaacccctactactacctgaagaatgaggccctgaagtctgaggagggctgcatccccaacatcgccccagacatctgcatcgcctacaagctgcacctggagtgcagccgcctcatcaacctggtggactggagcgaggcctttgccaccgtggtgacagctgctgagaagatggatgccaacagcgccaccagcgaggagatgaatgagatcatccacgcccgcttcatccgggctgtgtctgagctggagctgctgggcttcatcaagcccaccaagcagaagacagaccacgtggcccggctgacctggggcggctgctag

SEQ ID NO: 75554 - DNA, 1707 bp, Artificial Sequence
  derived and/or modified sequence
atgaagcacttcctgcagaagctgatcagccagctgatggactgctgcgtcgatatcaaaagtaaggaagaagagtcagtgcacgtgacacagcgaaaaactcattacagtatggactcactttcgtcctggtacatgactgtgacccagaaaacggatccaaaaatgttgagcaagaagaggacaaccagctcacaatggcaatcaccgcctgtcgtggtgatactgaaggacatggagtcattcgccacgaaagtactccaagatttcattatcatatcgtctcagcatctccatgaatttcccctaattctgatattcgggattgccacgtctccaattataatccatagattgctgccccatgctgtgagcagtctcctttgcatcgagctgttccaatcactctcctgcaaagagcatctgacaacggtacttgataaattactgttgaccactcagtttccttttaagatcaatgagaaagtactccaggtcctcacaaatatcttcctctaccatgacttctcagtccagaattttatcaaaggccttcagctgtcactgctggagcatttttactcacagccgcttagtgtcctgtgttgtaatctgcccgaggcaaagcgccgcattaattttttgagtaataaccagtgtgagaacatccgacggctcccctctttccgtcgctatgttgagaagcaggccagtgagaaacaggtggccctattaaccaacgaacggtacctcaaggaggaaacacagctgcttctggagaatctacacgtgtaccacatgaactattttctggttctcagatgcctccacaaatttacttcaagtctccctaagtaccctttaggccggcaaattagggagctgtactgtacatgcctggaaaaaaatatctgggacagtgaggagtatgccagcgtgctgcaacttctgaggatgctggctaaagacgaactgatgactattcttgaaaagtgttttaaagtattcaagagttattgtgagaatcacctcggctccacggctaaaagaatcgaagaattccttgcgcagttccagtcactcgatgaaactaaggaggaggaggacgcatccgggagccaaccaaagggcttacagaagactgacctataccatttgcagaagtctctgcttgagatgaaagaactccgcaggtcgaagaagcagactaaattcgaggttctaagggagaatgtggtcaattttatcgactgtcttgttcgggagtacctgttgccccccgagactcagcccctgcatgaagtcgtgtacttcagcgcagctcatgccttgcgggaacatttaaatgccgcacccaggatcgctcttcatactgccctaaataatccatattactacctcaagaacgaagccctcaaaagcgaagagggatgcataccaaatatcgccccagatatttgtattgcttacaaattgcatttggagtgtagccgcctgattaatctggtagattggagcgaggcatttgccacagtggtcactgccgctgaaaaaatggatgccaattccgctacatctgaggaaatgaatgagatcatacatgccaggttcatccgtgccgtcagtgagctggaactgctgggattcattaagcctaccaaacagaaaaccgaccacgtggctcgcctgacgtggggcggatgttag

SEQ ID NO: 75555 - DNA, 1707 bp, Artificial Sequence
  derived and/or modified sequence
atgaagcattttctccagaaactgatttctcagctgatggactgctgcgtggacatcaagagtaaagaagaggaaagtgttcatgtgacacagcgcaaaacacactattctatggattctctgtcttcctggtacatgactgtcacacaaaagacagacccaaagatgctaagtaagaagcgcaccacgagctctcaatggcagagccccccagtggtggtcatcctaaaggacatggaaagctttgctaccaaggtcctgcaggactttatcatcatcagtagtcagcatctgcatgagtttcctttgatcctcatattcggtattgctacttcacctataatcatacaccgattgctgccacatgcggtctcctccctgctgtgcatagagctcttccaatccctcagttgtaaggagcatttgacgacggtcctggataagctacttctgactacacagtttccttttaaaatcaatgaaaaagtgttgcaggtcctgacaaatatctttctgtaccacgatttcagtgtacagaactttattaaaggtctccagctgtctctgctggaacacttctactcccagcccctgagtgtgttgtgttgtaacctgcccgaggctaagcgtagaatcaattttctttcaaataaccagtgcgagaacattcggagactcccaagcttcagaaggtacgtggaaaagcaggcgagtgaaaaacaagtcgctttgctgactaacgagcgctacctgaaagaggaaacccagcttctgttggaaaacttacacgtgtatcacatgaattactttttggtcctacggtgtctgcataaattcactagttccctgccaaagtacccgttgggtcgtcagattagggagttgtactgcacctgcctggaaaagaacatctgggatagcgaagaatacgccagtgtgctgcagttgctgcgcatgcttgctaaagacgaactgatgactatactggagaaatgcttcaaagtgttcaaaagctactgtgaaaatcaccttggctcgactgccaaaagaatcgaggaattcctggcccagttccaatccctagatgagacgaaagaggaagaggacgcatcagggtcgcagccaaaagggctgcagaaaacagacctgtaccatctgcaaaaaagcctgctggaaatgaaggagctgcgaagaagcaagaaacagaccaaattcgaggtcttgcgagagaacgtagtcaatttcattgattgtctggtgcgggagtacctgttacctcccgaaacccagcctctgcatgaagtcgtatactttagtgccgctcacgcattgcgggagcacctcaatgctgctcctaggatcgctcttcatacggccttaaataacccatactattatctcaagaacgaagccctcaaaagcgaggaagggtgcataccaaacatcgctcctgacatatgtatcgcctataagctgcacctggaatgcagccggttaataaacttggtggactggtccgaggccttcgccacagtggtgactgccgctgaaaagatggacgcaaatagcgctacctcagaggaaatgaacgaaatcattcacgcacggtttatccgtgctgtcagcgaacttgagcttctcgggttcattaagcccaccaaacagaaaacagaccacgtggccaggctgacctggggaggctgttag

SEQ ID NO: 75556 - DNA, 1707 bp, Artificial Sequence
  derived and/or modified sequence
atgaagcacttcctgcagaagctgatcagccagctgatggactgctgcgtggacatcaagagcaaggaggaggagagcgtgcacgtgacccagagaaagacccactacagcatggacagcctgagcagctggtacatgaccgtgacccagaagaccgaccccaagatgctgagcaagaagagaaccaccagcagccagtggcagagcccccccgtggtggtgatcctgaaggacatggagagcttcgccaccaaggtgctgcaggacttcatcatcatcagcagccagcacctgcacgagttccccctgatcctgatcttcggcatcgccaccagccccatcatcatccacagactgctgccccacgccgtgagcagcctgctgtgcatcgagctgttccagagcctgagctgcaaggagcacctgaccaccgtgctggacaagctgctgctgaccacccagttccccttcaagatcaacgagaaggtgctgcaggtgctgaccaacatcttcctgtaccacgacttcagcgtgcagaacttcatcaagggcctgcagctgagcctgctggagcacttctacagccagcccctgagcgtgctgtgctgcaacctgcccgaggccaagagaagaatcaacttcctgagcaacaaccagtgcgagaacatcagaagactgcccagcttcagaagatacgtggagaagcaggccagcgagaagcaggtggccctgctgaccaacgagagatacctgaaggaggagacccagctgctgctggagaacctgcacgtgtaccacatgaactacttcctggtgctgagatgcctgcacaagttcaccagcagcctgcccaagtaccccctgggcagacagatcagagagctgtactgcacctgcctggagaagaacatctgggacagcgaggagtacgccagcgtgctgcagctgctgagaatgctggccaaggacgagctgatgaccatcctggagaagtgcttcaaggtgttcaagagctactgcgagaaccacctgggcagcaccgccaagagaatcgaggagttcctggcccagttccagagcctggacgagaccaaggaggaggaggacgccagcggcagccagcccaagggcctgcagaagaccgacctgtaccacctgcagaagagcctgctggagatgaaggagctgagaagaagcaagaagcagaccaagttcgaggtgctgagagagaacgtggtgaacttcatcgactgcctggtgagagagtacctgctgccccccgagacccagcccctgcacgaggtggtgtacttcagcgccgcccacgccctgagagagcacctgaacgccgcccccagaatcgccctgcacaccgccctgaacaacccctactactacctgaagaacgaggccctgaagagcgaggagggctgcatccccaacatcgcccccgacatctgcatcgcctacaagctgcacctggagtgcagcagactgatcaacctggtggactggagcgaggccttcgccaccgtggtgaccgccgccgagaagatggacgccaacagcgccaccagcgaggagatgaacgagatcatccacgccagattcatcagagccgtgagcgagctggagctgctgggcttcatcaagcccaccaagcagaagaccgaccacgtggccagactgacctggggcggctgctag

SEQ ID NO: 75557 - DNA, 1029 bp, Artificial Sequence
  derived and/or modified sequence
atgctggaaaattcgctttactcgccgacttgggaggggagtcagttttgggttaccgtccagagaaccgaagcagctgagaggtgcggactgcacggcagttacgttctcagggtcgaggctgaaagactaaccctactgaccgtgggtgcacagagccagatactcgagcccctcctcagttggccctacactctcctgaggcgctacggcagggacaaggttatgttttccttcgaggcgggtaggagatgcccaagcggcccgggaacattcacctttcaaaccgcccagggaaatgacatctttcaagcagtcgaaactgccatccatagacagaaagcccaaggcaaagccggccaaggccatgacgtactgagagcggattcccacgagggtgaggtcgctgaaggaaaactgcccagcccccctggtccacaggagctgctggacagcccccccgccctgtacgccgagcccctggatagccttcgcattgccccttgccctagccaggacagcctctattctgaccctctggattctacctccgctcaggccggcgagggggtgcagagaaaaaagccattgtattgggatttatacgagcatgcccagcagcagttgctgaaggccaagcttactgaccctaaagaggatcccatatatgacgagccagaaggtcttgccccggtccctccgcaaggactgtacgatctgcccagggagccaaaggatgcgtggtggtgccaggcacgcgttaaggaggaaggatatgaactgccatataatcccgctactgacgattacgccgtgccgcccccccgcagtaccaagcctctactagccccaaagccccaggggccggcatttcccgagcctggaactgcaactgggagtgggatcaagagccataactccgccctgtattcccaggttcaaaaatccggcgcatcagggtcatgggattgcggactctcccgggtgggcacagataagactggggtcaagagtgagggatcaacttag

SEQ ID NO: 75558 - DNA, 1029 bp, Artificial Sequence
  derived and/or modified sequence
atgctggagaacagcctgtacagccccacctgggagggcagccagttctgggtgacagtgcagaggacagaagctgctgagcgctgtggcctgcacggcagctatgtgctgcgggtggaggccgagcggctgaccctgctgactgtgggcgcccagagccagatcctggagcccctgctgtcctggccctacaccctgctgcggcgctatggccgggacaaggtgatgttctcctttgaagctggaagacgctgccccagcggccctggcaccttcaccttccagacagcccagggcaatgacatcttccaggccgtggagacagccatccaccggcagaaggcccagggcaaggccggccagggccatgatgtgctgcgggctgacagccatgaaggagaggtggccgagggcaagctgcccagccccccaggcccccaggagctgctggacagccccccagccctgtatgcagagcccctggacagcctgcgcatcgccccctgccccagccaggacagcctgtacagcgaccccctggacagcaccagcgcccaggccggggagggcgtgcagaggaagaagcccctgtactgggacctgtatgagcacgcccagcagcagctgctgaaggccaagctgacagaccccaaggaggaccccatctatgatgagcctgagggcctggcccctgtgcccccccagggcctgtatgacctgccccgggagcccaaggatgcctggtggtgccaggcccgggtgaaggaggagggctatgagctgccctacaacccagccacagatgattatgctgtgcccccacccaggagcaccaagcccctgctggcccccaagccccagggccctgccttccctgagcccggcacagccaccggcagcggcatcaagagccacaacagcgccctgtacagccaggtgcagaagagcggggccagcggctcctgggactgtggcctgagccgggtgggcacagacaagacaggagtgaagtctgagggcagcacctag

SEQ ID NO: 75559 - DNA, 1029 bp, Artificial Sequence
  derived and/or modified sequence
atgctggagaacagcctgtacagccccacctgggagggcagccagttctgggtgaccgttcagaggaccgaggccgccgagcggtgcgggttgcacgggtcctacgtgctgcgcgtcgaggctgaaaggctaacgctattgactgtcggcgcccagagccagatcttggagcccctcctttcatggccatacaccctgctgcgccggtacggccgggacaaggtcatgttttccttcgaggcagggcgcagatgtcctagtggccccgggacatttactttccagacagcacagggaaatgatattttccaagctgtagaaacagccatccaccgtcaaaaggctcagggaaaggctggtcagggccatgacgtcctgcgcgctgactctcacgaaggagaagtggcggaaggaaagttgcctagcccgcctggcccccaggaactgcttgactctcccccagcactgtatgcagagccactcgacagcctgagaattgccccctgcccctcgcaggactctctgtactctgatccccttgactcaacaagcgctcaggccggagagggcgtgcagagaaaaaagcccttatactgggacctctatgaacacgcccagcagcaactgctcaaggccaaactgactgatccaaaggaggatcctatttatgacgagcccgaaggtctggcaccagttccacctcagggtctgtacgacctgccaagggagcctaaagatgcctggtggtgtcaggccagagtgaaagaagaaggttacgaactaccctataatcctgcaactgacgattacgcggtccctccacctcgctctacaaaacccctcctggctcccaagccccaggggccagccttccccgagcctggaacagccaccggctcggggatcaaaagccataactctgcattgtactcacaagtgcaaaagagtggtgcctctggcagttgggattgtggcctttcaagagtgggtaccgataaaacaggcgtcaagtccgaaggctccacttag

SEQ ID NO: 75560 - DNA, 1029 bp, Artificial Sequence
  derived and/or modified sequence
atgctggagaacagcctgtactcaccaacgtgggaggggagccagttttgggtgaccgttcagcgtaccgaggctgccgaacggtgcggactgcacggatcctacgttttgagggtcgaggccgaacggctgacactcctgacagtcggcgcacaaagtcaaatactggagcccctgctgagctggccatacacgttgcttcgcagatatggaagggataaggttatgtttagcttcgaggccggtaggagatgtccttcaggcccaggtacatttaccttccagacagcccagggcaatgatattttccaggctgtggaaactgcaatccaccgccagaaggctcaagggaaagccggacagggacatgatgtgctccgcgctgactctcacgagggcgaagtggcagaggggaagctaccctctcctccgggaccacaggagctgctcgatagcccacccgctctttacgctgaaccattggacagcctgcgaatagctccttgtccgagccaggacagcctttactcagacccgctggattctacctctgcgcaggctggagaaggcgtacaacgaaaaaagcctctttactgggacctgtatgagcacgcacagcagcagcttctcaaggcaaaactgactgacccgaaagaagatcccatctatgacgaaccggaaggtctggcgccagtccccccacaagggctgtatgacctgccccgtgagcctaaagatgcctggtggtgccaggcacgggtgaaggaagagggatatgagctgccttacaaccctgccacggatgactacgcagttcctccccctagaagcacgaaaccactgttagcgcctaaacctcagggtccggctttccccgaacctgggactgccaccgggtctggtattaagagccataactctgccctgtatagccaagtacagaagagcggcgcaagtgggagctgggactgtgggctctccagagttggcacggacaagacaggagtcaagtcagaggggagtacctag

SEQ ID NO: 75561 - DNA, 1029 bp, Artificial Sequence
  derived and/or modified sequence
atgctggagaacagcctgtacagccccacctgggagggcagccagttctgggtgaccgtgcagagaaccgaggccgccgagagatgcggcctgcacggcagctacgtgctgagagtggaggccgagagactgaccctgctgaccgtgggcgcccagagccagatcctggagcccctgctgagctggccctacaccctgctgagaagatacggcagagacaaggtgatgttcagcttcgaggccggcagaagatgccccagcggccccggcaccttcaccttccagaccgcccagggcaacgacatcttccaggccgtggagaccgccatccacagacagaaggcccagggcaaggccggccagggccacgacgtgctgagagccgacagccacgagggcgaggtggccgagggcaagctgcccagcccccccggcccccaggagctgctggacagcccccccgccctgtacgccgagcccctggacagcctgagaatcgccccctgccccagccaggacagcctgtacagcgaccccctggacagcaccagcgcccaggccggcgagggcgtgcagagaaagaagcccctgtactgggacctgtacgagcacgcccagcagcagctgctgaaggccaagctgaccgaccccaaggaggaccccatctacgacgagcccgagggcctggcccccgtgcccccccagggcctgtacgacctgcccagagagcccaaggacgcctggtggtgccaggccagagtgaaggaggagggctacgagctgccctacaaccccgccaccgacgactacgccgtgcccccccccagaagcaccaagcccctgctggcccccaagccccagggccccgccttccccgagcccggcaccgccaccggcagcggcatcaagagccacaacagcgccctgtacagccaggtgcagaagagcggcgccagcggcagctgggactgcggcctgagcagagtgggcaccgacaagaccggcgtgaagagcgagggcagcacctag

SEQ ID NO: 75562 - protein, 536 aa, Artificial Sequence
  derived and/or modified sequence
MEDGLIKQIGENLIVPGGVKTIEAHSRMVIPGGIDVHTRFQMPDQGMTSADDFFQGTKAALAGGTTMIIDHVVPEPGTSLLAAFDQWREWADSKSCCDYSLHVDISEWHKGIQEEMEALVKDHGVNSFLVYMAFKDRFQLTDCQIYEVLSVIRDIGAIAQVHAENGDIIAEEQQRILDLGITGPEGHVLSRPEEVEAEAVNRAITIANQTNCPLYITKVMSKSSAEVIAQARKKGTVVYGEPITASLGTDGSHYWSKNWAKAAAFVTSPPLSPDPTTPDFLNSLLSCGDLQVTGSAHCTFNTAQKAVGKDNFTLIPEGTNGTEERMSVIWDKAVVTGKMDENQFVAVTSTNAAKVFNLYPRKGRIAVGSDADLVIWDPDSVKTISAKTHNSSLEYNIFEGMECRGSPLVVISQGKIVLEDGTLHVTEGSGRYIPRKPFPDFVYKRIKARSRLAELRGVPRGLYDGPVCEVSVTPKTVTPASSAKTSPAKQQAPPVRNLHQSGFSLSGAQIDDNIPRRTTQRIVAPPGGRANITSLG

SEQ ID NO: 75563 - DNA, 4552 bp, Artificial Sequence
  derived and/or modified sequence
actggcagacggacggacggacggcgaggaccctacccgagcccccgagccatggccgagagaaagcaatccgggaaggcggcagaggacgaagaggtccctgctttttttaaaaacctgggctccggcagccccaagccccggcagaaattctgtggcatgttctgcccggtggaagggtcctcggagaacaagaccatcgacttcgactcgctgtcggtgggccggggctcggggcaggtggtggctcagcagcgggacgtcgcccacttgggcccggacccgcagccgccgtactcgcggcagggccggcgcgccggcggagagccatctgttgaatcgggccggaaggtggagatccggagggcctcgggcaaagaagccctgcagaacatcaacgaccagagcgatcgtcttctgatcaaaggaggtaaaattgttaatgatgaccagtcgttctatgcagacatatacatggaagatgggttgatcaagcaaataggagaaaatctgattgtgccaggaggagtgaagaccatcgaggcccactcccggatggtgatccccggaggaattgacgtccacactcgtttccagatgcctgatcagggaatgacgtctgctgatgatttcttccaaggaaccaaggcggccctggctgggggaaccactatgatcattgaccacgttgttcctgagcctgggacaagcctgctcgctgcctttgaccagtggagggaatgggccgacagcaagtcctgctgtgactactctctgcatgtggacatcagtgagtggcataagggcatccaggaggagatggaagcgcttgtgaaggatcacggggtaaattccttcctcgtgtacatggctttcaaagatcgcttccagctaacggattgccagatttatgaagtactgagtgtgatccgggatattggcgccatagcccaagtccacgcagaaaatggcgacatcattgcagaggagcagcagaggatcctggatctgggcatcacgggccccgagggacatgtgctgagccgacctgaggaggtcgaggccgaagccgtgaatcgtgccatcaccatcgccaaccagaccaactgcccgctgtatatcaccaaggtgatgagcaaaagctctgctgaggtcatcgcccaggcacggaagaagggaactgtggtgtatggcgagcccatcactgccagcttgggaacggacggctcccattactggagcaagaactgggccaaggctgctgcctttgtcacctccccacccttgagccctgatccaaccactccagactttctcaactccttgctgtcctgtggagacctccaggtcacgggcagtgcccattgcacgtttaacactgcccagaaggctgtaggaaaggacaacttcaccctgattccggagggcaccaatggcactgaggagcggatgtccgtcatctgggacaaggctgtggtcactgggaagatggatgagaaccagtttgtggctgtgaccagcaccaatgcagccaaagtcttcaacctttacccccggaaaggccgcattgctgtgggatccgatgccgacctggtcatctgggaccccgacagcgttaaaaccatctctgccaagacacacaacagctctctcgagtacaacatctttgaaggcatggagtgccgcggctccccactggtggtcatcagccaggggaagattgtcctggaggacggcaccctgcatgtcaccgaaggctctggacgctacattccccggaagcccttccctgattttgtttacaagcgtatcaaggcaaggagcaggctggctgagctgagaggggttcctcgtggcctgtatgacggacctgtgtgtgaagtgtctgtgacgcccaagacagtcactccagcctcctcggccaagacgtctcctgccaagcagcaggccccacctgtccggaacctgcaccagtctggattcagtttgtctggtgctcagattgatgacaacattccccgccgcaccacccagcgtatcgtggcgccccccggtggccgtgccaacatcaccagcctgggctagagctcctgggctgtgccgtccactggggactggggatgggacacctgaggacattctgagacttctttcttccttcctttttttttttttgtttttttttttaagagcctgtgatagttactgtggagcagccagttcatggggtcccccttggggccccacaccccgtctctcaccaagagttactgattttgctcatccacttccctacacatctatgggtatcacacccaagactacccaccaagctcatacagggaaccacacccaacacttagacatgcgaacaagcagcccccagcgagggtctccttcgccttcaacctcctagtgtctgttagcatcttccttttcatggggggagggaagataaagtgaattgcccagagctgcctttttcttttctttttaaaaattttaagaagttttctttgtggggctggggaggggccggggtcagggagagtcttttttttttttttttttaaatactaaattggaacatttaattccatattaatacaaggggtttgaactggacatcctaatgatgcaattacgtcatcacccagctgattccgggtggttggcaaactcatcgtgtctgtcctgagaggctccacaatgcccacccgcatcgccattctgtagtcttcagggtcagctgttgataaaggggcaggcttgcgttattggcctagattttgctgcagattaaatcctttgaggattctcttctcttttaccatttttctgcgtgctctcactctctctttctctctctagctttttaattcatgaatattttcgtgtctgtctctctctctctctgtgtttcctccagcccttgtctcggagacggtgttttcctcccttgccccattatcttttcacctcccaggtctaccatttcatggtggtcgttgggtccgcctaaaggatttgagcgtttgccattgcaagcatagtgctgtgtcatcctggtccatgtaggactggtgctaaccacctgccatcatgaggatgtgtgctagagtgtgggaccctggccaagtgcaggaatgggccatgccgtctcacccacagtatcacacgtggaaccgcagacagggcccagaagctttagaggtatgaggctgcagaaccggagagattttcctctgtgcagtgctctctggctaaagtcacggtcaaacctaaacaccgagcctcattaacccaagtgaaccaaccaaagtcaccagttcagaagtgctaagctaataggagtctgacccgagggcctgctgcttcctggttaagtatcttttgagattctagaacacatgggagctttttattttcggggaaaaaccgtatttttttcttgtccaattatttctaaagacacactacatagaaagaggccctataaactcaaaaagtcattgggaaacttaaagtctattctactttgcaagaggagaaatgtgttttatgaacgatagatcacatcagaactcctgtggggaggaaaccttataaattaaacacatggcccccttagagaccacaggtgatgtctgtctccatccttccctctccttttctgtcacctttccccctagctggctcctttggacctacccctgtccttgctgacttgtgttgcattgtattccaaacgtgtttacaggttctcttaagcaatgttgtatttgcaggcttttctgaataccaaatctgctttttgtaaagcgtaaaaacatcacaaagtaggtcattccatcaccacccttgtctctctacacattttgcctttggggatctggttggggttttgggttttttgttgttgttgtttatttgttattttaaaggtaaattgcacttttaaaaaaataattggttgacttaatatatttgctttttttctcacctgcacttagaggaaatttgaacaagttggaaaaaaacaatttttgtttcaattctaagaaacacttgcagctctagtattcacttgagtcttcctgtttttcctgtaccgggtcatggtaatttttggttgttttggttgttttcttaaaaaacaagttaaaacctgacgatttctgcaggctgtgtaagcatgtttacctgttggcttgctttgtgtgtctgttaaatgaatgtcatatgtaaatgctaaaataaatcgacagtgtctcagaactgaataactgcagtgacttgatgctctaaaacagtgtaggatttaagaatagatggtttttaatcctggaaattgtgattgtgacccatgagtggaggaactttcagttctaaagctgataaagtgtgtagccagaagagtacttttttttttgtaaccactgtcttgatggcaaaataattatggtaaaaaacaagtctcgtgtttattattccttaagaactctgtgttatattaccatggaacgcctaataaagcaaaatgtggttgttt

SEQ ID NO: 75564 - protein, 684 aa, Artificial Sequence
  derived and/or modified sequence
MASGRRGWDSSHEDDLPVYLARPGTTDQVPRQKYGGMFCNVEGAFESKTLDFDALSVGQRGAKTPRSGQGSDRGSGSRPGIEGDTPRRGQGREESREPAPASPAPAGVEIRSATGKEVLQNLGPKDKSDRLLIKGGRIVNDDQSFYADIYMEDGLIKQIGDNLIVPGGVKTIEANGKMVIPGGIDVHTHFQMPYKGMTTVDDFFQGTKAALAGGTTMIIDHVVPEPESSLTEAYEKWREWADGKSCCDYALHVDITHWNDSVKQEVQNLIKDKGVNSFMVYMAYKDLYQVSNTELYEIFTCLGELGAIAQVHAENGDIIAQEQTRMLEMGITGPEGHVLSRPEELEAEAVFRAITIASQTNCPLYVTKVMSKSAADLISQARKKGNVVFGEPITASLGIDGTHYWSKNWAKAAAFVTSPPLSPDPTTPDYINSLLASGDLQLSGSAHCTFSTAQKAIGKDNFTAIPEGTNGVEERMSVIWDKAVATGKMDENQFVAVTSTNAAKIFNLYPRKGRISVGSDSDLVIWDPDAVKIVSAKNHQSAAEYNIFEGMELRGAPLVVICQGKIMLEDGNLHVTQGAGRFIPCSPFSDYVYKRIKARRKMADLHAVPRGMYDGPVFDLTTTPKGGTPAGSARGSPTRPNPPVRNLHQSGFSLSGTQVDEGVRSASKRIVAPPGGRSNITSLS

SEQ ID NO: 75565 - DNA, 2055 bp, Artificial Sequence
  derived and/or modified sequence
atggcctcaggccgccggggatgggattccagccacgaagacgatctgccggtctacctggcccggcctggtacaaccgaccaagtccctcgacagaaatacggcggcatgttctgcaatgtggaaggtgcctttgaatctaagacactcgactttgacgccctcagcgttggccagaggggggcaaagacccctaggagcgggcagggctccgataggggatctggcagtagacccggcattgaaggggacacaccacgaagagggcagggccgtgaagagtccagggagcccgctcccgcctcacccgcacctgcaggggtggagattaggtctgccactggcaaagaggtgctccagaatctggggccgaaggacaagagtgacagactcctgattaaaggcggaaggatcgtaaacgacgaccagtccttctatgcagatatctacatggaggatggtctcatcaaacagataggggacaatctcatcgtgcccgggggagtgaaaacaatagaggctaatggtaagatggtcattccaggcgggatcgacgtgcacactcatttccaaatgccgtataagggcatgaccactgtagacgacttcttccaaggaactaaggcggcactggcagggggtactacaatgatcatcgatcacgttgtgccagagccagagtcaagcctgactgaagcctatgagaagtggagggagtgggcagatgggaaatcttgttgtgactacgccctccatgtcgacatcactcattggaacgacagtgtcaaacaggaagtgcagaatctgatcaaggacaagggcgtaaatagcttcatggtctacatggcttacaaggacttatatcaagtgtcgaatactgaactctatgaaatctttacttgcttaggtgagcttggagccatcgcccaggtacacgctgaaaatggagatatcatcgcccaggagcagacaagaatgttagagatgggtattaccgggccagaggggcatgtattgtcccgaccagaagagctggaagcagaggccgtcttccgtgccattacaattgccagtcagaccaattgtcctttgtatgttactaaggtgatgagcaagagtgccgccgacctgattagccaggcacgcaagaaggggaacgttgtgttcggcgagcctattacagcctccctgggcatcgacgggacgcactattggtccaaaaattgggccaaagccgccgctttcgtaacctctccccctctctcccccgatccaaccacacccgattatatcaattctttgctggcatcaggggatctgcaactgtctgggagcgcacactgcaccttctcaaccgcgcagaaggccataggaaaagacaattttaccgcaatccctgaagggacaaacggcgtggaggagaggatgtcagtgatctgggacaaagctgtcgccactggcaaaatggatgaaaaccagtttgtagccgtcacttccactaacgctgcgaagatattcaacttatatccacgtaaaggaaggatctcagttggttctgactccgatttggtcatttgggacccggatgccgtcaaaatagtcagcgccaaaaatcatcaatcagccgcggaatataatattttcgaaggtatggaattgcgaggagctcccctcgtggtgatttgtcaaggcaagatcatgttggaagacggaaatctccatgtgactcagggtgcaggaaggttcatcccgtgtagtcctttctctgattatgtgtataagagaatcaaggcccggcggaagatggcagacttgcatgcagtgcccagaggcatgtacgatggacctgtgttcgaccttacgaccacacccaagggaggcacacccgcaggatctgcgaggggtagcccgacaaggcctaatcccccagtgcgcaatctgcaccagagcgggttctcactgtctggcacccaggtggatgagggagtgcggagcgcctcgaaacggatcgtggccccgccaggcggtaggtcgaacatcacatctctgtcttag

SEQ ID NO: 75566 - DNA, 2055 bp, Artificial Sequence
  derived and/or modified sequence
atggccagcggcagaagaggctgggacagcagccatgaagatgacctgcctgtgtacctggcccggcccggcaccacagaccaggtgccccggcagaagtatggaggcatgttctgcaatgtggagggcgcctttgagagcaagaccctggactttgatgccctgtctgtgggccagagaggagccaagacccccaggagcggccagggcagtgaccggggcagcggcagcaggcctggcattgaaggagacaccccaagaagaggccagggccgggaggagagccgggagcccgccccagccagccctgccccagctggggtggagatccgcagcgccaccgggaaggaggtgctgcagaacctgggccccaaggacaagagtgaccggctgctgatcaagggcggccgcatcgtgaatgatgaccagagcttctatgctgacatctacatggaggatggcctcatcaagcagattggagacaacctgattgtgcctgggggcgtgaagaccatcgaggccaacgggaagatggtgattcctgggggcattgatgtgcacacccacttccagatgccctacaagggcatgaccaccgtggatgacttcttccagggcaccaaggccgccctggccggcggcaccaccatgatcatcgaccacgtggtgcctgagcctgagagcagcctgacagaggcctatgagaagtggagggagtgggcagatggcaagagctgctgtgactatgccctgcacgtggacatcacccactggaatgattctgtgaagcaggaggtgcagaacctgatcaaggacaagggcgtgaacagcttcatggtgtacatggcctacaaggacctgtaccaggtgagcaacacagagctgtatgagatcttcacctgcctgggggagctgggcgccatcgcccaggtgcatgctgaaaatggagacatcatcgcccaggagcagaccaggatgctggagatgggcatcaccggccctgagggccacgtgctgagcaggcctgaggagctggaggccgaggccgtgttccgggccatcaccatcgccagccagaccaactgccccctgtatgtgaccaaggtgatgagcaagtctgctgctgacctgatcagccaggccaggaagaagggaaatgtggtgtttggagagcccatcacagccagcctgggcattgatggcacccactactggagcaagaactgggccaaggctgctgcctttgtgaccagcccccccctgagcccagaccccaccaccccagactacatcaacagcctgctggccagcggggacctgcagctgagcggcagcgcccactgcaccttcagcacagcccagaaggccatcggcaaggacaacttcaccgccatccctgagggcaccaacggggtggaggagaggatgtctgtcatctgggacaaggctgtggccaccgggaagatggatgagaaccagtttgtggccgtgaccagcaccaatgctgccaagatcttcaacctgtaccccaggaagggccgcatctctgtgggcagtgacagcgacctggtgatctgggaccctgatgctgtgaagatcgtgtctgccaagaaccaccagagcgctgctgagtacaacatctttgagggcatggagctgcggggggcccccctggtggtgatctgccagggcaagatcatgctggaggatggcaacctgcacgtgacccagggcgccggccgcttcatcccctgcagccccttcagtgactatgtgtacaagaggatcaaggcccggaggaagatggctgacctgcatgctgtgccccggggcatgtatgatggccctgtgtttgacctgaccaccacccccaagggcggcaccccagctggcagcgcccggggcagccccacccggcccaacccccctgtgaggaacctgcaccagagcggcttcagcctgagcggcacccaggtggatgagggcgtgcgcagcgccagcaagagaattgtggcccctcctgggggccgcagcaacatcaccagcctgtcctag

SEQ ID NO: 75567 - DNA, 2055 bp, Artificial Sequence
  derived and/or modified sequence
atggccagcggccggcggggctgggacagcagccacgaggacgacctgcccgtttaccttgcccggccaggaactaccgatcaagtgcccaggcagaagtacggcggcatgttttgcaatgttgagggcgcttttgaatcaaagacactggattttgatgcgctatccgtcggtcagagaggagccaaaaccccaagaagtgggcagggaagcgatcggggcagcggatctcgcccaggaatcgaaggagacaccccaaggagaggtcaagggcgcgaggagtcacgggagccggcacccgcatcccctgctccagccggagttgaaattcggagcgcgactgggaaggaggtgcttcagaacttaggaccgaaggataagagcgatagactgctgatcaaaggcggtcgtatcgttaatgacgatcagagcttctatgctgacatttatatggaggatgggctcatcaaacagattggagacaacctgattgtgcctgggggcgtcaaaaccattgaggcgaacggaaagatggtcatccccggagggatagatgtccatactcatttccagatgccctataaaggtatgacaactgtggatgactttttccagggaaccaaagctgccctggctggggggactacaatgatcattgaccatgtggtgcccgagcctgagagtagcctcactgaggcttacgaaaaatggagagagtgggctgacggaaaaagctgttgcgactacgcgctccacgtggatattacacactggaatgattcagtcaagcaggaagtgcagaatctaattaaggacaagggcgtgaattcttttatggtgtacatggcctataaggatctgtatcaggtgtctaatacggaattatacgagatatttacctgcctgggcgagctcggagccatcgcgcaggttcacgcggagaatggggacattatcgctcaggagcaaacacggatgctggagatggggatcaccgggcctgagggccacgtgctgagccggccggaggaactcgaggcggaagctgtctttcgcgccattactatagccagtcagactaactgccctctttatgtgacgaaagttatgtctaaaagcgcagctgacttaatctcacaggccagaaagaagggtaatgtagttttcggcgaaccaatcacagcgagcctgggcatcgacggtacccattattggagcaagaactgggcaaaagcagctgccttcgtgaccagcccccctctcagtcctgacccaactactcctgattatatcaactccctcctggcctcgggagacctgcagctatcgggcagcgcccattgtacattttctacagcgcagaaggccataggtaaagacaattttactgcaataccagagggaaccaatggcgtagaggaacggatgagcgtcatatgggataaggctgttgccacaggtaagatggatgagaatcagttcgtagcagtcactagcaccaacgctgcgaagatctttaatctttaccccaggaaagggcggatctctgtgggatccgattcggacctcgtgatctgggaccctgatgccgtcaaaatcgtgtccgcgaaaaatcatcagtccgccgccgagtataatatcttcgaagggatggaactgcgaggagcaccactcgttgtcatctgtcaaggcaaaataatgttagaagacggaaatctgcacgttacccaaggcgcggggcggttcatcccctgttccccgttcagtgattatgtgtacaaaaggattaaggcgcggcgcaagatggcggatttacatgccgtcccaagaggaatgtatgacggccccgtgttcgacttaaccactacacctaagggtggaacccctgccgggtctgccagaggaagcccaaccaggccaaaccctcccgttaggaacctgcaccagagtggcttttcgttatctggcactcaagtggacgagggcgtccgctccgcctccaaacggatcgtggccccacccggaggacgcagtaatatcacatcccttagttag

SEQ ID NO: 75568 - DNA, 2055 bp, Artificial Sequence
  derived and/or modified sequence
atggcttccgggcgacggggatgggactcctcacacgaagatgatctccctgtgtatctggcccgtcccggtacaactgatcaggtgcctagacagaaatatggaggaatgttttgtaatgtggaaggagccttcgagtccaagacgctggattttgacgccctatctgtgggccaaagaggtgccaaaaccccacggagcggacaaggttctgatagagggtcagggtcgcgcccaggtattgagggggatactccgagaaggggtcagggacgcgaagagagtcgtgagcccgctcccgctagccccgctcctgctggtgtggagatcaggtctgctaccggaaaagaggtcctccagaatctgggtcctaaagacaaaagcgaccggctgctgatcaagggaggacgaattgttaacgacgatcaatccttttatgcggacatatacatggaggatggactgataaagcagataggcgacaatctgatcgtgccagggggagtgaaaacaatcgaggctaacggaaagatggtgatccccggaggaattgacgtccatacccatttccagatgccttataagggcatgactacggtggacgactttttccaggggaccaaggccgcactggcagggggaaccactatgattatagatcacgtggtgccagaaccagaatcctccctcactgaggcatatgagaaatggagggagtgggcagatgggaaatcatgttgtgattatgcactgcatgtagatataactcactggaatgatagcgtgaaacaggaagtacaaaacctgatcaaagataagggtgtcaacagctttatggtgtacatggcttacaaggatctgtaccaggtcagtaacacagaactgtatgaaatcttcacctgcctaggtgagcttggcgcaatcgctcaggtgcatgctgaaaatggagacataattgcgcaagagcagaccaggatgctggagatgggaataacaggcccagaaggccatgtcttatcgcgcccagaagagctcgaggctgaggcagtcttccgagctatcaccattgcttcccagaccaactgtcctttatatgtaaccaaggtgatgtcaaagtcagccgctgacctgatcagccaggcgagaaaaaaggggaacgtagtctttggcgagcccatcactgccagcttgggaattgacgggacacactactggtccaagaactgggccaaggccgctgcgtttgtgacaagccctccgctgtcacccgaccccacaactccagactatatcaacagcctgctggccagcggggatcttcaactgagcggttccgcacattgcaccttcagtacagcacaaaaggcaatcggaaaggacaattttaccgcgattcctgagggtacgaacggggttgaggaacgcatgtccgtaatctgggataaggccgtcgcaaccgggaaaatggatgagaaccaatttgttgctgtcacctcgacgaatgccgctaagatttttaatctttatccacgaaaaggccgtattagcgtggggtccgactccgatcttgtcatttgggatccagacgccgttaagatagtctctgcaaagaaccatcagagcgctgccgaatacaatatcttcgagggtatggaactgcgaggggcaccgttagttgtcatttgccaagggaaaattatgctggaggacggcaatctacacgttactcagggggctgggagattcataccctgctcccctttttctgattacgtatataaaaggattaaggctaggcggaagatggctgacctccacgccgttccaaggggaatgtatgacggccctgtttttgatctgacgacaactcctaaggggggtacccccgctggttctgcaagggggtctcccacacgaccaaatccacccgtacggaatctgcaccagtcaggattctccctgagcggcacccaggttgacgaaggagtcagatctgcaagcaagagaatcgtcgcccctcccggaggcaggagcaatattacctccttatcctag

SEQ ID NO: 75569 - DNA, 2055 bp, Artificial Sequence
  derived and/or modified sequence
atggccagcggcagaagaggctgggacagcagccacgaggacgacctgcccgtgtacctggccagacccggcaccaccgaccaggtgcccagacagaagtacggcggcatgttctgcaacgtggagggcgccttcgagagcaagaccctggacttcgacgccctgagcgtgggccagagaggcgccaagacccccagaagcggccagggcagcgacagaggcagcggcagcagacccggcatcgagggcgacacccccagaagaggccagggcagagaggagagcagagagcccgcccccgccagccccgcccccgccggcgtggagatcagaagcgccaccggcaaggaggtgctgcagaacctgggccccaaggacaagagcgacagactgctgatcaagggcggcagaatcgtgaacgacgaccagagcttctacgccgacatctacatggaggacggcctgatcaagcagatcggcgacaacctgatcgtgcccggcggcgtgaagaccatcgaggccaacggcaagatggtgatccccggcggcatcgacgtgcacacccacttccagatgccctacaagggcatgaccaccgtggacgacttcttccagggcaccaaggccgccctggccggcggcaccaccatgatcatcgaccacgtggtgcccgagcccgagagcagcctgaccgaggcctacgagaagtggagagagtgggccgacggcaagagctgctgcgactacgccctgcacgtggacatcacccactggaacgacagcgtgaagcaggaggtgcagaacctgatcaaggacaagggcgtgaacagcttcatggtgtacatggcctacaaggacctgtaccaggtgagcaacaccgagctgtacgagatcttcacctgcctgggcgagctgggcgccatcgcccaggtgcacgccgagaacggcgacatcatcgcccaggagcagaccagaatgctggagatgggcatcaccggccccgagggccacgtgctgagcagacccgaggagctggaggccgaggccgtgttcagagccatcaccatcgccagccagaccaactgccccctgtacgtgaccaaggtgatgagcaagagcgccgccgacctgatcagccaggccagaaagaagggcaacgtggtgttcggcgagcccatcaccgccagcctgggcatcgacggcacccactactggagcaagaactgggccaaggccgccgccttcgtgaccagcccccccctgagccccgaccccaccacccccgactacatcaacagcctgctggccagcggcgacctgcagctgagcggcagcgcccactgcaccttcagcaccgcccagaaggccatcggcaaggacaacttcaccgccatccccgagggcaccaacggcgtggaggagagaatgagcgtgatctgggacaaggccgtggccaccggcaagatggacgagaaccagttcgtggccgtgaccagcaccaacgccgccaagatcttcaacctgtaccccagaaagggcagaatcagcgtgggcagcgacagcgacctggtgatctgggaccccgacgccgtgaagatcgtgagcgccaagaaccaccagagcgccgccgagtacaacatcttcgagggcatggagctgagaggcgcccccctggtggtgatctgccagggcaagatcatgctggaggacggcaacctgcacgtgacccagggcgccggcagattcatcccctgcagccccttcagcgactacgtgtacaagagaatcaaggccagaagaaagatggccgacctgcacgccgtgcccagaggcatgtacgacggccccgtgttcgacctgaccaccacccccaagggcggcacccccgccggcagcgccagaggcagccccaccagacccaacccccccgtgagaaacctgcaccagagcggcttcagcctgagcggcacccaggtggacgagggcgtgagaagcgccagcaagagaatcgtggccccccccggcggcagaagcaacatcaccagcctgagctag

SEQ ID NO: 75570 - DNA, 5476 bp, Artificial Sequence
  derived and/or modified sequence
tgctccgcgcgctagctggctgtgtggctcgctggctcgctagggacaagcaggaatcggagcagcactgccgcctctggcgcgaaggctcaggcgcctcctcccgccacagtcactgtggctcggcgcacgctgccggcggctgccctttccgcctctggggaagaaaaacccgcgggccgctttcgtgcttgaaccatggcctcgggccggaggggctgggacagctcccacgaagacgatctgcccgtgtacctggccaggccgggcaccacggaccaggtcccgcggcagaaatacggcggcatgttctgcaacgtggagggcgccttcgagagcaagacgctggatttcgatgccctcagcgtggggcagcggggcgcgaagactcctcggagcggccagggcagcgaccgaggatcggggagtcggcccgggatcgagggggacaccccgcgcaggggccaaggccgggaagagagcagggagcccgcgcccgcctcccccgcccccgccggggtagagatccggagcgccaccggcaaagaggtgttgcagaacctcggccccaaggacaagagtgaccgtctccttatcaagggaggcagaatcgtcaatgatgatcagtccttttatgctgatatttacatggaagatggcttaataaaacaaattggagacaatctgattgttcctggaggagtgaagaccattgaagccaatgggaagatggtgatccctggaggcatcgatgtccatactcacttccagatgccatataagggaatgaccacagtagatgacttcttccaagggacaaaggcggccttagcaggtggcaccaccatgatcattgaccatgtggtgcctgagcctgagtccagcctgactgaggcctatgagaaatggagagagtgggctgatgggaagagttgctgtgactatgccctgcatgtggacatcacccactggaatgacagcgtcaagcaggaagtgcagaacctcatcaaggacaaaggggttaactccttcatggtttatatggcttataaggatttgtatcaagtatctaacacagagctctatgagatcttcacctgcctgggagagctgggggccattgctcaagttcatgctgagaatggggatatcattgcccaggagcaaacccgcatgttggaaatggggataactggcccagaaggccatgtactgagcaggccagaagagctggaagctgaggctgtgttccgtgccatcaccattgccagccaaaccaattgccctctctacgtcacaaaggtcatgagcaagagtgcagctgacctcatctcacaagccaggaaaaaaggaaatgtagtctttggtgagcccatcactgccagcctcggcatagatggaacccattattggagcaagaactgggccaaggcggctgcatttgtgacatccccacccctgagccctgacccaactactccggactacatcaactccttgctggccagcggggatctgcagctatctgggagtgcccactgcaccttcagcactgcccagaaagcaattgggaaggacaacttcacagccattcctgagggcaccaatggtgtggaggagcggatgtctgtcatctgggacaaggctgtggccacagggaaaatggacgaaaaccagttcgtggctgtgacaagcacaaacgctgccaagatcttcaacctgtatccccgcaagggaagaatatctgtgggttctgacagcgacctcgtcatctgggatccagatgctgtgaagatcgtctctgccaagaaccaccagtctgcggcagagtacaacatctttgaagggatggagctgcgcggggctcctctggttgtcatctgccagggcaagatcatgctggaagatggcaacctgcacgtgacccagggggctggccgcttcataccctgcagcccgttctccgactatgtctacaagcgcattaaagcacggaggaagatggcagacctgcatgccgtcccaaggggcatgtacgatgggcctgtgtttgacctgaccaccacccccaaaggtggcacccccgcaggctctgctcggggctctcctactcggccgaacccacctgtgaggaatcttcatcagtcgggatttagcctgtcaggcacccaagtggatgagggggttcgctcagccagcaagcgcatcgtggcgcccccaggcggccgttctaatatcacatctctgagttaagcaagccttcctcaaagagaggggcagaagcaagaagagattgttttgaagccaaaatggtacaccgatatttaagaaggaaagcgaatccaaacggttgtgatctaaagaatcaataagcctcaagccttatgtttctccaatgttacgctcgcttgcctagctttacgaatattgctttgttttctgtttatgcatagccttgatttgtttgactcccctccccccatttacatgcatgcaatcagacaggccactaaggtaaaagagtctgctctatcatagtgttgagagcgtgtgtagtgctgcatcttatgacaaggggacagacaagctgggacgtcagggaaatgaacaaaagggacgcaggttatttggggtgagtgggtggtgggagcctggagcaaggtggagggtgcagaggggctggggtagggcatgtaggagggaggtgggtgggtcaggtgagtggaaggggtgttgtatattgtgttgatgacgtacgttatttccatggaagatagccgctgtggcagctgtcacatcaccacagctccctagggtctgccgagaaggcaggcagtctttgggttctgttctttgtcacgtcccctacaagtaaattttgtttctttgaacgtttattaaaatgccaagacccaaccatttcttccacctgcttgattgtgccagtgtttgctcaggcctctttcttagtgttgctttcaaatccttctctttcctgggttgggaaggccaggcagggacagagcaaatgacacttctcttcctcttgccctccctgcctctttggtgctcttaaaagccagcagctgagaacatagcacaggcccacgtggtgagggcacccacagcttaaagacgcttccttctaaacacggcgaggtcacctctcactcttctgtctttgcaaaccgagaagagtggcatgcttctggcatcccaagtcaggattttagctcagatgaggcagaatgaagggcctctcttacaggcagtttgtgtttgattctctcgatcctggcacatccatgataaataggagtttttgaaagttggttttattaggtgttccctaatttttaccgtaataggtcatctcagcttatatgaaagtcaagtggggaactgggaaagccaaagtcagtcttgagcagagggagcacattttgtggacctggttccacctttccattccaaaccacctgtttccccttccattagcagaaactctgggggaactttgtgtctcagtcctagaatctccccaagtgagtggaagtgacatgatgcagtcttcctcatggggcacctgaaagaaattagtgtgggtgcttcgatctaccttgtctgtcagagttgaatatctctttccctatcatgctgcttctgaaaattcagttttggagcaagtcctgtgagcaagataagaatctatagaaccaagatgctcattttcagaagaaatatgttcaacctgggatcagacttccatgctctggggaatccaagtggtagcacctgtaaccctgtgtactaagtgctttgaagagaagagcaggcctcagacaccttttaattgcttaggagaaaccattgtctctgactgcaggtttgaataagttgaagaccagagaaaagtacacactgggctacaaaggaatttggagatagccaaggaacaggatttcccctagcaagctaccttctgttcaaatcatgaaaaaagactatttccccttagaatagggaagcttgctattttaaagctcttgtagtgcttttcttttaagggagatgtagtaaaagggaaaatgtagctcttagtttacacttcaaagatgtgggggtctttcagagaactaagaataacagttttatgtgcagagagagtttgccagatctgaagcatatacctcattgactaggctgttactttgggataggttgcagtaccagccacagccagcagatagaggaaaagacacacataaactcgcttctgagcgtccacttctgcactctctgctctgctgttactcagcccctgagtctgactcatctctgcacaacctctctgtgccatgaagataagtcttccatggccaaatcggtcatccgcactgcccttgggacttccgaagtgaaccattccaccagaacctttgattctgcacaagatttccttgctctgggaacaacccccaaatgcccttgggaggaacaacatgagctcaggaagcctctctttcttcacttaccattactaactctccaagcatagaaatccctgggaattgcgagaataactcccactattttaaaatttatattcagatttgtttcgtttcataagacacatcaaacaggcctatacaaaaggtttaggaaaagaaaacaatggtgagtcccggccctcttcgaattcactggcacctcatgcaagtgtaggaaggcacgctggatcgtctatctgattccaaagctgtcctttgccatctcatcccttggcctgccccccaaccctgaggatgcccctgccatccccccaacctcctcatattgcctctgaacccagatggcaatccatcccggttctctctgagggccacgggcttgggtagtggaaagggtgtttgggaaattgttaaatcagttacccgtagtagagctatttcttgtacttctaagttttctagaagtggaaggattgtagtcatcctgaaaatgggtttacttcaaaatccctcagccttgttcttcacgactgtctatactgagagtgtcatgtttccacaaagggctgacacctgagcctggattttcactcatccctgagaagccctttccagtagggtgggcaattcccaacttccttgccacaagcttcccaggctttctcccctggaaaactccagcttgagtcccagatacactcatgggctgccctgggcagccagcattcattgtaagttccctctttgaaaactggtgtgtgggtgttcagttctgtgtctggtgggtatggacagacagtaatctcctgtgatctgtgctagctgtgaggcagctctggaacgtgaagagctgtttggtttgaaccgtgaacaaaactgtgttttgagtttagctgacattaaagaaaaaagttcatcacgtgactgttaatgtaaacctggttattaaaataactatgaaatta

SEQ ID NO: 75571 - protein, 199 aa, Artificial Sequence
  derived and/or modified sequence
MGEASPPAPARRHLLVLLLLLSTLVIPSAAAPIHDADAQESSLGLTGLQSLLQGFSRLFLKGNLLRGIDSLFSAPMDFRGLPGNYHKEENQEHQLGNNTLSSHLQIDKVPRMEEKEALVPIQKATDSFHTELHPRVAFWIIKLPRRRSHQDALEGGHWLSEKRHRLQAIRDGLRKGTHKDVLEEGTESSSHSRLSPRKT

SEQ ID NO: 75572 - DNA, 600 bp, Artificial Sequence
  derived and/or modified sequence
atgggtgaagcttccccccccgcacctgcccggcgccatctattagtcctcctgcttctgctctcaactctggtcatccccagcgcagctgcaccaatacacgacgccgatgcccaggagtccagtctgggtctgacaggcctgcagagccttcttcagggatttagtaggcttttcctcaaaggaaacttactgagaggcatcgacagtctctttagtgctcccatggatttccgagggcttcccgggaattaccacaaagaagagaaccaggaacatcagctgggcaacaacaccttgtcctcacatcttcagattgacaaggtgccacggatggaagagaaagaggctctggtaccaatacagaaagcaactgactctttccacacagaactacaccctcgagttgccttctggattatcaagctgccacggcggcgttcacaccaggatgctcttgaagggggccactggctatcagaaaaacgccataggctgcaagctataagggatggattgcggaaagggacacacaaagacgttttagaggaagggaccgagagttcctcacattccagactgagtcctcgcaaaacctag

SEQ ID NO: 75573 - DNA, 600 bp, Artificial Sequence
  derived and/or modified sequence
atgggagaggccagccccccagccccagcccggcggcacctgctggtgctgctgctgctgctgagcaccctggtgatccccagcgctgctgcccccatccatgatgctgatgcccaggagagcagcctgggcctgaccggcctgcagagcctgctgcagggcttcagccgcctcttcctgaagggcaacctgctgcggggcatcgacagcctcttcagcgcccccatggacttccggggcctgcccggcaactaccacaaggaggagaaccaggagcaccagctgggcaacaacaccctgagcagccacctgcagattgacaaggtgcccaggatggaggagaaggaggccctggtgcccatccagaaggccacagacagcttccacacagagctgcacccccgggtggccttctggatcatcaagctgccccggcggcgcagccaccaggatgccctggagggcggccactggctgtctgagaagaggcaccggctgcaggccatcagagatggcctgaggaagggcacccacaaggatgtgctggaggagggcacagagagcagcagccacagccggctgagccccaggaagacctag

SEQ ID NO: 75574 - DNA, 600 bp, Artificial Sequence
  derived and/or modified sequence
atgggcgaggccagcccccccgcccccgcccggcggcacctgctggtgctgctcctgctcctgtctactctggttatccccagcgcagcagcacccatccatgacgccgatgcccaagagagctcacttggcttgacagggctgcagagtttgcttcaaggtttttctcgactttttctgaaggggaatctgttacgcggaattgactcgctcttctcagccccaatggattttcggggcctgcccggaaattatcataaagaggaaaaccaagaacaccagctcggaaataacaccttatccagtcacctgcagatagacaaagtcccaagaatggaggaaaaagaagcgctcgtaccaattcaaaaggcgacagacagttttcacacagaactccaccctagggtagcattttggattattaaactccccagaagacgaagccatcaggatgcactagaggggggacactggttgtcagagaagcggcatagactccaggcgattcgcgacggactccgcaaagggactcacaaagatgtcttggaggagggaactgagtcgtcttcacactccagactgtccccaagaaagacctag

SEQ ID NO: 75575 - DNA, 600 bp, Artificial Sequence
  derived and/or modified sequence
atgggcgaggcatctccgccagccccagctcgacggcacttgctggtcctgctgctgctgctcagcacactcgtcataccttctgccgcagccccaattcatgatgcagacgcccaggagagcagcttgggcttgacaggactacagtcccttttgcaagggtttagcagattattcttaaaagggaaccttctccgcggaatagactccttattctcagcaccaatggacttccggggattgccgggaaactatcataaagaggagaatcaggagcaccagttgggcaataataccctgtcttctcacctgcagatagataaagtaccacgcatggaggagaaggaggccctagtcccgatacaaaaagccactgattcgtttcacacagagcttcatcccagggtcgccttctggatcataaaacttcctagacgcagaagccatcaggacgccctcgaaggaggccattggcttagcgagaaacgccaccggctccaggcaatccgtgatggtttgcggaaaggtacacacaaggatgtcctggaagagggaactgagtcatcaagccattctcgactgagtcccaggaagacatag

SEQ ID NO: 75576 - DNA, 600 bp, Artificial Sequence
  derived and/or modified sequence
atgggcgaggccagcccccccgcccccgccagaagacacctgctggtgctgctgctgctgctgagcaccctggtgatccccagcgccgccgcccccatccacgacgccgacgcccaggagagcagcctgggcctgaccggcctgcagagcctgctgcagggcttcagcagactgttcctgaagggcaacctgctgagaggcatcgacagcctgttcagcgcccccatggacttcagaggcctgcccggcaactaccacaaggaggagaaccaggagcaccagctgggcaacaacaccctgagcagccacctgcagatcgacaaggtgcccagaatggaggagaaggaggccctggtgcccatccagaaggccaccgacagcttccacaccgagctgcaccccagagtggccttctggatcatcaagctgcccagaagaagaagccaccaggacgccctggagggcggccactggctgagcgagaagagacacagactgcaggccatcagagacggcctgagaaagggcacccacaaggacgtgctggaggagggcaccgagagcagcagccacagcagactgagccccagaaagacctag

SEQ ID NO: 75577 - DNA, 664 bp, Artificial Sequence
  derived and/or modified sequence
ccgggagtccggtgacccgggctgtggtctagcataaaggcggagcccagaagaaggggcggggtatgggagaagcctccccacctgcccccgcaaggcggcatctgctggtcctgctgctgctcctctctaccctggtgatcccctccgctgcagctcctatccatgatgctgacgcccaagagagctccttgggtctcacaggcctccagagcctactccaaggcttcagccgacttttcctgaaaggtaacctgcttcggggcatagacagcttattctctgcccccatggacttccggggcctccctgggaactaccacaaagaggagaaccaggagcaccagctggggaacaacaccctctccagccacctccagatcgacaaggtacccaggatggaggagaaggaggccctggtacccatccagaaggccacggacagcttccacacagaactccatccccgggtggccttctggatcattaagctgccacggcggaggtcccaccaggatgccctggagggcggccactggctcagcgagaagcgacaccgcctgcaggccatccgggatggactccgcaaggggacccacaaggacgtcctagaagaggggaccgagagctcctcccactccaggctgtccccccgaaagaccca

SEQ ID NO: 75578 - protein, 154 aa, Artificial Sequence
  derived and/or modified sequence
MHDSNNVEKDITPSELPANPAIRANCHQEPSVCLQAACPESWIGFQRKCFYFSDDTKNWTSSQRFCDSQDADLAQVESFQELNFLLRYKGPSDHWIGLSREQGQPWKWINGTEWTRQFPILGAGECAYLNDKGASSARHYTERKWICSKSDIHV

SEQ ID NO: 75579 - DNA, 465 bp, Artificial Sequence
  derived and/or modified sequence
atgcatgacagcaataatgttgaaaaggatataactccctctgagctgcctgccaacccagcaatcagagcaaattgccatcaagagcctagcgtttgcctgcaagctgcttgccccgagtcctggattggtttccagagaaaatgtttctacttcagtgacgacaccaaaaactggacctccagccagagattctgtgactcacaggacgcagacctggcgcaagtagaaagttttcaggaactgaactttctgctcaggtataagggaccgtcagaccattggataggactttcccgcgaacagggccagccgtggaaatggataaacgggactgaatggactcgccagttccccattctgggagcaggcgaatgtgcttatctgaatgacaagggagcatcttctgcgaggcattataccgaacggaaatggatttgctctaaatcagacattcatgtctag

SEQ ID NO: 75580 - DNA, 465 bp, Artificial Sequence
  derived and/or modified sequence
atgcatgacagcaacaacgtggagaaggacatcacccccagcgagctgcctgccaacccagccatccgggccaactgccaccaggagcccagcgtgtgcctgcaggccgcctgcccagagagctggattggcttccagaggaagtgcttctacttcagtgatgacaccaagaactggaccagcagccagcgcttctgtgacagccaggatgctgacctggcccaggtggagagcttccaggagctgaacttcctgctgcgctacaagggccccagcgaccactggattggcctgagccgggagcagggccagccctggaagtggatcaatggaacagagtggacccggcagttccccatcctgggcgctggagaatgtgcctacctgaatgacaagggggccagcagcgcccggcactacacagagaggaagtggatctgcagcaagagtgacatccacgtgtag

SEQ ID NO: 75581 - DNA, 465 bp, Artificial Sequence
  derived and/or modified sequence
atgcacgacagcaacaacgtggagaaggacatcacccccagcgagcttcccgcaaatccagccattcgagctaattgccatcaggagcccagcgtttgtctgcaggctgcgtgtccggaaagctggatcggatttcaacgtaagtgtttctacttttccgatgatacaaaaaactggacctcctcccagaggttctgcgactcacaagatgctgacctggctcaagtggaatccttccaggagctgaactttcttctccgatataagggaccaagcgatcactggatcggcttgagtagggaacagggacagccttggaaatggataaatggaactgagtggactcgccagtttcccatcctgggtgctggagagtgtgcgtacctcaatgataaaggcgcttcaagcgcaaggcactatacggaacggaagtggatctgttccaaatctgatatacatgtgtag

SEQ ID NO: 75582 - DNA, 465 bp, Artificial Sequence
  derived and/or modified sequence
atgcacgattcaaataatgtggaaaaggacatcaccccctctgagttaccagcaaatcccgcaatccgcgcaaactgtcatcaggagcccagcgtttgtttacaggcagcctgtcctgaaagctggatcggatttcaacgcaaatgcttctacttctccgacgacaccaagaattggacctcttcacagagattctgtgactcccaagatgcggacctggcacaagtggagagttttcaggaactgaacttcttgctacgctataaaggaccctccgatcactggataggcttatctcgtgagcagggccagccttggaagtggatcaacggaacagagtggaccagacagttccctatcctaggagccggagagtgcgcttatctcaacgataagggtgctagcagcgcgcgtcactatacagagaggaaatggatatgttctaagtccgatatccacgtgtag

SEQ ID NO: 75583 - DNA, 465 bp, Artificial Sequence
  derived and/or modified sequence
atgcatgacagtaacaatgtggagaaagacattacaccatctgaattgcctgcaaacccagcaataagagctaactgccatcaagagccatcagtatgtcttcaagctgcatgcccagaaagctggattggttttcaaagaaagtgtttctatttttctgatgacaccaagaactggacatcaagtcagaggttttgtgactcacaagatgctgatcttgctcaggttgaaagcttccaggaactgaatttcctgttgagatataaaggcccatctgatcactggattgggctgagcagagaacaaggccaaccatggaaatggataaatggtactgaatggacaagacagtttcctatcctgggagcaggagagtgtgcctatttgaatgacaaaggtgccagtagtgccaggcactacacagagaggaagtggatttgttccaaatcagatatacatgtctag

SEQ ID NO: 75584 - DNA, 465 bp, Artificial Sequence
  derived and/or modified sequence
atgcacgacagcaacaacgtggagaaggacatcacccccagcgagctgcccgccaaccccgccatcagagccaactgccaccaggagcccagcgtgtgcctgcaggccgcctgccccgagagctggatcggcttccagagaaagtgcttctacttcagcgacgacaccaagaactggaccagcagccagagattctgcgacagccaggacgccgacctggcccaggtggagagcttccaggagctgaacttcctgctgagatacaagggccccagcgaccactggatcggcctgagcagagagcagggccagccctggaagtggatcaacggcaccgagtggaccagacagttccccatcctgggcgccggcgagtgcgcctacctgaacgacaagggcgccagcagcgccagacactacaccgagagaaagtggatctgcagcaagagcgacatccacgtgtag

SEQ ID NO: 75585 - protein, 132 aa, Artificial Sequence
  derived and/or modified sequence
MHDSNNVEKDITPSELPANPGCLHSKEHSIKATLIWRLFFLIMFLTIIVCGMVAALSAIRANCHQEPSVCLQAACPESWIGFQRKCFYFSDDTKNWTSSQRFCDSQDADLAQVESFQELVSYPGSRRVCLFE

SEQ ID NO: 75586 - DNA, 399 bp, Artificial Sequence
  derived and/or modified sequence
atgcatgattccaacaatgttgagaaagatatcactccttccgaactgcctgcaaaccccgggtgtttgcattccaaagaacactctatcaaagcaacactgatttggcgcttgttcttcctaatcatgtttctgaccatcatcgtctgcggcatggtggcggccctgtctgcaatccgggccaattgtcaccaggagcctagcgtgtgcctgcaggctgcatgtcctgagtcttggattggttttcagagaaagtgcttctacttctctgacgacacaaaaaattggacatccagccagcgcttctgtgacagtcaagacgctgaccttgcccaggtcgagtccttccaggaactcgtaagttacccagggtctcgtagggtttgcttgttcgaatag

SEQ ID NO: 75587 - DNA, 399 bp, Artificial Sequence
  derived and/or modified sequence
atgcatgacagcaacaacgtggagaaggacatcacccccagcgagctgcctgccaaccctggctgcctgcacagcaaggagcacagcatcaaggccaccctcatctggaggctcttcttcctgatcatgttcctgaccatcatcgtgtgtggcatggtggccgccctgagcgccatccgggccaactgccaccaggagcccagcgtgtgcctgcaggccgcctgcccagagagctggattggcttccagaggaagtgcttctacttcagtgatgacaccaagaactggaccagcagccagcgcttctgtgacagccaggatgctgacctggcccaggtggagagcttccaggagctggtgtcctacccaggcagccggcgggtgtgcctgtttgaatag

SEQ ID NO: 75588 - DNA, 399 bp, Artificial Sequence
  derived and/or modified sequence
atgcacgacagcaacaacgtggagaaggacatcacccccagcgagcttcccgcaaatccaggctgcctccactctaaggagcactccatcaaagctactttgatctggaggctgttttttcttatcatgtttcttaccattatagtttgtggcatggtcgcggctctgtctgcaatccgggccaattgtcaccaggagccttcggtgtgtctccaggcggcctgccctgagagctggataggattccagcggaagtgcttctatttttcagacgataccaagaactggacttcgagtcagcggttctgcgacagccaggacgctgatcttgcccaggtggaatcatttcaagagttagtcagctatcccggctcaaggagagtttgcctgtttgaatag

SEQ ID NO: 75589 - DNA, 399 bp, Artificial Sequence
  derived and/or modified sequence
atgcacgattcaaataatgtggagaaggatatcacaccctctgagctccccgctaaccccggttgcctccactcgaaggaacattccattaaagctaccctaatttggagactattcttccttatcatgtttcttacgataatagtgtgcggtatggttgccgctctcagcgctatccgcgcaaattgccaccaggaaccatctgtttgtctgcaagccgcatgtcccgagtcatggattggatttcagaggaaatgcttctacttcagcgacgatactaaaaactggacaagctcccagaggttctgtgactcccaggatgccgatctcgcacaagttgagtccttccaggaactggtttcgtatccgggtagccgccgtgtttgccttttcgagtag

SEQ ID NO: 75590 - DNA, 399 bp, Artificial Sequence
  derived and/or modified sequence
atgcatgacagtaacaatgtggagaaagacattacaccatctgaattgcctgcaaacccaggttgtctgcattcaaaagagcattctattaaagctaccttaatttggcgcttatttttcttaatcatgtttctgacaatcatagtgtgtggaatggttgctgctttaagcgcaataagagctaactgccatcaagagccatcagtatgtcttcaagctgcatgcccagaaagctggattggttttcaaagaaagtgtttctatttttctgatgacaccaagaactggacatcaagtcagaggttttgtgactcacaagatgctgatcttgctcaggttgaaagcttccaggaactggtttcctatcctgggagcaggagagtgtgcctatttgaatga

SEQ ID NO: 75591 - DNA, 399 bp, Artificial Sequence
  derived and/or modified sequence
atgcacgacagcaacaacgtggagaaggacatcacccccagcgagctgcccgccaaccccggctgcctgcacagcaaggagcacagcatcaaggccaccctgatctggagactgttcttcctgatcatgttcctgaccatcatcgtgtgcggcatggtggccgccctgagcgccatcagagccaactgccaccaggagcccagcgtgtgcctgcaggccgcctgccccgagagctggatcggcttccagagaaagtgcttctacttcagcgacgacaccaagaactggaccagcagccagagattctgcgacagccaggacgccgacctggcccaggtggagagcttccaggagctggtgagctaccccggcagcagaagagtgtgcctgttcgagtag

SEQ ID NO: 75592 - protein, 95 aa, Artificial Sequence
  derived and/or modified sequence
MHDSNNVEKDITPSELPANPAIRANCHQEPSVCLQAACPESWIGFQRKCFYFSDDTKNWTSSQRFCDSQDADLAQVESFQELVSYPGSRRVCLFE

SEQ ID NO: 75593 - DNA, 288 bp, Artificial Sequence
  derived and/or modified sequence
atgcatgatagcaataacgtggagaaagacataaccccatccgaactgcctgcgaacccggcaattcgcgccaactgccatcaggaaccctctgtatgtctgcaagccgcttgcccggaatcttggatcggcttccagcgaaaatgcttctatttttccgacgacaccaaaaactggacatcatcccagaggttctgtgactcgcaggacgccgatctggcccaagtcgagagctttcaggagctcgtgtcgtatccagggtctcggagggtttgtctcttcgagtag

SEQ ID NO: 75594 - DNA, 288 bp, Artificial Sequence
  derived and/or modified sequence
atgcatgacagcaacaacgtggagaaggacatcacccccagcgagctgcctgccaacccagccatccgggccaactgccaccaggagcccagcgtgtgcctgcaggccgcctgcccagagagctggattggcttccagaggaagtgcttctacttcagtgatgacaccaagaactggaccagcagccagcgcttctgtgacagccaggatgctgacctggcccaggtggagagcttccaggagctggtgtcctacccaggcagcagaagagtgtgcctgtttgaatag

SEQ ID NO: 75595 - DNA, 288 bp, Artificial Sequence
  derived and/or modified sequence
atgcacgacagcaacaacgtggagaaggacatcacccccagcgagttaccagccaatcccgctattcgagcaaactgtcaccaggaacctagcgtatgcttgcaggccgcgtgccctgagagctggatcggcttccagcgaaagtgcttctacttctccgacgatacaaagaattggacttccagccaaaggttctgcgacagtcaggacgcagacctggcccaggttgagtcctttcaggagttagtatcataccctggtagcagacgggtgtgcctctttgaatag

SEQ ID NO: 75596 - DNA, 288 bp, Artificial Sequence
  derived and/or modified sequence
atgcatgatagcaataacgtggaaaaagacattaccccttccgagttgccagcgaatcctgctattcgcgcaaattgccaccaggagccctctgtgtgcctgcaagccgcttgccccgaatcgtggatcgggtttcaaagaaaatgtttctatttttccgacgacacaaaaaactggacctcatcacagcgcttctgcgatagccaggatgccgatctggcccaagtcgagtctttccaggagttagtgtcttaccctggctcccgtcgcgtttgtctgtttgagtag

SEQ ID NO: 75597 - DNA, 288 bp, Artificial Sequence
  derived and/or modified sequence
atgcatgacagtaacaatgtggagaaagacattacaccatctgaattgcctgcaaacccagcaataagagctaactgccatcaagagccatcagtatgtcttcaagctgcatgcccagaaagctggattggttttcaaagaaagtgtttctatttttctgatgacaccaagaactggacatcaagtcagaggttttgtgactcacaagatgctgatcttgctcaggttgaaagcttccaggaactggtttcctatcctgggagcaggagagtgtgcctatttgaatga

SEQ ID NO: 75598 - DNA, 288 bp, Artificial Sequence
  derived and/or modified sequence
atgcacgacagcaacaacgtggagaaggacatcacccccagcgagctgcccgccaaccccgccatcagagccaactgccaccaggagcccagcgtgtgcctgcaggccgcctgccccgagagctggatcggcttccagagaaagtgcttctacttcagcgacgacaccaagaactggaccagcagccagagattctgcgacagccaggacgccgacctggcccaggtggagagcttccaggagctggtgagctaccccggcagcagaagagtgtgcctgttcgagtag

SEQ ID NO: 75599 - protein, 501 aa, Artificial Sequence
  derived and/or modified sequence
MAPERLRSRALSAFKLRGLLLRGEAIKYLTEALQSISELELEDKLEKIINAVEKQPLSSNMIERSVVEAAVQECSQSVDETILLMTNHPAPNLFGTPRDKAEMFRERYTILHQRTHRHELFTPPVIGSHPDESGSKFQLKTIETLLGSTTKIGDAIVLGMITQLKEGKFFLEDPTGTVQLDLSKAQFHSGLYTEACFVLAEGWFEDQVFHVNAFGFPPTEPSSTTRAYYGNINFFGGPSNTSVKTSAKLKQLEEENKDAMFVFLSDVWLDQVEVLEKLRIMFAGYSPAPPTCFILCGNFSSAPYGKNQVQALKDSLKTLADIICEYPDIHQSSRFVFVPGPEDPGFGSILPRPPLAESITNEFRQRVPFSVFTTNPCRIQYCTQEITVFREDLVNKMCRNCVRFPSSNLAIPNHFVKTILSQGHLTPLPLYVCPVYWAYDYALRVYPVPDLLVIADKYDPFTTTNTECLCINPGSFPRSGFSFKVFYPSNKTVEDSKLQGF

SEQ ID NO: 75600 - DNA, 1506 bp, Artificial Sequence
  derived and/or modified sequence
atggccccagagcgccttcgttctagggccctttccgccttcaagcttaggggactgctgcttaggggtgaagctattaagtatctaaccgaagcgctccagagcatcagcgagctggagcttgaggacaaactcgagaaaatcatcaatgccgtggagaagcaaccattgtcatcgaacatgattgaaaggtcagttgtcgaggccgccgtccaggagtgctcccagtccgtggacgagactattctgcttatgacaaaccacccagcccccaatctctttggtaccccacgggataaagccgaaatgttcagagagcgctatacaattctgcatcagcgaacccaccgccatgagcttttcaccccacctgtgattgggagccacccagatgagagcgggtctaagttccagctgaaaacgatcgaaactctgctgggatcaaccacaaagattggggacgccatcgtgctcggtatgatcacccaactgaaagagggcaagttcttcctggaggaccctactggaacagtacagctggatctcagcaaagcgcagtttcactccggcctctacaccgaggcctgttttgttctcgccgaaggctggttcgaggaccaggtgttccatgtgaacgccttcggttttcctcctaccgagccatcctccacaacaagagcatattatgggaacatcaatttctttggagggccgtctaacacgtcagtcaagaccagtgccaagctgaaacagctcgaggaggaaaataaggacgctatgttcgtattcctctctgacgtttggctcgaccaggtcgaggtccttgagaagttgcgtattatgttcgctgggtacagccccgcaccacccacgtgcttcatcctgtgcggcaatttttcctccgccccttacggaaagaatcaggtgcaggccctaaaagacagcctcaagacactggccgacatcatctgcgaataccccgacatacatcaatcgtcaagattcgtgtttgtgccgggaccagaggatcccggattcgggagcatccttccaaggcctccactggccgaaagtattaccaacgagtttcgtcagcgcgtcccgttcagcgttttcaccacgaatccctgcaggatccagtactgcacccaggagatcacagtgtttcgagaagacttagtcaataagatgtgtcgcaattgtgtgcgctttcccagcagcaatctcgcaatccctaatcattttgttaaaacaattctgtctcagggccacctgacccctctgcccttgtatgtctgtcccgtctattgggcctatgactatgcccttcgtgtgtaccctgtgccagacttgctggtgatcgcggataagtacgacccgttcaccacgaccaataccgaatgtctctgcatcaatcccggctctttcccacgttcaggattctcctttaaggtattttatccctccaataagacggtggaggactccaaactgcaggggttctag

SEQ ID NO: 75601 - DNA, 1506 bp, Artificial Sequence
  derived and/or modified sequence
atggcccctgagcggctgcggagccgggccctgagcgccttcaagctgcggggcctgctgctgcggggggaggccatcaagtacctgacagaggccctgcagagcatcagcgagctggagctggaggacaagctggagaagatcatcaatgctgtggagaagcagcccctgagcagcaacatgattgaaagatctgtggtggaggccgctgtgcaggagtgcagccagagcgtggatgagaccatcctgctgatgaccaaccacccagcccccaacctgtttggcaccccccgggacaaggccgagatgttccgggagcgctacaccatcctgcaccagaggacccacagacatgagctgttcaccccacctgtgattggcagccacccagatgaaagtggcagcaagttccagctgaagaccatcgagaccctgctgggcagcaccaccaagattggagatgccatcgtgctgggcatgatcacccagctgaaggagggcaagttcttcctggaggaccccactggaacagtgcagctggacctgagcaaggcccagttccacagcggcctgtacacagaggcctgctttgtgctggccgagggctggtttgaggaccaggtgttccacgtgaatgccttcggcttccccccaacagagcccagcagcaccacccgggcctactacggcaacatcaacttctttggaggccccagcaacacctctgtgaagaccagcgccaagctgaagcagctggaggaggagaacaaggatgccatgtttgtgttcctgagtgatgtgtggctggaccaggtggaggtgctggagaagctgcgcatcatgtttgctggctacagccctgccccacccacctgcttcatcctgtgtggcaacttcagcagcgccccctacggcaagaaccaggtgcaggccctgaaggacagcctgaagaccctggccgacatcatctgtgagtacccagacatccaccagagcagcagatttgtgtttgtgcccggccctgaggaccccggcttcggcagcatcctgcccaggcctcccctggccgagagcatcaccaatgagttccggcagagggtgcccttcagcgtcttcaccaccaacccctgccgcatccagtactgcacccaggagatcaccgtcttccgggaggacctggtgaacaagatgtgcaggaactgtgtgcgcttccccagcagcaacctggccatccccaaccactttgtgaagaccatcctgagccagggccacctgacccccctgcccctgtatgtgtgccctgtgtactgggcctatgactatgccctgcgggtgtaccctgtgcctgacctgctggtgattgctgacaagtatgaccccttcaccaccaccaacacagaatgtctgtgcatcaaccctggcagcttccccaggagcggcttctccttcaaggtgttctaccccagcaacaagacagtggaggacagcaagctgcagggcttctag

SEQ ID NO: 75602 - DNA, 1506 bp, Artificial Sequence
  derived and/or modified sequence
atggcccccgagcggctgcggagccgggccctgagcgccttcaagctgaggggcttgctgctcagaggcgaagcaatcaaatacctgacagaggcattacagtctatatcagagttagaactggaggacaagctggaaaagattatcaacgccgttgaaaagcagcctctcagctctaatatgattgagaggagtgtggtggaggcggcagtccaagagtgctcccagtctgttgacgaaactatattgctgatgaccaaccaccctgcacctaacctgtttggtactcctagggacaaggccgagatgtttcgtgagagatacacaatcctccaccagagaacgcaccgccatgagcttttcacacctcccgtgatcggtagccatcccgatgaatctggatctaagtttcagctgaagactattgaaacgctgctcggctctaccacaaaaatcggggatgccatagtgctgggaatgattactcagcttaaagagggaaaattctttctagaggaccctacgggaaccgtacagctagacttgagcaaagctcaattccacagcggcctttacaccgaagcatgcttcgtgctggccgagggatggtttgaagatcaggtgttccatgtcaatgcttttggttttcctccaaccgagccttcgtctactacccgcgcttattatggcaacatcaacttcttcggagggcctagtaacacgagcgtcaagaccagcgccaagctgaaacagttagaagaggagaataaagatgccatgtttgtgttcttgagcgacgtctggctcgatcaggttgaagtgctcgaaaaacttagaattatgttcgctggatactctcccgccccgcccacatgctttatcctctgtggcaatttctcctcagctccttacggtaaaaatcaggtgcaggcactcaaggactcgttaaagaccctggcagacataatttgtgaatatccagacatccaccagtcatctagattcgtcttcgtacccgggcctgaggacccgggatttggaagcattttgccacgtccacccctcgctgagagtattactaatgagtttaggcagcgtgtgcctttctccgtatttactacgaatccgtgccgtattcaatattgtacccaggagattactgtatttcgggaagatctggtcaacaagatgtgtcgtaactgtgtcagatttccatcttccaacctggccatacccaatcatttcgtcaagaccattctgagccagggccatctgacaccgttgccgctgtatgtatgtcccgtttactgggcgtacgactacgcgctccgcgtgtaccccgtccctgatctccttgtgatagccgacaagtacgacccttttaccaccactaacacagagtgcctgtgcatcaaccccggcagcttccctagatccggtttctcctttaaagtgttctatcctagcaacaagacggttgaggacagtaagttgcaaggcttttag

SEQ ID NO: 75603 - DNA, 1792 bp, Artificial Sequence
  derived and/or modified sequence
agtttcccggcagcaaaggagcgcgaggtggtctccactttcagcctactcggtccggggttgcgaactgtaaggtctgagttgctgcggcgcaggcagcggagaccaagcagggatcttaacagggtttagcgccacgcgggccagggccgaggccggagctgggaggggcgcgcccgggaaggggcggagctgcggcggtggcgccaaatcgcaaatatggcgccggagcggctgcggagccgggcgctctccgccttcaagttgcggggcttgctgctccgtggtgaagctattaagtacctcacagaagctcttcagtctatcagtgaattagagcttgaagataaactggaaaagataattaatgcagttgagaagcaacccttgtcatcaaacatgattgaacgatctgtggtggaagcagcagtccaggaatgcagtcagtctgttgatgaaactattctgttaatgaccaaccaccctgcaccaaatttatttggaacaccaagagataaagcagagatgtttcgtgagcgatataccattttgcaccagaggacccacaggcatgaattatttactcctccggtgataggttctcaccctgatgaaagcggaagcaaattccagcttaaaacaatagaaaccttattgggtagtacaaccaaaatcggagatgcgattgttcttggaatgataacgcagttaaaagagggaaaattttttctggaagatcctactggaacagtccaactagaccttagtaaagctcagttccatagtggtttatacacagaggcatgctttgtcttagcagaaggttggtttgaagatcaagtgtttcatgtcaatgcctttggatttccacccactgagccctctagtactactagggcatactatggaaatattaatttttttggaggtccttctaatacatctgtgaagacttctgcaaaactaaaacagctagaagaggagaataaagatgctatgtttgtgtttttatctgatgtttggttggaccaggtggaagtattggaaaaacttcgcataatgtttgctggttattcaccagcacctccaacctgctttattctgtgtggtaatttttcatctgcaccatatggaaaaaatcaagttcaagctttgaaagattccctaaaaactttggcagatataatatgtgaatacccagatattcaccaaagtagtcgttttgtgtttgtacctggtccagaggatcctggatttggttccatcttaccaaggccaccacttgctgaaagcatcactaatgaattcagacaaagggtaccattttcagtttttactactaatccttgcagaattcagtactgtacacaggaaattactgtcttccgtgaagacttagtaaataaaatgtgcagaaactgcgtccgttttcctagcagcaatttggctattcctaatcactttgtaaagactatcttatcccaaggacatctgactcccctacctctttatgtctgcccagtgtattgggcatatgactatgctttgagagtgtatcctgtgcccgatctacttgtcattgcagacaaatatgatcctttcactacgacaaataccgaatgcctctgcataaaccctggctcttttccaagaagtggattttcattcaaagttttttatccttctaataagacagtagaagatagcaaacttcaaggcttttgagattcttaaagatcatctgaagaaaattcatcagttttctgcttaactctatatcttatgtgattct

SEQ ID NO: 75604 - DNA, 1506 bp, Artificial Sequence
  derived and/or modified sequence
atggcccctgaacggctccggtcacgggctttgagtgcctttaaactacggggactgttgttaaggggggaggccattaaatatcttacagaagcccttcagtcgattagcgagctcgagcttgaggataagctcgaaaagatcataaacgccgtggaaaagcagcccctctcatctaatatgattgagaggagcgtggtcgaggcggctgtgcaagagtgtagccagagcgtagatgaaaccatcctcctcatgacaaaccatccggctcctaacctgtttgggacacccagagacaaggcggagatgtttcgtgagcggtatactatcctccaccagcgtactcaccggcacgaactatttacgccgccagtcatcggtagtcaccctgacgaaagcgggagcaagttccagctgaaaactattgaaactctcttggggagcacgacaaagattggcgacgcaattgtgcttggcatgataacacagcttaaggaggggaaattttttctcgaagacccaacaggtacagttcagttagacctgtccaaagcgcagttccacagcggcctgtacaccgaggcttgcttcgtactggccgagggttggttcgaggaccaggtgttccacgtgaatgcttttggcttccctcctacagaacctagtagcacaacacgcgcatactatggcaatatcaactttttcggcggtccgtcgaatacttctgtgaagacaagtgccaagctgaagcagttagaggaggaaaacaaggatgcgatgtttgtatttctcagcgacgtttggctggatcaggtggaagtgttggagaaactcaggattatgtttgctggctattcaccggcaccccctacctgcttcatcctctgtggtaacttcagctcggccccttacggcaaaaatcaggtgcaggcgcttaaggattcactcaagacactggctgacattatttgtgagtacccagatatccatcagtcctcccgctttgtatttgtaccaggacccgaggacccgggattcggcagcattctgccacggccacctttagctgaatctattacaaatgaatttagacagcgggtgcctttctccgtcttcaccaccaatccctgcaggatccagtactgtacccaggaaattaccgtgttcagagaggatctggtgaacaagatgtgccggaactgcgtcaggtttccctcctctaatctggcaatacctaatcattttgtgaagacaattctgtctcagggccatctgacaccgctccctctttacgtttgccccgtctactgggcctacgattacgccctcagagtgtaccccgtacccgacttgctagtgatcgcagataagtatgacccgtttacgacaacaaacactgagtgtctgtgcattaaccccggaagcttccctcgtagtggcttctcttttaaggtgttctatcccagcaacaaaactgtggaggattctaagttgcagggcttctag

SEQ ID NO: 75605 - DNA, 1506 bp, Artificial Sequence
  derived and/or modified sequence
atggcccccgagagactgagaagcagagccctgagcgccttcaagctgagaggcctgctgctgagaggcgaggccatcaagtacctgaccgaggccctgcagagcatcagcgagctggagctggaggacaagctggagaagatcatcaacgccgtggagaagcagcccctgagcagcaacatgatcgagagaagcgtggtggaggccgccgtgcaggagtgcagccagagcgtggacgagaccatcctgctgatgaccaaccaccccgcccccaacctgttcggcacccccagagacaaggccgagatgttcagagagagatacaccatcctgcaccagagaacccacagacacgagctgttcaccccccccgtgatcggcagccaccccgacgagagcggcagcaagttccagctgaagaccatcgagaccctgctgggcagcaccaccaagatcggcgacgccatcgtgctgggcatgatcacccagctgaaggagggcaagttcttcctggaggaccccaccggcaccgtgcagctggacctgagcaaggcccagttccacagcggcctgtacaccgaggcctgcttcgtgctggccgagggctggttcgaggaccaggtgttccacgtgaacgccttcggcttcccccccaccgagcccagcagcaccaccagagcctactacggcaacatcaacttcttcggcggccccagcaacaccagcgtgaagaccagcgccaagctgaagcagctggaggaggagaacaaggacgccatgttcgtgttcctgagcgacgtgtggctggaccaggtggaggtgctggagaagctgagaatcatgttcgccggctacagccccgccccccccacctgcttcatcctgtgcggcaacttcagcagcgccccctacggcaagaaccaggtgcaggccctgaaggacagcctgaagaccctggccgacatcatctgcgagtaccccgacatccaccagagcagcagattcgtgttcgtgcccggccccgaggaccccggcttcggcagcatcctgcccagaccccccctggccgagagcatcaccaacgagttcagacagagagtgcccttcagcgtgttcaccaccaacccctgcagaatccagtactgcacccaggagatcaccgtgttcagagaggacctggtgaacaagatgtgcagaaactgcgtgagattccccagcagcaacctggccatccccaaccacttcgtgaagaccatcctgagccagggccacctgacccccctgcccctgtacgtgtgccccgtgtactgggcctacgactacgccctgagagtgtaccccgtgcccgacctgctggtgatcgccgacaagtacgaccccttcaccaccaccaacaccgagtgcctgtgcatcaaccccggcagcttccccagaagcggcttcagcttcaaggtgttctaccccagcaacaagaccgtggaggacagcaagctgcagggcttctag

SEQ ID NO: 75606 - protein, 502 aa, Artificial Sequence
  derived and/or modified sequence
MAPERLRSRALSAFKLRGLLLRGEAIKYLTEALQSISELELEDKLEKIINAVEKQPLSSNMIERSVVEAAVQECSQSVDETIEHVFNIIGAFDIPRFVYNSERKKFLPLLMTNHPAPNLFGTPRDKAEMFRERYTILHQRTHRHELFTPPVIGSHPDESGSKFQLKTIETLLGSTTKIGDAIVLGMITQLKEGKFFLEDPTGTVQLDLSKAQFHSGLYTEACFVLAEGWFEDQVFHVNAFGFPPTEPSSTTRAYYGNINFFGGPSNTSVKTSAKLKQLEEENKDAMFVFLSDVWLDQVEVLEKLRIMFAGYSPAPPTCFILCGNFSSAPYGKNQVQALKDSLKTLADIICEYPDIHQSSRFVFVPGPEDPGFGSILPRPPLAESITNEFRQRVPFSVFTTNPCRIQYCTQEITVFREDLVNKMCRNCVRFPSSNLAIPNHFVKTILSQGHLTPLPLYVCPVYWAYDYALRVYPVPDLLVIADKYDPFTTTNTECLCINPVRM

SEQ ID NO: 75607 - DNA, 1509 bp, Artificial Sequence
  derived and/or modified sequence
atggcccctgagcggctgcggtcccgggctctgagcgccttcaaactgcgtggtctgctgctgagaggagaggcaattaagtacctgaccgaagccctgcagagtatcagtgagctggaactggaggataagctagagaagattatcaacgccgtggagaagcagcctttgagctcgaacatgatcgaaaggtcagtggttgaggctgcagtgcaagagtgctcccagtccgttgacgaaaccattgagcatgtgtttaatattatcggagctttcgacatcccccgtttcgtttacaattccgaaaggaagaagtttctgccactgttgatgaccaaccatcctgcccctaacctgttcggcacacctagagacaaggccgagatgttcagagaacgatatacgatcctccaccagcgcactcatcgccacgaattattcaccccccctgtaatcggcagccaccccgacgaatccggtagcaagttccagctcaaaactattgagacactgctggggagcacaacgaaaataggggatgctattgtgctgggcatgattactcaacttaaggaaggcaagttctttctggaagatcccacaggaacagtgcagctggatctctctaaggctcagttccacagcggtctgtacaccgaagcctgcttcgttctggcggaaggatggttcgaggatcaggtattccacgtgaacgcatttggcttcccccccacagagccctcatctaccacccgtgcatactacggcaacataaatttcttcggcggaccttcgaatacatccgtaaagacttctgccaagctgaagcagttggaagaggagaacaaagacgccatgtttgtgttcctctccgacgtctggctggaccaggttgaagtccttgagaagttgagaatcatgtttgctggttacagtcccgcccctccaacatgttttatcctttgtggcaacttcagctcagcaccctacggaaaaaatcaggtacaagcactgaaggactctttgaagacgcttgccgacatcatctgtgaatacccagacatacaccagtccagccggtttgtgttcgttcccggccccgaggatcccggcttcggttcaatccttcctcggcctcccctggcagaatccatcacgaacgaattccgccagcgcgtgcccttctcagtctttaccactaacccatgcaggatccagtattgtacacaagagattaccgtctttagagaagaccttgttaataaaatgtgcaggaactgtgttcggtttcctagctccaatttagccattccaaaccacttcgtgaaaacaattctgagtcaaggccacctgacccccttgccgctatacgtttgtcccgtgtactgggcatatgattacgccctgagagtttatcctgtgcccgatctgctggtgatcgccgataagtacgatccatttacgaccactaataccgagtgcctctgtataaaccctgttcggatgtag

SEQ ID NO: 75608 - DNA, 1509 bp, Artificial Sequence
  derived and/or modified sequence
atggcccctgagcggctgcggagccgggccctgagcgccttcaagctgcggggcctgctgctgcggggggaggccatcaagtacctgacagaggccctgcagagcatcagcgagctggagctggaggacaagctggagaagatcatcaatgctgtggagaagcagcccctgagcagcaacatgattgaaagatctgtggtggaggccgctgtgcaggagtgcagccagagcgtggatgagaccatcgagcacgtgttcaacatcattggagcctttgacatccccaggtttgtgtacaacagcgagaggaagaagttcctgcccctgctgatgaccaaccacccagcccccaacctgtttggcaccccccgggacaaggccgagatgttccgggagcgctacaccatcctgcaccagaggacccacagacatgagctgttcaccccacctgtgattggcagccacccagatgaaagtggcagcaagttccagctgaagaccatcgagaccctgctgggcagcaccaccaagattggagatgccatcgtgctgggcatgatcacccagctgaaggagggcaagttcttcctggaggaccccactggaacagtgcagctggacctgagcaaggcccagttccacagcggcctgtacacagaggcctgctttgtgctggccgagggctggtttgaggaccaggtgttccacgtgaatgccttcggcttccccccaacagagcccagcagcaccacccgggcctactacggcaacatcaacttctttggaggccccagcaacacctctgtgaagaccagcgccaagctgaagcagctggaggaggagaacaaggatgccatgtttgtgttcctgagtgatgtgtggctggaccaggtggaggtgctggagaagctgcgcatcatgtttgctggctacagccctgccccacccacctgcttcatcctgtgtggcaacttcagcagcgccccctacggcaagaaccaggtgcaggccctgaaggacagcctgaagaccctggccgacatcatctgtgagtacccagacatccaccagagcagcagatttgtgtttgtgcccggccctgaggaccccggcttcggcagcatcctgcccaggcctcccctggccgagagcatcaccaatgagttccggcagagggtgcccttcagcgtcttcaccaccaacccctgccgcatccagtactgcacccaggagatcaccgtcttccgggaggacctggtgaacaagatgtgcaggaactgtgtgcgcttccccagcagcaacctggccatccccaaccactttgtgaagaccatcctgagccagggccacctgacccccctgcccctgtatgtgtgccctgtgtactgggcctatgactatgccctgcgggtgtaccctgtgcctgacctgctggtgattgctgacaagtatgaccccttcaccaccaccaacacagaatgtctgtgcatcaaccctgtgaggatgtag

SEQ ID NO: 75609 - DNA, 1509 bp, Artificial Sequence
  derived and/or modified sequence
atggcccccgagcggctgcggagccgggccctgagcgccttcaagctaagaggcctgctgctccggggcgaggcaatcaagtaccttactgaggcgttacaaagcatcagtgagcttgagctggaagataaactggaaaagatcataaacgcagtcgaaaaacagccgctatccagcaatatgatcgaaaggtcggtggtcgaagccgccgtgcaggaatgctcccagtcagtggatgagacgattgagcacgtcttcaacattattggcgcattcgacattcccaggttcgtctataatagcgaacgcaagaaattcttaccccttcttatgactaatcatcccgcccccaacctctttggaacgccgagggacaaagccgaaatgtttagagagagatacaccatcttgcatcaaaggactcatcgccacgagctctttacacctccggtaattggctcacatcccgatgagtcgggtagcaagttccagttaaaaactattgagacactactcggttcaacaacgaagattggagacgctatagtgctcggcatgataacccaactaaaggagggtaagttttttctagaggatcctaccggtacagtgcagttggacctatcgaaggctcagttccactccgggttatacacagaagcttgctttgtgctggccgagggatggtttgaagaccaggtgtttcatgtgaacgcgttcggattccctccaaccgagccctcatccaccacacgagcctactatggtaatattaactttttcggtgggccctctaacacaagtgtcaagacaagcgcaaagctgaaacaactggaggaggagaataaggatgcaatgttcgtatttctgtcagatgtttggctcgaccaggtggaagtgctggagaagttgcggattatgttcgccggttactcccccgcgcctccaacttgttttatcctatgtggtaatttcagttccgcaccttatgggaagaatcaggtgcaggcacttaaagatagtctcaaaactctggctgacataatttgtgagtaccccgacatccatcagagcagccgattcgttttcgtgccggggcccgaggaccctgggttcggctctattctgccaagaccgcccctagctgagagcatcacaaatgagtttaggcagcgggttcccttttcggtgttcacaacaaatccttgcaggattcaatactgtacacaagagataactgtctttcgtgaggaccttgtcaacaagatgtgccgtaactgcgtgcgattcccctccagtaatcttgccattcctaatcacttcgtcaaaaccattctgtcgcagggacacctgacgcccctcccattgtatgtgtgcccggtgtactgggcttatgattatgctctgcgcgtatatcccgtaccagacctcctggtcattgctgacaagtacgatccttttacgacgaccaacacagagtgcctgtgcataaaccccgtcagaatgtag

SEQ ID NO: 75610 - DNA, 1581 bp, Artificial Sequence
  derived and/or modified sequence
cgcaaatatggcgccggagcggctgcggagccgggcgctctccgccttcaagttgcggggcttgctgctccgtggtgaagctattaagtacctcacagaagctcttcagtctatcagtgaattagagcttgaagataaactggaaaagataattaatgcagttgagaagcaacccttgtcatcaaacatgattgaacgatctgtggtggaagcagcagtccaggaatgcagtcagtctgttgatgaaactatagagcacgttttcaatatcataggagcatttgatattccacgctttgtgtacaattcagaaagaaaaaaatttcttcctctgttaatgaccaaccaccctgcaccaaatttatttggaacaccaagagataaagcagagatgtttcgtgagcgatataccattttgcaccagaggacccacaggcatgaattatttactcctccggtgataggttctcaccctgatgaaagcggaagcaaattccagcttaaaacaatagaaaccttattgggtagtacaaccaaaatcggagatgcgattgttcttggaatgataacgcagttaaaagagggaaaattttttctggaagatcctactggaacagtccaactagaccttagtaaagctcagttccatagtggtttatacacagaggcatgctttgtcttagcagaaggttggtttgaagatcaagtgtttcatgtcaatgcctttggatttccacccactgagccctctagtactactagggcatactatggaaatattaatttttttggaggtccttctaatacatctgtgaagacttctgcaaaactaaaacagctagaagaggagaataaagatgctatgtttgtgtttttatctgatgtttggttggaccaggtggaagtattggaaaaacttcgcataatgtttgctggttattcaccagcacctccaacctgctttattctgtgtggtaatttttcatctgcaccatatggaaaaaatcaagttcaagctttgaaagattccctaaaaactttggcagatataatatgtgaatacccagatattcaccaaagtagtcgttttgtgtttgtacctggtccagaggatcctggatttggttccatcttaccaaggccaccacttgctgaaagcatcactaatgaattcagacaaagggtaccattttcagtttttactactaatccttgcagaattcagtactgtacacaggaaattactgtcttccgtgaagacttagtaaataaaatgtgcagaaactgcgtccgttttcctagcagcaatttggctattcctaatcactttgtaaagactatcttatcccaaggacatctgactcccctacctctttatgtctgcccagtgtattgggcatatgactatgctttgagagtgtatcctgtgcccgatctacttgtcattgcagacaaatatgatcctttcactacgacaaataccgaatgcctctgcataaaccctgtaagaatgtagttaatcttatatagtcattatttatcaagattagagtgcattttttaatttaaaaatatatattt

SEQ ID NO: 75611 - DNA, 1509 bp, Artificial Sequence
  derived and/or modified sequence
atggcacccgagaggctgagatctcgcgctctgtccgcttttaaactgcgaggcctgttactcaggggagaagccatcaagtatctaaccgaagccctgcagtcaatcagcgaactggagttagaagacaaactggagaagatcatcaacgccgtcgagaaacagcctttgtcctcaaatatgatagaacgttcagtggtggaggccgctgtgcaggaatgtagccagtctgtggatgagactatagagcacgtgtttaacataataggcgcatttgatatccccaggttcgtatacaattccgaaagaaagaagttcctgccattgctcatgacaaatcatcccgcaccgaacctgtttgggaccccacgtgataaagccgaaatgttcagggaacgctacacaatccttcatcaacgtactcacaggcatgaactgtttactccacctgttatcgggtcccacccggacgaatccgggtcaaaattccagctgaaaacaatcgagactttgcttggtagcaccaccaaaattggcgatgctatagtgttgggcatgattacccagctgaaggagggaaagtttttcctggaggacccaaccggcacagtgcagctggacctatctaaagcccaattccactcgggactgtacacagaggcttgcttcgtgctggctgaggggtggttcgaggaccaggtgtttcacgtgaatgcctttggctttccaccaactgaaccttctagtaccacaagagcctattatggcaatatcaactttttcggaggaccctcaaacacctccgttaaaacctctgctaagctgaaacagctggaagaggaaaataaggatgctatgtttgtcttcctgagcgatgtatggctggatcaggtggaagtgctcgagaaacttagaattatgtttgctggatattccccagctccaccaacctgttttatcctctgcggaaatttttcttctgccccttatgggaagaatcaggtacaggctctcaaagatagcttgaagacattggctgatatcatttgtgagtacccggatattcaccaaagctcaaggttcgtctttgtgccagggcctgaggaccctgggttcggtagtatcctgcctagaccccctctcgccgagtccatcaccaacgagttccggcagcgcgtaccattcagtgtctttacaacaaatccatgtagaatccagtactgcacccaggagatcactgtatttagggaggacctggtgaacaagatgtgtaggaattgtgttaggttccccagcagtaacctggcaattcccaatcactttgttaagactatcctttcacaagggcacctgactccgcttccactttacgtatgcccagtctattgggcctacgattacgccctgcgcgtgtaccctgtccctgacctgttggtgatcgcagacaaatacgacccattcaccacaaccaacacggaatgcctctgcattaatcctgttagaatgtag

SEQ ID NO: 75612 - DNA, 1509 bp, Artificial Sequence
  derived and/or modified sequence
atggcccccgagagactgagaagcagagccctgagcgccttcaagctgagaggcctgctgctgagaggcgaggccatcaagtacctgaccgaggccctgcagagcatcagcgagctggagctggaggacaagctggagaagatcatcaacgccgtggagaagcagcccctgagcagcaacatgatcgagagaagcgtggtggaggccgccgtgcaggagtgcagccagagcgtggacgagaccatcgagcacgtgttcaacatcatcggcgccttcgacatccccagattcgtgtacaacagcgagagaaagaagttcctgcccctgctgatgaccaaccaccccgcccccaacctgttcggcacccccagagacaaggccgagatgttcagagagagatacaccatcctgcaccagagaacccacagacacgagctgttcaccccccccgtgatcggcagccaccccgacgagagcggcagcaagttccagctgaagaccatcgagaccctgctgggcagcaccaccaagatcggcgacgccatcgtgctgggcatgatcacccagctgaaggagggcaagttcttcctggaggaccccaccggcaccgtgcagctggacctgagcaaggcccagttccacagcggcctgtacaccgaggcctgcttcgtgctggccgagggctggttcgaggaccaggtgttccacgtgaacgccttcggcttcccccccaccgagcccagcagcaccaccagagcctactacggcaacatcaacttcttcggcggccccagcaacaccagcgtgaagaccagcgccaagctgaagcagctggaggaggagaacaaggacgccatgttcgtgttcctgagcgacgtgtggctggaccaggtggaggtgctggagaagctgagaatcatgttcgccggctacagccccgccccccccacctgcttcatcctgtgcggcaacttcagcagcgccccctacggcaagaaccaggtgcaggccctgaaggacagcctgaagaccctggccgacatcatctgcgagtaccccgacatccaccagagcagcagattcgtgttcgtgcccggccccgaggaccccggcttcggcagcatcctgcccagaccccccctggccgagagcatcaccaacgagttcagacagagagtgcccttcagcgtgttcaccaccaacccctgcagaatccagtactgcacccaggagatcaccgtgttcagagaggacctggtgaacaagatgtgcagaaactgcgtgagattccccagcagcaacctggccatccccaaccacttcgtgaagaccatcctgagccagggccacctgacccccctgcccctgtacgtgtgccccgtgtactgggcctacgactacgccctgagagtgtaccccgtgcccgacctgctggtgatcgccgacaagtacgaccccttcaccaccaccaacaccgagtgcctgtgcatcaaccccgtgagaatgtag

SEQ ID NO: 75613 - DNA, 1380 bp, Artificial Sequence
  derived and/or modified sequence
atgccccagctgaacggcggcggcggcgacgacctgggcgccaacgacgagctgatcagcttcaaggacgagggcgagcaggaggagaagagcagcgagaacagcagcgccgagagagacctggccgacgtgaagagcagcctggtgaacgagagcgagaccaaccagaacagcagcagcgacagcgaggccgagagaagacccccccccagaagcgagagcttcagagacaagagcagagagagcctggaggaggccgccaagagacaggacggcggcctgttcaagggccccccctaccccggctaccccttcatcatgatccccgacctgaccagcccctacctgcccaacggcagcctgagccccaccgccagaacctacctgcagatgaagtggcccctgctggacgtgcaggccggcagcctgcagagcagacaggccctgaaggacgccagaagccccagccccgcccacatcgtgagcaacaaggtgcccgtggtgcagcacccccaccacgtgcaccccctgacccccctgatcacctacagcaacgagcacttcacccccggcaacccccccccccacctgcccgccgacgtggaccccaagaccggcatccccagacccccccacccccccgacatcagcccctactaccccctgagccccggcaccgtgggccagatcccccaccccctgggctggctggtgccccagcagggccagcccgtgtaccccatcaccaccggcggcttcagacacccctaccccaccgccctgaccgtgaacgccagcatgagcagattccccccccacatggtgcccccccaccacaccctgcacaccaccggcatcccccaccccgccatcgtgacccccaccgtgaagcaggagagcagccagagcgacgtgggcagcctgcacagcagcaagcaccaggacagcaagaaggaggaggagaagaagaagccccacatcaagaagcccctgaacgccttcatgctgtacatgaaggagatgagagccaaggtggtggccgagtgcaccctgaaggagagcgccgccatcaaccagatcctgggcagaagatggcacgccctgagcagagaggagcaggccaagtactacgagctggccagaaaggagagacagctgcacatgcagctgtaccccggctggagcgccagagacaactacggcaagaagaagaagagaaagagagacaagcagcccggcgagaccaacgagcacagcgagtgcttcctgaacccctgcctgagcctgccccccatcaccgacctgagcgcccccaagaagtgcagagccagattcggcctggaccagcagaacaactggtgcggcccctgcagcctgtag

SEQ ID NO: 75614 - DNA, 1380 bp, Artificial Sequence
  derived and/or modified sequence
atgcctcagttgaatggaggtggaggggatgatctgggagctaatgatgagctcatctctttcaaggatgagggtgagcaggaggagaagtcctcagaaaacagctccgcggagcgcgatttggcggatgtcaaaagctcactggtaaatgagagcgagacgaaccagaactcttcctcggactccgaggccgagaggaggccccccccccgctcggagagcttccgggataaatctcgggaaagtctcgaagaggccgctaagaggcaagacggcgggttgtttaaaggcccaccttacccaggctacccttttatcatgatccccgatttaacaagcccttatctgccaaacggttccctgagccctacagccaggacctatctgcagatgaaatggcccctcctggacgtgcaggcaggcagtctccaatctagacaggctctgaaagacgctagatctccgagtcccgcccacatcgtttcaaacaaggtgcccgtcgtgcagcatccccaccatgtccaccctctgacaccactgatcacctattccaatgagcacttcacccccgggaacccacccccccacctacctgccgatgtggacccaaaaacgggtatacctcgccctcctcacccccccgacatcagtccctattaccctcttagtcctggcacggttggtcagatccctcatcctctgggctggcttgtgccacagcaggggcagcccgtctaccccatcacaaccggcggctttcggcatccctatcctactgctctcacagtaaacgccagcatgagtcgattcccaccccacatggttccaccacatcacaccttacacacaactggtattccccatccagctatcgttactcccacagttaaacaggaaagtagccagtccgatgtcgggtccttgcacagctccaaacatcaggattctaagaaagaggaggaaaaaaagaagcctcacatcaaaaaaccattaaatgcctttatgctgtacatgaaggagatgcgggctaaggtggtagccgaatgcaccctcaaggagtctgcagctatcaaccagatcctggggcgccgctggcatgctctgtcccgggaggaacaggctaagtactacgagcttgcgagaaaagaacgccagctacatatgcagctgtaccccggatggagcgcccgcgataattacggaaagaaaaagaagagaaaacgagacaaacagcctggtgagacaaacgagcattctgagtgtttcttgaacccctgtctatcactacctcccataactgatctgtccgcacccaaaaagtgccgagccagatttgggctggaccaacagaacaactggtgtggtccttgctccttatag

SEQ ID NO: 75615 - DNA, 1380 bp, Artificial Sequence
  derived and/or modified sequence
atgccccagctgaatggaggcggcggagatgacctgggcgccaatgatgagctgatctccttcaaggatgaaggagagcaggaggagaagagcagcgagaacagcagcgctgagcgggacctggctgatgtgaagagcagcctggtgaatgaaagtgagaccaaccagaacagcagcagtgacagcgaggccgagcggcggcccccacccaggtctgagagcttccgggacaagagccgggagagcctggaggaggccgccaagaggcaggacggcggcctcttcaagggccccccctacccaggctaccccttcatcatgatcccagacctgaccagcccctacctgcccaacggcagcctgagccccacagcccggacctacctgcagatgaagtggcccctgctggatgtgcaggccggcagcctgcagagccggcaggccctgaaggatgcccggagccccagccctgcccacatcgtgagcaacaaggtgcctgtggtgcagcacccccaccacgtgcaccccctgacccccctcatcacctacagcaatgagcacttcaccccaggcaaccccccaccccacctgcctgcagatgtggaccccaagacaggcatcccccggcccccccaccccccagacatcagcccctactaccccctgagccctggcaccgtgggccagatcccccaccccctgggctggctggtgccccagcagggccagcctgtgtaccccatcaccaccggcggcttccgccacccctaccccacagccctgactgtgaatgcctccatgagccgcttccccccccacatggtgcccccccaccacaccctgcacaccaccggcatcccccacccagccatcgtgacccccaccgtgaagcaggagagcagccagagtgatgtgggcagcctgcacagcagcaagcaccaggacagcaagaaggaggaggagaagaagaagccccacatcaagaagcccctgaatgccttcatgctgtacatgaaggagatgagggccaaggtggtggccgagtgcaccctgaaggagagcgctgccatcaaccagatcctgggccgccgctggcacgccctgagccgggaggagcaggccaagtactatgagctggccaggaaggagcggcagctgcacatgcagctgtacccaggctggagcgcccgggacaactacggcaagaagaagaagaggaagagggacaagcagcccggggagaccaatgagcacagcgagtgcttcctgaacccctgcctgagcctgccccccatcacagacctgagcgcccccaagaagtgccgggccaggtttggcctggaccagcagaacaactggtgtggcccctgcagcctgtag

SEQ ID NO: 75616 - DNA, 1380 bp, Artificial Sequence
  derived and/or modified sequence
atgccccagctgaacggcggcggcggcgacgacctgggcgccaacgacgaactcatctcatttaaggacgaaggcgagcaggaggagaaaagctctgaaaatagctctgcagagcgcgacttggccgacgtcaagtcctcgcttgttaacgagtctgagaccaaccagaatagctcctccgatagtgaagccgagagaagacccccccctcgatccgaatctttccgggataagtcaagagaatcactagaagaggcagcaaaaagacaggacggcgggctcttcaaaggccccccttatccaggctacccatttatcatgataccagaccttaccagcccttacctccctaacggaagtctgagcccaacagcaaggacatatctccagatgaaatggccattgctggacgtgcaagcaggatctttgcagtccaggcaggccctgaaggatgcccgttcccctagtccagcccatatcgtgtcaaataaggtgcctgtcgtccagcatccccaccatgtgcacccacttacccccttaataacctactcaaatgagcatttcaccccaggcaatcctcctccccacctaccggcggacgttgatcccaagacggggattcctcggcctccgcatcccccggacattagcccctattaccctctttcgccaggtacggtgggacagatcccacatccactgggctggctggttccccagcagggccagccagtttatcctattactacaggggggtttcgacatccctatccaaccgcccttacggtgaacgcgtcaatgagcaggttccccccgcacatggtgcctccccatcatactctgcacacaaccggaattcctcatccagctattgtgacacccacggttaaacaggagtctagtcagagcgatgtcggcagcctgcacagtagcaaacaccaggactcaaaaaaggaggaggaaaaaaagaagccccacattaaaaagccacttaacgcatttatgctttacatgaaggagatgagggcgaaggtggtggccgaatgtacattgaaggaaagcgctgcaatcaaccagatcctggggaggcgttggcatgctcttagcagagaggaacaggccaaatattatgaactggcacgtaaggaaagacaactgcatatgcagctataccccggctggtccgcccgtgataactatggcaaaaaaaaaaagaggaagagggacaagcagccgggtgaaacgaacgaacacagcgagtgcttcctcaatccttgtctgtcccttccgcctatcaccgacctctctgcccccaaaaagtgccgtgctagattcgggttggatcagcagaataattggtgtggcccttgttctctctag

SEQ ID NO: 75617 - DNA, 1380 bp, Artificial Sequence
  derived and/or modified sequence
atgcctcaactgaacggcggtgggggagacgaccttggggctaacgatgagctgataagcttcaaagatgagggagaacaagaggaaaagagtagcgagaattctagtgccgagagggacctcgctgacgtcaaaagcagcctcgtcaacgagagcgagaccaatcagaactctagtagtgactcggaggctgagagaagaccccctcccagatccgagtcttttagagacaaatctcgggaatccctcgaggaggcagccaaacggcaagacgggggactgtttaagggcccaccttaccctggctaccccttcattatgatcccagacctaacgtctccatacctacccaatggctctttgtctcctaccgcccgtacatacctgcaaatgaaatggccgcttctggatgtccaagcgggtagcctgcaatcccggcaagcgctgaaggatgctcgaagtccctctccagctcatatcgtgtccaacaaggtccccgtggttcagcacccacaccatgtacatcccttgactccccttatcacgtatagcaacgaacactttactccaggaaatccccctccccatctgcccgctgatgtggacccaaaaaccggcataccccgaccccctcatcccccagacatcagcccgtattatcctctttcccctgggaccgtcggacaaatacctcatcccttgggatggctggtgccgcagcaagggcagcccgtttaccccatcaccaccggtgggtttagacatccgtacccaacagctctgaccgtcaacgcctccatgagccggtttcccccacatatggtccccccacaccacaccctccacaccacaggtataccacacccagcgatcgtgacaccaaccgtcaaacaggaaagttctcagtctgatgtcgggagtttgcatagcagtaagcatcaggatagcaagaaagaggaagaaaaaaaaaaaccgcatattaaaaaaccccttaacgcctttatgctctatatgaaagaaatgagagcaaaagtggtggctgagtgcactctcaaagaatctgcagcaatcaatcagatactagggcgtaggtggcatgctctctctcgcgaggaacaggctaagtactacgagctggcacgcaaggagcgtcagctgcacatgcagctgtacccagggtggtccgcccgtgacaactacggaaagaagaagaaacgcaagcgcgacaaacagcccggagaaacgaacgagcacagtgagtgctttcttaacccttgcttatcgttacctccgataacggaccttagcgcccctaaaaagtgccgagctcgctttgggcttgaccagcaaaacaattggtgcggcccatgcagcctatag

SEQ ID NO: 75618 - DNA, 1547 bp, Artificial Sequence
  derived and/or modified sequence
gggggggcaaaactttttgggggtgattttttttggcttttcttcctccttcatttttcttccaaaattgctgctggtgggtgaaaaaaaaatgccgcagctgaacggcggtggaggggatgacctaggcgccaacgacgaactgatttccttcaaagacgagggcgaacaggaggagaagagctccgaaaactcctcggcagagagggatttagctgatgtcaaatcgtctctagtcaatgaatcagaaacgaatcaaaacagctcctccgattccgaggcggaaagacggcctccgcctcgctccgaaagtttccgagacaaatcccgggaaagtttggaagaagcggccaagaggcaagatggagggctctttaaggggccaccgtatcccggctaccccttcatcatgatccccgacctgacgagcccctacctccccaacggatcgctctcgcccaccgcccgaacctatctccagatgaaatggccactgcttgatgtccaggcagggagcctccagagtagacaagccctcaaggatgcccggtccccatcaccggcacacattgtctctaacaaagtgccagtggtgcagcaccctcaccatgtccaccccctcacgcctcttatcacgtacagcaatgaacacttcacgccgggaaacccacctccacacttaccagccgacgtagaccccaaaacaggaatcccacggcctccgcaccctccagatatatccccgtattacccactatcgcctggcaccgtaggacaaatcccccatccgctaggatggttagtaccacagcaaggtcaaccagtgtacccaatcacgacaggaggattcagacacccctaccccacagctctgaccgtcaatgcttccatgtccaggttccctccccatatggtcccaccacatcatacgctacacacgacgggcattccgcatccggccatagtcacaccaacagtcaaacaggaatcgtcccagagtgatgtcggctcactccatagttcaaagcatcaggactccaaaaaggaagaagaaaagaagaagccccacataaagaaacctcttaatgcattcatgttgtatatgaaggaaatgagagcaaaggtcgtagctgagtgcacgttgaaagaaagcgcggccatcaaccagatccttgggcggaggtggcatgcactgtccagagaagagcaagcgaaatactacgagctggcccggaaggagcgacagcttcatatgcaactgtaccccggctggtccgcgcgggataactatggaaagaagaagaagaggaaaagggacaagcagccgggagagaccaatgaacacagcgaatgtttcctaaatccttgcctttcacttcctccgattacagacctgagcgctcctaagaaatgccgagcgcgctttggccttgatcaacagaataactggtgcggcccttgcagtctttgaatttggaatattacaatggagaaaaaaaaagtgcgttcgctacatacaaggtgaaggcagctgcctcagcccaccc

SEQ ID NO: 75619 - protein, 176 aa, Artificial Sequence
  derived and/or modified sequence
MSRFPPHMVPPHHTLHTTGIPHPAIVTPTVKQESSQSDVGSLHSSKHQDSKKEEEKKKPHIKKPLNAFMLYMKEMRAKVVAECTLKESAAINQILGRRWHALSREEQAKYYELARKERQLHMQLYPGWSARDNYGKKKKRKRDKQPGETNGEKKSAFATYKVKAAASAHPLQMEAY

SEQ ID NO: 75620 - DNA, 531 bp, Artificial Sequence
  derived and/or modified sequence
atgagcagattccccccccacatggtgcccccccaccacaccctgcacaccaccggcatcccccaccccgccatcgtgacccccaccgtgaagcaggagagcagccagagcgacgtgggcagcctgcacagcagcaagcaccaggacagcaagaaggaggaggagaagaagaagccccacatcaagaagcccctgaacgccttcatgctgtacatgaaggagatgagagccaaggtggtggccgagtgcaccctgaaggagagcgccgccatcaaccagatcctgggcagaagatggcacgccctgagcagagaggagcaggccaagtactacgagctggccagaaaggagagacagctgcacatgcagctgtaccccggctggagcgccagagacaactacggcaagaagaagaagagaaagagagacaagcagcccggcgagaccaacggcgagaagaagagcgccttcgccacctacaaggtgaaggccgccgccagcgcccaccccctgcagatggaggcctactag

SEQ ID NO: 75621 - DNA, 531 bp, Artificial Sequence
  derived and/or modified sequence
atgagtcgcttcccgcctcatatggtgcctccccatcacactctgcatactactggcattcctcatcctgctatcgtcaccccaacggtgaaacaagagtcttcacagagcgatgtggggtctctccattcatctaagcaccaggactccaaaaaggaagaagaaaagaagaagccacatatcaagaagccattaaatgcattcatgctctatatgaaggaaatgcgagcaaaggtggtggctgaatgtacactgaaggagtccgcagccatcaaccagatcctggggcgccgttggcacgcgctgtctcgggaggaacaggctaaatactatgagttagcccgcaaggagcgacagctgcacatgcaattataccctggctggtcagctcgggacaactacgggaaaaaaaagaagcggaaaagggataaacaacccggggaaactaacggggaaaaaaagtccgcttttgctacgtacaaggtaaaagctgccgccagcgcccatcctctacaaatggaagcgtactag

SEQ ID NO: 75622 - DNA, 531 bp, Artificial Sequence
  derived and/or modified sequence
atgagccgcttccccccccacatggtgcccccccaccacaccctgcacaccaccggcatcccccacccagccatcgtgacccccaccgtgaagcaggagagcagccagagtgatgtgggcagcctgcacagcagcaagcaccaggacagcaagaaggaggaggagaagaagaagccccacatcaagaagcccctgaatgccttcatgctgtacatgaaggagatgagggccaaggtggtggccgagtgcaccctgaaggagagcgctgccatcaaccagatcctgggccgccgctggcacgccctgagccgggaggagcaggccaagtactatgagctggccaggaaggagcggcagctgcacatgcagctgtacccaggctggagcgcccgggacaactacggcaagaagaagaagaggaagagggacaagcagcccggggagaccaacggggagaagaagagcgcctttgccacctacaaggtgaaggctgctgccagcgcccaccccctgcagatggaggcctactag

SEQ ID NO: 75623 - DNA, 531 bp, Artificial Sequence
  derived and/or modified sequence
atgagccggttccccccccacatggtgcccccccaccacaccctgcacaccactgggataccccatcccgccatagtgaccccaaccgtgaagcaggagtcctcacagagtgacgttggctcactacatagctccaagcaccaggactcgaagaaggaagaagagaagaaaaagccgcacattaagaagcccctgaacgcctttatgctctacatgaaagagatgcgcgcaaaagtggttgcggagtgtacgcttaaggagagcgccgccatcaatcagattctgggtcgccgctggcatgctttgagtagagaagaacaagcaaaatactacgagttagcgagaaaagaacgccagctccatatgcagctgtacccagggtggtccgcacgtgataactatggcaagaaaaagaaacgaaagcgtgacaaacaaccaggcgaaacgaacggtgaaaagaagtccgccttcgctacatacaaggtgaaagctgcggcgtcagcccacccactacagatggaggcttactag

SEQ ID NO: 75624 - DNA, 531 bp, Artificial Sequence
  derived and/or modified sequence
atgtcaagattcccgcctcacatggtgcccccacaccatacactgcatactaccggaattccccatcccgcaattgtgacaccaactgtgaaacaggagagttcacagagtgatgtcggctctctacactcgtcgaagcaccaagactccaagaaagaagaagagaagaaaaaaccacacatcaaaaagcctcttaatgcctttatgttatatatgaaagaaatgagagctaaagtcgtagccgagtgtacgctgaaagaatcagccgcaatcaaccagattttgggcagacggtggcatgctctgagtcgcgaggagcaggcaaagtattatgaattagcacgtaaggagaggcaattgcacatgcagctgtatcccggttggtctgcacgcgataactacgggaagaagaaaaaaagaaagagagataaacaaccaggggagacaaatggtgaaaagaaatccgccttcgcaacatacaaagttaaagcagcagcgtctgcccatccgcttcagatggaggcctattag

SEQ ID NO: 75625 - DNA, 738 bp, Artificial Sequence
  derived and/or modified sequence
caggaatcccacggcctccgcaccctccagatatatccccgtattacccactatcgcctggcaccgtaggacaaatcccccatccgctaggatggttagtaccacagcaaggtcaaccagtgtacccaatcacgacaggaggattcagacacccctaccccacagctctgaccgtcaatgcttccatgtccaggttccctccccatatggtcccaccacatcatacgctacacacgacgggcattccgcatccggccatagtcacaccaacagtcaaacaggaatcgtcccagagtgatgtcggctcactccatagttcaaagcatcaggactccaaaaaggaagaagaaaagaagaagccccacataaagaaacctcttaatgcattcatgttgtatatgaaggaaatgagagcaaaggtcgtagctgagtgcacgttgaaagaaagcgcggccatcaaccagatccttgggcggaggtggcatgcactgtccagagaagagcaagcgaaatactacgagctggcccggaaggagcgacagcttcatatgcaactgtaccccggctggtccgcgcgggataactatggaaagaagaagaagaggaaaagggacaagcagccgggagagaccaatggagaaaaaaaaagtgcgttcgctacatacaaggtgaaggcagctgcctcagcccaccctcttcagatggaagcttactagattcgcctcccccctccccgaa

SEQ ID NO: 75626 - protein, 874 aa, Artificial Sequence
  derived and/or modified sequence
MTKDKNSPGLKKKSQSVDINAPGFNPLAGAGKQTPQASKPPAPKTPIIEEEQNNAANTQKHPSRRSELKRFYTIDTGQKKTLDKKDGRRMSFQKPKGTIEYTVESRDSLNSIALKFDTTPNELVQLNKLFSRAVVTGQVLYVPDPEYVSSVESSPSLSPVSPLSPTSSEAEFDKTTNPDVHPTEATPSSTFTGIRPARVVSSTSEEEEAFTEKFLKINCKYITSGKGTVSGVLLVTPNNIMFDPHKNDPLVQENGCEEYGIMCPMEEVMSAAMYKEILDSKIKESLPIDIDQLSGRDFCHSKKMTGSNTEEIDSRIRDAGNDSASTAPRSTEESLSEDVFTESELSPIREELVSSDELRQDKSSGASSESVQTVNQAEVESLTVKSESTGTPGHLRSDTEHSTNEVGTLCHKTDLNNLEMAIKEDQIADNFQGISGPKEDSTSIKGNSDQDSFLHENSLHQEESQKENMPCGETAEFKQKQSVNKGKQGKEQNQDSQTEAEELRKLWKTHTMQQTKQQRENIQQVSQKEAKHKITSADGHIESSALLKEKQRHRLHKFLCLRVGKPMRKTFVSQASATMQQYAQRDKKHEYWFAVPQERTDHLYAFFIQWSPEIYAEDTGEYTREPGFIVVKKIEESETIEDSSNQAAAREWEVVSVAEYHRRIDALNTEELRTLCRRLQITTREDINSKQVATVKADLESESFRPNLSDPSELLLPDQIEKLTKHLPPRTIGYPWTLVYGTGKHGTSLKTLYRTMTGLDTPVLMVIKDSDGQVFGALASEPLKVSDGFYGTGETFVFTFCPEFEVFKWTGDNMFFIKGDMDSLAFGGGGGEFALWLDGDLYHGRSHSCKTFGNRTLSKKEDFFIQDIEIWAFE

SEQ ID NO: 75627 - DNA, 2625 bp, Artificial Sequence
  derived and/or modified sequence
atgacaaaagataaaaattctccaggcctgaaaaagaaatcacagagtgtggatatcaatgccccaggttttaatcccctggctggcgccggaaagcaaacgccccaggcctctaagcctccagctccaaagacccctattattgaggaggaacagaacaacgccgctaatacacagaagcatccttcaaggcggtctgagctgaaaagattttacactatagataccggccaaaagaaaaccctggacaaaaaagacggtcgaagaatgtcatttcagaagcctaaaggcactatcgagtacactgtcgaaagccgcgactccctcaattccatcgctctgaagtttgacacgacccctaacgagctggtccaactgaacaaactgttttcacgggcagtggtgaccgggcaggtgctctatgtgcccgatccagaatatgtttcctctgtcgagagcagtccatccctgagccctgtcagtccgctgtctccgacatcatccgaggccgaattcgacaagacaacaaatcccgacgttcatcctaccgaggcaactccctcttctaccttcacgggcatcaggccggcccgtgtggtatcaagcacaagcgaggaagaggaagcctttactgaaaagtttctaaaaatcaactgcaaatacatcaccagcgggaagggaactgtatcgggggtactgttggtgaccccaaacaatattatgtttgatccgcacaaaaatgacccactcgtgcaggaaaatggttgcgaagagtacggcataatgtgccctatggaagaggtgatgagtgctgccatgtacaaagaaattttggatagcaagatcaaggagtcattaccaattgatatcgaccagctctccggtcgtgacttttgtcacagcaagaaaatgactggcagcaatacagaagaaatcgacagtcgcatccgggacgcaggcaatgattccgcctcgacagcccccaggtcgactgaggaatccctgagcgaagatgtcttcactgagagcgagttgagccctatccgagaggagctcgtcagcagcgatgagctacggcaggataaatcctccggcgcgtccagtgaaagtgtgcagaccgtgaatcaggcggaggtggagtctctgactgtcaaaagcgaatcaaccgggactcccggccacctgaggagcgatacagagcacagcactaatgaagtgggtactctctgccataaaaccgatctgaataatttggagatggccatcaaggaggatcagatcgccgacaattttcaaggtatatcaggcccaaaagaagactcgacctcaattaaggggaattccgatcaggacagtttcctgcatgaaaatagcctgcaccaggaggagtcacagaaggagaatatgccttgcggagagaccgctgagttcaaacagaaacagtctgtgaataaaggcaagcaaggcaaagagcagaatcaggattctcagactgaggcagaggaacttcgaaaactttggaaaacccacaccatgcagcagaccaagcagcagagggaaaatatccaacaggtctctcagaaggaggcaaagcataagatcacctccgctgatggccacattgaatcctctgccctgcttaaggagaaacagcgtcatcgactgcacaagtttctttgtctcagagtcggcaagcccatgaggaagacattcgtgtctcaggcctccgccacaatgcagcagtacgcacagagggacaaaaaacatgagtattggtttgccgtgcctcaggagcggaccgaccacctgtatgccttctttatccagtggagccccgagatctacgccgaagatacaggtgagtacaccagagaaccagggtttatagtggtgaagaagattgaggagtccgagacaattgaggactcatccaatcaggcagcagcccgcgaatgggaggtagtaagtgtggcggagtaccaccgtagaattgatgccttgaatactgaggaactccgaacactgtgcagacgtctacaaataactactcgagaggatatcaacagtaagcaggtggccacagtcaaagctgaccttgaatctgagagcttccgccccaatctctcagacccgtctgagctcttgcttcctgatcagatcgagaaattaacaaagcacctgccacctcgtacaatagggtacccctggactctggtatacgggactggtaagcacgggacgtcactgaagacgctgtaccgcacaatgactggcctcgacacacctgtgctcatggttattaaggattccgacggccaggtctttggcgcgttggcgtcagagcccctcaaggtgtctgacggattctatggaactggagagacattcgtgttcaccttttgtccggaattcgaagtgttcaaatggaccggcgacaacatgttttttattaagggcgatatggattcactggcattcgggggaggagggggggaatttgccctgtggcttgatggcgacctgtaccatggtaggagtcactcatgcaagacatttggcaatagaactctctctaagaaagaggacttcttcatccaagacatcgagatctgggccttcgaatag

SEQ ID NO: 75628 - DNA, 2625 bp, Artificial Sequence
  derived and/or modified sequence
atgaccaaggacaagaacagccctggcctgaagaagaagagccagagcgtggacatcaatgcccctggcttcaaccccctggccggggccggcaagcagaccccccaggccagcaagcccccagcccccaagacccccatcatcgaggaggagcagaacaatgctgccaacacccagaagcaccccagccgccgctctgagctgaagcgcttctacaccatcgacaccggccagaagaagaccctggacaagaaggatggccgcaggatgtccttccagaagcccaagggcaccatcgagtacacagtggagagccgggacagcctgaacagcatcgccctgaagtttgacaccaccccaaatgagctggtgcagctgaacaagctgttcagcagagctgtggtgacaggccaggtgctgtatgtgcctgaccctgaatatgtgtcctctgtggagagcagccccagcctgagccctgtgagccccctgagccccaccagcagcgaggccgagtttgacaagaccaccaacccagatgtgcaccccacagaggccacccccagcagcaccttcaccggcatccggcctgcccgggtggtgagcagcaccagcgaggaggaggaggccttcacagagaagttcctgaagatcaactgcaagtacatcaccagcggcaagggcaccgtgtctggagtgctgctggtgacccccaacaacatcatgtttgacccccacaagaatgaccccctggtgcaggagaatggctgtgaggagtatggcatcatgtgccccatggaggaggtgatgtctgctgccatgtacaaggagatcctggacagcaagatcaaggagagcctgcccatcgacatcgaccagctgagcggccgggacttctgccacagcaagaagatgacaggcagcaacacagaggagattgacagccgcatcagagatgctggaaatgattctgccagcacagcccccaggagcacagaggagagcctgtctgaagatgtgttcacagaaagtgagctgagccccatccgggaggagctggtgtccagtgatgagctgcggcaggacaagagcagcggggccagcagcgagagcgtgcagacagtgaaccaggccgaggtggagagcctgactgtgaagtctgagagcacaggcaccccaggccacctgcggagtgacacagagcacagcaccaatgaggtgggcaccctgtgccacaagacagacctgaacaacctggagatggccatcaaggaggaccagattgctgacaacttccagggcatcagcggccccaaggaggacagcaccagcatcaagggcaacagcgaccaggacagcttcctgcacgagaacagcctgcaccaggaggagagccagaaggagaacatgccctgtggggagacagctgagttcaagcagaagcagagcgtgaacaagggcaagcagggcaaggagcagaaccaggacagccagacagaggccgaggagctgaggaagctgtggaagacccacaccatgcagcagaccaagcagcagcgggagaacatccagcaggtgtcccagaaggaggccaagcacaagatcaccagcgcagatggccacatcgagagcagcgccctgctgaaggagaagcagaggcaccggctgcacaagttcctgtgcctgcgggtgggcaagcccatgaggaagacctttgtgtcccaggccagcgccaccatgcagcagtatgcccagagggacaagaagcatgagtactggtttgctgtgccccaggagaggacagaccacctgtatgccttcttcatccagtggagccctgagatctatgcagaagatactggagagtacacccgggagcccggcttcatcgtggtgaagaagattgaggagagcgagaccatcgaggacagcagcaaccaggccgccgcccgggagtgggaggtggtgtctgtggccgagtaccacagaagaattgatgccctgaacacagaggagctgcggaccctgtgccggcggctgcagatcaccacccgggaggacatcaacagcaagcaggtggccaccgtgaaggctgacctggagagcgagagcttccggcccaacctgagtgaccccagcgagctgctgctgcctgaccagatcgagaagctgaccaagcacctgccccccaggaccatcggctacccctggaccctggtgtatggcaccgggaagcacggcaccagcctgaagaccctgtaccgcaccatgacaggcctggacacccctgtgctgatggtgatcaaggacagtgatggccaggtgtttggagccctggccagcgagcccctgaaggtgtctgatggcttctacggcaccggggagacctttgtgttcaccttctgcccagagtttgaggtgttcaagtggacaggagacaacatgttcttcatcaagggggacatggacagcctggccttcggcggcggcggcggggagtttgccctgtggctggatggagacctgtaccacggccgcagccacagctgcaagaccttcggcaacagaaccctgagcaagaaggaggacttcttcatccaggacatcgagatctgggcctttgaatag

SEQ ID NO: 75629 - DNA, 2625 bp, Artificial Sequence
  derived and/or modified sequence
atgaccaaggacaagaacagccccggcctgaagaagaagagccagagtgtggatattaatgctccggggttcaatccccttgctggtgctggaaagcagacgcctcaggcctcgaaaccacctgcacctaaaacgcccattatagaggaagaacagaacaacgcagctaatactcagaagcatcccagcagacgttccgaactcaaacggttttataccatagacaccggtcagaaaaagacactggataagaaggacggacgccgtatgagctttcagaagcctaaaggcacaatcgagtacaccgtagagtctcgtgattcgctgaactcaatcgccctgaagtttgacactacccctaatgaactagtgcagttgaataagctattcagccgtgctgtggtgacgggccaggtactttatgtgcctgacccagaatacgtctcctccgtggagagctctccatctctctcacccgtcagtcctttgtcccctactagtagcgaggctgagttcgacaagactaccaatccagacgtccatcctaccgaagcaaccccatcgtccaccttcactggcatccgacccgcaagagtcgtgtcgagtacaagcgaggaggaagaggcattcactgagaaatttctgaagattaactgcaaatacatcacctcaggcaaaggcactgtgagcggggttctgctggttacacccaataacatcatgtttgaccctcacaagaatgaccctctggtccaggaaaacggttgtgaggagtatggcataatgtgcccgatggaggaggtgatgagcgcagcgatgtataaagagatcctggatagtaaaatcaaagaatccctccctatcgatattgaccaactctctggtagggatttttgccactccaagaagatgaccggttcaaataccgaggagatcgacagtagaatcagagacgcaggaaacgacagtgcatcaacagcgccccggagcacagaggaaagcctctctgaggacgtgttcactgaatctgagctgtccccgatcagagaagagctggttagcagtgacgaactacgacaagataagtcatcaggggctagcagcgagtcagtgcaaactgtgaaccaggccgaggtggagagcctcactgtgaagtctgaaagcaccggaacaccagggcatttgagatccgatactgagcatagtaccaacgaggtggggaccctatgccacaagaccgacctgaataacctggagatggcaattaaagaggaccaaattgctgacaacttccagggcattagtggaccaaaggaggacagcacaagcatcaaagggaacagcgatcaggattctttcctacatgagaattccctgcaccaggaagaaagccagaaagaaaacatgccatgcggagagacagctgaattcaagcaaaagcagagtgtgaacaaaggcaaacaagggaaagagcagaatcaagacagtcagaccgaggccgaagagctgcggaagttgtggaaaacacacactatgcagcagaccaaacagcagcgcgagaacatccagcaggtgagccagaaggaagctaagcataagataacgagcgccgacggacacatcgagagctccgctttgttgaaggagaaacagcgacatagattgcataaattcctctgcctcagagttggcaaacctatgaggaaaaccttcgtcagtcaagcttccgcaaccatgcagcaatacgcccagcgagacaaaaagcatgagtattggtttgcagtgcctcaggagcggactgaccacttatacgcatttttcatacagtggagtcctgaaatctatgccgaggacactggagaatacacccgggagccgggatttatcgtggttaaaaagattgaggaaagtgaaactattgaagactctagcaatcaggctgctgccagggagtgggaagtggtatctgtcgcggagtaccatcgccggattgacgccctgaacactgaagagctgcgaactctctgccgacgactccagattaccacacgtgaagatattaattcaaagcaggtggcgaccgtcaaggccgatctcgagtcagaaagtttcaggccaaacctgtctgacccctcagagcttctgctgcccgatcagattgagaaactaacaaagcatctgccccccaggaccataggttacccatggaccttggtctacggtaccgggaagcatggtacctctctcaagactctatacaggacaatgaccgggttagatacccctgtactgatggttattaaagacagcgatgggcaggtattcggcgcactggcttccgagcccctgaaggtgagtgatgggttttatggaactggcgaaacgtttgtgtttaccttctgccccgagttcgaggtgtttaaatggaccggcgacaacatgttttttataaaaggtgatatggactctctcgccttcggaggtggggggggtgagtttgcgctgtggttagacggtgacctgtaccatgggaggagtcactcctgcaaaacattcggtaatagaaccctcagcaagaaggaggatttctttatacaggacatcgaaatctgggcatttgagtag

SEQ ID NO: 75630 - DNA, 2956 bp, Artificial Sequence
  derived and/or modified sequence
aacgagacatctagtacggggctcacaggtaacagaactctgatcagatccgccccggctcccacacagctataaggttgcctgcctgcctgcacagaaatgacgaaggacaaaaacagcccagggctgaagaaaaagtcccagtcggtggatattaatgctccagggttcaaccctttggctggtgcaggaaagcaaacaccacaagccagtaagcccccggcacccaagacccccatcattgaagaagagcagaacaatgcagcaaatactcagaaacatccttccagaaggagcgaactgaagaggttctacacaattgacactggccaaaagaagaccctagacaagaaagatggaagacgaatgtcttttcagaaacctaaagggactattgagtatactgttgaatcaagggattctttgaatagcatagccctgaagtttgatacaacacctaacgaacttgttcaattaaataagttattctcccgagcagttgttactggacaggttctgtatgttcctgatcctgaatatgtctccagtgttgagagctctccatctctaagccccgtaagtcctctgtcaccaacatcatctgaggctgaatttgataagaccactaatcctgatgtccatccaacagaagcaactccctcatctactttcactggtattcgacctgcacgagttgtatcttcaacttctgaggaggaggaagcatttactgagaaatttcttaaaattaattgcaaatatattaccagtggcaagggcacagtcagtggtgtgctgctagttacaccaaataatataatgtttgatccacataaaaatgaccctttggttcaagagaatggctgtgaggaatatggcatcatgtgtccaatggaagaggtgatgtcagctgcaatgtacaaagaaattttggatagcaaaataaaggaatctttacccatagatatagatcagctatcaggaagggacttctgccattcaaagaaaatgacaggaagtaacactgaggaaatagactcaagaatccgagatgcaggtaatgatagtgccagcactgctcctaggagcactgaggagtctctttctgaagatgtgttcacagaatcagaactttcccctatacgagaggagcttgtatcttcagatgaactgcgacaagataaatcttctggtgcgtcatcagaatctgtgcaaactgtcaatcaggctgaagtagaaagtctgacagtcaaatcagaatctactggtactcctggtcacttaagatctgatactgaacattctacaaatgaagttgggactttatgtcataaaactgatttaaataatcttgaaatggccattaaggaagatcagattgcagataactttcaaggaatatcaggtcctaaagaagacagcacaagtataaaaggtaattcagaccaggattcttttcttcatgagaattcgttacaccaagaagagagtcaaaaagaaaatatgccttgtggggaaacagcagaatttaaacaaaagcaaagtgttaacaaaggaaaacaaggaaaggagcaaaatcaggactcacagacagaggcagaagagctacgcaaactttggaaaacccatactatgcaacaaactaaacagcaaagggaaaatattcaacaagtgtcacaaaaagaagctaagcataaaattacatctgctgatggacacatagaaagttctgcacttttaaaagaaaagcaaaggcatcgattacataagttcttgtgtctcagagttggaaaaccaatgaggaaaacgtttgtatctcaagcaagtgctacaatgcaacagtatgcacagagagataagaaacatgaatattggtttgctgtgccacaagaaaggacagatcacttgtatgccttcttcattcagtggagtccagaaatatatgcagaagatactggcgaatataccagagaacctggatttatagtagtaaaaaagattgaggagtctgaaacaattgaggattctagtaatcaagcagcagccagagaatgggaggtagtgtcagtggctgagtatcaccgcaggatcgatgctctaaatactgaagaactgcgcacactctgcagacgcctccagattactacaagggaagacataaattcaaagcaggttgctacagtgaaagcagacctggagtctgaatcttttcgaccaaacctaagtgatcccagtgaacttttactgccagatcaaattgaaaagcttaccaagcatcttccaccaagaacaattggctatccatggactcttgtttatggtactggaaaacatggcacaagcttgaaaactctttatcgaacaatgacaggtttagacaccccagtgctgatggtgattaaagacagtgatggacaggtttttggtgcgttagcatctgagccactgaaagtgagtgatggcttttatggtactggagagacctttgtttttacattctgtccggagtttgaggtctttaagtggacaggagataatatgttttttatcaaaggagacatggattcactagctttcggtggtggaggaggagaatttgcgctttggcttgatggagatctctaccatggaagaagccattcttgtaaaacgtttgggaatcgtacactttctaagaaggaagatttctttatccaagatattgaaatctgggcttttgaataaataaaatgctctctgtcttagcaggagaatggcccaaacctgacatggacaagcattgtttggaaagttcaagaagcaatacagtgtaacatgtcacttgtgctttaaaattagtctgtatcaccatttattacagttataattttggagtttatttttcaaatcatgttcttgtcccagagttctttaggttaacactagggactgcgtccatgtactagtataacagctt

SEQ ID NO: 75631 - DNA, 2625 bp, Artificial Sequence
  derived and/or modified sequence
atgacgaaggacaagaatagcccaggactgaaaaagaagtctcagagcgttgatataaacgccccaggcttcaacccactggctggtgcaggaaagcagaccccgcaggcctctaaaccccctgccccaaagacgccaatcattgaggaggagcagaataatgctgctaacacccagaaacatcctagccgtcgcagtgaactcaaacgcttctacacaatagacactggacaaaagaagaccctcgataaaaaggatggtcggagaatgtccttccagaaacccaagggcacgattgaatatacagtggaatcccgggacagcctcaacagtatagccctgaagtttgacacaacccccaacgagcttgtgcagctaaacaagcttttttcccgggcagtggttactgggcaagtgctatatgtccctgatccagagtacgtgtcctccgtcgaaagctcaccttccctgtcacctgtgtcccctctttctcccacgagctcagaggcagagttcgataagactacaaatcctgatgtccaccctaccgaggcgaccccttcctccacattcactgggatcagaccggcacgagtggtgagttcaacctccgaagaggaagaagcttttaccgagaagttcctgaagatcaactgtaagtatattacttcaggtaaaggaactgtctctggagtgctcctggtgacccccaacaatatcatgttcgaccctcacaaaaacgacccactcgtccaagaaaacgggtgcgaggaatatggcatcatgtgcccaatggaggaagttatgagcgccgctatgtataaggagatcctcgactccaagataaaagagagccttccaattgatatcgaccagctttcaggcagagatttctgtcattcaaaaaagatgaccggctccaacaccgaggagatagattcccgaattcgagacgccggtaacgattcagcgtccactgctccccgaagcacggaggagtctctttccgaggacgttttcacagagtcagagcttagccccattagagaggaactggtgtcaagcgacgagttacggcaggataagtcttcaggagcatcctcagagagcgtccagacggttaaccaggccgaggtggagagtctaactgtgaaaagcgaatcgaccggaacaccaggtcatcttaggtctgacactgagcactcgacaaatgaggtaggcactctttgccataagaccgatctgaacaacctggagatggccattaaggaagaccaaatagcagataacttccagggcatcagtggcccaaaagaagattccactagcataaaggggaacagtgatcaggacagttttcttcacgaaaacagcctgcaccaggaggagtcccaaaaggaaaacatgccctgcggcgagacagccgagttcaagcagaagcagtccgtgaacaagggtaagcagggcaaggaacagaatcaggatagtcagactgaagcagaagagttgcggaagctttggaagacgcacactatgcaacagacaaaacagcagcgagagaatatacagcaggtgtcccagaaagaggccaaacataagattacttcggcagacggccacattgagtctagtgccctgctgaaggaaaagcagcgtcacagactacataaatttctgtgcctccgagtgggaaagcctatgaggaagaccttcgtatcacaggcgtccgctacgatgcaacagtatgcgcagcgagacaagaaacatgagtactggttcgccgtacctcaagagcgcacagatcatctctacgcttttttcattcagtggtctccagaaatttacgccgaggacaccggtgaatacacacgcgagccagggtttatcgttgtgaaaaaaatcgaagagtccgaaactatcgaagactctagcaaccaggccgctgcgagggagtgggaggtggttagtgtggctgagtatcaccggcgaatcgacgctctgaataccgaggagctcagaaccctctgtcgtcgcttgcagattacaaccagagaagatattaatagcaagcaggtagccacggtaaaagccgacctggaatctgaatctttcaggcccaacctgagtgatccaagcgaattgctgctgccagaccagatcgagaagctgaccaagcacttgcccccaaggaccatcggatatccttggacactggtttatggtacaggtaaacacggcactagcttgaagaccctgtacaggaccatgactgggttagacaccccagtcctgatggttataaaagactccgatggacaggtgttcggcgcactggcatcggaacctcttaaggtgtccgatggattctatggcacaggggagaccttcgtgttcacattctgcccagagttcgaggtgtttaaatggacaggggataatatgtttttcatcaagggtgatatggatagcttggccttcggcggtgggggtggcgaattcgctttatggttagatggggatctgtatcacggtcgttcacactcctgtaagaccttcgggaatagaaccctaagcaagaaagaagattttttcattcaggatattgagatctgggctttcgaatag

SEQ ID NO: 75632 - DNA, 2625 bp, Artificial Sequence
  derived and/or modified sequence
atgaccaaggacaagaacagccccggcctgaagaagaagagccagagcgtggacatcaacgcccccggcttcaaccccctggccggcgccggcaagcagaccccccaggccagcaagccccccgcccccaagacccccatcatcgaggaggagcagaacaacgccgccaacacccagaagcaccccagcagaagaagcgagctgaagagattctacaccatcgacaccggccagaagaagaccctggacaagaaggacggcagaagaatgagcttccagaagcccaagggcaccatcgagtacaccgtggagagcagagacagcctgaacagcatcgccctgaagttcgacaccacccccaacgagctggtgcagctgaacaagctgttcagcagagccgtggtgaccggccaggtgctgtacgtgcccgaccccgagtacgtgagcagcgtggagagcagccccagcctgagccccgtgagccccctgagccccaccagcagcgaggccgagttcgacaagaccaccaaccccgacgtgcaccccaccgaggccacccccagcagcaccttcaccggcatcagacccgccagagtggtgagcagcaccagcgaggaggaggaggccttcaccgagaagttcctgaagatcaactgcaagtacatcaccagcggcaagggcaccgtgagcggcgtgctgctggtgacccccaacaacatcatgttcgacccccacaagaacgaccccctggtgcaggagaacggctgcgaggagtacggcatcatgtgccccatggaggaggtgatgagcgccgccatgtacaaggagatcctggacagcaagatcaaggagagcctgcccatcgacatcgaccagctgagcggcagagacttctgccacagcaagaagatgaccggcagcaacaccgaggagatcgacagcagaatcagagacgccggcaacgacagcgccagcaccgcccccagaagcaccgaggagagcctgagcgaggacgtgttcaccgagagcgagctgagccccatcagagaggagctggtgagcagcgacgagctgagacaggacaagagcagcggcgccagcagcgagagcgtgcagaccgtgaaccaggccgaggtggagagcctgaccgtgaagagcgagagcaccggcacccccggccacctgagaagcgacaccgagcacagcaccaacgaggtgggcaccctgtgccacaagaccgacctgaacaacctggagatggccatcaaggaggaccagatcgccgacaacttccagggcatcagcggccccaaggaggacagcaccagcatcaagggcaacagcgaccaggacagcttcctgcacgagaacagcctgcaccaggaggagagccagaaggagaacatgccctgcggcgagaccgccgagttcaagcagaagcagagcgtgaacaagggcaagcagggcaaggagcagaaccaggacagccagaccgaggccgaggagctgagaaagctgtggaagacccacaccatgcagcagaccaagcagcagagagagaacatccagcaggtgagccagaaggaggccaagcacaagatcaccagcgccgacggccacatcgagagcagcgccctgctgaaggagaagcagagacacagactgcacaagttcctgtgcctgagagtgggcaagcccatgagaaagaccttcgtgagccaggccagcgccaccatgcagcagtacgcccagagagacaagaagcacgagtactggttcgccgtgccccaggagagaaccgaccacctgtacgccttcttcatccagtggagccccgagatctacgccgaggacaccggcgagtacaccagagagcccggcttcatcgtggtgaagaagatcgaggagagcgagaccatcgaggacagcagcaaccaggccgccgccagagagtgggaggtggtgagcgtggccgagtaccacagaagaatcgacgccctgaacaccgaggagctgagaaccctgtgcagaagactgcagatcaccaccagagaggacatcaacagcaagcaggtggccaccgtgaaggccgacctggagagcgagagcttcagacccaacctgagcgaccccagcgagctgctgctgcccgaccagatcgagaagctgaccaagcacctgccccccagaaccatcggctacccctggaccctggtgtacggcaccggcaagcacggcaccagcctgaagaccctgtacagaaccatgaccggcctggacacccccgtgctgatggtgatcaaggacagcgacggccaggtgttcggcgccctggccagcgagcccctgaaggtgagcgacggcttctacggcaccggcgagaccttcgtgttcaccttctgccccgagttcgaggtgttcaagtggaccggcgacaacatgttcttcatcaagggcgacatggacagcctggccttcggcggcggcggcggcgagttcgccctgtggctggacggcgacctgtaccacggcagaagccacagctgcaagaccttcggcaacagaaccctgagcaagaaggaggacttcttcatccaggacatcgagatctgggccttcgagtag

SEQ ID NO: 75633 - protein, 873 aa, Artificial Sequence
  derived and/or modified sequence
MSVSNLSWLKKKSQSVDINAPGFNPLAGAGKQTPQASKPPAPKTPIIEEEQNNAANTQKHPSRRSELKRFYTIDTGQKKTLDKKDGRRMSFQKPKGTIEYTVESRDSLNSIALKFDTTPNELVQLNKLFSRAVVTGQVLYVPDPEYVSSVESSPSLSPVSPLSPTSSEAEFDKTTNPDVHPTEATPSSTFTGIRPARVVSSTSEEEEAFTEKFLKINCKYITSGKGTVSGVLLVTPNNIMFDPHKNDPLVQENGCEEYGIMCPMEEVMSAAMYKEILDSKIKESLPIDIDQLSGRDFCHSKKMTGSNTEEIDSRIRDAGNDSASTAPRSTEESLSEDVFTESELSPIREELVSSDELRQDKSSGASSESVQTVNQAEVESLTVKSESTGTPGHLRSDTEHSTNEVGTLCHKTDLNNLEMAIKEDQIADNFQGISGPKEDSTSIKGNSDQDSFLHENSLHQEESQKENMPCGETAEFKQKQSVNKGKQGKEQNQDSQTEAEELRKLWKTHTMQQTKQQRENIQQVSQKEAKHKITSADGHIESSALLKEKQRHRLHKFLCLRVGKPMRKTFVSQASATMQQYAQRDKKHEYWFAVPQERTDHLYAFFIQWSPEIYAEDTGEYTREPGFIVVKKIEESETIEDSSNQAAAREWEVVSVAEYHRRIDALNTEELRTLCRRLQITTREDINSKQVATVKADLESESFRPNLSDPSELLLPDQIEKLTKHLPPRTIGYPWTLVYGTGKHGTSLKTLYRTMTGLDTPVLMVIKDSDGQVFGALASEPLKVSDGFYGTGETFVFTFCPEFEVFKWTGDNMFFIKGDMDSLAFGGGGGEFALWLDGDLYHGRSHSCKTFGNRTLSKKEDFFIQDIEIWAFE

SEQ ID NO: 75634 - DNA, 2622 bp, Artificial Sequence
  derived and/or modified sequence
atgtccgtttccaacctgtcatggctcaaaaagaagtcacaatcagtggatattaatgctccaggctttaaccctttagcaggggctgggaagcaaacccctcaggcttcaaagccacctgcccctaaaactccaataatcgaggaggagcaaaacaacgccgctaacactcagaaacacccctcgcggaggtccgaactgaaaagattctatactatcgatactggccagaagaagaccctggacaaaaaggacggtcggcgtatgagcttccaaaagcccaagggtaccattgagtacactgtggagagtcgggattcactgaattctattgcgctgaagttcgataccacccctaacgagctcgtccaattaaataagctcttttctagggcagttgtgaccggacaggtcctttatgtcccagatcccgagtacgtgtcctcagtggaatcatctccatccttgagtcccgtgagtccgctgtcgcctacaagttcggaggccgagtttgataagaccactaacccggatgttcatcctactgaagcaacaccttcctcaacctttactggaattaggccagctcgtgttgtgtcatccacctccgaggaagaagaggctttcactgagaagtttttgaagatcaattgcaaatatattacatcaggcaaaggtacagtctccggggtgctgctcgtgacgcccaacaatatcatgtttgatcctcataagaatgaccctttggtccaggagaatggctgtgaggaatacggcatcatgtgtcctatggaggaggtcatgagcgctgcgatgtacaaggagattttggattcaaagatcaaggaatcccttcctatagatatagaccagctctctggtagagacttctgtcacagtaaaaagatgaccggctctaatactgaggaaatcgactcccgaatccgggatgctggaaacgattctgccagcacggctccacgatcaacagaggagtctttgtcagaagacgtgttcaccgagtcggaactgtcccctatacgggaagagctcgtgagtagcgacgagctcagacaagacaaatcaagcggagcctcttcagagagcgtgcagactgtcaatcaggctgaggtcgaatccctgacagtcaagtccgagtcgaccgggacacccggacacctgaggtctgacaccgagcatagcactaacgaagtgggaacactgtgccacaaaaccgacctgaataacctggaaatggctattaaagaggatcagattgcagacaacttccaggggatttcagggccgaaagaagactccacatctatcaaaggaaactccgatcaggactcttttctgcacgaaaatagcctgcaccaggaggagagccagaaggagaacatgccctgcggcgaaacggccgagttcaagcagaagcaaagtgtgaataaaggaaagcagggaaaggagcagaatcaggactcacagacagaggccgaagagttacggaaactgtggaaaactcacacaatgcagcaaactaagcagcagcgggagaacattcagcaagtcagccagaaggaggccaagcataaaatcacctccgcggatgggcatatagagtcctccgccctactgaaggaaaagcagcgccacaggcttcacaagttcctgtgtctgcgggtaggcaaacctatgcggaagacctttgtctctcaggcctccgcaacgatgcaacagtacgcccagcgcgacaaaaaacatgagtactggttcgccgtgccacaggagcgtaccgatcacctttacgccttctttattcaatggagccccgaaatatatgcagaggacacaggggaatacacgcgagaacctgggtttatcgtggtgaaaaagatagaggagtcagaaaccatcgaggactcgtcgaatcaggcggctgcccgagagtgggaggttgttagcgtggccgagtatcaccgccggatcgatgcactgaacaccgaggaactgcgaacactgtgcaggcgcctgcagatcaccacccgcgaggatatcaattctaagcaggtggcgaccgtcaaggcggatctggaatcggagagttttcgccctaacctgtcagatccatctgagctgctcctccccgaccagattgaaaaactgaccaagcacctgccgcctaggaccattggttatccttggacactggtgtacggcacgggaaagcacgggacaagtctaaaaactctgtacaggactatgactgggctggacacacctgtgctaatggtcatcaaagatagcgacggtcaggtctttggggctctggcaagcgaaccactgaaagtcagcgatggcttttatggaactggagagacgttcgtctttacgttttgtccagagttcgaggtgtttaagtggacaggagataatatgttcttcatcaaaggagatatggactcactggcattcggcggaggcggtggggagttcgcactgtggcttgatggggatctttaccatggcagatcccattcctgcaagacattcggcaaccgcactctgagtaaaaaagaagacttctttatccaggatatcgagatctgggcatttgagtag

SEQ ID NO: 75635 - DNA, 2622 bp, Artificial Sequence
  derived and/or modified sequence
atgtctgtgagcaacctgtcctggctgaagaagaagagccagagcgtggacatcaatgcccctggcttcaaccccctggccggggccggcaagcagaccccccaggccagcaagcccccagcccccaagacccccatcatcgaggaggagcagaacaatgctgccaacacccagaagcaccccagcagaagaagtgagctgaagcgcttctacaccatcgacaccggccagaagaagaccctggacaagaaggatggaagaaggatgtccttccagaagcccaagggcaccatcgagtacacagtggagagccgggacagcctgaacagcatcgccctgaagtttgacaccaccccaaatgagctggtgcagctgaacaagctgttcagcagagctgtggtgacaggccaggtgctgtatgtgcctgaccctgaatatgtgtcctctgtggagagcagccccagcctgagccctgtgagccccctgagccccaccagcagcgaggccgagtttgacaagaccaccaacccagatgtgcaccccacagaggccacccccagcagcaccttcaccggcatccggcctgcccgggtggtgagcagcaccagcgaggaggaggaggccttcacagagaagttcctgaagatcaactgcaagtacatcaccagcgggaaaggaacagtgtctggagtgctgctggtgacccccaacaacatcatgtttgacccccacaagaatgaccccctggtgcaggagaatggctgtgaggagtatggcatcatgtgccccatggaggaggtgatgtctgctgccatgtacaaggagatcctggacagcaagatcaaggagagcctgcccattgatattgaccagctgagcggccgggacttctgccacagcaagaagatgacaggcagcaacacagaggagattgacagccgcatcagagatgctggaaatgacagcgccagcacagcccccaggagcacagaggagagcctgtctgaagatgtgttcacagagagcgagctgagccccatccgggaggagctggtgtccagtgatgagctgcggcaggacaagagcagcggggccagcagcgagagcgtgcagacagtgaaccaggccgaggtggagagcctgactgtgaagtctgagagcacaggcaccccaggccacctgcggagtgacacagagcacagcaccaatgaggtgggcaccctgtgccacaagacagacctgaacaacctggagatggccatcaaggaggaccagattgctgacaacttccagggcatcagcggccccaaggaggacagcaccagcatcaagggcaacagcgaccaggacagcttcctgcacgagaacagcctgcaccaggaggagagccagaaggagaacatgccctgtggggagacagctgagttcaagcagaagcagagcgtgaacaagggcaagcagggcaaggagcagaaccaggacagccagacagaagctgaggagctgaggaagctgtggaagacccacaccatgcagcagaccaagcagcagcgggagaacatccagcaggtgtcccagaaggaggccaagcacaagatcaccagcgcagatggccacatcgagagcagcgccctgctgaaggagaagcagaggcaccggctgcacaagttcctgtgcctgcgggtgggcaagcccatgaggaagacctttgtgtcccaggccagcgccaccatgcagcagtatgcccagagggacaagaagcatgagtactggtttgctgtgccccaggagaggacagaccacctgtatgccttcttcatccagtggagccctgagatctatgcagaggacaccggggagtacacccgggagcccggcttcatcgtggtgaagaagattgaggagagcgagaccatcgaggacagcagcaaccaggccgccgcccgggagtgggaggtggtgtctgtggccgagtaccacagaagaattgatgccctgaacacagaggagctgcggaccctgtgccggcggctgcagatcaccacccgggaggacatcaacagcaagcaggtggccaccgtgaaggctgacctggagagcgagagcttccggcccaacctgagtgaccccagcgagctgctgctgcctgaccagatcgagaagctgaccaagcacctgccccccaggaccatcggctacccctggaccctggtgtatggaacaggcaagcacggcaccagcctgaagaccctgtaccgcaccatgacaggcctggacacccctgtgctgatggtgatcaaggacagtgatggccaggtgtttggagccctggccagcgagcccctgaaggtgtctgatggcttctatggaactggagagacctttgtgttcaccttctgcccagagtttgaggtgttcaagtggacaggagacaacatgttcttcatcaagggggacatggacagcctggcctttggaggcggcggcggggagtttgccctgtggctggatggagacctgtaccacggccgcagccacagctgcaagacctttggaaacagaaccctgagcaagaaggaggacttcttcatccaggacatcgagatctgggcctttgaatag

SEQ ID NO: 75636 - DNA, 2622 bp, Artificial Sequence
  derived and/or modified sequence
atgagcgtgagcaacctgagctggctgaagaagaagagccagagcgtggatatcaacgcgccaggctttaaccctttagcgggagcggggaaacagacaccgcaggcgagtaagcctcctgcgcctaaaactcccataattgaagaagaacaaaataacgccgctaacacacagaaacacccatcacggaggagtgagcttaaaagattttacaccattgataccggccagaagaagacgttggacaaaaaggatggacgtcggatgagttttcagaagcccaaaggcaccatcgaatacactgttgaatcacgcgattcattgaactcgatcgccctcaaatttgatacaacgccaaatgagctggtgcaactgaacaaactcttcagccgcgctgtggtgaccggtcaggtgttatacgtgcccgatcctgagtacgtgtcatcagtggagagcagcccttcactgtcacctgtgtctccgcttagcccgacctccagcgaagccgagttcgacaagaccaccaaccccgacgttcatcctacagaagccactccctccagcacattcaccggcattcgcccagccagagtggtctccagtacctctgaggaagaagaagctttcacagaaaaattcctgaagatcaactgtaagtatataacgtctggaaaagggacggtgtcaggggtcctcctcgtgacccccaacaacattatgttcgacccccacaaaaacgatccactggttcaagagaacggatgtgaagagtatggaatcatgtgtcccatggaggaggtcatgtccgccgccatgtataaggaaatcttggactccaagattaaagaatcccttccaattgacatcgatcagttgtccgggcgggacttctgtcactcaaagaaaatgactgggagcaatacggaagagatcgatagtaggatccgggatgctggcaacgatagtgccagcacagctccgcgcagtactgaagaaagcctgtctgaagacgttttcaccgagagtgagctgtcccctattagagaggaattggtctcttcagacgagcttcggcaagacaagagcagcggcgcctcaagtgaatccgtccagacagtaaatcaggccgaggtggaatctttaacagtgaaatcggaaagcaccggtacaccaggccatctgagaagcgatactgaacactcaacaaatgaagttggcacactgtgccacaaaacagatctgaacaaccttgaaatggcaattaaggaagatcagatcgccgacaatttccagggcatcagcggccctaaagaggactctactagtattaaaggaaatagcgatcaggattcgttcttgcacgaaaacagtctccatcaggaagaaagccagaaggaaaacatgccatgcggagaaactgcagagtttaagcagaagcagtccgttaacaagggcaaacagggcaaagaacagaaccaagactctcaaaccgaagctgaagagctgagaaagctgtggaaaacgcacactatgcagcaaacaaaacagcaaagggagaacatccagcaggtcagtcagaaagaggctaagcacaagattactagcgccgatggacacatcgagtcctctgccttgctgaaagaaaaacagagacacaggctgcacaagttcctatgccttagagtgggcaaacctatgaggaaaacgttcgtctcgcaggcatcagccaccatgcagcagtacgcacagcgggacaagaaacacgaatattggtttgccgtgccgcaggaaaggacggatcacctgtatgccttctttatacagtggtcaccggaaatttacgctgaagatacgggtgaatatacacgtgagccagggtttattgttgtcaaaaaaatcgaagagagcgaaaccatagaggactcatccaatcaggccgcagctagggaatgggaagtcgtgtctgtggccgagtaccaccggaggattgacgccctgaatacggaagagttgcgcactctttgccgccggctgcagattactactagagaggacatcaattccaaacaggttgccaccgtgaaagctgatttggaatccgagagttttcgccctaacctgtccgatcctagcgagttgctgctacccgaccaaattgagaaactgaccaaacacctgcctccacgtactattggttatccctggaccctggtgtatggcacaggtaaacatgggacaagtttgaaaacactctaccgcaccatgacaggattggacacacccgtcttgatggtgattaaagattctgacggccaggtctttggtgcgcttgcatcagagccactaaaggtgagtgacggcttctacgggaccggggaaacatttgtcttcacgttctgccctgagttcgaagtctttaaatggactggcgacaatatgtttttcatcaaaggggatatggacagtttagctttcggcggtggcgggggagagtttgcactgtggctagacggtgacctgtaccacggcagatcccattcatgtaagacctttggcaatcgcacactgagtaagaaggaagatttttttatccaggacatcgaaatatgggccttcgaatag

SEQ ID NO: 75637 - DNA, 4501 bp, Artificial Sequence
  derived and/or modified sequence
gtcctctcaaactgtgagtaactaagtggtttgtgcatcattccagaagcaaagctaaaatttttagcggtgttgtcgacttgacctgctaatttcctgttctggaatcgagagaagactcctcaacaagttgctgcaatgtctgtgtctaatctatcatggctgaagaaaaagtcccagtcggtggatattaatgctccagggttcaaccctttggctggtgcaggaaagcaaacaccacaagccagtaagcccccggcacccaagacccccatcattgaagaagagcagaacaatgcagcaaatactcagaaacatccttccagaaggagcgaactgaagaggttctacacaattgacactggccaaaagaagaccctagacaagaaagatggaagacgaatgtcttttcagaaacctaaagggactattgagtatactgttgaatcaagggattctttgaatagcatagccctgaagtttgatacaacacctaacgaacttgttcaattaaataagttattctcccgagcagttgttactggacaggttctgtatgttcctgatcctgaatatgtctccagtgttgagagctctccatctctaagccccgtaagtcctctgtcaccaacatcatctgaggctgaatttgataagaccactaatcctgatgtccatccaacagaagcaactccctcatctactttcactggtattcgacctgcacgagttgtatcttcaacttctgaggaggaggaagcatttactgagaaatttcttaaaattaattgcaaatatattaccagtggcaagggcacagtcagtggtgtgctgctagttacaccaaataatataatgtttgatccacataaaaatgaccctttggttcaagagaatggctgtgaggaatatggcatcatgtgtccaatggaagaggtgatgtcagctgcaatgtacaaagaaattttggatagcaaaataaaggaatctttacccatagatatagatcagctatcaggaagggacttctgccattcaaagaaaatgacaggaagtaacactgaggaaatagactcaagaatccgagatgcaggtaatgatagtgccagcactgctcctaggagcactgaggagtctctttctgaagatgtgttcacagaatcagaactttcccctatacgagaggagcttgtatcttcagatgaactgcgacaagataaatcttctggtgcgtcatcagaatctgtgcaaactgtcaatcaggctgaagtagaaagtctgacagtcaaatcagaatctactggtactcctggtcacttaagatctgatactgaacattctacaaatgaagttgggactttatgtcataaaactgatttaaataatcttgaaatggccattaaggaagatcagattgcagataactttcaaggaatatcaggtcctaaagaagacagcacaagtataaaaggtaattcagaccaggattcttttcttcatgagaattcgttacaccaagaagagagtcaaaaagaaaatatgccttgtggggaaacagcagaatttaaacaaaagcaaagtgttaacaaaggaaaacaaggaaaggagcaaaatcaggactcacagacagaggcagaagagctacgcaaactttggaaaacccatactatgcaacaaactaaacagcaaagggaaaatattcaacaagtgtcacaaaaagaagctaagcataaaattacatctgctgatggacacatagaaagttctgcacttttaaaagaaaagcaaaggcatcgattacataagttcttgtgtctcagagttggaaaaccaatgaggaaaacgtttgtatctcaagcaagtgctacaatgcaacagtatgcacagagagataagaaacatgaatattggtttgctgtgccacaagaaaggacagatcacttgtatgccttcttcattcagtggagtccagaaatatatgcagaagatactggcgaatataccagagaacctggatttatagtagtaaaaaagattgaggagtctgaaacaattgaggattctagtaatcaagcagcagccagagaatgggaggtagtgtcagtggctgagtatcaccgcaggatcgatgctctaaatactgaagaactgcgcacactctgcagacgcctccagattactacaagggaagacataaattcaaagcaggttgctacagtgaaagcagacctggagtctgaatcttttcgaccaaacctaagtgatcccagtgaacttttactgccagatcaaattgaaaagcttaccaagcatcttccaccaagaacaattggctatccatggactcttgtttatggtactggaaaacatggcacaagcttgaaaactctttatcgaacaatgacaggtttagacaccccagtgctgatggtgattaaagacagtgatggacaggtttttggtgcgttagcatctgagccactgaaagtgagtgatggcttttatggtactggagagacctttgtttttacattctgtccggagtttgaggtctttaagtggacaggagataatatgttttttatcaaaggagacatggattcactagctttcggtggtggaggaggagaatttgcgctttggcttgatggagatctctaccatggaagaagccattcttgtaaaacgtttgggaatcgtacactttctaagaaggaagatttctttatccaagatattgaaatctgggcttttgaataaataaaatgctctctgtcttagcaggagaatggcccaaacctgacatggacaagcattgtttggaaagttcaagaagcaatacagtgtaacatgtcacttgtgctttaaaattagtctgtatcaccatttattacagttataattttggagtttatttttcaaatcatgttcttgtcccagagttctttaggttaacactagggactgcgtccatgtactagtataacagcttgggtttgttagaatttgggcaacattttgattataatgacaacttcattttcacatgttactcagttccctaataggatggtgctcttttgttgaacctgtattgatttttttttttttaactatattgattcgtttactagaacagtctaattggggcattgaggaaatgaagactggatacttctgtatctgtgaagttggcacaggtaacatttggacatgttcatcttattcttaggaaggaaaaaatcacttgccaaaataatacatacttcatagaccactgagttctagtttttattcacactacaacattctctttaacgatgttgcaggtattctcaatttccttttaagaaaaatgaaatgtgaggagaattctggttgtaatagatgacagtacatatgatctgcaggtttgggcatatgctttcatcattaaattatctgataaagttacaagtcacaaaggagaatgagaacttaatgattctattggatttaatatattagcaagaaaacatactatttacatatgtgtagcttagtaaggcattaacataagtacaaaaactatgaaacagatgcatatttcctcaacatactgtgtcaggtatactgttttataatttggttgttttagccttattgcacaccaactcccaaaatataggttactcttgttcaaaaggaaaaaaaaaattgtgattttctttgagtggtatatgttattaattaccattagcatttgctcttataaagggcaatgattatagtagacaatattgtaactcagtagacttgttgaatatgcaaacttactgtcaagtgacctcaaaaaaaaaatgaaaagatagaatacactagtagttcttatcctcttttgtaggaaaccaataatagccattgtggcaataattcatcagttgattttaaagcttcatgttatgcaaaaaagaatcctgctgttatacatgtgacagtgactttgtgctgaaatttcagctattccagataaacattgtatatcttgtaaattaatgtttaaaggtgtagttttgttcttacagaaagtgttgattgccaggttgcttatagcactttaagttattctaaaaatgaaattataagccaaatatttggcttaagtagatttagttgtatagcacttacatatttagttcttttgaaagtttagataattatttaaagaaagcataatgctaatggaaaagaaaatctgatgttctattataatatgctattgctgaatatgaatagaaatacagggcatcatttccttgtctcattataagttagtaacaatatatagattaaatgtttacaatatagggaattgtaaataaatatatcagtttttttccccttcggtcttccacagcagtattattgtctttgtggagttgactaatgataatttaaaaatcctgtaatggatttctactaaaataaggtcatagtggcatataccaaataaaatcaaata

SEQ ID NO: 75638 - DNA, 2622 bp, Artificial Sequence
  derived and/or modified sequence
atgagtgtgtccaacctctcctggttgaagaagaagtcccagtccgtggatatcaacgctcccggatttaacccgctggctggagctggaaagcagaccccacaagcatctaagccgcctgctcctaaaacacctatcatcgaagaagagcagaataatgccgctaacacccagaagcacccatctaggcgtagtgaactgaagcgtttttatacgatcgatacgggccagaaaaagaccctcgacaagaaagacggtcgtcgcatgagcttccagaaacctaaaggtacaatcgagtacaccgtggagtctagggacagccttaatagcatcgcgttaaagttcgacactacccccaacgagcttgtccagttaaacaagcttttctccagagctgtagtcaccgggcaagtgctgtacgttccagaccccgagtatgtgagcagcgtggagtcaagcccgtccttaagcccagtttctcctttgtcgcccactagctccgaggctgaattcgacaaaacaaccaatcccgatgttcacccaaccgaggcaactccatcctcaacctttacgggaattcgaccagccagggtagtcagcagtacctccgaagaggaagaagcatttaccgaaaaattcctgaagatcaactgcaagtatatcacctccggcaagggaaccgtcagcggtgtcctgcttgtcacaccaaacaatatcatgtttgacccacacaaaaatgatcctctcgttcaggaaaacggctgcgaggagtatggaatcatgtgccctatggaagaggtcatgtctgccgcaatgtacaaggagatcttagactctaagatcaaggagtcactccccatcgacatcgatcaactcagcgggagagacttctgccactccaaaaaaatgacaggtagcaacacagaagagatagactcaagaattagagatgcagggaacgactcagcctcgaccgcaccccgatcaacggaggagtccctctccgaagacgtgtttacagagagtgagctgagtcctatacgagaagaactggtttcatcagacgaactaaggcaggataagtcttcaggtgcatccagcgagagcgtccaaacagtcaaccaggccgaagtcgaaagcctaactgtgaaaagcgagtctaccgggacaccagggcatcttaggtctgacacagaacacagcacaaacgaggtaggtactctctgccataaaacagatctcaacaacctggaaatggccattaaggaggatcagatcgccgataactttcagggcattagcggccctaaagaagatagcacatccattaaggggaactccgaccaggattcctttctccacgagaatagtctgcaccaggaggaaagccagaaagaaaacatgccctgtggcgagaccgctgagtttaagcagaagcagagcgtgaataagggcaagcaagggaaagaacaaaaccaagatagccaaacagaagcggaggaactccggaagctttggaagacccacaccatgcaacagaccaaacagcagagagaaaacatccagcaggtgtcccagaaggaagccaaacacaagattacttctgcagatggacacattgagtcttcagcgttgctaaaggaaaagcagcgtcacagactgcacaaatttttgtgcttgagggtcggaaagcccatgaggaaaacatttgtttcccaagctagtgccacaatgcagcagtatgcgcaaagagataaaaagcacgaatattggttcgcggtgccacaggagcgcacagatcacctgtacgcattcttcattcagtggagtccggagatttatgctgaagacactggcgaatacaccagggaacccggtttcatcgtggtgaagaagatcgaggaaagcgaaaccatagaggacagctctaatcaggcagccgctagagagtgggaagtcgtatccgtggctgaataccaccggaggattgacgctcttaacacagaggagcttaggactctctgtaggcggctgcagatcacaactcgagaagacattaatagcaagcaggtcgcaaccgtcaaggctgacctggagtctgagagtttccgcccaaacctgagtgatcccagcgagctcctcctgccagatcagatagagaagctgacgaaacacctcccaccacgcactatcgggtacccctggaccctggtgtacggaacaggaaagcacggtacatcactgaaaactctctatcgaactatgacgggactggacaccccagtgcttatggtgataaaggattccgacggccaggtattcggagccttggcatccgagcctttgaaagtgagcgacgggttctatggaaccggagagacgttcgtgtttacattttgtcccgaattcgaagttttcaaatggacgggagataacatgtttttcatcaaaggggatatggattctctggccttcgggggagggggaggagagttcgctttatggctggacggagacctttatcacgggagatcccactcatgtaaaacgtttggcaatcggacgctcagtaagaaggaggacttcttcattcaagacatcgaaatctgggcgttcgaatag

SEQ ID NO: 75639 - DNA, 2622 bp, Artificial Sequence
  derived and/or modified sequence
atgagcgtgagcaacctgagctggctgaagaagaagagccagagcgtggacatcaacgcccccggcttcaaccccctggccggcgccggcaagcagaccccccaggccagcaagccccccgcccccaagacccccatcatcgaggaggagcagaacaacgccgccaacacccagaagcaccccagcagaagaagcgagctgaagagattctacaccatcgacaccggccagaagaagaccctggacaagaaggacggcagaagaatgagcttccagaagcccaagggcaccatcgagtacaccgtggagagcagagacagcctgaacagcatcgccctgaagttcgacaccacccccaacgagctggtgcagctgaacaagctgttcagcagagccgtggtgaccggccaggtgctgtacgtgcccgaccccgagtacgtgagcagcgtggagagcagccccagcctgagccccgtgagccccctgagccccaccagcagcgaggccgagttcgacaagaccaccaaccccgacgtgcaccccaccgaggccacccccagcagcaccttcaccggcatcagacccgccagagtggtgagcagcaccagcgaggaggaggaggccttcaccgagaagttcctgaagatcaactgcaagtacatcaccagcggcaagggcaccgtgagcggcgtgctgctggtgacccccaacaacatcatgttcgacccccacaagaacgaccccctggtgcaggagaacggctgcgaggagtacggcatcatgtgccccatggaggaggtgatgagcgccgccatgtacaaggagatcctggacagcaagatcaaggagagcctgcccatcgacatcgaccagctgagcggcagagacttctgccacagcaagaagatgaccggcagcaacaccgaggagatcgacagcagaatcagagacgccggcaacgacagcgccagcaccgcccccagaagcaccgaggagagcctgagcgaggacgtgttcaccgagagcgagctgagccccatcagagaggagctggtgagcagcgacgagctgagacaggacaagagcagcggcgccagcagcgagagcgtgcagaccgtgaaccaggccgaggtggagagcctgaccgtgaagagcgagagcaccggcacccccggccacctgagaagcgacaccgagcacagcaccaacgaggtgggcaccctgtgccacaagaccgacctgaacaacctggagatggccatcaaggaggaccagatcgccgacaacttccagggcatcagcggccccaaggaggacagcaccagcatcaagggcaacagcgaccaggacagcttcctgcacgagaacagcctgcaccaggaggagagccagaaggagaacatgccctgcggcgagaccgccgagttcaagcagaagcagagcgtgaacaagggcaagcagggcaaggagcagaaccaggacagccagaccgaggccgaggagctgagaaagctgtggaagacccacaccatgcagcagaccaagcagcagagagagaacatccagcaggtgagccagaaggaggccaagcacaagatcaccagcgccgacggccacatcgagagcagcgccctgctgaaggagaagcagagacacagactgcacaagttcctgtgcctgagagtgggcaagcccatgagaaagaccttcgtgagccaggccagcgccaccatgcagcagtacgcccagagagacaagaagcacgagtactggttcgccgtgccccaggagagaaccgaccacctgtacgccttcttcatccagtggagccccgagatctacgccgaggacaccggcgagtacaccagagagcccggcttcatcgtggtgaagaagatcgaggagagcgagaccatcgaggacagcagcaaccaggccgccgccagagagtgggaggtggtgagcgtggccgagtaccacagaagaatcgacgccctgaacaccgaggagctgagaaccctgtgcagaagactgcagatcaccaccagagaggacatcaacagcaagcaggtggccaccgtgaaggccgacctggagagcgagagcttcagacccaacctgagcgaccccagcgagctgctgctgcccgaccagatcgagaagctgaccaagcacctgccccccagaaccatcggctacccctggaccctggtgtacggcaccggcaagcacggcaccagcctgaagaccctgtacagaaccatgaccggcctggacacccccgtgctgatggtgatcaaggacagcgacggccaggtgttcggcgccctggccagcgagcccctgaaggtgagcgacggcttctacggcaccggcgagaccttcgtgttcaccttctgccccgagttcgaggtgttcaagtggaccggcgacaacatgttcttcatcaagggcgacatggacagcctggccttcggcggcggcggcggcgagttcgccctgtggctggacggcgacctgtaccacggcagaagccacagctgcaagaccttcggcaacagaaccctgagcaagaaggaggacttcttcatccaggacatcgagatctgggccttcgagtag

SEQ ID NO: 75640 - protein, 243 aa, Artificial Sequence
  derived and/or modified sequence
MSRLWYGKKGRRHQPINHKYTLVVSVAEYHRRIDALNTEELRTLCRRLQITTREDINSKQVATVKADLESESFRPNLSDPSELLLPDQIEKLTKHLPPRTIGYPWTLVYGTGKHGTSLKTLYRTMTGLDTPVLMVIKDSDGQVFGALASEPLKVSDGFYGTGETFVFTFCPEFEVFKWTGDNMFFIKGDMDSLAFGGGGGEFALWLDGDLYHGRSHSCKTFGNRTLSKKEDFFIQDIEIWAFE

SEQ ID NO: 75641 - DNA, 732 bp, Artificial Sequence
  derived and/or modified sequence
atgagtcggctgtggtacggcaagaagggaaggagacaccaacctataaaccataaatataccctggttgtgagtgtcgctgaatatcaccggaggatcgatgcgctaaatactgaagagctcagaaccttatgcagaaggctgcagataacaaccagagaggacatcaatagcaagcaggtggccactgtcaaggcggatctggagtccgaatcattccgaccaaatctgtcagatccctccgagctgctgctgcctgaccaaatcgagaagctcactaagcatctgccccccagaacaattggctacccctggacactcgtgtacgggacaggcaaacacggaacttctctgaaaacactgtacagaacgatgactggacttgatactcccgtgctcatggtgatcaaggattctgacggacaggtctttggtgcattagcttcagagccgctcaaagtgtctgacggattctacgggactggagagaccttcgtgtttaccttttgtcctgaattcgaggtttttaagtggaccggtgataacatgttcttcattaagggagacatggattccctggcgtttggcgggggaggtggcgaatttgctctttggttagacggagacctgtatcatggaaggtcccattcttgtaaaacttttggtaacagaacactctccaagaaggaggatttctttatccaggacatcgagatttgggcatttgaatag

SEQ ID NO: 75642 - DNA, 732 bp, Artificial Sequence
  derived and/or modified sequence
atgagccggctgtggtacggcaagaagggcagaagacaccagcccatcaaccacaagtacaccctggtggtgtctgtggccgagtaccacagaagaattgatgccctgaacacagaggagctgcggaccctgtgccggcggctgcagatcaccacccgggaggacatcaacagcaagcaggtggccaccgtgaaggctgacctggagagcgagagcttccggcccaacctgagtgaccccagcgagctgctgctgcctgaccagatcgagaagctgaccaagcacctgccccccaggaccatcggctacccctggaccctggtgtatggaacaggcaagcacggcaccagcctgaagaccctgtaccgcaccatgacaggcctggacacccctgtgctgatggtgatcaaggacagtgatggccaggtgtttggagccctggccagcgagcccctgaaggtgtctgatggcttctatggaactggagagacctttgtgttcaccttctgcccagagtttgaggtgttcaagtggacaggagacaacatgttcttcatcaagggggacatggacagcctggcctttggaggcggcggcggggagtttgccctgtggctggatggagacctgtaccacggccgcagccacagctgcaagacctttggaaacagaaccctgagcaagaaggaggacttcttcatccaggacatcgagatctgggcctttgaatag

SEQ ID NO: 75643 - DNA, 732 bp, Artificial Sequence
  derived and/or modified sequence
atgagccggctgtggtacggcaagaagggccggcggcaccagcccatcaaccacaaatacacactcgtcgtttccgtggccgagtaccaccgacgaattgatgcactcaacacagaagaactgcggacgctctgtcgcagactgcagatcaccacacgggaggacatcaattccaagcaggtggccacggtgaaggcggaccttgagagtgagagctttagacctaacctcagtgatccttccgagttgctcctgccagaccagattgagaagctgacgaagcatctacccccacgcaccatcggttatccttggacattagtttatgggacaggcaagcatgggacatcacttaaaacactgtataggaccatgactggactcgacacgccagtgctcatggtcatcaaggactccgatgggcaggttttcggagctctggcttcagagccccttaaagttagtgatgggttttacggcaccggggaaacttttgtgtttactttttgccccgagttcgaagtgttcaagtggacaggagataacatgttcttcatcaaaggtgacatggactccttggcctttgggggaggaggcggagaattcgcactctggctggatggagacctgtatcatggccgctctcattcttgcaaaactttcgggaaccggactctctccaagaaggaggatttctttatacaagatatcgaaatttgggcttttgagtag

SEQ ID NO: 75644 - DNA, 1944 bp, Artificial Sequence
  derived and/or modified sequence
aaatctttgtctctagcaaactgttttgtcactgtagtaaggctctagtgctggaaatttatctttgacagaggaagaatgcttttgaaaacagttcttacgtgattttatgtaacttaatttgccctggaaaggaaatgtctcgtctctggtatgggaaaaaagggagaagacatcaaccaattaatcataaatacactctggtagtgtcagtggctgagtatcaccgcaggatcgatgctctaaatactgaagaactgcgcacactctgcagacgcctccagattactacaagggaagacataaattcaaagcaggttgctacagtgaaagcagacctggagtctgaatcttttcgaccaaacctaagtgatcccagtgaacttttactgccagatcaaattgaaaagcttaccaagcatcttccaccaagaacaattggctatccatggactcttgtttatggtactggaaaacatggcacaagcttgaaaactctttatcgaacaatgacaggtttagacaccccagtgctgatggtgattaaagacagtgatggacaggtttttggtgcgttagcatctgagccactgaaagtgagtgatggcttttatggtactggagagacctttgtttttacattctgtccggagtttgaggtctttaagtggacaggagataatatgttttttatcaaaggagacatggattcactagctttcggtggtggaggaggagaatttgcgctttggcttgatggagatctctaccatggaagaagccattcttgtaaaacgtttgggaatcgtacactttctaagaaggaagatttctttatccaagatattgaaatctgggcttttgaataaataaaatgctctctgtcttagcaggagaatggcccaaacctgacatggacaagcattgtttggaaagttcaagaagcaatacagtgtaacatgtcacttgtgctttaaaattagtctgtatcaccatttattacagttataattttggagtttatttttcaaatcatgttcttgtcccagagttctttaggttaacactagggactgcgtccatgtactagtataacagcttgggtttgttagaatttgggcaacattttgattataatgacaacttcattttcacatgttactcagttccctaataggatggtgctcttttgttgaacctgtattgatttttttttttttaactatattgattcgtttactagaacagtctaattggggcattgaggaaatgaagactggatacttctgtatctgtgaagttggcacaggtaacatttggacatgttcatcttattcttaggaaggaaaaaatcacttgccaaaataatacatacttcatagaccactgagttctagtttttattcacactacaacattctctttaacgatgttgcaggtattctcaatttccttttaagaaaaatgaaatgtgaggagaattctggttgtaatagatgacagtacatatgatctgcaggtttgggcatatgctttcatcattaaattatctgataaagttacaagtcacaaaggagaatgagaacttaatgattctattggatttaatatattagcaagaaaacatactatttacatatgtgtagcttagtaaggcattaacataagtacaaaaactatgaaacagatgcatatttcctcaacatactgtgtcaggtatactgttttataatttggttgttttagccttattgcacaccaactcccaaaatataggttactcttgttcaaaaggaaaaaaaaaattgtgattttctttgagtggtatatgttattaattaccattagcatttgctcttataaagggcaatgattatagtagacaatattgtaactcagtagacttgttgaatatgcaaacttactgtcaagtgacctcaaaaa

SEQ ID NO: 75645 - DNA, 732 bp, Artificial Sequence
  derived and/or modified sequence
atgtcgcgactgtggtacgggaagaaaggcaggcgccaccagcctatcaatcataagtacaccctggtagtctcagtggctgagtatcaccgaagaattgatgctcttaacaccgaagagctcagaaccctgtgtcgacgtcttcagataaccacccgagaagacatcaacagcaagcaggtagcaactgtgaaggctgatcttgaatctgaatcctttaggccaaatctgtctgacccttctgagctcctactcccagaccagatcgagaagctcaccaagcatctaccaccgaggacgattgggtatccttggaccctcgtctacgggacgggcaaacacggaacgtctctcaagacgctgtataggactatgacaggcctggatacccccgtgctgatggtgatcaaggactcagacggccaggtgtttggcgcactggcttcagaacctctgaaagtctctgacggattttacggtactggtgaaacattcgtgttcaccttttgtcctgaatttgaggtgttcaaatggacaggggacaacatgtttttcatcaagggggatatggattccctcgccttcggagggggtgggggtgagtttgcgctttggctggacggagacctttatcacggtaggagccacagctgcaagactttcggtaatcgcactctgtcgaagaaggaagatttttttatccaggacatcgagatctgggctttcgagtag

SEQ ID NO: 75646 - DNA, 732 bp, Artificial Sequence
  derived and/or modified sequence
atgagcagactgtggtacggcaagaagggcagaagacaccagcccatcaaccacaagtacaccctggtggtgagcgtggccgagtaccacagaagaatcgacgccctgaacaccgaggagctgagaaccctgtgcagaagactgcagatcaccaccagagaggacatcaacagcaagcaggtggccaccgtgaaggccgacctggagagcgagagcttcagacccaacctgagcgaccccagcgagctgctgctgcccgaccagatcgagaagctgaccaagcacctgccccccagaaccatcggctacccctggaccctggtgtacggcaccggcaagcacggcaccagcctgaagaccctgtacagaaccatgaccggcctggacacccccgtgctgatggtgatcaaggacagcgacggccaggtgttcggcgccctggccagcgagcccctgaaggtgagcgacggcttctacggcaccggcgagaccttcgtgttcaccttctgccccgagttcgaggtgttcaagtggaccggcgacaacatgttcttcatcaagggcgacatggacagcctggccttcggcggcggcggcggcgagttcgccctgtggctggacggcgacctgtaccacggcagaagccacagctgcaagaccttcggcaacagaaccctgagcaagaaggaggacttcttcatccaggacatcgagatctgggccttcgagtag

SEQ ID NO: 75647 - protein, 216 aa, Artificial Sequence
  derived and/or modified sequence
MSRLWYGKKGRRHQPINHKYTLITTREDINSKQVATVKADLESESFRPNLSDPSELLLPDQIEKLTKHLPPRTIGYPWTLVYGTGKHGTSLKTLYRTMTGLDTPVLMVIKDSDGQVFGALASEPLKVSDGFYGTGETFVFTFCPEFEVFKWTGDNMFFIKGDMDSLAFGGGGGEFALWLDGDLYHGRSHSCKTFGNRTLSKKEDFFIQDIEIWAFE

SEQ ID NO: 75648 - DNA, 651 bp, Artificial Sequence
  derived and/or modified sequence
atgtcaaggctttggtacggaaagaagggcagaagacaccagcctattaatcacaaatacacgttaataaccaccagagaagacataaactccaaacaggttgccacggtgaaggcggacctggagtcagagtcctttcgtcctaacctgagcgatccaagcgaactgctgcttccggaccaaattgagaagctgaccaaacacctgcccccaagaactattgggtatccctggactctggtgtacggtactggcaagcacggcacttcacttaagacactgtaccgaacgatgactggattagacaccccggtccttatggttattaaggattccgacggacaggtcttcggcgccctggcttcagagcccctgaaggtatctgatggtttttacggaaccggcgaaacattcgtgttcacattttgccctgaatttgaagttttcaaatggacaggagataacatgttttttattaagggggacatggacagccttgctttcggcggcggagggggagaatttgccctatggctggatggtgacctttatcatggaagaagtcacagctgcaaaacatttggtaacagaaccctcagtaagaaagaggatttttttatacaggacatcgagatttgggccttcgaatag

SEQ ID NO: 75649 - DNA, 651 bp, Artificial Sequence
  derived and/or modified sequence
atgagccggctgtggtacggcaagaagggcagaagacaccagcccatcaaccacaagtacaccctcatcaccacccgggaggacatcaacagcaagcaggtggccaccgtgaaggctgacctggagagcgagagcttccggcccaacctgagtgaccccagcgagctgctgctgcctgaccagatcgagaagctgaccaagcacctgccccccaggaccatcggctacccctggaccctggtgtatggcaccgggaagcacggcaccagcctgaagaccctgtaccgcaccatgacaggcctggacacccctgtgctgatggtgatcaaggacagtgatggccaggtgtttggagccctggccagcgagcccctgaaggtgtctgatggcttctacggcaccggggagacctttgtgttcaccttctgcccagagtttgaggtgttcaagtggacaggagacaacatgttcttcatcaagggggacatggacagcctggccttcggcggcggcggcggggagtttgccctgtggctggatggagacctgtaccacggccgcagccacagctgcaagaccttcggcaacagaaccctgagcaagaaggaggacttcttcatccaggacatcgagatctgggcctttgaatag

SEQ ID NO: 75650 - DNA, 651 bp, Artificial Sequence
  derived and/or modified sequence
atgagccggctgtggtacggcaagaagggccggcggcaccagcccattaaccataagtacacactgattaccactagagaggacattaattcaaagcaggtggccaccgtcaaagctgatctggagtcagagagtttccggccaaatctatctgacccttctgagctgctcctgcctgaccaaatagagaaacttaccaaacatctcccccccaggactatcgggtacccttggactctggtttatggcaccggtaaacacggtacgtcgttaaagaccttatatcgcacaatgacgggactggacacccctgttttaatggttatcaaagactccgacggccaagtattcggagccctcgccagtgaacccttgaaggtgagtgacggtttctatggtacaggtgaaacattcgtctttacattttgccccgaattcgaagttttcaaatggacgggagataatatgttcttcattaagggtgacatggattctctggcgttcgggggaggaggaggagagtttgctctatggttggatggagacttgtatcatgggagaagccactcttgtaaaacctttggcaatcgcaccctgtccaagaaagaggatttctttatccaggatatcgaaatatgggcatttgaatag

SEQ ID NO: 75651 - DNA, 2621 bp, Artificial Sequence
  derived and/or modified sequence
gaaattctctcttccctccccagctttacagcctccactcaggactatcattgctatggatactacttagtgattagctctctctcttgtcaatcaaatctttgtctctagcaaactgttttgtcactgtagtaaggctctagtgctggaaatttatctttgacagaggaagaatgcttttgaaaacagttcttacgtgattttatgtaacttaatttgccctggaaaggaaatgtctcgtctctggtatgggaaaaaagggagaagacatcaaccaattaatcataaatacactctgattactacaagggaagacataaattcaaagcaggttgctacagtgaaagcagacctggagtctgaatcttttcgaccaaacctaagtgatcccagtgaacttttactgccagatcaaattgaaaagcttaccaagcatcttccaccaagaacaattggctatccatggactcttgtttatggtactggaaaacatggcacaagcttgaaaactctttatcgaacaatgacaggtttagacaccccagtgctgatggtgattaaagacagtgatggacaggtttttggtgcgttagcatctgagccactgaaagtgagtgatggcttttatggtactggagagacctttgtttttacattctgtccggagtttgaggtctttaagtggacaggagataatatgttttttatcaaaggagacatggattcactagctttcggtggtggaggaggagaatttgcgctttggcttgatggagatctctaccatggaagaagccattcttgtaaaacgtttgggaatcgtacactttctaagaaggaagatttctttatccaagatattgaaatctgggcttttgaataaataaaatgctctctgtcttagcaggagaatggcccaaacctgacatggacaagcattgtttggaaagttcaagaagcaatacagtgtaacatgtcacttgtgctttaaaattagtctgtatcaccatttattacagttataattttggagtttatttttcaaatcatgttcttgtcccagagttctttaggttaacactagggactgcgtccatgtactagtataacagcttgggtttgttagaatttgggcaacattttgattataatgacaacttcattttcacatgttactcagttccctaataggatggtgctcttttgttgaacctgtattgatttttttttttttaactatattgattcgtttactagaacagtctaattggggcattgaggaaatgaagactggatacttctgtatctgtgaagttggcacaggtaacatttggacatgttcatcttattcttaggaaggaaaaaatcacttgccaaaataatacatacttcatagaccactgagttctagtttttattcacactacaacattctctttaacgatgttgcaggtattctcaatttccttttaagaaaaatgaaatgtgaggagaattctggttgtaatagatgacagtacatatgatctgcaggtttgggcatatgctttcatcattaaattatctgataaagttacaagtcacaaaggagaatgagaacttaatgattctattggatttaatatattagcaagaaaacatactatttacatatgtgtagcttagtaaggcattaacataagtacaaaaactatgaaacagatgcatatttcctcaacatactgtgtcaggtatactgttttataatttggttgttttagccttattgcacaccaactcccaaaatataggttactcttgttcaaaaggaaaaaaaaaattgtgattttctttgagtggtatatgttattaattaccattagcatttgctcttataaagggcaatgattatagtagacaatattgtaactcagtagacttgttgaatatgcaaacttactgtcaagtgacctcaaaaaaaaaatgaaaagatagaatacactagtagttcttatcctcttttgtaggaaaccaataatagccattgtggcaataattcatcagttgattttaaagcttcatgttatgcaaaaaagaatcctgctgttatacatgtgacagtgactttgtgctgaaatttcagctattccagataaacattgtatatcttgtaaattaatgtttaaaggtgtagttttgttcttacagaaagtgttgattgccaggttgcttatagcactttaagttattctaaaaatgaaattataagccaaatatttggcttaagtagatttagttgtatagcacttacatatttagttcttttgaaagtttagataattatttaaagaaagcataatgctaatggaaaagaaaatctgatgttctattataatatgctattgctgaatatgaatagaaatacagggcatcatttccttgtctcattataagttagtaacaatatatagattaaatgtttacaatatagggaattgtaaataaatatatcagtttttttccccttcggtcttccacagcagtattattgtctttgtggagttgactaatgataatttaaaaatcctgtaatggatttctactaaaataaggtcatagtggcatataccaaataaaatcaa

SEQ ID NO: 75652 - DNA, 651 bp, Artificial Sequence
  derived and/or modified sequence
atgagcaggttgtggtatgggaagaaggggagaaggcatcagcctataaaccacaagtacacactgattacaacgagggaagacattaacagcaagcaagtagctaccgtgaaagccgatttagagtccgaatcgtttaggcccaacctaagcgacccaagcgaactcctgctcccggaccaaatagaaaagctcactaagcacttaccgccaagaacgatcggatacccctggacactggtgtatggcaccggtaaacacggtacctccctgaagaccctgtatcgcaccatgacgggtttggacactcccgttcttatggttattaaagactctgatggacaagtgtttggagctctggcgtctgagcccttgaaggtgtccgacggattttatggcaccggggaaacttttgtctttactttttgccccgagttcgaggtcttcaagtggaccggggataacatgttctttatcaagggtgacatggattctctggcattcggaggtgggggaggcgaattcgccctttggctggacggggatttgtaccatggcaggtcacactcttgcaagacattcgggaatcgaacattgtctaagaaagaagacttctttatccaggacatcgagatatgggcctttgaatag

SEQ ID NO: 75653 - DNA, 651 bp, Artificial Sequence
  derived and/or modified sequence
atgagcagactgtggtacggcaagaagggcagaagacaccagcccatcaaccacaagtacaccctgatcaccaccagagaggacatcaacagcaagcaggtggccaccgtgaaggccgacctggagagcgagagcttcagacccaacctgagcgaccccagcgagctgctgctgcccgaccagatcgagaagctgaccaagcacctgccccccagaaccatcggctacccctggaccctggtgtacggcaccggcaagcacggcaccagcctgaagaccctgtacagaaccatgaccggcctggacacccccgtgctgatggtgatcaaggacagcgacggccaggtgttcggcgccctggccagcgagcccctgaaggtgagcgacggcttctacggcaccggcgagaccttcgtgttcaccttctgccccgagttcgaggtgttcaagtggaccggcgacaacatgttcttcatcaagggcgacatggacagcctggccttcggcggcggcggcggcgagttcgccctgtggctggacggcgacctgtaccacggcagaagccacagctgcaagaccttcggcaacagaaccctgagcaagaaggaggacttcttcatccaggacatcgagatctgggccttcgagtag

SEQ ID NO: 75654 - protein, 412 aa, Artificial Sequence
  derived and/or modified sequence
MAKTPSDHLLSTLEELVPYDFEKFKFKLQNTSVQKEHSRIPRSQIQRARPVKMATLLVTYYGEEYAVQLTLQVLRAINQRLLAEELHRAAIQGRPPDTAASPRCHAQEGDPVDGTCVRDSCSFPEAVSGHPQASGSRSPGCPRCQDSHERKSPGSLSPQPLPQCKRHLKQVQLLFCEDHDEPICLICSLSQEHQGHRVRPIEEVALEHKKKIQKQLEHLKKLRKSGEEQRSYGEEKAVSFLKQTEALKQRVQRKLEQVYYFLEQQEHFFVASLEDVGQMVGQIRKAYDTRVSQDIALLDALIGELEAKECQSEWELLQDIGDILHRAKTVPVPEKWTTPQEIKQKIQLLHQKSEFVEKSTKYFSETLRSEMEMFNDHSPQHGLGSWEERDYTQHSMQGPKQGVPCFLVVRTV

SEQ ID NO: 75655 - protein, 402 aa, Artificial Sequence
  derived and/or modified sequence
MAKTPSDHLLSTLEELVPYDFEKFKFKLQNTSVQKEHSRIPRSQIQRARPVKMATLLVTYYGEEYAVQLTLQVLRAINQRLLAEELHRAAIQGRPPDTAASPRCHAQEGDPVDGTCVRDSCSFPEAVSGHPQASGSRSPGCPRCQDSHERKSPGSLSPQPLPQCKRHLKQVQLLFCEDHDEPICLICSLSQEHQGHRVRPIEEVALEHKKKIQKQLEHLKKLRKSGEEQRSYGEEKAVSFLKQTEALKQRVQRKLEQVYYFLEQQEHFFVASLEDVGQMVGQIRKAYDTRVSQDIALLDALIGELEAKECQSEWELLQDIGDILHRAKTVPVPEKWTTPQEIKQKIQLLHQKSEFVEKSTKYFSETLRSEMEMFNGESSGNGVCWPGVVAVFPCAVDLRGPI

SEQ ID NO: 75656 - protein, 445 aa, Artificial Sequence
  derived and/or modified sequence
MAKTPSDHLLSTLEELVPYDFEKFKFKLQNTSVQKEHSRIPRSQIQRARPVKMATLLVTYYGEEYAVQLTLQVLRAINQRLLAEELHRAAIQGRPPDTAASPRCHAQEGDPVDGTCVRDSCSFPEAVSGHPQASGSRSPGCPRCQDSHERKSPGSLSPQPLPQCKRHLKQVQLLFCEDHDEPICLICSLSQEHQGHRVRPIEEVALEHKKKIQKQLEHLKKLRKSGEEQRSYGEEKAVSFLKQTEALKQRVQRKLEQVYYFLEQQEHFFVASLEDVGQMVGQIRKAYDTRVSQDIALLDALIGELEAKECQSEWELLQDIGDILHRAKTVPVPEKWTTPQEIKQKIQLLHQKSEFVEKSTKYFSETLRSEMEMFNDHSPQHGLGSWEERDYTQHSMQGPKQGVPCLSLLSGQCNLAPLNANAQDFFPYLIFLRSSGADWRSGTCC

SEQ ID NO: 75657 - DNA, 1239 bp, Artificial Sequence
  derived and/or modified sequence
atggcaaaaactccttctgaccacctcctgtctaccctggaagagttagttccctacgactttgaaaagtttaaatttaagctgcagaatacatcggtgcagaaagagcactcccggattcctaggagtcaaatacagcgcgcacgaccagtcaaaatggccacactgcttgtaacttactatggagaggagtatgctgtgcagctgacactacaggttttgcgcgccatcaatcaaaggctgttggccgaggagctccaccgggccgcgatccaagggagacctcccgataccgcagcatctcctcggtgccacgcccaggagggtgatccagtcgatggcacctgcgtcagagattcttgttccttccccgaggcagtgagcggacacccgcaggcttctggaagtcgcagtcccggctgcccacgttgtcaggatagtcacgaaagaaaatccccgggcagtctgtctccccaacccttgccacaatgcaaacggcacctgaagcaggttcagctgttattttgcgaagatcacgatgaacccatctgtcttatctgttccctttcacaggaacatcagggacaccgggtgaggccaatcgaggaagttgcactggagcataaaaagaagatccaaaagcaactggaacatctgaagaagttaagaaagtcgggcgaggagcagcggagctatggcgaagaaaaggcagtctcattcttgaaacaaacagaggctctgaagcagcgggtacaacgtaagcttgagcaggtgtattactttctcgagcaacaggagcactttttcgtggcaagtcttgaggacgtaggccagatggtcggtcagattcggaaagcctatgatactagagtttcacaggacatcgccctgctggatgctctaattggcgagctcgaggctaaggaatgccaaagcgaatgggagctcctgcaggacatcggtgatatactgcaccgagcaaagaccgttccagtacctgagaagtggacaacgccccaggaaatcaaacagaaaatacaattactccaccagaaaagcgagtttgtggagaagagcacaaaatacttttccgaaacccttaggtctgagatggagatgtttaatgatcatagtccgcaacatggcctgggtagctgggaagaaagggattacacacagcactccatgcaggggcccaagcaaggagtaccctgttttctggtggtccggaccgtatag

SEQ ID NO: 75658 - DNA, 1209 bp, Artificial Sequence
  derived and/or modified sequence
atggccaagacgccatccgaccacctcctcagtacactcgaggagctggtgccatatgactttgaaaaatttaaattcaagctacagaacacatccgttcagaaggaacactctagaattccaaggtctcagatccaacgggcacgtccagtgaaaatggctacactactggttacatattatggagaagagtacgctgtgcagttgaccctgcaggtccttcgagcgattaaccagcggttactggcagaagagctgcaccgggctgcaatacagggtcggccacccgataccgctgccagccctagatgccacgctcaggagggagacccagtcgatggtacctgtgtccgcgactcatgcagcttcccagaggccgtcagcggacatccgcaggcttccggttcccggtcaccagggtgtccacggtgccaggactctcacgaacgaaaatccccgggcagtctctctccccaacccttaccccagtgtaagcggcatttaaagcaggtccagctgctgttttgcgaagaccacgatgagcccatatgcttgatttgcagtttatcacaggaacatcagggccatcgggtacgacccatcgaggaagtagccctcgagcataaaaagaagatccagaaacagttagaacatctcaaaaagctcagaaaatcaggagaggagcagagatcgtacggagaagaaaaggccgtatctttcctgaaacagaccgaagcattgaaacagcgagttcagagaaaactcgagcaggtgtattactttctggaacagcaggagcacttcttcgtagcttcactggaagacgttggacagatggtgggtcagatcaggaaagcatatgatactcgagtcagccaagacatcgctctcctggacgctctcataggagaattggaagcaaaggaatgtcagtcagaatgggaactactgcaggatatcggtgatattcttcatagagctaagacggtcccggttccagaaaaatggaccactccccaagaaatcaagcaaaaaattcagctgttacatcagaaatcggaatttgtggagaaatcaaccaagtacttcagtgaaactttaaggtcagagatggaaatgtttaatggagagtcaagtggcaatggggtctgttggcccggagtggttgcagtgtttccttgtgcggtggaccttcggggtcctatatag

SEQ ID NO: 75659 - DNA, 1338 bp, Artificial Sequence
  derived and/or modified sequence
atggccaagactccttctgatcacctcctgagcacccttgaagagctggtgccttacgatttcgaaaagttcaaatttaaactgcaaaacactagtgttcagaaagaacattccaggattccaaggtcccaaatacagcgagcccgtcctgtgaaaatggctacactgcttgtcacctattacggagaagaatatgcagtgcagctgacactgcaggtccttcgggcaattaaccaacgtctgctcgctgaggagctgcacagagcggcgattcagggacgacctcccgataccgccgcatccccaagatgtcatgctcaggaaggcgatccggtggacgggacctgtgtaagagacagctgtagtttccccgaagctgtctctggccaccctcaagcatctggtagtcgctctcccgggtgtcctcggtgccaggacagtcatgagaggaaaagtcccggatccctttcacctcagcccctgccacagtgtaaaaggcaccttaaacaggttcagctactgttctgcgaagatcacgacgagccaatctgtcttatttgttctctgagccaggagcatcagggccatcgggtccgcccgatagaggaagtggcgcttgagcataaaaagaagatccaaaagcagctggagcatctgaaaaagctcaggaaaagcggagaggagcagaggagctacggagaggaaaaagctgtgtccttcctcaaacagactgaggctcttaagcaacgcgttcagagaaagctggagcaggtgtattattttttagagcagcaggaacattttttcgtcgcgagtctggaagatgtcggacaaatggtaggccaaattagaaaggcttatgacacaagagtctcccaagatatcgcactcctggatgccctcatcggcgagctcgaggccaaggagtgtcaaagcgaatgggaactgcttcaggatataggagacattttacatagagccaaaaccgtgccggtaccagagaagtggaccacaccacaggaaatcaagcagaaaatccagttactgcatcagaaaagcgaatttgtcgagaagtctacgaagtacttttctgagaccctgcggtccgagatggaaatgttcaacgatcacagtccacagcacggactaggaagctgggaagagagagattatacccagcactctatgcagggcccgaagcagggggtcccctgtctatcccttctgtccggacagtgcaacctggcacccctgaatgctaatgcccaggacttctttccttatctgatctttttaagaagctccggcgccgactggagatccggtacttgctgctag

SEQ ID NO: 75660 - DNA, 1239 bp, Artificial Sequence
  derived and/or modified sequence
atggccaagacccccagcgaccacctgctgagcaccctggaggagctggtgccctatgactttgagaagttcaagttcaagctgcagaacacctctgtgcagaaggagcacagccgcatccccaggagccagatccagagggcccggcctgtgaagatggccaccctgctggtgacctactatggagaggagtatgctgtgcagctgaccctgcaggtgctgcgggccatcaaccagaggctgctggccgaggagctgcacagagctgccatccagggccggcccccagacacagctgccagcccccgctgccacgcccaggagggggaccctgtggatggcacctgtgtgcgggacagctgcagcttccctgaggccgtgtctggccacccccaggccagcggcagccgcagccctggctgcccccgctgccaggacagccatgagaggaagagccctggcagcctgagcccccagcccctgccccagtgcaagaggcacctgaagcaggtgcagctgctcttctgtgaagatcatgatgagcccatctgcctgatctgcagcctgagccaggagcaccagggccaccgggtgcggcccatcgaggaggtggccctggagcacaagaagaagatccagaagcagctggagcacctgaagaagctgaggaagtctggagaggagcagaggagctatggagaggagaaggctgtgtccttcctgaagcagacagaggccctgaagcagagggtgcagaggaagctggagcaggtgtactacttcctggagcagcaggagcacttctttgtggccagcctggaggatgtgggccagatggtgggccagatcaggaaggcctatgacaccagggtgtcccaggacatcgccctgctggatgccctgattggagagctggaggccaaggagtgccagagcgagtgggagctgctgcaggacatcggggacatcctgcaccgggccaagacagtgcctgtgcctgagaagtggaccaccccccaggagatcaagcagaagatccagctgctgcaccagaagtcagaatttgtggagaagagcaccaagtacttcagcgagaccctgcggtctgagatggagatgtttaatgaccacagcccccagcacggcctgggctcctgggaggagcgggactacacccagcacagcatgcagggccccaagcagggcgtgccctgcttcctggtggtgaggacagtgtag

SEQ ID NO: 75661 - DNA, 1209 bp, Artificial Sequence
  derived and/or modified sequence
atggccaagacccccagcgaccacctgctgagcaccctggaggagctggtgccctatgactttgagaagttcaagttcaagctgcagaacacctctgtgcagaaggagcacagccgcatccccaggagccagatccagagggcccggcctgtgaagatggccaccctgctggtgacctactatggagaggagtatgctgtgcagctgaccctgcaggtgctgcgggccatcaaccagaggctgctggccgaggagctgcacagagctgccatccagggccggcccccagacacagctgccagcccccgctgccacgcccaggagggggaccctgtggatggcacctgtgtgcgggacagctgcagcttccctgaggccgtgtctggccacccccaggccagcggcagccgcagccctggctgcccccgctgccaggacagccatgagaggaagagccctggcagcctgagcccccagcccctgccccagtgcaagaggcacctgaagcaggtgcagctgctcttctgtgaagatcatgatgagcccatctgcctgatctgcagcctgagccaggagcaccagggccaccgggtgcggcccatcgaggaggtggccctggagcacaagaagaagatccagaagcagctggagcacctgaagaagctgaggaagtctggagaggagcagaggagctatggagaggagaaggctgtgtccttcctgaagcagacagaggccctgaagcagagggtgcagaggaagctggagcaggtgtactacttcctggagcagcaggagcacttctttgtggccagcctggaggatgtgggccagatggtgggccagatcaggaaggcctatgacaccagggtgtcccaggacatcgccctgctggatgccctgattggagagctggaggccaaggagtgccagagcgagtgggagctgctgcaggacatcggggacatcctgcaccgggccaagacagtgcctgtgcctgagaagtggaccaccccccaggagatcaagcagaagatccagctgctgcaccagaagtcagaatttgtggagaagagcaccaagtacttcagcgagaccctgcggtctgagatggagatgtttaatggagagagcagtggaaatggagtgtgctggccaggagtggtggccgtgttcccctgtgctgtggacctgcggggccccatctag

SEQ ID NO: 75662 - DNA, 1338 bp, Artificial Sequence
  derived and/or modified sequence
atggccaagacccccagcgaccacctgctgagcaccctggaggagctggtgccctatgactttgagaagttcaagttcaagctgcagaacacctctgtgcagaaggagcacagccgcatccccaggagccagatccagagggcccggcctgtgaagatggccaccctgctggtgacctactatggagaggagtatgctgtgcagctgaccctgcaggtgctgcgggccatcaaccagaggctgctggccgaggagctgcacagagctgccatccagggccggcccccagacacagctgccagcccccgctgccacgcccaggagggggaccctgtggatggcacctgtgtgcgggacagctgcagcttccctgaggccgtgtctggccacccccaggccagcggcagccgcagccctggctgcccccgctgccaggacagccatgagaggaagagccctggcagcctgagcccccagcccctgccccagtgcaagaggcacctgaagcaggtgcagctgctcttctgtgaagatcatgatgagcccatctgcctgatctgcagcctgagccaggagcaccagggccaccgggtgcggcccatcgaggaggtggccctggagcacaagaagaagatccagaagcagctggagcacctgaagaagctgaggaagtctggagaggagcagaggagctatggagaggagaaggctgtgtccttcctgaagcagacagaggccctgaagcagagggtgcagaggaagctggagcaggtgtactacttcctggagcagcaggagcacttctttgtggccagcctggaggatgtgggccagatggtgggccagatcaggaaggcctatgacaccagggtgtcccaggacatcgccctgctggatgccctgattggagagctggaggccaaggagtgccagagcgagtgggagctgctgcaggacatcggggacatcctgcaccgggccaagacagtgcctgtgcctgagaagtggaccaccccccaggagatcaagcagaagatccagctgctgcaccagaagtcagaatttgtggagaagagcaccaagtacttcagcgagaccctgcggtctgagatggagatgtttaatgaccacagcccccagcacggcctgggctcctgggaggagcgggactacacccagcacagcatgcagggccccaagcagggcgtgccctgcctgagcctgctgagcggccagtgcaacctggcccccctgaatgccaatgcccaggacttcttcccctacctgatcttcctgcggagcagtggagctgactggaggagcggcacctgctgctag

SEQ ID NO: 75663 - DNA, 1279 bp, Artificial Sequence
  derived and/or modified sequence
gaagccagacagctggctcgagcctctcctgctcagcaccatggctaagacccctagtgaccatctgctgtccaccctggaggagctggtgccctatgacttcgagaagttcaagttcaagctgcagaacaccagtgtgcagaaggagcactccaggatcccccggagccagatccagagagccaggccggtgaagatggccactctgctggtcacctactatggggaagagtacgccgtgcagctcaccctgcaggtcctgcgggccatcaaccagcgcctgctggccgaggagctccacagggcagccattcagggaaggccaccagacacggctgcgagtccccgctgccacgcccaggaaggagacccagttgacggtacctgtgtgcgtgattcctgcagcttccccgaggcagtttctgggcacccccaggcctcaggcagccgctcacctggctgcccccggtgccaggactcccatgaaaggaagagcccgggaagcctaagcccccagcccctgccacagtgtaagcgccacctgaagcaggtccagctgctcttctgtgaggatcacgatgagcccatctgcctcatctgcagtctgagtcaggagcaccaaggccaccgggtgcgccccattgaggaggtcgccctggaacacaagaagaaaattcagaagcagctggagcatctgaagaagctgagaaaatcaggggaggagcagcgatcctatggggaggagaaggcagtgagctttctgaaacaaactgaagcgctgaagcagcgggtgcagaggaagctggagcaggtgtactacttcctggagcagcaagagcatttctttgtggcctcactggaggacgtgggccagatggttgggcagatcaggaaggcatatgacacccgcgtatcccaggacatcgccctgctcgatgcgctgattggggaactggaggccaaggagtgccagtcagaatgggaacttctgcaggacattggagacatcttgcacagggctaagacagtgcctgtccctgaaaagtggaccactcctcaagagataaaacaaaagatccaactcctccaccagaagtcagagtttgtggagaagagcacaaagtacttctcagaaaccctgcgttcagaaatggaaatgttcaatgaccacagtccccaacatggcctgggttcctgggaggaacgggattatacccaacatagcatgcagggccctaagcagggggttccttgtttccttgttgtcaggacagtgtaa

SEQ ID NO: 75664 - DNA, 1888 bp, Artificial Sequence
  derived and/or modified sequence
atggctaagacccctagtgaccatctgctgtccaccctggaggagctggtgccctatgacttcgagaagttcaagttcaagctgcagaacaccagtgtgcagaaggagcactccaggatcccccggagccagatccagagagccaggccggtgaagatggccactctgctggtcacctactatggggaagagtacgccgtgcagctcaccctgcaggtcctgcgggccatcaaccagcgcctgctggccgaggagctccacagggcagccattcagggaaggccaccagacacggctgcgagtccccgctgccacgcccaggaaggagacccagttgacggtacctgtgtgcgtgattcctgcagcttccccgaggcagtttctgggcacccccaggcctcaggcagccgctcacctggctgcccccggtgccaggactcccatgaaaggaagagcccgggaagcctaagcccccagcccctgccacagtgtaagcgccacctgaagcaggtccagctgctcttctgtgaggatcacgatgagcccatctgcctcatctgcagtctgagtcaggagcaccaaggccaccgggtgcgccccattgaggaggtcgccctggaacacaagaagaaaattcagaagcagctggagcatctgaagaagctgagaaaatcaggggaggagcagcgatcctatggggaggagaaggcagtgagctttctgaaacaaactgaagcgctgaagcagcgggtgcagaggaagctggagcaggtgtactacttcctggagcagcaagagcatttctttgtggcctcactggaggacgtgggccagatggttgggcagatcaggaaggcatatgacacccgcgtatcccaggacatcgccctgctcgatgcgctgattggggaactggaggccaaggagtgccagtcagaatgggaacttctgcaggacattggagacatcttgcacagggctaagacagtgcctgtccctgaaaagtggaccactcctcaagagataaaacaaaagatccaactcctccaccagaagtcagagtttgtggagaagagcacaaagtacttctcagaaaccctgcgttcagaaatggaaatgttcaatgaccacagtccccaacatggcctgggttcctgggaggaacgggattatacccaacatagcatgcagggccctaagcagggggttccttgtctttccttgttgtcaggacagtgtaatttagcccctcttaatgctaatgctcaggatttttttccctatctgatttttctccgtagttccggagctgattggcgctcaggcacatgctgttaatgtgattctggatgcagaaaccgcttaccccaacctcatcttctctgatgatctgaagagtgttagacttggaaacaagtgggagaggctgcctgatggcccgcaaagatttgacagctgtatcattgttctgggctctccgagtttcctctctggccgccgttactgggaggtggaggttggagacaagacagcatggatcctgggagcctgcaagacatccataagcaggaaagggaacatgactctgtcgccagagaatggctactgggtggtgataatgatgaaggaaaatgagtaccaggcgtccagcgttcccccgacccgcctgctaataaaggagcctcccaagcgtgtgggcatcttcgtggactacagagttggaagcatctccttttacaatgtgacagccagatcccacatctatacattcgccagctgctctttctctgggccccttcaacctatcttcagccctgggacacgtgatggagggaagaacacagctcctctgactatctgtccagtgggtggtcaggggcctgactga

SEQ ID NO: 75665 - DNA, 1239 bp, Artificial Sequence
  derived and/or modified sequence
atggccaagacccccagcgaccacctgctgagcaccctggaggagcttgtgccatatgactttgaaaagttcaaattcaagttgcaaaacactagcgtgcagaaggagcacagtaggataccaaggagccaaatccagcgcgctcggcctgtaaagatggctacccttcttgtcacgtattacggggaagaatacgcagttcaactgactctccaggtgctgagagctattaatcagaggttattggctgaagagctgcacagggccgcaattcagggcaggcctcccgatacagccgcctctcctcgctgtcatgcacaagaaggtgaccccgtggacggaacttgtgtaagagatagttgttcattccctgaggccgtgtcgggacacccgcaggcatctggcagccggtcccccggttgtccaagatgtcaggattctcacgaacgcaaaagtcctggtagcttgtccccacagccgttacctcaatgtaagaggcatcttaagcaggttcaactcctattctgtgaggaccacgacgaaccaatctgtctgatctgtagcctgtcccaggagcaccagggacaccgcgtgcgacccatcgaagaagttgctcttgagcacaagaagaagattcagaagcagttggagcacctgaagaagctgcgtaaatccggagaagagcagcgttcatacggcgaggaaaaggccgtgagctttctgaaacagacggaggctctcaaacagcgagttcagaggaagctcgagcaggtctactactttctggaacagcaggaacactttttcgtcgcgtctctggaagatgtgggacagatggtggggcagattcggaaagcttatgatacgcgcgtctcccaggacatcgccctgctggacgcattgatcggagaactggaggccaaggaatgccagagtgagtgggagctactccaggatatcggagacattctccacagggcaaaaacggtgccagtgccagagaagtggacaacgccccaggaaatcaagcagaagatccaactattgcatcaaaagtcagagtttgtcgagaagagtactaagtacttttctgaaacgttgcggtctgaaatggaaatgtttaatgaccacagccctcagcatggtcttggctcctgggaggagagggactatactcagcatagcatgcaggggccaaaacagggggtgccatgttttttggttgtgaggaccgtatag

SEQ ID NO: 75666 - DNA, 1209 bp, Artificial Sequence
  derived and/or modified sequence
atggccaagacccccagcgaccacctgctgagcaccctggaggagcttgtgccctatgatttcgaaaaattcaaatttaagctgcaaaataccagcgttcagaaggagcactctcgcatccccagatctcagatacagagagctaggcccgtgaaaatggccactctcctggtcacctattacggagaagaatatgcagtacaactgacactgcaggtacttcgtgcgatcaaccaaagattactggcagaggagctgcaccgggccgcaatacaaggccggccccctgatactgcagcatcaccacggtgccacgcacaagaaggcgaccccgtggacggtacatgtgtgcgggactcctgcagttttcctgaagccgtgtcagggcacccccaggcatcaggttcacgaagtcctggttgcccccggtgccaagacagccatgaacgcaagagcccaggttctttgtcaccccaacctctaccccaatgcaaaagacacctgaagcaggttcagctgttattctgcgaagatcatgatgagcctatttgtttaatttgcagtcttagccaggagcaccagggccatagagtgaggcctattgaggaggtggccctcgagcataagaaaaaaatacagaaacaactcgagcatctaaaaaaactgaggaagagcggcgaagagcaacggtcttatggggaggagaaggctgtgtcgttcttgaagcagaccgaggccctcaagcaacgcgtacaaagaaaacttgaacaagtgtactacttcctggagcagcaggagcatttttttgtagctagtttggaggatgtggggcagatggttgggcagatccggaaagcttatgatacaagggtgtctcaggacatcgcacttctagacgcgctcatcggtgagcttgaagctaaagagtgtcaatctgagtgggaactgttgcaggacattggtgatatcctgcatagggccaagaccgtcccggtgccagagaaatggaccactccacaggagatcaagcagaagattcagctcctgcatcagaaatcagaattcgttgagaaatcaactaaatattttagcgagactctgcggtccgaaatggagatgtttaatggtgaatcatccggcaatggtgtctgttggcctggcgtagtggcagtctttccctgcgcagttgacctgcgaggtcctatttag

SEQ ID NO: 75667 - DNA, 1338 bp, Artificial Sequence
  derived and/or modified sequence
atggccaagacccccagcgaccacctgctgagcaccctggaggagctggtgccttatgactttgaaaagttcaaatttaaactgcagaacacaagcgtccagaaagagcacagcaggattccccggagtcagattcagcgcgcccgtcctgtcaaaatggccacactcctggtcacatattatggagaggaatacgctgtgcaactgactttgcaggtgctgagagccattaaccagcgcctgctggctgaggagctgcatagggcggcaatccagggcaggcctcctgacaccgcagccagtcctcgttgtcacgcccaggagggtgatcctgtcgatgggacctgcgtgcgcgactcctgctctttccccgaagctgtgtctggccacccacaggcttccggcagccgatcccccggatgtcccagatgtcaggatagtcacgaaagaaaaagccccggctcgctgagcccccaaccactgccccagtgcaaaaggcacctgaagcaggtgcagttgctcttctgtgaggaccacgatgaacccatttgtttgatctgtagcctctcacaggagcaccaagggcaccgcgtcagacctatagaagaggtggcgttggagcacaagaagaaaattcagaagcagcttgagcatttaaagaagctgagaaagagcggtgaggaacagcgcagctacggggaggaaaaggccgtcagcttcctcaagcagactgaggccctgaagcagcgggtccagcgcaaattggagcaagtgtactacttcctcgagcagcaggagcacttctttgtcgcatctctcgaggacgtgggccagatggtcggacagatcagaaaagcttacgatacaagggtctcccaagatatcgcactccttgatgctctgatcggggaacttgaagcgaaggagtgtcaaagcgagtgggagctgttgcaggatattggcgacatcctgcatagggccaagacagtgcccgtgcccgagaagtggaccacaccacaggagattaaacagaaaattcagctgttacaccagaaatcagagttcgtcgagaagagcactaagtacttcagtgagacactacgctccgagatggagatgtttaacgatcactcgccacaacacggcctcggtagctgggaggaaagagattatactcagcactccatgcagggccccaaacagggtgtgccatgcctgtcactcctctccggtcaatgcaacctggcccccctgaacgccaatgcccaggacttctttccatacttgatttttctgagatcctccggggcagattggaggtccggcacctgctgttag

SEQ ID NO: 75668 - DNA, 1239 bp, Artificial Sequence
  derived and/or modified sequence
atggccaagacccctagtgaccatctcctttctacactggaggaactggtcccctacgatttcgaaaagtttaaatttaaacttcaaaacacgagcgtccagaaggaacatagcaggattccccgatcacaaatccagcgggctaggcctgttaagatggccaccctccttgttacctattatggcgaggagtacgcagtgcaactaacactacaggtcctgcgggcaatcaaccagcggttgctcgctgaggagttgcatagagccgctatccagggtcgccctcctgacactgctgcttcaccacggtgccacgcacaggaaggcgaccccgtcgacggaacatgcgtcagagatagctgttcctttccagaggccgtttccgggcacccgcaagcctcaggtagtaggagtccaggatgccctaggtgccaagattcccacgaacgaaagtctcccggatctttgtctccacagcccctaccacagtgtaagagacacctgaagcaggtgcaacttcttttctgcgaagaccatgatgagcccatctgcttgatctgtagcctcagccaagagcatcagggtcaccgggtgcggccaattgaggaggtagccctcgaacacaagaagaagatacaaaagcagctcgagcacctgaagaagttacgaaaaagcggagaagagcagcgctcctacggcgaggaaaaagccgtgtcctttttaaagcagacagaagcgctcaaacagcgcgtgcaacggaagctcgaacaggtgtactactttctcgaacagcaggagcacttctttgtcgctagtctcgaggacgtgggccagatggtcggacagatcagaaaagcctacgacaccagagtgtcccaggacattgcacttctcgatgcactgattggggaactggaagcaaaggagtgtcaatccgagtgggagctcctgcaagatatcggggacattttgcatagggctaaaacagtgcctgtcccagaaaagtggacgacccctcaggagattaaacagaagatccagttactgcaccagaaaagcgaatttgtagaaaaaagcacaaagtacttctccgagaccctccgcagtgagatggagatgtttaacgatcacagcccgcaacacggcctgggttcctgggaagagcgagattatacccagcacagcatgcaggggccaaagcagggtgtcccttgttttttggttgttaggacagtttag

SEQ ID NO: 75669 - DNA, 1209 bp, Artificial Sequence
  derived and/or modified sequence
atggctaagacgccgtcagatcacctgctcagtacattagaagagctggttccgtatgatttcgagaagttcaagttcaagctgcagaacacctccgttcaaaaagagcacagtcgaatcccgcgatcacagattcagcgtgcccgtcctgtaaaaatggcaactctgttagttacatattacggcgaagaatatgccgtgcagctaaccctacaggtgcttcgcgcaattaatcagagacttttggctgaggaactgcaccgtgccgcaatccaaggacgtcctcctgacacggctgcgagcccgaggtgtcatgcccaggaaggtgaccccgttgacggcacgtgtgtgcgcgacagctgttctttccccgaagccgtgagcgggcacccccaggctagtggatctcggtctccaggatgccccagatgtcaggatagtcacgaaaggaagagtcccggatccttgtcaccacagcctcttccccaatgcaagcgacatttaaagcaggttcaactgctgttttgcgaggatcacgacgagcccatctgcctgatttgcagtctctctcaggagcaccagggacacagggtccgcccaattgaagaggttgcactggaacacaaaaaaaaaatacagaagcagctcgaacatctcaaaaaattgcgcaagagtggagaagagcagcgcagttatggcgaggaaaaggccgttagctttttgaaacagactgaggcactgaagcagcgggtgcagcgaaaactggaacaggtatactactttctggagcagcaagagcactttttcgtagctagtttggaagacgtcggccaaatggtggggcagattcggaaggcgtatgatactcgagtctcgcaggacatagcactgctggatgcactaatcggcgaactcgaagctaaagagtgccagtctgagtgggagctgctccaagacattggcgatatcttgcaccgggcaaaaactgtcccagtgccggaaaagtggaccaccccccaagagattaagcagaaaatccaattactgcatcagaagtccgaatttgtggaaaaaagtaccaagtatttttcagaaaccttaaggagtgagatggaaatgtttaacggcgagtcctctggcaacggggtctgttggcctggtgtggtggccgtcttcccgtgtgctgtcgacctaaggggcccaatttag

SEQ ID NO: 75670 - DNA, 1338 bp, Artificial Sequence
  derived and/or modified sequence
atggccaagacaccaagtgatcatctgctgagcacgctcgaagaactcgttccttatgatttcgaaaaattcaaatttaagctgcaaaacacttcagtgcagaaggaacatagtaggattccacggagccaaatacaaagggctaggcccgttaagatggccacgctgctggtaacatattatggggaggagtatgccgtacagcttactctgcaggtgttgagagccattaatcagaggttattggcagaggagctgcatcgggctgctattcagggcaggcctcccgatactgcagcatcccctcgctgccatgctcaagaaggagaccccgtggacggtacatgcgtgcgggattcttgtagcttccccgaagcagtgagcggccacccccaggccagcggcagccgctctcccggttgtccccgatgtcaggatagccatgagaggaaatctccagggagcctgtccccccagccactgccacaatgcaagcgccacctgaagcaggtacagttgctgttttgtgaggaccatgatgagcctatttgcttaatctgcagcctttctcaggaacatcaggggcatcgtgtccgccctatcgaggaagttgcactggaacataaaaaaaagatccaaaaacaattggaacatttaaaaaaactgcgcaaatcgggcgaggaacagaggagctacggggaagaaaaggccgttagctttctcaagcagaccgaggcattgaaacagcgcgtccaacggaagctggagcaggtctattacttccttgagcagcaggaacacttttttgtcgccagtttggaagatgtgggccagatggttggtcagatcagaaaggcctacgatacacgtgtaagtcaggatatcgccctcctcgatgcgctgatcggcgagctcgaagccaaggagtgtcagtccgagtgggaactgctgcaagacatcggcgacatcttacacagagccaagactgtacccgtgcctgaaaaatggactactcctcaggaaataaagcagaagatacagttgttgcatcaaaaatccgagttcgtggagaagagtaccaaatatttttccgaaacgctgagaagcgagatggagatgtttaatgatcattccccacagcacggactgggctcttgggaggagcgagactatactcagcacagcatgcagggccctaagcagggcgtgccttgtctgtctttgctgtcaggtcagtgtaaccttgcacccctgaacgcaaacgcccaagatttctttccctacctgatatttttgagatcaagcggggcagattggcgttctggcacctgttgttag

SEQ ID NO: 75671 - DNA, 1239 bp, Artificial Sequence
  derived and/or modified sequence
atggccaagacccccagcgaccacctgctgagcaccctggaggagctggtgccctacgacttcgagaagttcaagttcaagctgcagaacaccagcgtgcagaaggagcacagcagaatccccagaagccagatccagagagccagacccgtgaagatggccaccctgctggtgacctactacggcgaggagtacgccgtgcagctgaccctgcaggtgctgagagccatcaaccagagactgctggccgaggagctgcacagagccgccatccagggcagaccccccgacaccgccgccagccccagatgccacgcccaggagggcgaccccgtggacggcacctgcgtgagagacagctgcagcttccccgaggccgtgagcggccacccccaggccagcggcagcagaagccccggctgccccagatgccaggacagccacgagagaaagagccccggcagcctgagcccccagcccctgccccagtgcaagagacacctgaagcaggtgcagctgctgttctgcgaggaccacgacgagcccatctgcctgatctgcagcctgagccaggagcaccagggccacagagtgagacccatcgaggaggtggccctggagcacaagaagaagatccagaagcagctggagcacctgaagaagctgagaaagagcggcgaggagcagagaagctacggcgaggagaaggccgtgagcttcctgaagcagaccgaggccctgaagcagagagtgcagagaaagctggagcaggtgtactacttcctggagcagcaggagcacttcttcgtggccagcctggaggacgtgggccagatggtgggccagatcagaaaggcctacgacaccagagtgagccaggacatcgccctgctggacgccctgatcggcgagctggaggccaaggagtgccagagcgagtgggagctgctgcaggacatcggcgacatcctgcacagagccaagaccgtgcccgtgcccgagaagtggaccaccccccaggagatcaagcagaagatccagctgctgcaccagaagagcgagttcgtggagaagagcaccaagtacttcagcgagaccctgagaagcgagatggagatgttcaacgaccacagcccccagcacggcctgggcagctgggaggagagagactacacccagcacagcatgcagggccccaagcagggcgtgccctgcttcctggtggtgagaaccgtgtag

SEQ ID NO: 75672 - DNA, 1209 bp, Artificial Sequence
  derived and/or modified sequence
atggccaagacccccagcgaccacctgctgagcaccctggaggagctggtgccctacgacttcgagaagttcaagttcaagctgcagaacaccagcgtgcagaaggagcacagcagaatccccagaagccagatccagagagccagacccgtgaagatggccaccctgctggtgacctactacggcgaggagtacgccgtgcagctgaccctgcaggtgctgagagccatcaaccagagactgctggccgaggagctgcacagagccgccatccagggcagaccccccgacaccgccgccagccccagatgccacgcccaggagggcgaccccgtggacggcacctgcgtgagagacagctgcagcttccccgaggccgtgagcggccacccccaggccagcggcagcagaagccccggctgccccagatgccaggacagccacgagagaaagagccccggcagcctgagcccccagcccctgccccagtgcaagagacacctgaagcaggtgcagctgctgttctgcgaggaccacgacgagcccatctgcctgatctgcagcctgagccaggagcaccagggccacagagtgagacccatcgaggaggtggccctggagcacaagaagaagatccagaagcagctggagcacctgaagaagctgagaaagagcggcgaggagcagagaagctacggcgaggagaaggccgtgagcttcctgaagcagaccgaggccctgaagcagagagtgcagagaaagctggagcaggtgtactacttcctggagcagcaggagcacttcttcgtggccagcctggaggacgtgggccagatggtgggccagatcagaaaggcctacgacaccagagtgagccaggacatcgccctgctggacgccctgatcggcgagctggaggccaaggagtgccagagcgagtgggagctgctgcaggacatcggcgacatcctgcacagagccaagaccgtgcccgtgcccgagaagtggaccaccccccaggagatcaagcagaagatccagctgctgcaccagaagagcgagttcgtggagaagagcaccaagtacttcagcgagaccctgagaagcgagatggagatgttcaacggcgagagcagcggcaacggcgtgtgctggcccggcgtggtggccgtgttcccctgcgccgtggacctgagaggccccatctag

SEQ ID NO: 75673 - DNA, 1338 bp, Artificial Sequence
  derived and/or modified sequence
atggccaagacccccagcgaccacctgctgagcaccctggaggagctggtgccctacgacttcgagaagttcaagttcaagctgcagaacaccagcgtgcagaaggagcacagcagaatccccagaagccagatccagagagccagacccgtgaagatggccaccctgctggtgacctactacggcgaggagtacgccgtgcagctgaccctgcaggtgctgagagccatcaaccagagactgctggccgaggagctgcacagagccgccatccagggcagaccccccgacaccgccgccagccccagatgccacgcccaggagggcgaccccgtggacggcacctgcgtgagagacagctgcagcttccccgaggccgtgagcggccacccccaggccagcggcagcagaagccccggctgccccagatgccaggacagccacgagagaaagagccccggcagcctgagcccccagcccctgccccagtgcaagagacacctgaagcaggtgcagctgctgttctgcgaggaccacgacgagcccatctgcctgatctgcagcctgagccaggagcaccagggccacagagtgagacccatcgaggaggtggccctggagcacaagaagaagatccagaagcagctggagcacctgaagaagctgagaaagagcggcgaggagcagagaagctacggcgaggagaaggccgtgagcttcctgaagcagaccgaggccctgaagcagagagtgcagagaaagctggagcaggtgtactacttcctggagcagcaggagcacttcttcgtggccagcctggaggacgtgggccagatggtgggccagatcagaaaggcctacgacaccagagtgagccaggacatcgccctgctggacgccctgatcggcgagctggaggccaaggagtgccagagcgagtgggagctgctgcaggacatcggcgacatcctgcacagagccaagaccgtgcccgtgcccgagaagtggaccaccccccaggagatcaagcagaagatccagctgctgcaccagaagagcgagttcgtggagaagagcaccaagtacttcagcgagaccctgagaagcgagatggagatgttcaacgaccacagcccccagcacggcctgggcagctgggaggagagagactacacccagcacagcatgcagggccccaagcagggcgtgccctgcctgagcctgctgagcggccagtgcaacctggcccccctgaacgccaacgcccaggacttcttcccctacctgatcttcctgagaagcagcggcgccgactggagaagcggcacctgctgctag

SEQ ID NO: 75674 - protein, 941 aa, Artificial Sequence
  derived and/or modified sequence
MVFLPLKWSLATMSFLLSSLLALLTVSTPSWCQSTEASPKRSDGTPFPWNKIRLPEYVIPVHYDLLIHANLTTLTFWGTTKVEITASQPTSTIILHSHHLQISRATLRKGAGERLSEEPLQVLEHPRQEQIALLAPEPLLVGLPYTVVIHYAGNLSETFHGFYKSTYRTKEGELRILASTQFEPTAARMAFPCFDEPAFKASFSIKIRREPRHLAISNMPLVKSVTVAEGLIEDHFDVTVKMSTYLVAFIISDFESVSKITKSGVKVSVYAVPDKINQADYALDAAVTLLEFYEDYFSIPYPLPKQDLAAIPDFQSGAMENWGLTTYRESALLFDAEKSSASSKLGITMTVAHELAHQWFGNLVTMEWWNDLWLNEGFAKFMEFVSVSVTHPELKVGDYFFGKCFDAMEVDALNSSHPVSTPVENPAQIREMFDDVSYDKGACILNMLREYLSADAFKSGIVQYLQKHSYKNTKNEDLWDSMASICPTDGVKGMDGFCSRSQHSSSSSHWHQEGVDVKTMMNTWTLQKGFPLITITVRGRNVHMKQEHYMKGSDGAPDTGYLWHVPLTFITSKSDMVHRFLLKTKTDVLILPEEVEWIKFNVGMNGYYIVHYEDDGWDSLTGLLKGTHTAVSSNDRASLINNAFQLVSIGKLSIEKALDLSLYLKHETEIMPVFQGLNELIPMYKLMEKRDMNEVETQFKAFLIRLLRDLIDKQTWTDEGSVSERMLRSQLLLLACVHNYQPCVQRAEGYFRKWKESNGNLSLPVDVTLAVFAVGAQSTEGWDFLYSKYQFSLSSTEKSQIEFALCRTQNKEKLQWLLDESFKGDKIKTQEFPQILTLIGRNPVGYPLAWQFLRKNWNKLVQKFELGSSSIAHMVMGTTNQFSTRTRLEEVKGFFSSLKENGSQLRCVQQTIETIEENIGWMDKNFDKIRVWLQSEKLERM

SEQ ID NO: 75675 - DNA, 2826 bp, Artificial Sequence
  derived and/or modified sequence
atggtttttttgcccctgaaatggtcactcgccacaatgtctttcctgttgtcctcacttcttgcactcttaaccgtttcaacacccagctggtgccagagcaccgaagcctccccaaagcgcagtgatgggactccgttcccctggaacaaaatcaggttacccgagtatgttattccggttcactacgatcttctgattcatgccaacctcacgaccctgacattctggggaactacaaaggtcgaaatcactgcttcccaaccaacttcaacaatcatcctgcatagccatcacctacagatatccagggccacattgcggaagggtgctggagagcggctttcagaagaaccattgcaggtgctggagcatccccgccaggaacagatcgccttactcgccccagagcccctgctggttgggttaccctataccgtggtcatccactatgctggcaacctgtcagaaactttccacggcttttataagtctacctaccgcacaaaggaaggcgagttgagaatcctggccagcacgcaattcgagcccactgcggcaagaatggctttcccttgtttcgacgagcccgcctttaaagcttcattctctatcaagataaggcgggaaccccggcacctagcaatatcaaatatgccactggtcaagtccgttacagtggcagaaggattgattgaggatcatttcgacgtcacagtgaagatgagcacatatctcgttgctttcattatctccgatttcgaatcagtcagcaagatcaccaagtctggcgtgaaggtatcagtatacgctgtgccagataaaatcaaccaggcagattatgccttagacgccgctgtcaccctcctagaattctatgaagactattttagcatcccgtatcccctgcctaaacaagatcttgctgctattcccgacttccaatcaggggccatggagaattgggggctgacaacttaccgggaatccgcactgctctttgacgcagaaaagagctctgccagcagcaaactcggcataactatgacagtcgctcatgaactagcgcatcagtggttcggaaacctggtcaccatggagtggtggaatgacctatggcttaatgagggctttgcaaaattcatggaattcgtgtccgtctccgtgacacatcctgagttgaaagtgggcgattattttttcgggaagtgctttgatgccatggaagttgacgctcttaactccagtcaccctgtatccactcccgtggaaaatcctgctcagatacgggaaatgtttgacgatgtttcctacgataaaggtgcttgtatattaaacatgctgcgtgagtacctctccgccgatgcattcaaaagcggtattgtacaatatttacagaagcactcgtacaaaaacactaagaacgaggatctgtgggatagtatggccagtatatgtcctacagatggtgtcaagggcatggatggattttgctcaagatctcagcatagcagctctagctctcattggcaccaggagggcgtggatgttaaaacaatgatgaacacatggaccctacagaagggattcccactgatcactattaccgtgcgcgggagaaacgttcatatgaaacaagagcattacatgaaaggaagtgacggagctccggacactggctacctgtggcacgtgcctctgacctttatcaccagcaagtccgacatggtccaccggtttttgctgaaaaccaaaaccgacgtcctaattctccccgaggaagtagagtggataaaatttaatgtcggaatgaacggatattatatcgttcattacgaggatgacggatgggatagcctcactggcctgctcaaggggacacatacggctgtgagctcaaacgacagggcctcacttattaataacgcttttcaattggtgagtatcggaaagctctccattgagaaagccctggatttgagcctgtacttgaaacatgaaaccgagataatgccggtatttcaaggcctgaatgagttaatcccgatgtataagctcatggagaaaagggatatgaacgaggtcgagacccaatttaaggcattcctgatccgtctgttaagggatctgatcgacaagcaaacttggacagacgaaggatccgtcagcgagaggatgctgaggagccagctgttactgctggcctgcgtgcataactaccagccatgcgtgcagagggctgaaggatacttcagaaagtggaaggaatctaatggaaacctgtctctccctgtagacgttacattggcagtgttcgccgttggcgcgcagagcaccgagggttgggatttcctgtacagcaagtatcagttttcactgtccagtaccgagaagtctcagatcgaatttgcattatgcagaacacagaacaaagagaagctgcagtggctgctcgacgaaagcttcaaaggagataagattaagacacaggagttcccacaaattttgactctgattggaaggaaccctgtcggttatcccctcgcgtggcagtttctgaggaagaattggaacaagcttgtccagaaattcgagctggggtcatctagtatcgcacatatggtcatgggtaccactaaccagtttagtacacgtaccagactggaagaagtgaagggcttcttctctagtctgaaagagaacgggagccaacttcggtgtgtgcagcagactattgagacaatcgaggaaaatatagggtggatggataaaaatttcgacaagatcagggtgtggctgcaatctgagaagttagagaggatgtag

SEQ ID NO: 75676 - DNA, 2826 bp, Artificial Sequence
  derived and/or modified sequence
atggtgttcttgcccctgaaatggagtctggctacaatgtcatttcttttgagtagtttgctggctctgctgaccgtcagtacaccttcttggtgtcagagtacggaggcttcccctaaacgctccgatggaactccctttccctggaataagatcaggctgcctgagtacgtaattccagttcattatgatctcctcattcacgcaaatttgactaccttgacattttggggcaccaccaaagttgaaataaccgcatcacagcctacgtctacaatcatcttacacagccaccatctccaaatatcgcgagcaaccctgagaaagggcgcaggagaaagactgtcggaagagcctttacaggtgctggagcacccccgacaagaacagattgccctgctcgccccggaacctttgctggtgggtctgccctataccgtggtcattcattatgcaggcaatctgtccgaaaccttccacggcttttacaagtctacgtatagaactaaagagggcgaactaaggattttggcaagtactcaatttgaacctacggcagcccggatggcatttccttgctttgacgagcccgcgtttaaagcaagttttagtatcaaaatccgaagagaaccacgacacttagctatctctaatatgcccctggtaaaaagcgtgactgtagctgaaggactgattgaagatcatttcgatgttactgtgaaaatgtctacatatctggtggcctttataataagcgactttgaatcagtgagcaaaatcacaaagtcgggcgtaaaagtgtccgtttacgccgtgcctgataagataaatcaggccgattacgccctcgacgccgctgtgaccctgttggagttttatgaggactatttttcgatcccatatccactccccaaacaagatctggctgcaattcccgatttccagagcggcgctatggagaactgggggttaactacttatcgcgagtccgccctgctcttcgacgcagagaaatccagcgctagttcaaagctgggtatcacaatgacagtcgctcatgaactggcccatcaatggtttgggaatctcgtgaccatggaatggtggaacgacttgtggctcaacgagggtttcgctaaatttatggagttcgttagcgtttctgtaacccaccccgagctgaaagtgggagactacttttttgggaagtgtttcgacgcgatggaagtcgacgctctgaacagctcccatcctgtgagcactcccgtagaaaaccctgcacaaatcagggagatgttcgatgacgtgtcttatgacaaaggtgcctgcatcttaaacatgcttcgagagtatctctcagctgacgctttcaagagtggtattgtgcaataccttcagaagcattcctacaagaataccaagaatgaggatttgtgggatagtatggctagcatttgtccaaccgatggagtgaaaggtatggacgggttttgttctagatcccagcacagcagctcttcctctcattggcaccaggaaggggtagatgtgaagacgatgatgaatacttggaccctgcaaaaagggttccctttgatcacaatcaccgttagaggcaggaacgtgcatatgaaacaggagcattatatgaagggaagcgatggcgcccctgataccgggtacctgtggcatgtacctctgacgtttataacgtcgaagtccgacatggtccacagattccttctgaagacaaagaccgacgtgctgatcctgcctgaggaagtcgagtggataaagttcaatgtggggatgaacggctattatattgtgcattacgaggacgatggctgggactctcttactggcctgcttaagggtacgcataccgccgtgtcgagcaacgaccgtgcctccctgattaataatgcatttcaattggtgtcgatagggaagttaagcatcgagaaggctctggatctgtccctataccttaagcacgagacggagattatgccagtgtttcagggcctgaatgagttaatccctatgtataagttgatggaaaaaagggacatgaatgaggtggaaacgcagtttaaggctttcctgattagactcctacgcgacttgattgacaaacagacctggacagatgaagggagcgtgtccgagcggatgcttaggtcgcaactattacttctggcttgtgtacacaattatcagccgtgtgtacagcgtgctgaaggttacttccggaaatggaaagaatctaacgggaacttatccctgccagtcgatgttaccctggctgtctttgcagtaggggcccaatccaccgagggttgggatttcttgtatagcaaatatcagtttagtctgtcgtccacagaaaaatcacagatcgaatttgccctctgtaggacacagaacaaagagaagttgcagtggctgctggatgagtcgtttaagggagataagattaagacccaggagttcccacagatattgactctgatcgggagaaatcctgtgggctatccactcgcttggcagttcctacggaaaaactggaacaagctggttcagaagtttgagcttggtagcagcagcatagctcacatggtaatgggaactactaatcagttcagcacccgtacccgcctggaggaagtcaaggggttctttagttctctgaaggagaatggaagtcagctccgttgtgtgcaacagacaatagaaaccatcgaggaaaacattggatggatggataagaattttgataaaattcgcgtctggctccaatcagagaagctcgagcggatgtag

SEQ ID NO: 75677 - DNA, 390 bp, Artificial Sequence
  derived and/or modified sequence
atggtgttcctacccctgaagtggtccttagctaccatgtcctttctgttatctagcctgctcgccctgttgacggtgagtactcccagttggtgccaaagcaccgaagcctcacccaaacgtagtgacggcactcctttcccttggaacaaaatcaggctccccgaatatgtgatacccgtccattacgacctgctcatccatgctaatcttaccactctgacattttggggtactacgaaggtggagataacagcatcccagcccacatccactattattctgcacagtcatcatctgcagatctccagagcgacattacggaaaggcgccggcgaacggctgtccgaagaacctttgcaggtcttggaacatccccgacaagaatag

SEQ ID NO: 75678 - DNA, 2826 bp, Artificial Sequence
  derived and/or modified sequence
atggtgttcctgcccctgaagtggagcctggccaccatgtccttcctgctgagcagcctgctggccctgctgactgtgtccacccccagctggtgccagagcacagaggccagccccaagagaagtgatggcacccccttcccctggaacaagatccggctgcctgaatatgtgattcctgtgcactatgacctgctgatccacgccaacctgaccaccctgaccttctggggcaccaccaaggtggagatcacagccagccagcccaccagcaccatcatcctgcacagccaccacctgcagatcagccgggccaccctgaggaaaggagctggggagcggctgtctgaggagcccctgcaggtgctggagcacccccggcaggagcagatcgccctgctggcccctgagcccctgctggtgggcctgccctacacagtggtgatccactacgccggcaacctgtctgagaccttccacggcttctacaagagcacctaccgcaccaaggagggggagctgcgcatcctggccagcacccagtttgagcccacagctgccaggatggccttcccctgctttgatgagcccgccttcaaggccagcttcagcatcaagatccggcgggagcccaggcacctggccatcagcaacatgcccctggtgaagtctgtgacagtggccgagggcctgattgaggaccactttgatgtgacagtgaagatgagcacctacctggtggccttcatcatcagtgactttgagagcgtgtccaagatcaccaagtctggagtgaaggtgtctgtgtatgctgtgcctgacaagatcaaccaggccgactatgccctggatgctgctgtgaccctgctggagttctatgaggactacttcagcatcccctaccccctgcccaagcaggacctggccgccatcccagacttccagagcggggccatggagaactggggcctgaccacctaccgggagagcgccctgctgtttgatgctgagaagagcagcgccagcagcaagctgggcatcaccatgacagtggcccacgagctggcccaccagtggtttggaaacctggtgaccatggagtggtggaatgacctgtggctgaatgaaggatttgccaagttcatggagtttgtgtctgtgtctgtgacccaccctgagctgaaggtgggggactacttctttggaaaatgttttgatgccatggaggtggatgccctgaacagcagccaccctgtgtccacccctgtggagaacccagcccagatccgggagatgtttgatgatgtgtcctatgacaagggggcctgcatcctgaacatgctgcgggagtacctgtctgcagatgccttcaagtctggaattgtgcagtacctgcagaagcacagctacaagaacaccaagaatgaagacctgtgggacagcatggccagcatctgccccacagatggagtgaagggcatggatggcttctgcagccgcagccagcacagcagcagcagcagccactggcaccaggagggcgtggatgtgaagaccatgatgaacacctggaccctgcagaagggcttccccctcatcaccatcaccgtgcggggcagaaatgtgcacatgaagcaggagcactacatgaagggcagtgatggagccccagacaccggctacctgtggcacgtgcccctgaccttcatcaccagcaagagtgacatggtgcaccgcttcctgctgaagaccaagacagatgtgctgatcctgcctgaggaggtggagtggatcaagttcaacgtgggcatgaatggctactacatcgtgcactatgaagatgatggctgggacagcctgaccggcctgctgaagggcacccacacagctgtgagcagcaatgaccgggccagcctcatcaacaatgccttccagctggtgtccatcggcaagctgagcattgagaaggccctggacctgagcctgtacctgaagcatgaaacagagatcatgcctgtgttccagggcctgaatgagctgatccccatgtacaagctgatggagaagagggacatgaatgaggtggagacccagttcaaggccttcctgatccggctgctgcgggacctgattgacaagcagacctggacagatgagggctctgtgtctgagaggatgctgcggagccagctgctgctgctggcctgtgtgcacaactaccagccctgtgtgcagagagctgagggctacttcaggaagtggaaggagagcaatggaaacctgagcctgcctgtggatgtgaccctggccgtgtttgctgtgggcgcccagagcacagagggctgggacttcctgtacagcaagtaccagttcagcctgagcagcacagagaagagccagattgaatttgccctgtgcaggacccagaacaaggagaagctgcagtggctgctggatgagagcttcaagggggacaagatcaagacccaggagttcccccagatcctgaccctgattggaagaaatcctgtgggctaccccctggcctggcagttcctgaggaagaactggaacaagctggtgcagaagtttgagctgggcagcagcagcatcgcccacatggtgatgggcaccaccaaccagttcagcaccaggacccggctggaggaggtgaagggcttcttcagcagcctgaaggaaaatggcagccagctgcgctgtgtgcagcagaccatcgagaccattgaagaaaatattggctggatggacaagaactttgacaagatccgggtgtggctgcagagcgagaagctggagaggatgtag

SEQ ID NO: 75679 - DNA, 390 bp, Artificial Sequence
  derived and/or modified sequence
atggtgttcctgcccctgaagtggagcctggccaccatgtccttcctgctgagcagcctgctggccctgctgactgtgtccacccccagctggtgccagagcacagaggccagccccaagagaagtgatggcacccccttcccctggaacaagatccggctgcctgaatatgtgattcctgtgcactatgacctgctgatccacgccaacctgaccaccctgaccttctggggcaccaccaaggtggagatcacagccagccagcccaccagcaccatcatcctgcacagccaccacctgcagatcagccgggccaccctgaggaaaggagctggggagcggctgtctgaggagcccctgcaggtgctggagcacccccggcaggagtag

SEQ ID NO: 75680 - DNA, 2826 bp, Artificial Sequence
  derived and/or modified sequence
atggtgttcctgcccctgaagtggagcctggccaccatgagcttcctgctgtccagcctgctcgctctgttgaccgtctctaccccaagctggtgccagagcactgaggccagtccgaagaggtctgacggcaccccatttccgtggaacaagatcagactgcctgaatacgtgattccggtccactatgacctgctcatccatgcgaaccttacgacactaacattctgggggactacaaaggttgaaatcaccgcctcccagccgactagcacaatcatcctccattcacaccatctgcaaatctctagagctacattacgcaaaggtgccggcgagaggctgtcagaagagccactgcaagtcttggaacacccgagacaggaacagattgctctcctcgcaccagagcccctgctggtgggcttaccttatacggtagtcattcattacgctggtaacttgtcggaaaccttccacggattttataaaagcacttaccggaccaaagaaggcgaactgagaattctggcctcaacgcaatttgaacccactgccgccagaatggccttcccatgtttcgacgagccggctttcaaggcttccttttctattaaaataaggagggagccacggcatctcgccattagcaacatgccactggtgaagagtgtcacagtggctgagggcctaatcgaagaccactttgatgtgacggtcaagatgtccacttacctggtggcatttattattagcgactttgagagtgtgtccaagattacaaagtctggagtaaaagtgtctgtctacgccgtcccagacaagattaatcaagccgattacgccttggacgctgcagttactctactcgaattctatgaggactacttctcaattccataccctttaccaaagcaggacctcgcggccatcccagattttcagtcaggggctatggaaaattgggggctaaccacatatcgagagtctgcattgctgtttgatgccgaaaagtcttccgccagctcaaaactggggatcactatgacggtcgctcacgaactcgcccaccaatggttcggaaacctcgtaaccatggagtggtggaatgatctgtggctaaacgagggcttcgccaaatttatggagttcgtgtcagtaagcgttacccaccccgagttaaaggtcggcgattacttttttgggaagtgttttgacgctatggaggtggatgctcttaatagttctcacccagtttctacacccgtcgagaatcccgcccagattagggaaatgtttgacgatgtgtcgtacgataaaggagcctgcatactcaacatgctgcgcgaatacctatctgccgatgccttcaagagcggaatcgtgcagtatctgcagaagcactcctacaaaaatacaaagaacgaggacttatgggactcaatggcctcgatctgtcccaccgacggtgtgaagggcatggacgggttttgtagcagaagccagcactcctccagtagcagtcattggcaccaagaaggggtggatgttaagactatgatgaacacatggacgctgcagaagggttttcccctcatcaccatcaccgtgagaggtcggaatgtgcatatgaaacaggagcattatatgaaaggaagtgacggagcacctgatacgggatatctatggcacgtgcccctgacatttatcacatctaaatcagacatggtgcatcggtttctactgaagaccaagaccgatgtgcttattctgccagaagaagttgaatggattaaatttaatgtgggtatgaatggctattacatcgtacattacgaggatgatggttgggacagcttgaccgggctactcaaaggaacccacaccgccgtctcaagtaacgatcgggcatccctcattaacaatgcattccaattggtgtcgatagggaaacttagtatcgaaaaagccctcgatctcagtctgtatttaaagcacgaaaccgaaatcatgcctgtgttccaaggcttaaatgaattgatccccatgtacaagctcatggaaaagcgggacatgaacgaagtggaaacccaatttaaggccttcctcatccgactcctgcgggacctaatcgataaacagacttggaccgatgaagggtccgtgtctgagcgaatgctgcgcagtcagctgttgctgctggcatgtgttcacaactatcagccttgcgtacagcgggcggaaggttacttcagaaaatggaaagagtcgaatggaaacctcagcctacccgtggatgtgactcttgccgtattcgcagttggtgcgcaatccacagagggttgggacttcctatattcaaaataccagttttcactttcctcgacagagaaatcacagattgaattcgccctatgccggactcagaacaaagaaaagttacagtggctattggacgagtcctttaagggcgacaaaattaagactcaagagttcccccagatcctgacgttgatcggcaggaaccccgtcggctacccgctggcgtggcagtttctgcgaaagaactggaacaagctcgtgcagaagttcgaactcggatcctcctccatcgctcacatggttatgggcacgactaaccagttctcgacgcgcactagattggaagaagtgaagggcttttttagcagcttgaaagagaatggttctcagttgaggtgcgtgcagcagactatagagaccatcgaggaaaatatcggctggatggacaagaactttgacaaaattcgagtttggttacagtcagaaaagctcgaacgcatgtag

SEQ ID NO: 75681 - DNA, 2826 bp, Artificial Sequence
  derived and/or modified sequence
atggtgttcctgcccctgaagtggagcctggccaccatgagcttcttgctgagttctctgttggccttgctgaccgtctccacgcccagttggtgccagagcacagaggcctcacctaagcggagcgacgggaccccgttcccctggaacaagattcgtctgccagagtatgtgatcccagttcattacgacctgctgatacatgccaatcttactaccctgacattctggggcacgactaaagtagagattaccgcttcacaacccaccagcacaatcatactgcactcccaccatttacagatctctcgcgccaccctgaggaagggagctggcgagagattatcagaggaaccgctccaggtccttgaacacccaaggcaggagcagattgctctgctcgcacctgagccattactggtgggcctcccctacacagtggtgattcactacgcgggcaatctctccgagacttttcacggcttctacaagtcgacatatagaacgaaggagggtgaactgcggatcctcgcttccacccagtttgaaccaactgctgcgagaatggcctttccgtgctttgatgagcccgcctttaaggcgtccttcagtatcaagatcaggagggagcctcgtcacctcgcaataagtaatatgcccctggttaagtccgttaccgtggccgaggggctgatagaggaccacttcgatgtgacggtgaagatgagtacttatctggtggcttttattatttcagacttcgaaagtgtcagcaagattacaaagagcggcgtgaaggtgagcgtttatgccgtccctgacaaaattaatcaggcggactacgctctggatgctgccgtgacccttctcgaattctatgaggattacttttccataccttatcctctccccaagcaggatttagccgccatccctgattttcaaagcggagcaatggaaaactggggactgacaacttatagagagagcgccctcctttttgatgcagagaaaagtagtgcctcctcaaagctgggcattacaatgacggtggcgcacgaactggcccatcaatggtttggaaacctcgtgacaatggagtggtggaatgatctttggctgaacgaggggtttgctaagttcatggagttcgtctccgtttcagtgacccacccagaattgaaggttggcgactactttttcggcaaatgctttgatgccatggaggtcgacgccttgaatagtagtcatcccgtgtctacaccagttgagaaccccgctcagatccgtgaaatgtttgatgacgtgagctacgacaaaggagcctgtatactcaacatgctgcgcgaatacctgtcagccgacgcatttaaatcaggaattgtccagtatcttcagaagcactcttacaagaataccaagaatgaggacctgtgggattctatggcaagtatctgtcctacagatggggtcaaaggaatggatggcttttgttcccgctcacagcactcctcttcgagctctcactggcatcaggagggcgtcgatgttaaaaccatgatgaatacttggacactgcagaaagggtttccccttatcactattacagtgcggggacgcaatgtgcacatgaaacaggaacactacatgaagggatccgacggagccccagacacagggtatctctggcacgtgcctctgactttcattactagcaaaagcgacatggtgcaccggttccttctgaaaactaagactgatgtgctaatcctgccagaagaggtagaatggattaagttcaacgtcgggatgaacgggtattacatcgtccactacgaagacgacggctgggacagtctgactggcctgctgaagggaacccacactgccgtgtctagcaatgatcgtgcatcattgattaacaatgccttccagctggtgtcgattggcaaactgtccatcgaaaaagctctggatctatctctgtatctgaagcacgagacggagatcatgccagtatttcagggtttgaatgagttaattccaatgtataaattaatggagaagagggacatgaacgaagtcgagacccaatttaaggcctttttaattaggttactacgagacctgatcgacaagcagacttggactgacgagggcagcgtgtcagaaaggatgttgcggtctcagctgctgttgctagcatgtgtccataactaccagccttgtgtccagagagcggagggctacttcaggaagtggaaggaatccaacggcaatctctcactgcccgtagatgttactttggccgtatttgctgtcggcgctcagagcactgaagggtgggattttctgtacagtaagtaccagttctcactgtcttccacagagaaatcacaaattgaattcgcactgtgtcgcacccagaataaagaaaagctgcagtggttgctggacgaaagtttcaagggagacaagattaaaacccaggaatttccccagatcctgacgctgatcggtaggaaccccgtggggtacccgctcgcgtggcaattcctgcgaaagaattggaacaaactggttcagaagttcgaattgggcagttcctccatcgcacacatggttatggggaccacaaatcaattctccacgcgaacacgtttggaagaggtcaaaggcttcttcagctctctgaaagagaatgggagccaactgcgttgcgtgcagcagactatcgagacgattgaggagaacattggatggatggataagaatttcgataagatccgggtttggctgcagagtgagaagcttgaacgcatgtag

SEQ ID NO: 75682 - DNA, 390 bp, Artificial Sequence
  derived and/or modified sequence
atggtgttcctgcccctgaagtggagcctggccaccatgagcttcctactgtcctcattactcgccctcctaacagtgtccaccccctcctggtgccagagtaccgaggcatccccaaagcggtcagacggaacacccttcccctggaacaaaatccgtttaccagaatacgtgatcccagtacattacgatctactgattcacgccaaccttacgaccctgaccttctggggcacgactaaggtggagattactgcctcacaaccaacctcaacgatcatcctgcactcacaccacctgcagatcagtcgagccacgcttagaaagggagctggcgagcgcttgtctgaagagcctctgcaggtgctggaacatccaaggcaggagtag

SEQ ID NO: 75683 - DNA, 2826 bp, Artificial Sequence
  derived and/or modified sequence
atggtattccttccacttaaatggtcacttgcaacaatgtctttcctccttagctctctgctggctttattgacggtgtccactccatcttggtgccagagtactgaggcatcaccaaaacgaagcgatggaacccccttcccctggaacaaaatccgcctgcccgagtatgtcatccctgtgcattatgatctcctcatccacgcgaacctgacaaccctgacgttttggggcaccacaaaagtggagattaccgcctctcagccaaccagcacaatcatcctccacagccaccatctacagattagcagggcaacgttgcgaaaaggtgcaggggaaaggctcagtgaggaaccgctacaggtcctggagcaccccagacaggagcagatagctctcttagcacccgaacccttactggtgggcctgccctataccgtagtcatccattacgccggtaatctctctgaaaccttccatggtttttataagagcacctaccggacgaaagaaggcgaattgaggatacttgctagtacccaattcgagcccaccgcggctaggatggcctttccctgcttcgacgagccagcctttaaagcctctttttctattaagatcaggcgcgagccccgtcatttagctatttcaaacatgccactggtcaagtcggtcactgttgctgaaggtttaatcgaagatcacttcgatgtcaccgtgaagatgtcgacttacctggtagcattcattatttcagacttcgagagcgtcagtaagatcactaaaagcggggttaaagtgtcggtttacgccgtgccagacaaaattaaccaagccgactatgcactggacgcagccgtaacactactggagttttacgaggattacttctcgattccctaccccttgcctaagcaggacctagccgctatccctgactttcagagcggagccatggagaattggggcctgaccacttatcgtgagtccgcccttctgtttgacgccgaaaagtccagcgctagtagcaaactaggtatcacaatgacagtcgctcatgaactggcacatcagtggttcggaaatcttgtgacaatggaatggtggaatgatttgtggttgaatgagggattcgccaaatttatggagtttgtgtctgtatctgttacacatccggaactgaaagtcggagactattttttcggcaaatgtttcgatgctatggaagtggacgctctcaactccagtcatcccgtcagtactcccgttgagaaccccgcacagattcgggaaatgttcgatgacgtttcttacgacaagggcgcatgcattttaaacatgcttagagaatatctttctgcagacgccttcaagagcgggatcgtccagtacttacagaagcacagttataagaatactaaaaacgaggatctgtgggacagcatggctagcatctgtcctacagacggggtcaagggaatggatggtttctgttcccggagccagcatagttctagctcaagtcactggcaccaggaaggggtggacgtcaagacaatgatgaatacatggacgcttcagaaggggtttccactgattaccataactgttcggggtcggaacgttcatatgaaacaagaacattacatgaaggggtctgacggggctcctgatactggttacttatggcatgttccactgacctttatcacctcgaaatccgacatggtgcataggtttttgcttaaaaccaagactgacgtgctgattctgcctgaggaggtggaatggattaagtttaacgtgggcatgaatggatactatatcgtgcattacgaggacgatgggtgggacagcttaacgggcctgctgaagggcacccatacagcagtgtctagcaatgatagggcatcattgattaacaatgcatttcaactcgtatcaattggcaaattgtccattgagaaagcactcgacctaagcctgtatcttaaacatgagaccgaaatcatgcctgtgttccagggactaaacgagttaatccccatgtataagctgatggagaaacgagacatgaacgaggtggagacacaatttaaggccttcctgatcagactcctccgcgatctcattgacaaacagacatggacagacgaaggcagcgtctccgaaaggatgctgcggagccagttgcttctgctggcttgcgttcacaattatcagccttgtgtgcaaagagcggagggctacttcagaaagtggaaggagagcaacggcaatttgtccctgcccgtcgatgtcacactcgccgtgtttgccgtcggtgcccaaagtactgagggttgggactttctgtattccaaataccaattcagcctgagttccactgaaaaaagccagattgaatttgccttgtgcagaacccaaaataaggagaaactgcagtggctgctcgacgagtcattcaaaggtgataagataaaaacacaagaatttcctcaaatactgacacttattggcaggaatccggttggatacccattggcttggcagttccttcgcaaaaactggaataagttagtgcaaaaatttgaactgggctccagcagtatcgcacacatggtcatgggcaccaccaaccagttcagtaccaggacacgtttagaagaagtcaaagggttcttttcctccctgaaggaaaatggttcccagctcaggtgtgtacagcaaactattgagaccattgaagagaatattggatggatggataagaatttcgataaaatacgggtgtggctgcagagcgagaagctcgaaaggatgtag

SEQ ID NO: 75684 - DNA, 2826 bp, Artificial Sequence
  derived and/or modified sequence
atggtgttcctgcccctgaaatggtctctggctaccatgagcttcttactgagcagtttactagccttattaaccgtgagcactcccagttggtgccaaagtacagaagcatcccccaagcgctctgacggcaccccattcccctggaataaaattcgtttgcctgagtacgtgatcccagtccactacgatctccttattcatgccaatttaaccaccttaaccttctggggcaccacgaaggtcgagatcacagcgtctcaaccaacaagtaccatcatcctccactctcaccatttgcagatttctcgggctactttgcgaaagggggctggagaacggttatccgaggagcctctccaagtcctagagcatcctaggcaagagcagatcgctctgttggctcccgagcccctgttggttgggctgccatataccgtggtcatacactacgctggaaacctaagcgagacttttcatgggttctataaaagtacctatcgcaccaaagagggcgagttgagaatcctcgccagtactcagttcgagccgacggccgcacgcatggcctttccatgctttgatgaacccgctttcaaggcaagcttctctattaagatccgtcgcgaacccagacatttggccatcagcaacatgcccctggtgaagtctgtgaccgtcgccgaagggttaatcgaggaccactttgacgttaccgtaaagatgtctacatacctggtcgccttcattatatcggattttgagtcagtcagtaaaatcacgaaatcgggagtgaaggtgtctgtgtatgctgttccagataagataaaccaggctgactatgctcttgacgcagctgtcacattgttagaattttatgaggactatttctctattccctaccctctccccaagcaagatctggcagctatcccagattttcagtcaggggctatggagaattggggactgacaacctaccgggaaagcgcgctgctgtttgacgctgagaaatcgagtgccagctctaagctcggcatcacaatgactgtggctcatgagctggctcaccaatggttcggcaacctcgttactatggagtggtggaacgacttgtggctaaacgagggcttcgccaaattcatggaattcgtgagtgtatcggtcacacatcctgaattaaaggtgggggactacttcttcgggaagtgtttcgacgcgatggaggtcgatgcactgaattcaagccaccccgtcagcacgcctgttgagaacccagcacagatccgagagatgtttgatgatgtgagttacgataaaggagcctgtatcctcaacatgcttcgagagtacctgtccgcagacgcgtttaagtccggaatagtgcaatacctgcagaaacatagctataaaaatacaaagaacgaagacctttgggattcaatggctagtatttgtcctacagacggcgtcaaaggaatggatggcttttgtagccgcagccagcattctagttcctcatcccactggcaccaagaaggcgtcgacgtgaagacaatgatgaatacctggactctgcagaagggcttcccccttataactatcaccgtgaggggacggaatgtccatatgaaacaggagcactacatgaaaggaagtgacggcgctccagataccgggtatctctggcacgtgcccctaaccttcattaccagcaaatccgacatggttcaccgattcttgcttaagacgaagaccgacgtcctgatcctcccagaggaagtggagtggatcaaatttaacgtgggcatgaacggatattacatcgtgcactatgaagatgatggctgggactccctgacaggcctgctcaaaggcactcacacagctgtgtcctctaatgatcgagcatctctcatcaacaacgctttccagctcgtgtccatcggtaagctctccatcgaaaaagctttggatttatccctgtacctgaagcacgagacggaaatcatgccggtgttccagggtcttaacgaattgataccaatgtacaaactcatggaaaagcgcgatatgaacgaagtggaaacccagtttaaggcatttctcatccggcttctgagagaccttattgataagcagacttggactgacgagggcagcgtttcagagcggatgcttagaagccagcttctcctgctggcttgtgttcataattatcagccatgcgttcagagagccgagggatacttccggaaatggaaagaaagcaacgggaatctgtctcttcctgtggacgtgaccttagcggttttcgcagtgggagcacaatctacggaggggtgggatttcctgtactcaaagtatcagttcagcctttcaagtactgaaaagagtcaaatcgaattcgctctgtgcaggacccagaacaaggagaaactgcagtggctgttagacgaaagctttaagggcgacaaaataaagacacaggaattcccacagatccttacactcattgggcgtaatccggtgggatacccgctcgcgtggcaatttctgcgtaaaaactggaataagttggtccagaagtttgaattgggaagtagctctatagcgcacatggttatgggcactacgaaccagtttagcacgcgtacgcgtttggaggaagtgaaaggtttcttctcgtcccttaaggaaaacggtagccaattgcgctgcgtgcaacaaaccattgagacgatcgaggagaacatcggctggatggataaaaactttgataaaattagagtgtggctgcaatcggaaaagctcgaacgcatgtag

SEQ ID NO: 75685 - DNA, 390 bp, Artificial Sequence
  derived and/or modified sequence
atggtctttctgcccctgaagtggtcactcgccaccatgagctttctcttgtctagcctgctcgctttgcttaccgtttcaacaccctcatggtgccagtccacagaggcgtcacctaaacgatccgatggaactccctttccttggaacaagatccggctgcctgaatatgtgataccagtgcattacgatctactgattcacgccaatctgacaactttgaccttctggggtaccaccaaggtggaaattaccgcctcacagcccacttccactatcattttgcatagccaccatctgcagataagcagagcaacattgaggaaaggcgcaggtgaacgactgagtgaagaacccttgcaggtccttgagcacccacgtcaggagtag

SEQ ID NO: 75686 - DNA, 2826 bp, Artificial Sequence
  derived and/or modified sequence
atggtgttcctgcccctgaagtggagcctggccaccatgagcttcctgctgagcagcctgctggccctgctgaccgtgagcacccccagctggtgccagagcaccgaggccagccccaagagaagcgacggcacccccttcccctggaacaagatcagactgcccgagtacgtgatccccgtgcactacgacctgctgatccacgccaacctgaccaccctgaccttctggggcaccaccaaggtggagatcaccgccagccagcccaccagcaccatcatcctgcacagccaccacctgcagatcagcagagccaccctgagaaagggcgccggcgagagactgagcgaggagcccctgcaggtgctggagcaccccagacaggagcagatcgccctgctggcccccgagcccctgctggtgggcctgccctacaccgtggtgatccactacgccggcaacctgagcgagaccttccacggcttctacaagagcacctacagaaccaaggagggcgagctgagaatcctggccagcacccagttcgagcccaccgccgccagaatggccttcccctgcttcgacgagcccgccttcaaggccagcttcagcatcaagatcagaagagagcccagacacctggccatcagcaacatgcccctggtgaagagcgtgaccgtggccgagggcctgatcgaggaccacttcgacgtgaccgtgaagatgagcacctacctggtggccttcatcatcagcgacttcgagagcgtgagcaagatcaccaagagcggcgtgaaggtgagcgtgtacgccgtgcccgacaagatcaaccaggccgactacgccctggacgccgccgtgaccctgctggagttctacgaggactacttcagcatcccctaccccctgcccaagcaggacctggccgccatccccgacttccagagcggcgccatggagaactggggcctgaccacctacagagagagcgccctgctgttcgacgccgagaagagcagcgccagcagcaagctgggcatcaccatgaccgtggcccacgagctggcccaccagtggttcggcaacctggtgaccatggagtggtggaacgacctgtggctgaacgagggcttcgccaagttcatggagttcgtgagcgtgagcgtgacccaccccgagctgaaggtgggcgactacttcttcggcaagtgcttcgacgccatggaggtggacgccctgaacagcagccaccccgtgagcacccccgtggagaaccccgcccagatcagagagatgttcgacgacgtgagctacgacaagggcgcctgcatcctgaacatgctgagagagtacctgagcgccgacgccttcaagagcggcatcgtgcagtacctgcagaagcacagctacaagaacaccaagaacgaggacctgtgggacagcatggccagcatctgccccaccgacggcgtgaagggcatggacggcttctgcagcagaagccagcacagcagcagcagcagccactggcaccaggagggcgtggacgtgaagaccatgatgaacacctggaccctgcagaagggcttccccctgatcaccatcaccgtgagaggcagaaacgtgcacatgaagcaggagcactacatgaagggcagcgacggcgcccccgacaccggctacctgtggcacgtgcccctgaccttcatcaccagcaagagcgacatggtgcacagattcctgctgaagaccaagaccgacgtgctgatcctgcccgaggaggtggagtggatcaagttcaacgtgggcatgaacggctactacatcgtgcactacgaggacgacggctgggacagcctgaccggcctgctgaagggcacccacaccgccgtgagcagcaacgacagagccagcctgatcaacaacgccttccagctggtgagcatcggcaagctgagcatcgagaaggccctggacctgagcctgtacctgaagcacgagaccgagatcatgcccgtgttccagggcctgaacgagctgatccccatgtacaagctgatggagaagagagacatgaacgaggtggagacccagttcaaggccttcctgatcagactgctgagagacctgatcgacaagcagacctggaccgacgagggcagcgtgagcgagagaatgctgagaagccagctgctgctgctggcctgcgtgcacaactaccagccctgcgtgcagagagccgagggctacttcagaaagtggaaggagagcaacggcaacctgagcctgcccgtggacgtgaccctggccgtgttcgccgtgggcgcccagagcaccgagggctgggacttcctgtacagcaagtaccagttcagcctgagcagcaccgagaagagccagatcgagttcgccctgtgcagaacccagaacaaggagaagctgcagtggctgctggacgagagcttcaagggcgacaagatcaagacccaggagttcccccagatcctgaccctgatcggcagaaaccccgtgggctaccccctggcctggcagttcctgagaaagaactggaacaagctggtgcagaagttcgagctgggcagcagcagcatcgcccacatggtgatgggcaccaccaaccagttcagcaccagaaccagactggaggaggtgaagggcttcttcagcagcctgaaggagaacggcagccagctgagatgcgtgcagcagaccatcgagaccatcgaggagaacatcggctggatggacaagaacttcgacaagatcagagtgtggctgcagagcgagaagctggagagaatgtag

SEQ ID NO: 75687 - DNA, 390 bp, Artificial Sequence
  derived and/or modified sequence
atggtgttcctgcccctgaagtggagcctggccaccatgagcttcctgctgagcagcctgctggccctgctgaccgtgagcacccccagctggtgccagagcaccgaggccagccccaagagaagcgacggcacccccttcccctggaacaagatcagactgcccgagtacgtgatccccgtgcactacgacctgctgatccacgccaacctgaccaccctgaccttctggggcaccaccaaggtggagatcaccgccagccagcccaccagcaccatcatcctgcacagccaccacctgcagatcagcagagccaccctgagaaagggcgccggcgagagactgagcgaggagcccctgcaggtgctggagcaccccagacaggagtag

SEQ ID NO: 75688 - DNA, 3122 bp, Artificial Sequence
  derived and/or modified sequence
actttcggtcctgggggagctaggccggcggcagtggtggtggcggcggcgcaagggtgagggcggccccagaaccccaggtaggtagagcaagaagatggtgtttctgcccctcaaatggtcccttgcaaccatgtcatttctactttcctcactgttggctctcttaactgtgtccactccttcatggtgtcagagcactgaagcatctccaaaacgtagtgatgggacaccatttccttggaataaaatacgacttcctgagtacgtcatcccagttcattatgatctcttgatccatgcaaaccttaccacgctgaccttctggggaaccacgaaagtagaaatcacagccagtcagcccaccagcaccatcatcctgcatagtcaccacctgcagatatctagggccaccctcaggaagggagctggagagaggctatcggaagaacccctgcaggtcctggaacacccccgtcaggagcaaattgcactgctggctcccgagcccctccttgtcgggctcccgtacacagttgtcattcactatgctggcaatctttcggagactttccacggattttacaaaagcacctacagaaccaaggaaggggaactgaggatactagcatcaacacaatttgaacccactgcagctagaatggcctttccctgctttgatgaacctgccttcaaagcaagtttctcaatcaaaattagaagagagccaaggcacctagccatctccaatatgccattggtgaaatctgtgactgttgctgaaggactcatagaagaccattttgatgtcactgtgaagatgagcacctatctggtggccttcatcatttcagattttgagtctgtcagcaagataaccaagagtggagtcaaggtttctgtttatgctgtgccagacaagataaatcaagcagattatgcactggatgctgcggtgactcttctagaattttatgaggattatttcagcataccgtatcccctacccaaacaagatcttgctgctattcccgactttcagtctggtgctatggaaaactggggactgacaacatatagagaatctgctctgttgtttgatgcagaaaagtcttctgcatcaagtaagcttggcatcacaatgactgtggcccatgaactggctcaccagtggtttgggaacctggtcactatggaatggtggaatgatctttggctaaatgaaggatttgccaaatttatggagtttgtgtctgtcagtgtgacccatcctgaactgaaagttggagattatttctttggcaaatgttttgacgcaatggaggtagatgctttaaattcctcacaccctgtgtctacacctgtggaaaatcctgctcagatccgggagatgtttgatgatgtttcttatgataagggagcttgtattctgaatatgctaagggagtatcttagtgctgacgcatttaaaagtggtattgtacagtatctccagaagcatagctataaaaatacaaaaaacgaggacctgtgggatagtatggcaagtatttgccctacagatggtgtaaaagggatggatggcttttgctctagaagtcaacattcatcttcatcctcacattggcatcaggaaggggtggatgtgaaaaccatgatgaacacttggacactgcagaagggttttcccctaataaccatcacagtgagggggaggaatgtacacatgaagcaagagcactacatgaagggctctgacggcgccccggacactgggtacctgtggcatgttccattgacattcatcaccagcaaatccgacatggtccatcgatttttgctaaaaacaaaaacagatgtgctcatcctcccagaagaggtggaatggatcaaatttaatgtgggcatgaatggctattacattgtgcattacgaggatgatggatgggactctttgactggccttttaaaaggaacacacacagcagtcagcagtaatgatcgggcgagtctcattaacaatgcatttcagctcgtcagcattgggaagctgtccattgaaaaggccttggatttatccctgtacttgaaacatgaaactgaaattatgcccgtgtttcaaggtttgaatgagctgattcctatgtataagttaatggagaaaagagatatgaatgaagtggaaactcaattcaaggccttcctcatcaggctgctaagggacctcattgataagcagacatggacagacgagggctcagtctcagagcgaatgctgcggagtcaactactactcctcgcctgtgtgcacaactatcagccgtgcgtacagagggcagaaggctatttcagaaagtggaaggaatccaatggaaacttgagcctgcctgtcgacgtgaccttggcagtgtttgctgtgggggcccagagcacagaaggctgggattttctttatagtaaatatcagttttctttgtccagtactgagaaaagccaaattgaatttgccctctgcagaacccaaaataaggaaaagcttcaatggctactagatgaaagctttaagggagataaaataaaaactcaggagtttccacaaattcttacactcattggcaggaacccagtaggatacccactggcctggcaatttctgaggaaaaactggaacaaacttgtacaaaagtttgaacttggctcatcttccatagcccacatggtaatgggtacaacaaatcaattctccacaagaacacggcttgaagaggtaaaaggattcttcagctctttgaaagaaaatggttctcagctccgttgtgtccaacagacaattgaaaccattgaagaaaacatcggttggatggataagaattttgataaaatcagagtgtggctgcaaagtgaaaagcttgaacgtatgtaaaaattcctcccttgccaggttcctgttatctctaatcaccaacattttgttgagtgtattttcaaactagagatggctgttttggctccaactggagatacttttttcccttcaactcattttttgactatccctgtgaaaagaatagctgttagtttttcatgaatggtttaataaaaatagaaatcactggtaattt

SEQ ID NO: 75689 - DNA, 4805 bp, Artificial Sequence
  derived and/or modified sequence
gcagtggtggtggcggcggcgcaagggtgagggcggccccagaaccccaggtaggtagagcaagaagatggtgtttctgcccctcaaatggtcccttgcaaccatgtcatttctactttcctcactgttggctctcttaactgtgtccactccttcatggtgtcagagcactgaagcatctccaaaacgtagtgatgggacaccatttccttggaataaaatacgacttcctgagtacgtcatcccagttcattatgatctcttgatccatgcaaaccttaccacgctgaccttctggggaaccacgaaagtagaaatcacagccagtcagcccaccagcaccatcatcctgcatagtcaccacctgcagatatctagggccaccctcaggaagggagctggagagaggctatcggaagaacccctgcaggtcctggaacacccccgtcaggagcaaattgcactgctggctcccgagcccctccttgtcgggctcccgtacacagttgtcattcactatgctggcaatctttcggagactttccacggattttacaaaagcacctacagaaccaaggaaggggaactgaggatactagcatcaacacaatttgaacccactgcagctagaatggcctttccctgctttgatgaacctgccttcaaagcaagtttctcaatcaaaattagaagagagccaaggcacctagccatctccaatatgccattggtgaaatctgtgactgttgctgaaggactcatagaagaccattttgatgtcactgtgaagatgagcacctatctggtggccttcatcatttcagattttgagtctgtcagcaagataaccaagagtggagtcaaggtttctgtttatgctgtgccagacaagataaatcaagcagattatgcactggatgctgcggtgactcttctagaattttatgaggattatttcagcataccgtatcccctacccaaacaagatcttgctgctattcccgactttcagtctggtgctatggaaaactggggactgacaacatatagagaatctgctctgttgtttgatgcagaaaagtcttctgcatcaagtaagcttggcatcacaatgactgtggcccatgaactggctcaccagtggtttgggaacctggtcactatggaatggtggaatgatctttggctaaatgaaggatttgccaaatttatggagtttgtgtctgtcagtgtgacccatcctgaactgaaagttggagattatttctttggcaaatgttttgacgcaatggaggtagatgctttaaattcctcacaccctgtgtctacacctgtggaaaatcctgctcagatccgggagatgtttgatgatgtttcttatgataagggagcttgtattctgaatatgctaagggagtatcttagtgctgacgcatttaaaagtggtattgtacagtatctccagaagcatagctataaaaatacaaaaaacgaggacctgtgggatagtatggcaagtatttgccctacagatggtgtaaaagggatggatggcttttgctctagaagtcaacattcatcttcatcctcacattggcatcaggaaggggtggatgtgaaaaccatgatgaacacttggacactgcagaagggttttcccctaataaccatcacagtgagggggaggaatgtacacatgaagcaagagcactacatgaagggctctgacggcgccccggacactgggtacctgtggcatgttccattgacattcatcaccagcaaatccgacatggtccatcgatttttgctaaaaacaaaaacagatgtgctcatcctcccagaagaggtggaatggatcaaatttaatgtgggcatgaatggctattacattgtgcattacgaggatgatggatgggactctttgactggccttttaaaaggaacacacacagcagtcagcagtaatgatcgggcgagtctcattaacaatgcatttcagctcgtcagcattgggaagctgtccattgaaaaggccttggatttatccctgtacttgaaacatgaaactgaaattatgcccgtgtttcaaggtttgaatgagctgattcctatgtataagttaatggagaaaagagatatgaatgaagtggaaactcaattcaaggccttcctcatcaggctgctaagggacctcattgataagcagacatggacagacgagggctcagtctcagagcgaatgctgcggagtcaactactactcctcgcctgtgtgcacaactatcagccgtgcgtacagagggcagaaggctatttcagaaagtggaaggaatccaatggaaacttgagcctgcctgtcgacgtgaccttggcagtgtttgctgtgggggcccagagcacagaaggctgggattttctttatagtaaatatcagttttctttgtccagtactgagaaaagccaaattgaatttgccctctgcagaacccaaaataaggaaaagcttcaatggctactagatgaaagctttaagggagataaaataaaaactcaggagtttccacaaattcttacactcattggcaggaacccagtaggatacccactggcctggcaatttctgaggaaaaactggaacaaacttgtacaaaagtttgaacttggctcatcttccatagcccacatggtaatgggtacaacaaatcaattctccacaagaacacggcttgaagaggtaaaaggattcttcagctctttgaaagaaaatggttctcagctccgttgtgtccaacagacaattgaaaccattgaagaaaacatcggttggatggataagaattttgataaaatcagagtgtggctgcaaagtgaaaagcttgaacgtatgtaaaaattcctcccttgccaggttcctgttatctctaatcaccaacattttgttgagtgtattttcaaactagagatggctgttttggctccaactggagatacttttttcccttcaactcattttttgactatccctgtgaaaagaatagctgttagtttttcatgaatgggctatcgctaccatgtgttttgttcatcacaggtgttgccctgcaacgtaaacccaagtgttgggttccctgccacagaagaataaagtaccttattcttctcattttatagtttatgcttaagcacccgtgtccaaaaccctgtaccccatgtttatcattcataaactgtttcatcagtctcctcgaaagactctgaatagtcgactactgaacaatgaacacctggatctgagactaagccggacgatgactgggttaaagctctcccggctcacccctccagacccgctgcccatccctcttccttgctccatgcccaggggctgacttgtaaaggccaagtcatcaagctttcttgccctttggatgttggtcagtggggagccggagagctggagctggggtcggaggaggtagtaggtggaggtgttcttccctgattcccttgcgggatgcctcgggctggcctcccctgagggtcttagctccgagaggggaccctcttttccacacagccttctccacctctggattttggtaactgctccctcctcatcccttcaggattagtggcctcagtgggagtctggcttttactagtcctggcggacttgtggtttctacataatgtgctcgcacttttgcaaaaaatctttttatagaaccctcctcagataattctgagtgagtgtcatctatttccctgactggtacagtatctcttctgaaaaagcagagtgcattcaagtctgtaggaaaacccttttcttagggaggtgattttttttctctctctgcttcttatttggcctactttacaatttctaactaactagttattggcatttactgacagtaaattattgcagtcaccaataaatgatagtacattgtgaaacaaaatatttgctcatattagcaaataggacattctttggctttgaagtctttctttcttttgtgaagacttcacacacggttgcttcagcacacagttgctgctcaggttttatgtatagatgataataatagaaagcacagtttactaacatggtaaaccaacggagttcaagtcaagtcagttaataccctaagaattagattttatttcttattctgaaaacttgctacacagggacttatctaacccatagtgtgctctgttgctgacttgattcaagttgcagcgtgttttgcgctgactctaaggtgcggaaatcctcacacctggcaaaggagaattcaaactgaactttttgaatataaggcaaaaacttcaagataagggaatatgattgatgattggtacgaaaaatgtcaaaatgtgttcccctaatacacgacaaaatagagtgacttctggacataaatctgccatttattaaaccattcactacaacaaataaataggtataaaagtggaattggaatttttatacttatttgttgtagtgaatggtttaataaaaatagaaatcactggtaatttccaccccaaactaaactatttcccttcttttaaaaaaatacacaaccaagattttaatgtaaaatattttgctttaattgtattttatgccttgattaatgaaacatggaaatattgattttcagttttggtcacctgaggaacctatctttgtttgcttttggaaaagcccattttctaaacagatacaatattgccacaacaatgtgcagaaacctttttgataataaaaaattgttctttgcctctaa

SEQ ID NO: 75690 - DNA, 583 bp, Artificial Sequence
  derived and/or modified sequence
agctaggccggcggcagtggtggtggcggcggcgcaagggtgagggcggccccagaaccccagacagagtcttgctctgttgccaggctggagtgcagtggtgcaatctcagctcactgcaactctgcctcccaggttcaagcgattctcctgcctcagcctcccaagtaattaggactacaggtagagcaagaagatggtgtttctgcccctcaaatggtcccttgcaaccatgtcatttctactttcctcactgttggctctcttaactgtgtccactccttcatggtgtcagagcactgaagcatctccaaaacgtagtgatgggacaccatttccttggaataaaatacgacttcctgagtacgtcatcccagttcattatgatctcttgatccatgcaaaccttaccacgctgaccttctggggaaccacgaaagtagaaatcacagccagtcagcccaccagcaccatcatcctgcatagtcaccacctgcagatatctagggccaccctcaggaagggagctggagagaggctatcggaagaacccctgcaggtcctggaacacccccgtcaggag

SEQ ID NO: 75691 - DNA, 2853 bp, Artificial Sequence
  derived and/or modified sequence
atggaatcagccggagggttcaaattgggtatggagcctctcagcgggggcggcgtctgcgaaaaaaagaagttactgaagatgacaagtcgccgcttagaagagagcatgggggcggtgcagatgggcctcgtcaacatgtttaaaggtttccaaagcaaggttttgccccccctgagccccaaggtggtcacagaggaggaagtgaatagaatgttaaccccatcagaattccttaaagaaatgtccctcacgacggagcaacggctagccaagaccaggctcatgtgccggccccagattatcgagttgcttgatatgggcgagaccacccaccagaagttcagcgggatcgaccttgaccaagcattattccagcccttccctagtgaaattatcttccagaactataccccgtgtgaggtttacgaggttcctttgattttacgaaacaacgacaagatccctagattggttaaggtggtcgaagagagtagcccatactttaaagtcatcagtccgaaggatataggccataaggtagctcctggagtgccgtctatttttcgcattttatttacaccggaagaaaacaaggattacgcacatactttgacatgtgtcactgaacgtgaaaagttcatcgtccctattaaggcaaggggggcgagagcgattctcgactttcccgataaattgaatttttccacctgtcctgtaaagtacagtacccagaaaatccttctggttcggaacatcggtaataagaacgcagtttttcacattaagacatgtcgaccattcagcatagaaccagccattggcaccttgaatgtcggcgaatccatgcaactcgaagtagagttcgaacctcagtctgtaggagaccatagcgggcgtctgatagtgtgttacgacacgggcgagaaggtgtttgtgagcctgtacggtgccgccatcgatatgaacattagattggataaaaattccctgacgattgaaaaaacgtatatcagtctggccaatcagaggacaatcacgatccacaatagatccaacatcatcgcccattttctatggaaagtctttgctacccaacaagaggaagatagggagaaataccgggcctgtgacgacctgatcaaagaggagaaggacgaaacagacgagttcttcgaagagtgcataacagatcccctgttgcgcgagcatctgagcgttctatcaagaaccttcgctaatcagcgcagactcgtacaaggagattcaaagctgttctttaacaacgtgttcacggtcgagccactcgagggagatgtgtggccaaactctagcgctgagatcacggtgtacttcaacccgctcgaagcgaagctctaccagcagacgatttattgtgacattcttggaagagaaattaggctccccctaaggattaaaggcgaggggatgggccctaagatacatttcaattttgaactgctggatattggaaaagtctttacggggtctgcacactgttacgaagccatcctgtacaacaagggctcaatcgatgcgctgtttaacatgacaccaccaacatctgctctgggagcatgcttcgtgttctctccaaaggaaggcattatcgaaccttccggagtccaagccatccaaataagtttctcatctactatcttaggaaacttcgaagaagagtttcttgttaacgtcaacggtagccccgaaccagtcaagctgaccattcggggatgcgtgatcggccctacctttcactttaacgtgcctgcactgcatttcggagacgtttcatttggcttcccacacacactcatctgttctctcaataacactagcctcatcccgatgacctacaaactgcgtattcctggcgacggactgggacacaaatccattagctattgtgagcagcacgtggattacaaacgcccgagttggacaaaggaagagatatcatctatgaaacctaaagagtttaccatctccccagactgtggcactatcagaccccaaggattcgccgctatcagggttacactgtgtagcaacaccgtgcagaagtatgaacttgcactcgtggtggatgtagaaggaattggggaagaagtgctggccctgctcatcacagctaggtgcgtcgtccccgctttacacttggtgaataccgaggtagatttcgggcattgctttctgaaatatccttacgagaagactctgcagctcgccaatcaggatgaccttccaggattctacgaggtgcagccccaagtgtgcgaggaggtgcccactgtgctcttctcatcaccaactcccagcggcgtgatctccccctcgtccaccatccatattccacttgtcctggagacacaggtgactggcgaacaccgcagcaccgtctacatttccatctttggctctcaagaccctcccttagtgtgccatcttaagtctgcgggagagggcccagtgatttacgtgcatcctaaccaagtggacttcggaaatatctatgtgctcaaggacagttctagaatcctcaacctttgcaaccaatccttcatccctgccttctttcaggcacacatggcacacaagaagagtctttggacaatcgagcctaacgaaggtatggtgccacctgagacagacgtccagcttgccttaactgccaacctgaacgatacactgacatttaaggattgcgtcatcttggatatagaaaacagctcaacgtataggattcccgtccaagcctctggcactggctcaactatcgtgtccgataagccttttgcccccgaactcaacctgggggcacacttcagatag

SEQ ID NO: 75692 - DNA, 3152 bp, Artificial Sequence
  derived and/or modified sequence
accgtggcaacggacggcaacagctcgggcggcgcatggagagtgcgggcggcttcaagctgggtatggagcccctcagcggcggcggggtctgtgagaaaaaaaaattactaaaaatgacaagtagaagacttgaggagtccatgggggctgttcagatgggattggtcaatatgttcaaaggatttcaaagcaaggttttgccacccctgagtccaaaggtggttacagaagaagaagtaaaccgaatgcttacaccctcagagttcctgaaggaaatgtccctgaccaccgagcagagactggcaaaaacacgtttgatgtgccgaccacagatcatcgaactcttagatatgggggaaacaacacatcagaagttttcaggaattgacctggatcaggcattattccagccctttccatcagaaattatatttcagaactacactccctgtgaagtctatgaagttccactgattttgaggaacaatgacaaaattccaaggttggtgaaagttgtggaagaaagttcgccttactttaaagtaatcagccccaaagatattggccacaaagtggctcctggagtgccttccatattccgaatcctctttactccagaggagaacaaggattacgcccatacgttgacctgtgttactgaaagagaaaagtttattgtacccatcaaagctagaggggcacgagccattctcgattttcctgacaagctgaatttttccacttgtcctgtcaaatacagcacccagaagattctgctggtacgaaacattggcaacaaaaatgctgtatttcacatcaaaacttgtaggcctttctctatagaaccagctattggaactcttaatgtgggagagtccatgcaactggaagtggagtttgagccacagagtgtgggcgatcacagtggaagacttatcgtgtgttatgacacaggtgaaaaggtgtttgtatctctctatggagctgccatagacatgaatataaggctggataagaattccttgaccatcgagaaaacctacatatctctggccaatcagcgaactataaccattcacaatcgcagtaatatcattgcccatttcctgtggaaggtatttgctacccagcaagaagaggacagagaaaaatatagggcctgtgatgatctgatcaaagaggagaaggatgagactgatgagttttttgaagagtgcattactgatcctttactccgagaacatctttctgttctgtcccgaacctttgcgaatcagaggaggctggtgcagggagacagcaagctgttcttcaataacgttttcactgtggagcccctggaaggtgatgtctggcccaactcatcagctgaaatcaccgtgtactttaacccactagaagccaagctctatcaacagaccatttactgcgacattttaggccgagaaatccgtctgcccctccgaatcaaaggggaaggcatgggacctaagattcacttcaactttgaattgctggatattgggaaagttttcactggatctgcacattgttatgaggcgatactgtacaacaaaggcagcatcgatgctctcttcaacatgacccctccaacttcagctttgggggcctgctttgttttcagtcccaaggaaggcatcattgaaccaagtggagtccaagctatccagatctccttcagctctaccatcctgggaaactttgaagaagagttcctggtcaatgtcaatgggtcacctgagcctgtgaaactgaccattagaggctgtgtcattggacctaccttccattttaatgttccagctctgcactttggtgatgtttcctttgggtttcctcataccttgatatgttccctcaataatacctctttgatccccatgacttacaaactgcgtatccctggggatggccttggccataaaagcatttcatattgtgagcagcatgtggactacaaaagaccatcttggaccaaggaagaaatatcctcaatgaaaccaaaagaattcaccatctctcctgactgtggcaccattcgcccccagggatttgctgctatcagggtgacattatgctccaacactgtgcagaaatacgagctggcactcgtggtggacgtggagggcatcggagaagaggtgctggcgctcttaattacagcaaggtgtgttgtacctgccctccacctggtcaatacagaggtggactttgggcactgcttcctgaagtacccgtatgagaaaacactccagcttgccaatcaagatgacctcccaggattctatgaggtccagcctcaggtgtgtgaggaggtgcctactgtgctgttttccagccccacccccagcggggtcatctccccaagcagcaccatccacataccactggtcctggagacccaggtcactggagaacacagatccacggtttacatctcaatctttgggagccaggacccccctttggtatgtcacttaaagagcgctggagaaggcccagttatctacgtccatcccaatcaagtggacttcgggaatatctacgtcctaaaagactcttccaggattctcaacctatgcaaccagtccttcattcccgcatttttccaggcacacatggcacacaaaaaatccctttggacgattgaacccaatgaaggcatggttcctccagaaactgatgttcaactggcactgaccgccaacctgaatgacacactgacattcaaggactgtgttattttggacattgaaaatagcagtacctatcggattcctgttcaggcttccggaactggttccactattgtttcagataagccctttgctccagaactcaatttgggggcacattttaggtaaggaaatctcatggaccagtttttatagatatcacatatgttacatatgctgagcatcacctctactttagaaaattattttaagtaattaaaactagccacctcagtccctctcctttcccatcctcactcttccacctcctgatgtgtatgtcagcaacaagaagacattttctagccataacttggttgcattctctaatccgtgtccctctacatccgagaagaatatggtttgtaggaaatgcattcttttctcaaactg

SEQ ID NO: 75693 - DNA, 2853 bp, Artificial Sequence
  derived and/or modified sequence
atggagagcgctgggggcttcaagctgggcatggagcccctgagcggcggcggcgtgtgtgagaagaagaagctgctgaagatgaccagccggcggctggaggagagcatgggcgctgtgcagatgggcctggtgaacatgttcaagggcttccagagcaaggtgctgccccccctgagccccaaggtggtgacagaggaggaggtgaacaggatgctgacccccagcgagttcctgaaggagatgagcctgaccacagagcagaggctggccaagacccggctgatgtgccggccccagatcatcgagctgctggacatgggagagaccacccaccagaagttcagcggcatcgacctggaccaggccctcttccagcccttccccagcgagatcatcttccagaactacaccccctgtgaggtgtatgaggtgcccctcatcctgaggaacaatgacaagatcccccggctggtgaaggtggtggaggagagcagcccctacttcaaggtgatcagccccaaggacatcggccacaaggtggcccctggggtgcccagcatcttccgcatcctcttcaccccagaggagaacaaggactatgcccacaccctgacctgtgtgacagagcgggagaagttcatcgtgcccatcaaggcccggggggcccgggccatcctggacttcccagacaagctgaacttcagcacctgccctgtgaagtacagcacccagaagatcctgctggtgagaaatattggcaacaagaatgctgtgttccacatcaagacctgccggcccttcagcattgagcccgccatcggcaccctgaatgtgggggagagcatgcagctggaggtggagtttgagccccagagcgtgggggaccacagcggccgcctcatcgtgtgctatgacacaggagagaaggtgtttgtgtccctgtatggagctgccatcgacatgaacatccggctggacaagaacagcctgaccatcgagaagacctacatcagcctggccaaccagaggaccatcaccatccacaacagaagcaacatcatcgcccacttcctgtggaaggtgtttgccacccagcaggaggaggaccgggagaagtaccgggcctgtgatgacctgatcaaggaggagaaggatgaaacagatgagttctttgaggagtgcatcacagaccccctgctgcgggagcacctgtctgtgctgagcaggacctttgccaaccagaggcggctggtgcagggcgacagcaagctgttcttcaacaacgtgttcaccgtggagcccctggagggagatgtgtggcccaacagcagcgctgagatcaccgtgtacttcaaccccctggaggccaagctgtaccagcagaccatctactgtgacatcctgggccgggagatccggctgcccctgcgcatcaagggggagggcatgggccccaagatccacttcaactttgagctgctggacatcggcaaggtgttcaccggcagcgcccactgctatgaggccatcctgtacaacaagggcagcattgatgccctcttcaacatgaccccacccaccagcgccctgggcgcctgctttgtgttcagccccaaggagggcatcatcgagcccagcggcgtgcaggccatccagatctccttcagcagcaccatcctgggcaactttgaggaggagttcctggtgaatgtgaatggcagccctgagcctgtgaagctgaccatccggggctgcgtcatcggccccaccttccacttcaacgtgcctgccctgcactttggagatgtgtcctttggcttcccccacaccctcatctgcagcctgaacaacaccagcctcatccccatgacctacaagctgcgcatccctggagatggcctgggccacaagagcatctcctactgtgagcagcacgtggactacaagaggcccagctggaccaaggaggagatcagctccatgaagcccaaggagttcaccatcagcccagactgtggcaccatccggccccagggctttgctgccatccgggtgaccctgtgcagcaacacagtgcagaagtatgagctggccctggtggtggatgtggagggcattggagaggaggtgctggccctgctgatcacagcccgctgtgtggtgcctgccctgcacctggtgaacacagaggtggactttggccactgcttcctgaagtacccctatgagaagaccctgcagctggccaaccaggatgacctgcccggcttctatgaggtgcagccccaggtgtgtgaggaggtgcccaccgtgctcttcagcagccccacccccagcggggtcatcagccccagcagcaccatccacatccccctggtgctggagacccaggtgactggagagcacaggagcacagtgtacatcagcatcttcggcagccaggacccccccctggtgtgccacctgaagtctgctggggagggccctgtgatctacgtgcaccccaaccaggtggactttggaaacatctacgtgctgaaggacagcagccgcatcctgaacctgtgcaaccagagcttcatcccagccttcttccaggcccacatggcccacaagaagagcctgtggaccatcgagcccaatgaaggcatggtgcccccagagacagatgtgcagctggccctgacagccaacctgaatgacaccctgaccttcaaggactgtgtgatcctggacatcgagaacagcagcacctaccgcatccctgtgcaggccagcggcaccggcagcaccatcgtgtctgacaagccctttgcccctgagctgaacctgggcgcccacttcagatag

SEQ ID NO: 75694 - DNA, 2853 bp, Artificial Sequence
  derived and/or modified sequence
atggagagcgccggcggcttcaagctgggcatggagcccctgagcggagggggtgtgtgtgagaagaagaagctactcaaaatgactagcagaagactcgaggaaagcatgggagccgtgcagatgggcctggtcaatatgttcaagggcttccagagtaaggttctcccccccttgtctccaaaggtggtgaccgaggaggaggtgaaccgtatgctgaccccaagcgagtttctcaaagaaatgtcactgactaccgagcagcgcctggcgaaaacacgcctgatgtgtcgtcctcagataatcgagctgctggatatgggtgaaacaacacaccagaaattctccggaattgacctcgatcaagcactgtttcaaccattccctagcgagatcatattccagaactacaccccttgtgaagtctacgaggtgcctctcatcctgcgtaacaacgacaaaatcccgcgtctcgtgaaggttgtggaggagagttctccgtacttcaaagtgattagtcctaaagatatcggccacaaagtggctcccggggtgcccagcatctttagaattctatttacccccgaggagaataaggactacgcccatactcttacctgcgtgaccgagcgcgagaaatttatcgtcccaattaaggctaggggcgcgagggccattctggacttccccgacaagttgaacttttcaacctgccccgtgaaatattcgacacagaagatcttacttgttaggaacataggcaacaaaaatgctgtttttcacattaagacctgtcggcctttttcaatcgagcctgccatcggcaccctgaacgtgggagagagcatgcagctggaggtggaatttgagccccagtccgtgggggaccactcgggtcgtctgatcgtttgctatgacaccggggaaaaagtgttcgtgtccctgtacggcgcagccattgacatgaatatcagactagacaaaaactccctgaccatagaaaaaacctacatcagcctcgcaaatcagcgtaccatcacaattcacaacagaagtaacattattgctcacttcctctggaaggtctttgctacccagcaggaagaggatcgggagaagtacagagcctgcgacgacctcatcaaggaggaaaaggatgagacggatgaattttttgaggaatgcatcactgatccgctgttgagggaacatctatctgttctgtctcggacctttgctaatcaacggaggttagtccagggggattctaaactgtttttcaacaatgtttttactgtggagcctctcgagggtgacgtctggccaaattcttcagcagaaatcaccgtgtatttcaaccctctggaggcaaagctgtatcagcagactatttattgtgatatcctcggacgcgagattcgcctgccattgcggattaaaggagagggcatgggccccaagatccacttcaactttgagctactcgatatcggaaaggtttttactggcagcgctcactgttacgaggccattctatacaataaaggctctatagatgccttatttaacatgacacctccaactagcgcccttggggcatgctttgtgttctcccctaaagagggaatcatcgagcccagcggcgtgcaggccatacagatatctttttcttcaacgatcctcggcaactttgaggaggaattcctggtcaatgtgaacgggtcacccgaaccagttaagctcacaatccgaggctgcgtgatcggtcccacctttcatttcaacgtgcccgccttacacttcggcgatgtgtctttcggatttccgcatacgctgatttgctcacttaataacacatcgttgattccaatgacttacaaactacggatcccaggagacggactgggccacaagagtatctcctattgtgaacagcatgttgactacaagcgcccatcctggaccaaagaggagataagtagtatgaagcccaaggagttcacaatctccccggactgtggaaccatcaggccacagggctttgccgccatccgggtgaccttatgtagtaataccgtccagaagtatgaactagcactggtggtggacgtagaggggataggagaagaggtgctggctctgttaatcacagccaggtgtgttgtgcctgcgctgcacctggtcaataccgaggtggactttggccattgctttttaaagtacccatacgagaaaaccctccaattagctaaccaggacgacctaccgggtttctatgaagtgcaaccacaggtctgcgaggaggtgcctacagtgctctttagttctcccactccgtcaggcgtgatctcgccaagtagtacaattcacataccgctcgtgttggagacacaggttacaggcgaacaccgctccaccgtgtacatcagcatttttggttcccaagatccacctctggtatgccaccttaaatcggctggcgaggggcccgtgatttacgtgcatccgaaccaggtggacttcggcaacatctacgtattgaaagacagtagccgcatcttaaacctgtgtaatcagtcatttatcccagcttttttccaggcccacatggctcataaaaaatcactgtggactattgagccaaatgaaggcatggtgccccccgaaaccgacgtgcaacttgcccttacggcaaacctcaatgacaccctcacattcaaggactgtgtcattctggacatcgagaattcctctacataccgtattcccgtacaagcttctggcaccggcagtacaatcgtgtccgacaagcctttcgctcccgaactcaacctgggggcccattttcgctag

SEQ ID NO: 75695 - DNA, 2853 bp, Artificial Sequence
  derived and/or modified sequence
atggagagtgctgggggatttaaactcggaatggaaccactatcaggcggtggggtgtgtgagaaaaaaaaattgctgaaaatgacatctagacggctcgaagagagtatgggtgctgtccagatgggtctcgtcaacatgttcaaggggttccagtctaaggtgttaccgcctttgtctcctaaagtggtgacagaagaggaggtgaataggatgttaactccatcagagttcctcaaagaaatgtctctcaccacagagcagcgattggctaagacccgcctgatgtgccgtccacagattatagagctcttggatatgggagagacaacccaccagaaattctctggcattgatctggatcaggccttgtttcagccttttccttcagagattatctttcagaactacaccccgtgtgaagtgtacgaagtgcccttaatcctgcgaaataatgataaaatccctaggctggtcaaagtggtggaggaatcaagcccgtacttcaaggttatcagccctaaagatatcggccacaaagttgctcctggcgtgccatctatatttcgcatactttttacccccgaagagaacaaggattatgcgcacactctgacctgcgtgacagagagagaaaaatttattgtccctattaaggccagaggcgctcgagccattctcgattttcccgacaaactgaactttagcacatgtccagtgaagtatagcactcagaagatccttctcgtgcggaacatcggaaataagaacgccgtgttccacatcaagacttgcagaccgttttcaatcgagcctgctattggcacactgaacgtcggcgagagcatgcagctggaagttgagtttgaaccccaatcggttggtgaccattccgggcgacttatagtctgctacgacacaggagagaaggtgtttgtttctctgtacggggctgccattgatatgaatatacggcttgacaagaatagcctcactatagaaaagacctacatatcgctcgctaaccaacgcacaattactattcacaatcgttctaatatcattgcgcacttcttgtggaaagtgtttgccactcaacaggaagaagacagggagaaatatagggcctgtgacgatctgataaaggaagagaaggatgaaaccgacgaattcttcgaagaatgtatcacggaccccctcctgcgggagcatctgagcgttcttagtagaacatttgctaatcagagacgattggtgcagggcgactctaagctgttttttaataacgttttcacagttgagccgttggaaggagatgtgtggcccaatagttctgccgaaatcacagtttattttaacccactggaggccaaactgtaccaacaaactatttactgtgacatccttgggagagaaattcgattacccctccgaatcaagggagaaggcatgggacccaagattcacttcaacttcgagcttttagacatcggcaaagtattcacaggctccgcacactgttacgaggctatcctgtacaacaagggatcaattgacgctttgttcaacatgactccacctacatctgcactgggcgcttgctttgttttctctcctaaagagggcattatcgagccctccggcgtacaagcaattcagatctccttcagttcaaccatcctgggcaacttcgaagaagagttcttggtcaacgtcaatgggtcccctgagcctgtgaagcttacaataagagggtgtgtgattggcccaacctttcatttcaacgtgccggcactgcatttcggcgacgttagctttggatttccccacacactcatctgcagcctgaataatacgagcttgatccctatgacctataagctgaggatccccggtgatgggctcggccataaatcaatcagctattgtgagcagcacgtggactataagcggccatcctggaccaaggaagaaatctctagtatgaagccaaaggaattcacaatctcgcctgactgtggtaccatccggccacaggggtttgcagctattagggtcacgttgtgctctaacaccgttcagaaatatgagttggccctcgtcgtggatgtcgagggcatcggcgaagaggtgctggctctgctcattactgccagatgcgtcgtcccggctctacacttggtgaacacggaggtggattttgggcattgcttccttaagtacccatatgaaaagactctgcaacttgccaaccaagatgatctgccaggcttctacgaggtccagccacaggtttgtgaagaggttccaacagtattattctcctcacctacaccatctggcgtcatcagcccgtcaagcaccattcatatcccactggtgctggagacgcaggtcacaggcgaacataggtctactgtctatatctcaatttttggatctcaggacccacccctggtttgccacttaaagagtgccggagaaggacccgttatctacgttcatccgaaccaggtggatttcgggaatatctacgtcctgaaagattcctctcgcatcctgaatctgtgtaatcagagtttcattcccgctttctttcaggcccatatggcccacaaaaagagcctctggactattgagccaaacgaaggtatggttcccccagaaactgacgttcagctagctctcacagcgaacctcaacgacactttaacattcaaggattgtgtgatacttgatattgagaattcctctacatatagaattcctgtgcaggcttccggaacaggctcaacaatcgtcagcgacaaaccctttgccccagaactgaacctcggagcgcattttaggtag

SEQ ID NO: 75696 - DNA, 2853 bp, Artificial Sequence
  derived and/or modified sequence
atggagagcgccggcggcttcaagctgggcatggagcccctgagcggcggcggcgtgtgcgagaagaagaagctgctgaagatgaccagcagaagactggaggagagcatgggcgccgtgcagatgggcctggtgaacatgttcaagggcttccagagcaaggtgctgccccccctgagccccaaggtggtgaccgaggaggaggtgaacagaatgctgacccccagcgagttcctgaaggagatgagcctgaccaccgagcagagactggccaagaccagactgatgtgcagaccccagatcatcgagctgctggacatgggcgagaccacccaccagaagttcagcggcatcgacctggaccaggccctgttccagcccttccccagcgagatcatcttccagaactacaccccctgcgaggtgtacgaggtgcccctgatcctgagaaacaacgacaagatccccagactggtgaaggtggtggaggagagcagcccctacttcaaggtgatcagccccaaggacatcggccacaaggtggcccccggcgtgcccagcatcttcagaatcctgttcacccccgaggagaacaaggactacgcccacaccctgacctgcgtgaccgagagagagaagttcatcgtgcccatcaaggccagaggcgccagagccatcctggacttccccgacaagctgaacttcagcacctgccccgtgaagtacagcacccagaagatcctgctggtgagaaacatcggcaacaagaacgccgtgttccacatcaagacctgcagacccttcagcatcgagcccgccatcggcaccctgaacgtgggcgagagcatgcagctggaggtggagttcgagccccagagcgtgggcgaccacagcggcagactgatcgtgtgctacgacaccggcgagaaggtgttcgtgagcctgtacggcgccgccatcgacatgaacatcagactggacaagaacagcctgaccatcgagaagacctacatcagcctggccaaccagagaaccatcaccatccacaacagaagcaacatcatcgcccacttcctgtggaaggtgttcgccacccagcaggaggaggacagagagaagtacagagcctgcgacgacctgatcaaggaggagaaggacgagaccgacgagttcttcgaggagtgcatcaccgaccccctgctgagagagcacctgagcgtgctgagcagaaccttcgccaaccagagaagactggtgcagggcgacagcaagctgttcttcaacaacgtgttcaccgtggagcccctggagggcgacgtgtggcccaacagcagcgccgagatcaccgtgtacttcaaccccctggaggccaagctgtaccagcagaccatctactgcgacatcctgggcagagagatcagactgcccctgagaatcaagggcgagggcatgggccccaagatccacttcaacttcgagctgctggacatcggcaaggtgttcaccggcagcgcccactgctacgaggccatcctgtacaacaagggcagcatcgacgccctgttcaacatgaccccccccaccagcgccctgggcgcctgcttcgtgttcagccccaaggagggcatcatcgagcccagcggcgtgcaggccatccagatcagcttcagcagcaccatcctgggcaacttcgaggaggagttcctggtgaacgtgaacggcagccccgagcccgtgaagctgaccatcagaggctgcgtgatcggccccaccttccacttcaacgtgcccgccctgcacttcggcgacgtgagcttcggcttcccccacaccctgatctgcagcctgaacaacaccagcctgatccccatgacctacaagctgagaatccccggcgacggcctgggccacaagagcatcagctactgcgagcagcacgtggactacaagagacccagctggaccaaggaggagatcagcagcatgaagcccaaggagttcaccatcagccccgactgcggcaccatcagaccccagggcttcgccgccatcagagtgaccctgtgcagcaacaccgtgcagaagtacgagctggccctggtggtggacgtggagggcatcggcgaggaggtgctggccctgctgatcaccgccagatgcgtggtgcccgccctgcacctggtgaacaccgaggtggacttcggccactgcttcctgaagtacccctacgagaagaccctgcagctggccaaccaggacgacctgcccggcttctacgaggtgcagccccaggtgtgcgaggaggtgcccaccgtgctgttcagcagccccacccccagcggcgtgatcagccccagcagcaccatccacatccccctggtgctggagacccaggtgaccggcgagcacagaagcaccgtgtacatcagcatcttcggcagccaggacccccccctggtgtgccacctgaagagcgccggcgagggccccgtgatctacgtgcaccccaaccaggtggacttcggcaacatctacgtgctgaaggacagcagcagaatcctgaacctgtgcaaccagagcttcatccccgccttcttccaggcccacatggcccacaagaagagcctgtggaccatcgagcccaacgagggcatggtgccccccgagaccgacgtgcagctggccctgaccgccaacctgaacgacaccctgaccttcaaggactgcgtgatcctggacatcgagaacagcagcacctacagaatccccgtgcaggccagcggcaccggcagcaccatcgtgagcgacaagcccttcgcccccgagctgaacctgggcgcccacttcagatag

SEQ ID NO: 75697 - protein, 940 aa, Artificial Sequence
  derived and/or modified sequence
MESAGGFKLGEKKKLLKMTSRRLEESMGAVQMGLVNMFKGFQSKVLPPLSPKVVTEEEVNRMLTPSEFLKEMSLTTEQRLAKTRLMCRPQIIELLDMGETTHQKFSGIDLDQALFQPFPSEIIFQNYTPCEVYEVPLILRNNDKIPRLVKVVEESSPYFKVISPKDIGHKVAPGVPSIFRILFTPEENKDYAHTLTCVTEREKFIVPIKARGARAILDFPDKLNFSTCPVKYSTQKILLVRNIGNKNAVFHIKTCRPFSIEPAIGTLNVGESMQLEVEFEPQSVGDHSGRLIVCYDTGEKVFVSLYGAAIDMNIRLDKNSLTIEKTYISLANQRTITIHNRSNIIAHFLWKVFATQQEEDREKYRACDDLIKEEKDETDEFFEECITDPLLREHLSVLSRTFANQRRLVQGDSKLFFNNVFTVEPLEGDVWPNSSAEITVYFNPLEAKLYQQTIYCDILGREIRLPLRIKGEGMGPKIHFNFELLDIGKVFTGSAHCYEAILYNKGSIDALFNMTPPTSALGACFVFSPKEGIIEPSGVQAIQISFSSTILGNFEEEFLVNVNGSPEPVKLTIRGCVIGPTFHFNVPALHFGDVSFGFPHTLICSLNNTSLIPMTYKLRIPGDGLGHKSISYCEQHVDYKRPSWTKEEISSMKPKEFTISPDCGTIRPQGFAAIRVTLCSNTVQKYELALVVDVEGIGEEVLALLITARCVVPALHLVNTEVDFGHCFLKYPYEKTLQLANQDDLPGFYEVQPQVCEEVPTVLFSSPTPSGVISPSSTIHIPLVLETQVTGEHRSTVYISIFGSQDPPLVCHLKSAGEGPVIYVHPNQVDFGNIYVLKDSSRILNLCNQSFIPAFFQAHMAHKKSLWTIEPNEGMVPPETDVQLALTANLNDTLTFKDCVILDIENSSTYRIPVQASGTGSTIVSDKPFAPELNLGAHFR

SEQ ID NO: 75698 - DNA, 2823 bp, Artificial Sequence
  derived and/or modified sequence
atggagtccgccggaggttttaagctaggcgagaagaagaagttgctgaagatgacatcacgaaggctggaagaatccatgggggcggtacagatgggattggtgaatatgttcaagggtttccagtcgaaggtgcttccccctctgagccccaaggtagttactgaagaggaggtgaaccgcatgctgaccccctccgagtttctgaaggaaatgagcctgacaactgagcagagactggcaaagacccgcctgatgtgccggccacagattatcgaactgctcgatatgggcgaaaccactcaccaaaaattcagcggcatagatttggaccaggcactgtttcagcccttcccctccgaaatcatatttcagaactataccccctgtgaggtgtacgaggtgccgcttatactaaggaacaatgataaaattccacgcttagtgaaagtcgtcgaggagagttcaccatatttcaaagtcatcagccccaaggacatcgggcacaaagtagctcccggagtgccgagcatattcagaatcctttttactcccgaggagaacaaagattacgcccacaccttaacttgcgtgactgaaagagaaaagttcatagtgcctattaaggctaggggcgcccgcgccatactcgattttccagacaaactgaacttcagcacctgccccgttaaatacagcacccagaagatcctattggtccgaaatatcggcaataaaaacgccgtattccacatcaaaacctgccgtcccttctcaatcgagcccgctatcggtacattaaatgtcggcgagagtatgcagctcgaggtcgagttcgagcctcagagcgtcggcgatcactccggacggctcattgtctgctatgacaccggcgaaaaggtgtttgtgtcgctctatggggcggccattgacatgaacatcaggttggacaagaattccctcacaattgagaagacctacatttcactggctaaccagcgcacgattacaatccataatcgctctaatattatagcccactttctttggaaggtatttgccacccaacaggaggaagacagagagaagtacagggcctgcgatgacttgataaaggaggagaaagatgaaaccgatgagttttttgaagaatgtatcactgatccacttctcagagagcacttgagcgtcctctcccgtacattcgcaaaccaacgaaggctggttcagggagactctaagttattttttaataacgtcttcaccgtggaacccctggagggagacgtttggcctaactcctccgctgagatcactgtgtattttaaccccctggaagcaaagctctatcagcagacgatttactgtgacatcctcggccgtgaaatccgccttcctctccgcattaagggggaaggtatggggcccaaaatccacttcaacttcgagctcctggacattggtaaggtgttcacgggatctgcccactgttacgaagccatactgtacaataagggcagcatagacgcactgtttaacatgaccccccccacaagcgcactcggagcatgcttcgttttttcgcctaaggaagggatcatagagccctcgggagtgcaggcgattcagattagtttctcttcaactattctgggaaacttcgaagaggagttcctcgtgaatgtcaacggctcccctgagcccgtcaagcttaccattcgcgggtgtgtgattggtccgacctttcacttcaacgtgcccgctctgcattttggagatgttagcttcggtttccctcacaccctgatttgctcacttaataatacaagcctgattcccatgacttataagcttcggatcccgggagatgggcttggtcataagtcaatcagctactgtgaacagcacgtggactacaagaggccctcatggactaaagaagaaataagcagcatgaagccaaaagagttcactatatcccccgattgtggcacaatccgtcctcagggatttgccgctatcagggttaccctatgtagcaacaccgtgcaaaagtacgagctggctttggttgtggacgtcgaaggcatcggcgaggaggtgttggcactgttgatcacggcgaggtgtgtcgttccagctctacacttggtgaacacggaagtagattttggccactgttttctgaaatacccttacgaaaaaactctacagttagccaatcaggacgatttgcccgggttctacgaagtgcagccccaagtgtgcgaagaggtgcccaccgtgcttttcagtagccctaccccctccggagtcatctcaccttcctccacaattcacatccccctcgtcttggagacccaggtgaccggcgagcacaggtccacagtgtatatatcaatctttggatcccaagatccacctttagtttgtcacttgaagtcagccggggaggggcctgttatttatgtgcacccaaaccaggtggacttcgggaacatatatgtgttgaaggactcatcccggatcctgaacctctgtaaccagtccttcatccccgctttttttcaggcacatatggcccataaaaagtctctttggacaatcgaacctaatgaaggaatggtgccgcctgagacagatgtgcaactggccttgaccgcaaacctgaacgataccctgactttcaaagactgtgttatcctcgatattgagaactcttcaacctatcggatccccgtccaggcaagcggaacaggatctacaatagtgagcgataagcccttcgctccagaactgaatcttggcgcccacttcaggtag

SEQ ID NO: 75699 - DNA, 3058 bp, Artificial Sequence
  derived and/or modified sequence
aacggacggcaacagctcgggcggcgcatggagagtgcgggcggcttcaagctgggtgagaaaaaaaaattactaaaaatgacaagtagaagacttgaggagtccatgggggctgttcagatgggattggtcaatatgttcaaaggatttcaaagcaaggttttgccacccctgagtccaaaggtggttacagaagaagaagtaaaccgaatgcttacaccctcagagttcctgaaggaaatgtccctgaccaccgagcagagactggcaaaaacacgtttgatgtgccgaccacagatcatcgaactcttagatatgggggaaacaacacatcagaagttttcaggaattgacctggatcaggcattattccagccctttccatcagaaattatatttcagaactacactccctgtgaagtctatgaagttccactgattttgaggaacaatgacaaaattccaaggttggtgaaagttgtggaagaaagttcgccttactttaaagtaatcagccccaaagatattggccacaaagtggctcctggagtgccttccatattccgaatcctctttactccagaggagaacaaggattacgcccatacgttgacctgtgttactgaaagagaaaagtttattgtacccatcaaagctagaggggcacgagccattctcgattttcctgacaagctgaatttttccacttgtcctgtcaaatacagcacccagaagattctgctggtacgaaacattggcaacaaaaatgctgtatttcacatcaaaacttgtaggcctttctctatagaaccagctattggaactcttaatgtgggagagtccatgcaactggaagtggagtttgagccacagagtgtgggcgatcacagtggaagacttatcgtgtgttatgacacaggtgaaaaggtgtttgtatctctctatggagctgccatagacatgaatataaggctggataagaattccttgaccatcgagaaaacctacatatctctggccaatcagcgaactataaccattcacaatcgcagtaatatcattgcccatttcctgtggaaggtatttgctacccagcaagaagaggacagagaaaaatatagggcctgtgatgatctgatcaaagaggagaaggatgagactgatgagttttttgaagagtgcattactgatcctttactccgagaacatctttctgttctgtcccgaacctttgcgaatcagaggaggctggtgcagggagacagcaagctgttcttcaataacgttttcactgtggagcccctggaaggtgatgtctggcccaactcatcagctgaaatcaccgtgtactttaacccactagaagccaagctctatcaacagaccatttactgcgacattttaggccgagaaatccgtctgcccctccgaatcaaaggggaaggcatgggacctaagattcacttcaactttgaattgctggatattgggaaagttttcactggatctgcacattgttatgaggcgatactgtacaacaaaggcagcatcgatgctctcttcaacatgacccctccaacttcagctttgggggcctgctttgttttcagtcccaaggaaggcatcattgaaccaagtggagtccaagctatccagatctccttcagctctaccatcctgggaaactttgaagaagagttcctggtcaatgtcaatgggtcacctgagcctgtgaaactgaccattagaggctgtgtcattggacctaccttccattttaatgttccagctctgcactttggtgatgtttcctttgggtttcctcataccttgatatgttccctcaataatacctctttgatccccatgacttacaaactgcgtatccctggggatggccttggccataaaagcatttcatattgtgagcagcatgtggactacaaaagaccatcttggaccaaggaagaaatatcctcaatgaaaccaaaagaattcaccatctctcctgactgtggcaccattcgcccccagggatttgctgctatcagggtgacattatgctccaacactgtgcagaaatacgagctggcactcgtggtggacgtggagggcatcggagaagaggtgctggcgctcttaattacagcaaggtgtgttgtacctgccctccacctggtcaatacagaggtggactttgggcactgcttcctgaagtacccgtatgagaaaacactccagcttgccaatcaagatgacctcccaggattctatgaggtccagcctcaggtgtgtgaggaggtgcctactgtgctgttttccagccccacccccagcggggtcatctccccaagcagcaccatccacataccactggtcctggagacccaggtcactggagaacacagatccacggtttacatctcaatctttgggagccaggacccccctttggtatgtcacttaaagagcgctggagaaggcccagttatctacgtccatcccaatcaagtggacttcgggaatatctacgtcctaaaagactcttccaggattctcaacctatgcaaccagtccttcattcccgcatttttccaggcacacatggcacacaaaaaatccctttggacgattgaacccaatgaaggcatggttcctccagaaactgatgttcaactggcactgaccgccaacctgaatgacacactgacattcaaggactgtgttattttggacattgaaaatagcagtacctatcggattcctgttcaggcttccggaactggttccactattgtttcagataagccctttgctccagaactcaatttgggggcacattttaggtaaggaaatctcatggaccagtttttatagatatcacatatgttacatatgctgagcatcacctctactttagaaaattattttaagtaattaaaactagccacctcagtccctctcctttcccatcctcactcttccacctcctgatgtgtatgtcagcaacaagaagacattttctagccataacttggttgcattctctaatccgtgt

SEQ ID NO: 75700 - DNA, 2340 bp, Artificial Sequence
  derived and/or modified sequence
ggagcccctcagcggcggcggggtctgtgagttggacgcggggtcttggcggggaatggaggtagaataaacgtgggacccggagtgcaccaaggtgagaaaaaaaaattactaaaaatgacaagtagaagacttgaggagtccatgggggctgttcagatgggattggtcaatatgttcaaaggatttcaaagcaaggttttgccacccctgagtccaaaggtggttacagaagaagaagtaaaccgaatgcttacaccctcagagttcctgaaggaaatgtccctgaccaccgagcagagactggcaaaaacacgtttgatgtgccgaccacagatcatcgaactcttagatatgggggaaacaacacatcagaagttttcaggaattgacctggatcaggcattattccagccctttccatcagaaattatatttcagaactacactccctgtgaagtctatgaagttccactgattttgaggaacaatgacaaaattccaaggttggtgaaagttgtggaagaaagttcgccttactttaaagtaatcagccccaaagatattggccacaaagtggctcctggagtgccttccatattccgaatcctctttactccagaggagaacaaggattacgcccatacgttgacctgtgttactgaaagagaaaagtttattgtacccatcaaagctagaggggcacgagccattctcgattttcctgacaagctgaatttttccacttgtcctgtcaaatacagcacccagaagattctgctggtacgaaacattggcaacaaaaatgctgtatttcacatcaaaacttgtaggcctttctctatagaaccagctattggaactcttaatgtgggagagtccatgcaactggaagtggagtttgagccacagagtgtgggcgatcacagtggaagacttatcgtgtgttatgacacaggtgaaaaggtgtttgtatctctctatggagctgccatagacatgaatataaggctggataagaattccttgaccatcgagaaaacctacatatctctggccaatcagcgaactataaccattcacaatcgcagtaatatcattgcccatttcctgtggaaggtatttgctacccagcaagaagaggacagagaaaaatatagggcctgtgatgatctgatcaaagaggagaaggatgagactgatgagttttttgaagagtgcattactgatcctttactccgagaacatctttctgttctgtcccgaacctttgcgaatcagaggaggctggtgcagggagacagcaagctgttcttcaataacgttttcactgtggagcccctggaaggtgatgtctggcccaactcatcagctgaaatcaccgtgtactttaacccactagaagccaagctctatcaacagaccatttactgcgacattttaggccgagaaatccgtctgcccctccgaatcaaaggggaaggcatgggacctaagattcacttcaactttgaattgctggatattgggaaagttttcactggatctgcacattgttatgaggcgatactgtacaacaaaggcagcatcgatgctctcttcaacatgacccctccaacttcagctttgggggcctgctttgttttcagtcccaaggaaggcatcattgaaccaagtggagtccaagctatccagatctccttcagctctaccatcctgggaaactttgaagaagagttcctggtcaatgtcaatgggtcacctgagcctgtgaaactgaccattagaggctgtgtcattggacctaccttccattttaatgttccagctctgcactttggtgatgtttcctttgccacacaggaactgagagatcctcaagtactgattccctttcagcggtttcctcataccttgatatgttccctcaataatacctctttgatccccatgacttacaaactgcgtatccctggggatggccttggccataaaagcatttcatattgtgagcagcatgtggactacaaaagaccatcttggaccaaggaagaaatatcctcaatgaaaccaaaagaattcaccatctctcctgactgtggcaccattcgcccccagggatttgctgctatcagggtgacattatgctccaacactgtgcagaaatacgagctggcactcgtggtggacgtggagggcatcggagaagaggtgctggcgctcttaattacagcaagtgctccagagttatgcaataggaaggtgatgctgtcagtcctgcagtggaagatccatagagccaagaggtccctgccccgggacactgttgctgtgacttga

SEQ ID NO: 75701 - DNA, 2823 bp, Artificial Sequence
  derived and/or modified sequence
atggagagcgctgggggcttcaagctgggggagaagaagaagctgctgaagatgaccagccggcggctggaggagagcatgggcgctgtgcagatgggcctggtgaacatgttcaagggcttccagagcaaggtgctgccccccctgagccccaaggtggtgacagaggaggaggtgaacaggatgctgacccccagcgagttcctgaaggagatgagcctgaccacagagcagaggctggccaagacccggctgatgtgccggccccagatcatcgagctgctggacatgggagagaccacccaccagaagttcagcggcatcgacctggaccaggccctcttccagcccttccccagcgagatcatcttccagaactacaccccctgtgaggtgtatgaggtgcccctcatcctgaggaacaatgacaagatcccccggctggtgaaggtggtggaggagagcagcccctacttcaaggtgatcagccccaaggacatcggccacaaggtggcccctggggtgcccagcatcttccgcatcctcttcaccccagaggagaacaaggactatgcccacaccctgacctgtgtgacagagcgggagaagttcatcgtgcccatcaaggcccggggggcccgggccatcctggacttcccagacaagctgaacttcagcacctgccctgtgaagtacagcacccagaagatcctgctggtgagaaatattggcaacaagaatgctgtgttccacatcaagacctgccggcccttcagcattgagcccgccatcggcaccctgaatgtgggggagagcatgcagctggaggtggagtttgagccccagagcgtgggggaccacagcggccgcctcatcgtgtgctatgacacaggagagaaggtgtttgtgtccctgtatggagctgccatcgacatgaacatccggctggacaagaacagcctgaccatcgagaagacctacatcagcctggccaaccagaggaccatcaccatccacaacagaagcaacatcatcgcccacttcctgtggaaggtgtttgccacccagcaggaggaggaccgggagaagtaccgggcctgtgatgacctgatcaaggaggagaaggatgaaacagatgagttctttgaggagtgcatcacagaccccctgctgcgggagcacctgtctgtgctgagcaggacctttgccaaccagaggcggctggtgcagggcgacagcaagctgttcttcaacaacgtgttcaccgtggagcccctggagggagatgtgtggcccaacagcagcgctgagatcaccgtgtacttcaaccccctggaggccaagctgtaccagcagaccatctactgtgacatcctgggccgggagatccggctgcccctgcgcatcaagggggagggcatgggccccaagatccacttcaactttgagctgctggacatcggcaaggtgttcaccggcagcgcccactgctatgaggccatcctgtacaacaagggcagcattgatgccctcttcaacatgaccccacccaccagcgccctgggcgcctgctttgtgttcagccccaaggagggcatcatcgagcccagcggcgtgcaggccatccagatctccttcagcagcaccatcctgggcaactttgaggaggagttcctggtgaatgtgaatggcagccctgagcctgtgaagctgaccatccggggctgcgtcatcggccccaccttccacttcaacgtgcctgccctgcactttggagatgtgtcctttggcttcccccacaccctcatctgcagcctgaacaacaccagcctcatccccatgacctacaagctgcgcatccctggagatggcctgggccacaagagcatctcctactgtgagcagcacgtggactacaagaggcccagctggaccaaggaggagatcagctccatgaagcccaaggagttcaccatcagcccagactgtggcaccatccggccccagggctttgctgccatccgggtgaccctgtgcagcaacacagtgcagaagtatgagctggccctggtggtggatgtggagggcattggagaggaggtgctggccctgctgatcacagcccgctgtgtggtgcctgccctgcacctggtgaacacagaggtggactttggccactgcttcctgaagtacccctatgagaagaccctgcagctggccaaccaggatgacctgcccggcttctatgaggtgcagccccaggtgtgtgaggaggtgcccaccgtgctcttcagcagccccacccccagcggggtcatcagccccagcagcaccatccacatccccctggtgctggagacccaggtgactggagagcacaggagcacagtgtacatcagcatcttcggcagccaggacccccccctggtgtgccacctgaagtctgctggggagggccctgtgatctacgtgcaccccaaccaggtggactttggaaacatctacgtgctgaaggacagcagccgcatcctgaacctgtgcaaccagagcttcatcccagccttcttccaggcccacatggcccacaagaagagcctgtggaccatcgagcccaatgaaggcatggtgcccccagagacagatgtgcagctggccctgacagccaacctgaatgacaccctgaccttcaaggactgtgtgatcctggacatcgagaacagcagcacctaccgcatccctgtgcaggccagcggcaccggcagcaccatcgtgtctgacaagccctttgcccctgagctgaacctgggcgcccacttcagatag

SEQ ID NO: 75702 - DNA, 2823 bp, Artificial Sequence
  derived and/or modified sequence
atggagagcgccggcggcttcaagctgggcgagaagaagaagctgcttaagatgacaagtagaagactcgaggagagcatgggagccgttcagatgggcttggtgaatatgttcaagggattccaaagtaaagttttgcccccactgagtcccaaggtcgtcactgaggaggaggtcaatagaatgctgacaccatcagaatttctcaaggaaatgtcgctcacaacagaacaacgccttgcaaaaaccaggctgatgtgccggcctcagatcatcgaactcttggacatgggagagacaacccaccagaagttttcaggtatagatctggatcaggcgctgtttcagccatttccatctgaaatcatcttccagaattataccccatgtgaagtttatgaagtgcccttgattctgcggaacaacgataaaatccccaggctggtgaaggtcgtcgaagaatcaagcccctattttaaggtgataagccccaaggacattgggcacaaggtcgcgcccggggtgccgtccatattccgaatactgtttacacccgaggagaataaggactacgcccacacgctcacatgcgtgacggagagggaaaagtttattgtacccataaaggcccgcggcgcacgggcaatactggatttccctgacaagctgaatttcagtacttgtcctgtgaagtatagtacacaaaaaattcttctggtcaggaacatcgggaataaaaatgcggtgtttcacatcaagacatgtcggcctttttcgatagagcctgctatagggaccttaaacgtaggggagtctatgcaactggaggtagagtttgaacctcagtccgtcggagatcattcaggcaggttgatcgtgtgttatgacaccggggaaaaggtcttcgtttcactgtacggagcggccattgacatgaatatccggctggataaaaactcgctgacaattgaaaagacatatatcagcttggccaatcagcgcactatcacaatacataaccggtctaacattatcgcccattttctctggaaggtgtttgccacgcagcaggaagaagacagagaaaaatatcgggcctgcgacgaccttatcaaggaggagaaagacgaaaccgatgaattttttgaagagtgcataacagatccgctcctgcgcgagcacctgtctgtgctgtctcgtacctttgctaatcaacgcaggctggtgcaaggggactctaagctgtttttcaacaatgtgttcaccgtcgagcccctcgagggcgacgtgtggcctaattcttcagctgagattaccgtgtactttaatccgcttgaagcaaagctctaccagcagactatctactgtgacatcttaggcagggaaattcgtctccctttgaggatcaagggagaaggcatgggccctaagatccactttaactttgagctactcgacattggcaaagtgtttactggatccgcacactgttacgaggccattctgtacaacaagggatcaatagacgccttattcaatatgaccccgcccactagtgccctaggcgcttgcttcgttttttctccaaaagagggaatcattgagccaagcggagttcaggcaatccagatctcattctctagtacgatcctgggtaattttgaagaagaattcctggtcaacgtgaacgggtccccggaacccgtgaagctgaccatcaggggatgcgtgatcggaccgacctttcacttcaacgtacctgccttacacttcggcgacgtctcatttggttttccccacactcttatctgttcattgaataacacatcccttatccccatgacatataagctgagaattcccggcgatggccttggccataaatccatttcgtattgcgagcaacacgtggattataagcgcccttcttggactaaagaggagatcagttccatgaaaccaaaggagtttacaataagcccagactgcggtaccataagaccgcagggttttgccgctatccgtgtcaccttgtgtagcaataccgtacagaaatatgaattggctctggtagtagacgttgagggcattggcgaggaagttcttgccctgttgatcacagctagatgtgtagttcctgccctacatctcgtgaataccgaggtggatttcggtcactgcttcttgaaatacccttatgagaagacactgcagctggctaaccaagacgatctacccggcttttatgaggtccagccccaggtctgtgaggaagttccaacggttctttttagcagccctaccccatcgggggtgatctccccctcaagcaccattcatatcccactcgtcctggaaacacaggttacaggagaacatcgctccacagtatacatcagtatttttggctctcaggaccctcccttggtgtgccacctaaagtcggctggggaaggcccagtgatatatgtgcacccaaaccaagtggatttcgggaatatctatgttctgaaggatagttctcgcattcttaacttatgtaatcagagtttcatacccgcattctttcaggctcatatggcccacaagaaaagtttgtggaccatcgagcctaatgaaggcatggtgcctcctgagacagacgtgcagctcgctctcaccgctaatctcaacgatactctaacatttaaagactgcgttattcttgacatcgaaaattcatcaacatacagaataccagtgcaggcctctggaactggttctacgatcgtgtctgacaagccctttgctccagagcttaatttaggagcacacttccggtag

SEQ ID NO: 75703 - DNA, 2823 bp, Artificial Sequence
  derived and/or modified sequence
atggagagcgccggtggtttcaagctgggggagaaaaaaaaactgctcaaaatgaccagcaggcgactggaggaatctatgggtgcagtgcagatgggtctcgtcaatatgtttaaggggtttcaatccaaggtgctgcctccactttcgccaaaagtggtcactgaggaagaagtgaaccggatgttgactccttcagagtttctgaaggaaatgtctttgactaccgagcaaaggctggccaaaacccggctgatgtgccgacctcagattatcgagctgctcgatatgggagagactactcatcagaaatttagcggcatcgacctggatcaggcattatttcagccattcccctctgaaattattttccaaaactacacaccttgtgaggtgtacgaggtgcccttgatcttaaggaacaacgataagattccacggttggtgaaggtggtggaagaatcttccccttattttaaagtaattagccctaaagatataggacacaaagtggccccaggcgttcctagtatcttcagaatcttatttaccccagaagaaaacaaagattacgcgcatacactcacttgtgtcacggagagagagaaattcattgtccctattaaagctaggggtgcgcgagctatccttgatttccctgataaactcaatttcagcacttgcccggtaaaatattctacgcaaaagattctcctggtgcgtaatatagggaataaaaacgccgtctttcacatcaaaacgtgtaggccattctcaatcgaaccagctataggaacgttgaatgttggcgagtccatgcagctggaagtggaattcgagcctcagagtgtgggggaccatagcggcagactgattgtttgttacgataccggcgaaaaagtgtttgtctcgctgtatggagccgcaattgatatgaatattaggttagacaagaatagtttgacaattgaaaagacatacatcagcctcgcaaaccagcggacaattacaatccacaaccgaagcaatattatcgcacatttcctatggaaagtcttcgcaactcagcaagaagaggatcgggagaagtatagagcttgcgacgacctgatcaaagaagaaaaagacgaaacagacgagttcttcgaagagtgcattacagatcccctcttgagagaacatctctctgtgttaagtaggaccttcgccaatcagcggaggctggtgcaaggagattcaaaactgtttttcaacaatgtgtttaccgtcgaacctctggaaggggacgtttggcccaacagctcagctgagatcaccgtttatttcaatcccctcgaggcgaagctgtaccagcagacaatatactgtgatatcctcggcagggagatcagactgcccttgcgtatcaagggagaaggaatggggccaaagattcatttcaatttcgaattgttagatattggcaaagtgttcactggatccgctcactgctacgaggccattctctacaacaaagggtctattgatgccctctttaatatgaccccaccaacgtccgctctgggagcctgtttcgttttttcaccaaaagaggggataatcgaaccttcaggtgttcaagccattcaaatcagctttagcagcaccatacttggaaactttgaagaggagtttctcgttaacgtgaatggttcacccgaacctgttaaactgacaatccgcggttgtgtcattggacccacatttcacttcaacgtaccagcactccactttggagacgtgtcattcgggttcccacatacgttgatctgctctttaaataacacaagcctcattccaatgacatacaagctacgcataccaggcgacggactcggacataagagtatatcctactgtgaacagcacgtcgactataagcgtcctagctggaccaaagaggagatctcctcaatgaagcccaaggagttcacaatctctcccgattgtgggacgatccgccctcagggatttgcagctatccgggtgaccctgtgcagcaacactgtgcagaaatatgagctcgccctggttgtagacgtggaagggattggagaggaggtgttggccctgctgattacggctagatgcgtcgtgcctgcactgcacctggttaacaccgaggtcgactttggtcactgcttcctgaagtatccatatgaaaaaaccctccagctcgctaaccaggacgacctgccgggattctacgaggtccagccccaggtgtgcgaggaggtgccaactgtgctgttctcctctcccacaccaagcggagtaatttccccctcctcaaccatacatatcccccttgtgctggagacccaggtgactggcgaacataggtccaccgtctacatatctatctttgggtcccaggaccctccgttggtgtgtcatcttaaatcagcaggcgaaggtcctgttatatacgttcaccccaaccaggtggattttggtaacatctatgttttaaaagacagcagccggattctgaatctttgcaatcagtcttttatccctgccttcttccaggcccacatggctcataagaagtccctttggaccatcgagccaaacgaaggcatggtgcctccagagaccgatgtgcagctcgcattgactgctaacctgaatgatacactgaccttcaaggattgtgttattctggacattgagaattcgtccacatacaggatccccgttcaagcctcgggtacaggatcaaccattgtgagcgacaaacctttcgcccctgagctgaacttgggcgctcactttagatag

SEQ ID NO: 75704 - DNA, 2823 bp, Artificial Sequence
  derived and/or modified sequence
atggagagcgccggcggcttcaagctgggcgagaagaagaagctgctgaagatgaccagcagaagactggaggagagcatgggcgccgtgcagatgggcctggtgaacatgttcaagggcttccagagcaaggtgctgccccccctgagccccaaggtggtgaccgaggaggaggtgaacagaatgctgacccccagcgagttcctgaaggagatgagcctgaccaccgagcagagactggccaagaccagactgatgtgcagaccccagatcatcgagctgctggacatgggcgagaccacccaccagaagttcagcggcatcgacctggaccaggccctgttccagcccttccccagcgagatcatcttccagaactacaccccctgcgaggtgtacgaggtgcccctgatcctgagaaacaacgacaagatccccagactggtgaaggtggtggaggagagcagcccctacttcaaggtgatcagccccaaggacatcggccacaaggtggcccccggcgtgcccagcatcttcagaatcctgttcacccccgaggagaacaaggactacgcccacaccctgacctgcgtgaccgagagagagaagttcatcgtgcccatcaaggccagaggcgccagagccatcctggacttccccgacaagctgaacttcagcacctgccccgtgaagtacagcacccagaagatcctgctggtgagaaacatcggcaacaagaacgccgtgttccacatcaagacctgcagacccttcagcatcgagcccgccatcggcaccctgaacgtgggcgagagcatgcagctggaggtggagttcgagccccagagcgtgggcgaccacagcggcagactgatcgtgtgctacgacaccggcgagaaggtgttcgtgagcctgtacggcgccgccatcgacatgaacatcagactggacaagaacagcctgaccatcgagaagacctacatcagcctggccaaccagagaaccatcaccatccacaacagaagcaacatcatcgcccacttcctgtggaaggtgttcgccacccagcaggaggaggacagagagaagtacagagcctgcgacgacctgatcaaggaggagaaggacgagaccgacgagttcttcgaggagtgcatcaccgaccccctgctgagagagcacctgagcgtgctgagcagaaccttcgccaaccagagaagactggtgcagggcgacagcaagctgttcttcaacaacgtgttcaccgtggagcccctggagggcgacgtgtggcccaacagcagcgccgagatcaccgtgtacttcaaccccctggaggccaagctgtaccagcagaccatctactgcgacatcctgggcagagagatcagactgcccctgagaatcaagggcgagggcatgggccccaagatccacttcaacttcgagctgctggacatcggcaaggtgttcaccggcagcgcccactgctacgaggccatcctgtacaacaagggcagcatcgacgccctgttcaacatgaccccccccaccagcgccctgggcgcctgcttcgtgttcagccccaaggagggcatcatcgagcccagcggcgtgcaggccatccagatcagcttcagcagcaccatcctgggcaacttcgaggaggagttcctggtgaacgtgaacggcagccccgagcccgtgaagctgaccatcagaggctgcgtgatcggccccaccttccacttcaacgtgcccgccctgcacttcggcgacgtgagcttcggcttcccccacaccctgatctgcagcctgaacaacaccagcctgatccccatgacctacaagctgagaatccccggcgacggcctgggccacaagagcatcagctactgcgagcagcacgtggactacaagagacccagctggaccaaggaggagatcagcagcatgaagcccaaggagttcaccatcagccccgactgcggcaccatcagaccccagggcttcgccgccatcagagtgaccctgtgcagcaacaccgtgcagaagtacgagctggccctggtggtggacgtggagggcatcggcgaggaggtgctggccctgctgatcaccgccagatgcgtggtgcccgccctgcacctggtgaacaccgaggtggacttcggccactgcttcctgaagtacccctacgagaagaccctgcagctggccaaccaggacgacctgcccggcttctacgaggtgcagccccaggtgtgcgaggaggtgcccaccgtgctgttcagcagccccacccccagcggcgtgatcagccccagcagcaccatccacatccccctggtgctggagacccaggtgaccggcgagcacagaagcaccgtgtacatcagcatcttcggcagccaggacccccccctggtgtgccacctgaagagcgccggcgagggccccgtgatctacgtgcaccccaaccaggtggacttcggcaacatctacgtgctgaaggacagcagcagaatcctgaacctgtgcaaccagagcttcatccccgccttcttccaggcccacatggcccacaagaagagcctgtggaccatcgagcccaacgagggcatggtgccccccgagaccgacgtgcagctggccctgaccgccaacctgaacgacaccctgaccttcaaggactgcgtgatcctggacatcgagaacagcagcacctacagaatccccgtgcaggccagcggcaccggcagcaccatcgtgagcgacaagcccttcgcccccgagctgaacctgggcgcccacttcagatag

SEQ ID NO: 75705 - protein, 199 aa, Artificial Sequence
  derived and/or modified sequence
MDQTMLDDSAAESFNGNETLGHSSIASGGTHSREMGDSNSDGKTGLEQDEQPLNLSDSPLSAQLTSEYRIDDHNSNGKNKYKNLLISDLKMEREARENGSKSPAHSYSSYDSGKNESVDRGAEDLSLNRGDEDEDDHEDHDDSEKVNETDGVEAERLKAFNSRPIPSHLTSAVAESILASACESESRNAAKRMRLERQQ

SEQ ID NO: 75706 - protein, 419 aa, Artificial Sequence
  derived and/or modified sequence
MSCSECQKRMHLNPDGTDHKDNGKPPTLVTSMIDYNMPITMAYMKHMKLQLLNSQQDEDESSIESDEFDMSDSTRMSAVNSDLSSNLEERMQSPQNLHGQQDDDSAAESFNGNETLGHSSIASGGTHSREMGDSNSDGKTGLEQDEQPLNLSDSPLSAQLTSEYRIDDHNSNGKNKYKNLLISDLKMEREARENGSKSPAHSYSSYDSGKNESVDRGAEDLSLNRGDEDEDDHEDHDDSEKVNETDGVEAERLKAFNSRPIPSHLTSAVAESILASACESESRNAAKRMRLERQQDESAPADKQCKPEATQATYSTSAVPGSQDVLYINGNGTYSYHSYRGLGGGLLNLNDASSSGPTDLSMKRQLATSSGSSSSSNSRPQLSPTEINAVRQLVAGYRESAAFLLRSADELENLILQQN

SEQ ID NO: 75707 - protein, 564 aa, Artificial Sequence
  derived and/or modified sequence
MADLMQETFLHHATDGVGVDEKLSLRRVAVVEDFFDIIYSMHVETGPNGEQIRKHAGQKRTYKAISESYAFLPREAVTRFLMSCSECQKRMHLNPDGTDHKDNGKPPTLVTSMIDYNMPITMAYMKHMKLQLLNSQQDEDESSIESDEFDMSDSTRMSAVNSDLSSNLEERMQSPQNLHGQQDDDSAAESFNGNETLGHSSIASGGTHSREMGDSNSDGKTGLEQDEQPLNLSDSPLSAQLTSEYRIDDHNSNGKNKYKNLLISDLKMEREARENGSKSPAHSYSSYDSGKNESVDRGAEDLSLNRGDEDEDDHEDHDDSEKVNETDGVEAERLKAFNMFVRLFVDENLDRMVPISKQPKEKIQAIIDSCRRQFPEYQERARKRIRTYLKSCRRMKRSGFEMSRPIPSHLTSAVAESILASACESESRNAAKRMRLERQQDESAPADKQCKPEATQATYSTSAVPGSQDVLYINGNGTYSYHSYRGLGGGLLNLNDASSSGPTDLSMKRQLATSSGSSSSSNSRPQLSPTEINAVRQLVAGYRESAAFLLRSADELENLILQQN

SEQ ID NO: 75708 - DNA, 1695 bp, Artificial Sequence
  derived and/or modified sequence
atggctgatctcatgcaggagacatttttgcatcatgcgactgatggagtgggggtggacgaaaagttgtccttgcgccgtgtcgccgttgtagaggattttttcgacatcatctattcaatgcatgttgagactgggccaaacggcgagcagatcaggaaacacgctgggcagaaaaggacctataaggccatcagcgagagctatgcattcctgcccagagaggcagtcaccagatttctgatgagctgctccgaatgtcagaagaggatgcacctcaacccagatggcacagaccacaaagacaacgggaagccacccacgctagtgactagtatgatcgactacaacatgccgattactatggcatatatgaaacatatgaaacttcagctcctgaactcccagcaggatgaagacgaaagctcaattgaatccgatgagttcgacatgtccgatagcacacgaatgagcgcagttaactctgatctgtcatccaatttggaggagcgcatgcagtctccccagaatctgcacggccagcaggacgatgattctgccgcagaaagctttaacggcaatgaaactctaggacattcttcaattgcctccggcgggacgcactcacgggagatgggtgattcaaattctgatggaaagaccgggctggagcaggatgaacaacccctaaacctttcggattctcctttaagcgcccagctcacctccgaatacaggattgatgaccataatagtaacggtaaaaacaaatataagaatctccttatttctgatctgaaaatggagcgcgaagcgcgcgagaatggctcaaaatcccccgcacattcttactcctcatacgactctggaaaaaacgagtccgtcgatcgcggagctgaagatttgagcctgaatcgtggcgacgaagacgaggatgatcacgaggatcacgacgattccgaaaaagtgaatgagacggacggtgtggaggctgagagactgaaagcatttaatatgtttgtacggttgttcgtggatgagaacctggatagaatggtacccattagcaaacagcctaaggaaaaaatccaggcaattattgactcatgcaggcgtcagttcccagagtaccaggaaagggcaaggaagaggatccgtacttacctcaagtcatgccggcgtatgaaaaggtccggcttcgaaatgtctcgaccgattcctagtcacctgacaagcgccgtggccgagtctattctggcaagcgcctgtgagtccgaaagcaggaacgctgccaaaaggatgaggctggagcgccaacaggatgagtctgcgcccgccgacaaacagtgtaaacccgaagccactcaggccacttattccacctccgcagtccccgggtcacaggatgtgctctacattaacggcaatgggacttactcgtaccatagctatcgcgggctggggggagggctgcttaatttgaacgatgcttcatcctccgggccaacagacctctctatgaagcggcagctggccacctcctctggcagctcttcaagctcaaacagtcgtcctcagctgtctcctacagagatcaacgctgtacggcagcttgtcgccggatacagggagtctgctgcctttttgctacggtctgcagacgaattagagaacctcatcctccagcagaattag

SEQ ID NO: 75709 - DNA, 1979 bp, Artificial Sequence
  derived and/or modified sequence
aagaagatgggaactgtgggctacaagtaggatggcagatctgatgcaggagacctttctgcatcatgccacggatggcgtaggggtagatgagaagctatctttacgacgggtagctgtggttgaagatttctttgacattatttattcgatgcatgtggaaacggggccaaatggagaacaaattcggaaacacgctggacaaaagagaacttacaaagcaatttcagagagctatgccttcctaccaagagaagcggtgacacgatttctaatgagctgctcagagtgccagaaaagaatgcatttaaacccagatggaacagatcataaagataatggaaaacctcccactttggtgaccagcatgattgactacaacatgccaattaccatggcctacatgaaacacatgaagctgcagctgctaaactcacagcaagatgaggatgaaagttcaatagaaagtgatgaatttgacatgagtgattcaacacggatgtcagctgtgaactctgatcttagctccaatcttgaagaaagaatgcaaagtccccagaatcttcatggccagcaagatgatgattctgctgcagagagctttaatggcaatgagactctggggcacagttcaattgcttcagggggaacacacagcagggagatgggagactccaacagtgatggcaaaactgggctggagcaagatgaacagccactgaacctgagtgacagtcccctctctgcgcagctaacttcggaatacagaatagatgatcacaacagtaatgggaaaaacaagtataagaatcttctaatttctgacctcaagatggaacgagaggcgagagaaaatggaagcaagtctcctgcacatagttactccagctatgactctggcaaaaatgagagtgtagaccgaggagctgaggacctctcactaaacaggggagatgaggacgaagatgaccacgaggaccatgacgattcggagaaagttaatgagacagacggcgttgaagccgagcggctgaaagcttttaatatgtttgtcaggctgtttgtagatgaaaacttggaccgaatggtcccaatctctaagcagcccaaagaaaagatccaggctatcattgactcatgcaggcgacaattccctgagtatcaagagcgtgccagaaaacgtatacgtacttacctcaagtcctgcaggcggatgaaaagaagtggttttgagatgtctcgacctattccttcccaccttacttcagcagttgcagagagtatcttggcttcagcttgtgagagtgagagtagaaatgccgccaagaggatgcgtctggagagacagcaggatgagtctgctccagctgacaaacagtgtaaaccagaggcgacccaggccacttactcaacatcagctgttccaggctcacaggacgtgctgtacatcaatggaaatgggacctatagttaccatagttacagagggctaggagggggtctgctaaatctgaatgatgcttccagcagtggacccactgatctcagcatgaagagacaattggcgactagctcaggatcctccagcagctcaaactccagaccccagctgagtccaactgaaatcaatgccgtgagacagcttgttgcaggatatcgagaatcagctgcatttttattgcgatctgcagatgaactggaaaatctcattttacaacagaactgagacagacgaccaccatattcactgaggtctaaatttgcagtttccactaatgacattttgatttcccaacagagatacttctggtcttactgcacagtcttttaagagaaatacttccattatgccacattgtccttgatccgtaagtgatgtgttaaggtgcttcaaaggaactctgacctctgaagtacttgagctactttagtatgtccagcctattgctttttgttttagtgtgtcaccataaatatca

SEQ ID NO: 75710 - DNA, 1695 bp, Artificial Sequence
  derived and/or modified sequence
atggctgacctgatgcaggagaccttcctgcaccacgccacagatggagtgggcgtggatgagaagctgagcctgcggcgggtggccgtggtggaggacttctttgacatcatctacagcatgcacgtggagaccggccccaacggggagcagatcaggaagcacgccggccagaagaggacctacaaggccatcagcgagagctatgccttcctgccccgggaggccgtgacccgcttcctgatgagctgcagcgagtgccagaagaggatgcacctgaacccagatggaacagaccacaaggacaatggcaagccacccaccctggtgacctccatgattgactacaacatgcccatcaccatggcctacatgaagcacatgaagctgcagctgctgaacagccagcaggatgaagatgagagcagcattgaaagtgatgaatttgacatgtctgacagcaccaggatgtctgctgtgaacagcgacctgagcagcaacctggaggagaggatgcagagcccccagaacctgcacggccagcaggatgatgacagcgctgctgagagcttcaatggaaatgagaccctgggccacagcagcatcgccagcggcggcacccacagccgggagatgggagacagcaacagtgatggcaagacaggcctggagcaggatgagcagcccctgaacctgagtgacagccccctgagcgcccagctgaccagcgagtacagaattgatgaccacaacagcaatggcaagaacaagtacaagaacctgctgatcagtgacctgaagatggagcgggaggcccgggagaatggcagcaagagccctgcccacagctacagcagctatgattctgggaagaatgaatctgtggacagaggagctgaggacctgagcctgaacagaggagatgaagatgaagatgaccatgaagatcatgatgacagcgagaaggtgaatgaaacagatggagtggaggccgagcggctgaaggccttcaacatgtttgtgcggctgtttgtggatgagaacctggacaggatggtgcccatcagcaagcagcccaaggagaagatccaggccatcatcgacagctgccggcggcagtttcctgagtaccaggagcgggccaggaagaggatccgcacctacctgaagagctgcaggaggatgaagaggagcggctttgagatgagccggcccatccccagccacctgaccagcgctgtggccgagagcatcctggccagcgcctgtgagagcgagagcagaaatgctgccaagaggatgaggctggagcggcagcaggatgaaagtgccccagctgacaagcagtgcaagccagaggccacccaggccacctacagcaccagcgctgtgcccggcagccaggatgtgctgtacatcaatggaaatggcacctacagctaccacagctaccggggcctgggcggcggcctgctgaacctgaatgatgccagcagcagcggccccacagacctgtccatgaagaggcagctggccaccagcagcggcagcagcagcagcagcaacagccggccccagctgagccccacagagatcaatgctgtgcggcagctggtggccggctaccgggagagcgctgccttcctgctgcggtctgcagatgagctggagaacctgatcctgcagcagaactag

SEQ ID NO: 75711 - DNA, 1695 bp, Artificial Sequence
  derived and/or modified sequence
atggccgacctgatgcaggagaccttcctgcaccacgccaccgacggcgtgggcgtggacgaaaaactgagcctgaggagggtggccgtggtggaggatttttttgatatcatctatagcatgcatgtggaaacaggccccaatggcgaacagattcgcaagcatgctgggcagaaacggacctacaaagctatctcagagtcttacgcatttctgcctcgggaagcagtcaccagatttcttatgagctgttcagaatgccagaagcgaatgcacctgaatcctgacgggacagatcacaaggataatggcaagccaccaacactggttacaagtatgatcgattacaacatgcctataacgatggcctatatgaagcacatgaagttgcagcttctcaactcccagcaagacgaggatgagagctctatcgagagtgacgagtttgacatgtctgatagtacccggatgtcagcagttaactctgatctgtcgtctaacctggaagagagaatgcagagcccccagaacctgcatggccaacaggacgatgattccgcggccgagtccttcaatggcaatgagactttgggtcattcctcaatcgctagcgggggaacgcatagcagagaaatgggagacagcaacagcgatggcaagacgggacttgaacaggatgagcagccgctgaacctgtctgatagtccccttagtgctcagctgacttcggagtaccgtatcgacgatcataactctaacgggaaaaataagtataagaacttgttgatatcggacttgaagatggaacgagaggcccgggagaacggcagcaaatcacccgcacattcctactcttcctacgacagtggtaaaaatgaatctgtggacaggggtgcggaggatctttctctgaatcgcggcgatgaggacgaggacgaccacgaggatcacgatgactcggagaaggtgaacgagacagatggtgtagaggccgagagactcaaggctttcaatatgttcgtcagacttttcgtggacgaaaacctggaccgcatggtgcctatatccaagcagcccaaggagaaaatccaggccatcatcgattcgtgccgaagacaatttcccgagtaccaggagagggcaaggaaacggatcaggacttacttgaagtcatgtagaaggatgaagagatccggatttgaaatgtcccgcccaatccctagtcacctcacaagcgcagtggccgaatcgatccttgcgagcgcctgtgagagtgaatccaggaatgcagccaaacggatgcgcctggaacgccaacaggatgagtccgccccggccgataaacagtgtaagcccgaggctacccaggcgacatacagtacttctgcagtgcctggtagtcaggatgtgctatacatcaatggcaacggcacctacagttaccattcttatagaggcctaggcggcggcctgcttaatttaaatgatgcatcctcttctggcccaactgatctgtccatgaagcgacagctggctacgtcttcagggtcttcctctagtagcaactcacgtccccagctgagcccaacagagatcaacgcagtacgccagttagttgcaggctatcgagagtccgccgcgttcttgctgagatccgcagacgagctggagaatctcatccttcagcagaactag

SEQ ID NO: 75712 - DNA, 1695 bp, Artificial Sequence
  derived and/or modified sequence
atggccgacctgatgcaagaaactttcttgcaccatgcaacagatggtgtgggcgtggacgagaagctttcactgcgacgcgtggcagtggtggaggatttttttgacattatttattccatgcatgttgagaccggcccaaatggtgagcaaatcaggaaacacgcgggtcagaagcggacctacaaggccatatccgaatcatacgcattcttaccgagagaggccgtaaccagattcctgatgagttgctctgaatgccaaaagcggatgcacctcaaccctgacggcactgaccacaaagataacggaaagcccccaactctggtaaccagcatgatagactataacatgcctatcactatggcctatatgaagcacatgaaattacagctcctgaattctcagcaggatgaggacgaatccagcattgaatcagatgagttcgatatgtccgattctacacgcatgagcgctgtgaactctgatcttagtagtaatttggaagagaggatgcagtccccgcagaacctacacggacagcaggacgacgactccgccgctgagagcttcaacggaaacgaaactcttggccactccagtatcgctagcggtgggactcacagcagagagatgggagatagcaactccgatggcaaaactggactggaacaggacgaacagccgctgaatctgtcagattcacctctctctgcgcagttgacaagcgagtaccggatcgacgatcataattcaaacggcaaaaataaatataaaaatctcttaatctcggatctgaaaatggaaagggaagcaagagaaaatgggtctaaatcccctgcacactcatattcatcatatgatagcggtaagaacgagtccgtggacagaggtgccgaggaccttagcctgaaccggggagacgaagatgaggacgatcatgaggatcatgacgattctgagaaagtcaacgagacagacggcgtggaagctgaaagacttaaagcctttaacatgtttgttcgacttttcgtcgacgagaatctcgacagaatggtgcccatcagcaagcagcccaaagaaaaaatccaggcaattattgactcatgccgcagacagtttcctgagtaccaggagagagcaagaaaaaggatacgcacttatctgaaatcctgccggcgtatgaagcgatcaggatttgagatgtcacgccctatcccctcccaccttacatctgctgtagccgaatctatactcgcatcagcgtgcgagtccgaaagccgaaacgcggcaaaacgtatgcggctcgagcgacagcaagatgaaagtgctccagctgataagcagtgcaaacccgaagccactcaggccacctattcaacgtccgcagttcctgggtcacaagacgtgttgtatataaatgggaatgggacgtacagctaccactcttacagaggacttggtggtgggttgctaaatctgaatgatgcatcttcctctggcccaaccgatctgtctatgaagcgtcagctggccactagctcagggtcgagctcatcgagcaattctaggccacagttgagccctactgagattaacgccgttcgccagctcgttgctgggtaccgcgagagtgcagcttttctcctgcgatccgctgatgagctcgaaaatctcatcttgcaacagaactag

SEQ ID NO: 75713 - DNA, 1695 bp, Artificial Sequence
  derived and/or modified sequence
atggccgacctgatgcaggagaccttcctgcaccacgccaccgacggcgtgggcgtggacgagaagctgagcctgagaagagtggccgtggtggaggacttcttcgacatcatctacagcatgcacgtggagaccggccccaacggcgagcagatcagaaagcacgccggccagaagagaacctacaaggccatcagcgagagctacgccttcctgcccagagaggccgtgaccagattcctgatgagctgcagcgagtgccagaagagaatgcacctgaaccccgacggcaccgaccacaaggacaacggcaagccccccaccctggtgaccagcatgatcgactacaacatgcccatcaccatggcctacatgaagcacatgaagctgcagctgctgaacagccagcaggacgaggacgagagcagcatcgagagcgacgagttcgacatgagcgacagcaccagaatgagcgccgtgaacagcgacctgagcagcaacctggaggagagaatgcagagcccccagaacctgcacggccagcaggacgacgacagcgccgccgagagcttcaacggcaacgagaccctgggccacagcagcatcgccagcggcggcacccacagcagagagatgggcgacagcaacagcgacggcaagaccggcctggagcaggacgagcagcccctgaacctgagcgacagccccctgagcgcccagctgaccagcgagtacagaatcgacgaccacaacagcaacggcaagaacaagtacaagaacctgctgatcagcgacctgaagatggagagagaggccagagagaacggcagcaagagccccgcccacagctacagcagctacgacagcggcaagaacgagagcgtggacagaggcgccgaggacctgagcctgaacagaggcgacgaggacgaggacgaccacgaggaccacgacgacagcgagaaggtgaacgagaccgacggcgtggaggccgagagactgaaggccttcaacatgttcgtgagactgttcgtggacgagaacctggacagaatggtgcccatcagcaagcagcccaaggagaagatccaggccatcatcgacagctgcagaagacagttccccgagtaccaggagagagccagaaagagaatcagaacctacctgaagagctgcagaagaatgaagagaagcggcttcgagatgagcagacccatccccagccacctgaccagcgccgtggccgagagcatcctggccagcgcctgcgagagcgagagcagaaacgccgccaagagaatgagactggagagacagcaggacgagagcgcccccgccgacaagcagtgcaagcccgaggccacccaggccacctacagcaccagcgccgtgcccggcagccaggacgtgctgtacatcaacggcaacggcacctacagctaccacagctacagaggcctgggcggcggcctgctgaacctgaacgacgccagcagcagcggccccaccgacctgagcatgaagagacagctggccaccagcagcggcagcagcagcagcagcaacagcagaccccagctgagccccaccgagatcaacgccgtgagacagctggtggccggctacagagagagcgccgccttcctgctgagaagcgccgacgagctggagaacctgatcctgcagcagaactag

SEQ ID NO: 75714 - protein, 422 aa, Artificial Sequence
  derived and/or modified sequence
MHVETGPNGEQIRKHAGQKRTYKAISESYAFLPREAVTRFLMSCSECQKRMHLNPDGTDHKDNGKPPTLVTSMIDYNMPITMAYMKHMKLQLLNSQQDEDESSIESDEFDMSDSTRMSAVNSDLSSNLEERMQSPQNLHGQQDDDSAAESFNGNETLGHSSIASGGTHSREMGDSNSDGKTGLEQDEQPLNLSDSPLSAQLTSEYRIDDHNSNGKNKYKNLLISDLKMEREARENGSKSPAHSYSSYDSGKNESVDRGAEDLSLNRGDEDEDDHEDHDDSEKVNETDGVEAERLKAFNDESAPADKQCKPEATQATYSTSAVPGSQDVLYINGNGTYSYHSYRGLGGGLLNLNDASSSGPTDLSMKRQLATSSGSSSSSNSRPQLSPTEINAVRQLVAGYRESAAFLLRSADELENLILQQN

SEQ ID NO: 75715 - DNA, 1269 bp, Artificial Sequence
  derived and/or modified sequence
atgcacgttgaaactggccctaacggtgaacagattcggaagcacgcaggccagaagcgaacctataaggccatctccgagtcctatgccttcttaccaagggaggcagtgacaagatttctgatgtcctgctccgagtgccaaaagcggatgcatctgaacccagatggcacggaccacaaggacaacggcaaaccaccaaccctcgtcacctcaatgatcgactacaacatgcctatcacgatggcgtatatgaagcacatgaagctccagctgttaaacagccagcaggacgaggacgagtcgtctatcgaatctgatgaattcgacatgagtgatagcactcgcatgagtgctgtgaactcagacctttcctcgaacctcgaggagagaatgcagagtcctcaaaatttgcatggacagcaagatgatgattctgccgctgagtcctttaatgggaacgaaacactgggtcattctagcattgctagcggcggcacacactctagggaaatgggggactccaactctgatggcaagactggcttagagcaggatgagcagcccctcaatttgagtgactccccactgtctgctcaattgaccagcgaatacaggattgatgatcataacagtaacggaaagaacaaatataaaaatctgcttatctcggatctcaaaatggaacgggaggccagagaaaatggctcaaaatcacccgcccattcttactcttcctatgattcaggtaagaacgagtctgtggaccggggcgcagaagacctgagcctgaacagaggggatgaggatgaggacgaccacgaagaccacgacgatagtgagaaagtcaacgaaacagacggtgtggaggcagaaaggctgaaagcgttcaatgatgagagtgccccagctgataaacagtgcaagcctgaggccacccaggccacctacagcacatcagccgtaccaggatcccaggatgtgctgtacataaatggcaatggaacctacagctatcattcctatcggggcttgggcggagggctccttaacctgaatgacgcttcaagtagcgggccaaccgacttgtcaatgaaacgtcagctcgccaccagctccggctctagctccagctccaactctcggcctcagctgtcgccaacagaaattaatgccgtgcgtcagctggtggctggctatcgggagtcagcagcttttctgttgcgcagcgccgacgagctagaaaacctcatactgcagcagaactag

SEQ ID NO: 75716 - DNA, 3575 bp, Artificial Sequence
  derived and/or modified sequence
cgttgcaattacgaatggaccagacttggtagcacggggcattgattgctggtgcccaaccggaccctcctcccctcttcccatcccttcccccacccaaagcaggctcccgctgcggccgggacctcgcatccctgcaacgtggccggggctgcatttttcatgagcctagggtgaacaggtgcgaagtgcgctgggagcatccggccagcggccgagcgcggggaacatggagagcgagcgcgacatgtaccgccagttccaggactggtgcctcaggacttacggggactcaggcaagaccaagacggtgacccgtaaaaaatacgaacggatcgtccagctcctcaatggctccgagtcgagctccacggacaacgccaaatttaaattctgggtcaaatcgaagggcttccagctgggccagccggacgaggtccgcgggggaggcggcggcgccaagcaagtgctctacgtgcctgtcaagaccacggatggcgtaggggtagatgagaagctatctttacgacgggtagctgtggttgaagatttctttgacattatttattcgatgcatgtggaaacggggccaaatggagaacaaattcggaaacacgctggacaaaagagaacttacaaagcaatttcagagagctatgccttcctaccaagagaagcggtgacacgatttctaatgagctgctcagagtgccagaaaagaatgcatttaaacccagatggaacagatcataaagataatggaaaacctcccactttggtgaccagcatgattgactacaacatgccaattaccatggcctacatgaaacacatgaagctgcagctgctaaactcacagcaagatgaggatgaaagttcaatagaaagtgatgaatttgacatgagtgattcaacacggatgtcagctgtgaactctgatcttagctccaatcttgaagaaagaatgcaaagtccccagaatcttcatggccagcaagatgatgattctgctgcagagagctttaatggcaatgagactctggggcacagttcaattgcttcagggggaacacacagcagggagatgggagactccaacagtgatggcaaaactgggctggagcaagatgaacagccactgaacctgagtgacagtcccctctctgcgcagctaacttcggaatacagaatagatgatcacaacagtaatgggaaaaacaagtataagaatcttctaatttctgacctcaagatggaacgagaggcgagagaaaatggaagcaagtctcctgcacatagttactccagctatgactctggcaaaaatgagagtgtagaccgaggagctgaggacctctcactaaacaggggagatgaggacgaagatgaccacgaggaccatgacgattcggagaaagttaatgagacagacggcgttgaagccgagcggctgaaagcttttaatgatgagtctgctccagctgacaaacagtgtaaaccagaggcgacccaggccacttactcaacatcagctgttccaggctcacaggacgtgctgtacatcaatggaaatgggacctatagttaccatagttacagagggctaggagggggtctgctaaatctgaatgatgcttccagcagtggacccactgatctcagcatgaagagacaattggcgactagctcaggatcctccagcagctcaaactccagaccccagctgagtccaactgaaatcaatgccgtgagacagcttgttgcaggatatcgagaatcagctgcatttttattgcgatctgcagatgaactggaaaatctcattttacaacagaactgagacagacgaccaccatattcactgaggtctaaatttgcagtttccactaatgacattttgatttcccaacagagatacttctggtcttactgcacagtcttttaagagaaatacttccattatgccacattgtccttgatccgtaagtgatgtgttaaggtgcttcaaaggaactctgacctctgaagtacttgagctactttagtatgtccagcctattgctttttgttttagtgtgtcaccataaatatcaggggcataaaaggctatctattcttaattcaaggataaaacagaagaagcttgtggtataaaacaatagttcaagatccagctgaaatattagtggaatttgctactgactcattggactgaaagctgaagtacctggcaaaaaaaaaaaaaagaaaaaaaaaagccaaatttcttgttgctacaggatataacaacaatgaaaaggatctcgtattttaaaaaaatatgtaatttttataaaaagaaaacttgtttttcattcaaacttgtcatttttactttggtaactttttcataggtcctaaaagaaaactgttttgagaaactactgtaagtaccttttccacatccctttgccttctcctctttccaaattctttctacaaaaataacacttgatgctggaaaaacccttgcctacgttctttcaatcgtcacatcaggaactacttccaagagaagcctgcatttctgctctcatgctgatctcaaaaaccccactcaacactgcaactttatcatagcagttttcatcccagaattttttttttaataatgacaagacatgttgttgaaaaaaaatcacaccttggtttcttagagctgctcgttcctgattgccgctgctgtctccaggcatccctctagcagcacctggatgtagatgactgaatgttaagaggttgcaagtgacaatctgaaaatttgcactcttgtgtgtagttttcttttcatttctttcagaaatagtttccaaaaagaccattacatctcctgatatgatttgtataattttcagttctagctaaaaataatgtaaggaactctcagcggatgcagctgcaacttacaatgaactgtgccctcctatcccccatactttacccttctttcttattttatagtgtgggatacacatgagtgatgttttctttgtgcactgagacaagcctattttttaaatatttagggagaagtactttagttcatgcttcttatacaacttttttctgttgtttagctttggttggattacaaattctttgtgcattcctgaatttgccttatttcatgtaaaatttatgtcattcagtttttgacaatgagtttgaggcatcagtgatatttcttatctacttgttacatatagtttttcaagtaatgactgtgattgtgaccgagtaatgtgcactttttcttgtaactgtggacattgctatgcttttttcttctagtgtttctagaattactgttccttacaattatgtaaacaaaaaacaaaaaaaaaacttttgtgatactgttggtgaatataatgtgaaaaatcttattgaaatatgagtattttggaaatacatagctgcacaaacatcttttaagatgtggatttagagtttgcttatttaaatgaaaattcaaaaattgagggctggtataattttctctgttttgtttggtttaataaacagatttctgtgtt

SEQ ID NO: 75717 - DNA, 1269 bp, Artificial Sequence
  derived and/or modified sequence
atgcacgtggagaccggccccaacggggagcagatcaggaagcacgccggccagaagaggacctacaaggccatcagcgagagctatgccttcctgccccgggaggccgtgacccgcttcctgatgagctgcagcgagtgccagaagaggatgcacctgaacccagatggaacagaccacaaggacaatggcaagccacccaccctggtgacctccatgattgactacaacatgcccatcaccatggcctacatgaagcacatgaagctgcagctgctgaacagccagcaggatgaagatgagagcagcattgaaagtgatgaatttgacatgtctgacagcaccaggatgtctgctgtgaacagcgacctgagcagcaacctggaggagaggatgcagagcccccagaacctgcacggccagcaggatgatgacagcgctgctgagagcttcaatggaaatgagaccctgggccacagcagcatcgccagcggcggcacccacagccgggagatgggagacagcaacagtgatggcaagacaggcctggagcaggatgagcagcccctgaacctgagtgacagccccctgagcgcccagctgaccagcgagtacagaattgatgaccacaacagcaatggcaagaacaagtacaagaacctgctgatcagtgacctgaagatggagcgggaggcccgggagaatggcagcaagagccctgcccacagctacagcagctatgattctgggaagaatgaatctgtggacagaggagctgaggacctgagcctgaacagaggagatgaagatgaagatgaccatgaagatcatgatgacagcgagaaggtgaatgaaacagatggagtggaggccgagcggctgaaggccttcaatgatgaaagtgccccagctgacaagcagtgcaagccagaggccacccaggccacctacagcaccagcgctgtgcccggcagccaggatgtgctgtacatcaatggaaatggcacctacagctaccacagctaccggggcctgggcggcggcctgctgaacctgaatgatgccagcagcagcggccccacagacctgtccatgaagaggcagctggccaccagcagcggcagcagcagcagcagcaacagccggccccagctgagccccacagagatcaatgctgtgcggcagctggtggccggctaccgggagagcgctgccttcctgctgcggtctgcagatgagctggagaacctgatcctgcagcagaactag

SEQ ID NO: 75718 - DNA, 1269 bp, Artificial Sequence
  derived and/or modified sequence
atgcacgtggagaccggccccaacggcgagcagatccggaagcacgcaggccagaagcgaacctacaaagcgatcagcgaatcttacgcctttttaccacgagaagcagtgactcgctttctaatgagttgcagcgagtgtcagaaaaggatgcacctgaatccagacgggacggaccacaaggacaatggcaaacctcccaccttggtgacgtctatgattgattacaatatgcctatcactatggcctatatgaagcacatgaaacttcagctgttgaactcccagcaggatgaggatgagagtagcatcgaaagtgacgagtttgacatgtccgattctactagaatgtctgctgtgaactctgatcttagttctaatctggaagaaaggatgcagtccccacaaaacttacacggtcagcaggatgacgactctgccgccgaatcattcaacggcaacgagaccctggggcactcaagcatcgccagcggtgggacgcactctagagagatgggggactctaactcggatggtaaaaccggcctcgaacaagacgaacagccactaaatctatcagacagccctctgagcgcccaacttaccagcgaataccgcatcgatgaccataacagtaacggtaagaacaaatacaaaaacttgctgatttccgatcttaaaatggagcgcgaggccagggagaatgggtcgaaatcaccggcccattcatactcttcttacgactccgggaagaatgagtcagtggacaggggagcagaggacctctcactgaatcgaggggacgaggacgaggacgatcatgaggatcacgacgattctgaaaaggtgaacgaaaccgatggagtggaagcagagagactgaaggcctttaatgatgagtcggcaccggctgacaagcagtgcaaaccagaagctactcaggccacctacagcacatctgctgttccaggctcccaagatgtgctctatattaacggaaacggaacgtatagttatcatagttaccgtggcctcggcggcggcctcctgaatcttaacgacgctagctccagcggcccaaccgacctgtccatgaagcgccagcttgccacctcctccgggtctagctcaagctccaactcacggccgcagctgtcaccaactgaaattaacgctgtgcggcagctagtggcgggctatcgtgaaagcgctgcctttttgctgagatctgccgacgagctagagaacctgatcttgcagcagaactag

SEQ ID NO: 75719 - DNA, 1269 bp, Artificial Sequence
  derived and/or modified sequence
atgcacgtggaaacaggcccaaatggggagcagatacgcaaacacgcaggtcagaaacgcacctacaaagctatcagtgaatcctacgcatttctgccgcgagaagctgtaactcgtttcctcatgtcgtgttcagaatgccagaaaagaatgcacttaaatcccgatggaactgaccataaagacaatgggaagcctcctacgctggtcaccagcatgattgactataacatgcccattaccatggcatacatgaagcacatgaagctccagctgctgaatagtcagcaggacgaagatgaatccagtattgaatcggacgaattcgacatgtcagatagcactaggatgagcgctgtaaatagcgatctatcgtcgaacttggaagagaggatgcagtctccccagaacctgcacggacagcaggacgacgatagcgctgctgagtctttcaatgggaacgagaccttgggacatagcagtatagcttctggtgggacacattcacgcgaaatgggggatagtaattcagatgggaaaacaggcctcgaacaggatgagcagcccctgaatctatcagattcccccttatccgcacagttaacctctgaatatcggatcgacgatcacaatagcaatgggaagaacaagtacaaaaatctgctgattagtgacctgaaaatggaacgggaggcgagggaaaatggatcaaagagtcccgcacatagttattcttcctatgactcaggcaaaaacgagagcgtagatagaggcgcagaagatctttcacttaacaggggggacgaggacgaggacgaccacgaagaccacgatgatagtgagaaggttaacgagaccgatggcgtggaggctgagcggttaaaagctttcaacgacgagtcagcccctgccgataagcagtgcaagccagaggccacgcaggccacttacagcaccagtgcggtacccggaagccaggacgtattgtacatcaacggcaacggaacctattcatatcattcatatcgtggactgggcggaggattgctcaatcttaatgatgccagtagttccgggccaaccgatctctccatgaaaaggcagttggccaccagttccggctccagctcttcctccaacagccgccctcaactgtctccaaccgagattaatgctgtgagacagttggtagctgggtatcgggagagtgccgcattcctactgcggagtgccgacgaactggagaatctcatattgcaacaaaattag

SEQ ID NO: 75720 - DNA, 1269 bp, Artificial Sequence
  derived and/or modified sequence
atgcacgtggagaccggccccaacggcgagcagatcagaaagcacgccggccagaagagaacctacaaggccatcagcgagagctacgccttcctgcccagagaggccgtgaccagattcctgatgagctgcagcgagtgccagaagagaatgcacctgaaccccgacggcaccgaccacaaggacaacggcaagccccccaccctggtgaccagcatgatcgactacaacatgcccatcaccatggcctacatgaagcacatgaagctgcagctgctgaacagccagcaggacgaggacgagagcagcatcgagagcgacgagttcgacatgagcgacagcaccagaatgagcgccgtgaacagcgacctgagcagcaacctggaggagagaatgcagagcccccagaacctgcacggccagcaggacgacgacagcgccgccgagagcttcaacggcaacgagaccctgggccacagcagcatcgccagcggcggcacccacagcagagagatgggcgacagcaacagcgacggcaagaccggcctggagcaggacgagcagcccctgaacctgagcgacagccccctgagcgcccagctgaccagcgagtacagaatcgacgaccacaacagcaacggcaagaacaagtacaagaacctgctgatcagcgacctgaagatggagagagaggccagagagaacggcagcaagagccccgcccacagctacagcagctacgacagcggcaagaacgagagcgtggacagaggcgccgaggacctgagcctgaacagaggcgacgaggacgaggacgaccacgaggaccacgacgacagcgagaaggtgaacgagaccgacggcgtggaggccgagagactgaaggccttcaacgacgagagcgcccccgccgacaagcagtgcaagcccgaggccacccaggccacctacagcaccagcgccgtgcccggcagccaggacgtgctgtacatcaacggcaacggcacctacagctaccacagctacagaggcctgggcggcggcctgctgaacctgaacgacgccagcagcagcggccccaccgacctgagcatgaagagacagctggccaccagcagcggcagcagcagcagcagcaacagcagaccccagctgagccccaccgagatcaacgccgtgagacagctggtggccggctacagagagagcgccgccttcctgctgagaagcgccgacgagctggagaacctgatcctgcagcagaactag

SEQ ID NO: 75721 - DNA, 1062 bp, Artificial Sequence
  derived and/or modified sequence
atgggcgattctaattccgacggcaaaacgggcctggaacaggatgagcagcccttgaatctctctgactccccactgagcgcccagctgacctctgagtaccggattgacgaccataactctaacgggaagaataagtataagaacttgcttatttccgacctgaagatggaaagagaagcaagagaaaacggcagtaaaagcccggcgcattcctatagcagttatgactccggcaagaacgagagtgtcgataggggggcagaagacctgagcctcaaccggggggacgaagacgaggatgaccatgaagaccacgatgacagtgagaaggtgaatgaaactgacggtgtcgaggcggaacggctgaaggccttcaatatgttcgttaggctgtttgtggacgaaaacttagaccgcatggtccctataagcaagcagcccaaagagaagatccaggcgattatcgactcatgcaggcgacagtttccagagtaccaggaaagagcgcgtaaaagaatcaggacatacctgaagagttgtagaaggatgaaaaggtcaggattcgaaatgagtcgccctattccgtctcaccttacatcggcagtagccgaaagcatccttgcatccgcttgcgagtccgaatccagaaatgccgcaaagcgcatgcggctcgagaggcagcaggacgagagtgctcccgcggacaaacagtgcaagcctgaagcaacccaggccacatactctacctccgccgtgccagggtcgcaggatgtcctttatatcaacggcaacggcacctactcataccattcataccgcggcctaggaggggggttactcaatcttaatgacgccagttcaagcggtccaactgatttgtcaatgaagcgtcagctggcaacaagtagtgggtcttcgtcatctagcaatagtaggcctcagctgtctcctactgagatcaatgcagtccggcagctggtggctggttatcgtgagtcagccgctttcttactccgctctgcagacgagctggagaatctgatcctgcagcagaattag

SEQ ID NO: 75722 - DNA, 1062 bp, Artificial Sequence
  derived and/or modified sequence
atgggagacagcaacagtgatggcaagacaggcctggagcaggatgagcagcccctgaacctgagtgacagccccctgagcgcccagctgaccagcgagtacagaattgatgaccacaacagcaatggcaagaacaagtacaagaacctgctgatcagtgacctgaagatggagcgggaggccagagaaaatggcagcaagagccctgcccacagctacagcagctatgacagcggcaagaatgaatctgtggacagaggagctgaggacctgagcctgaacagaggagatgaagatgaagatgaccacgaggaccatgatgattctgagaaggtgaatgaaacagatggagtggaggccgagcggctgaaggccttcaacatgtttgtgcggctgtttgtggatgagaacctggacaggatggtgcccatcagcaagcagcccaaggagaagatccaggccatcatcgacagctgccggcggcagtttcctgagtaccaggagcgggccaggaagaggatccgcacctacctgaagagctgcaggaggatgaagaggagcggctttgagatgagccggcccatccccagccacctgaccagcgctgtggccgagagcatcctggccagcgcctgtgagagcgagagcagaaatgctgccaagaggatgaggctggagcggcagcaggatgagagcgccccagctgacaagcagtgcaagccagaggccacccaggccacctacagcaccagcgctgtgcccggcagccaggatgtgctgtacatcaatggaaatggcacctacagctaccacagctaccggggcctgggcggcggcctgctgaacctgaatgatgccagcagcagcggccccacagacctgtccatgaagaggcagctggccaccagcagcggcagcagcagcagcagcaacagccggccccagctgagccccacagagatcaatgctgtgcggcagctggtggccggctaccgggagagcgctgccttcctgctgcggtctgcagatgagctggagaacctgatcctgcagcagaactag

SEQ ID NO: 75723 - DNA, 1062 bp, Artificial Sequence
  derived and/or modified sequence
atgggcgacagcaacagcgacggcaagaccggcctggagcaggacgaacagcccttgaacctgtcagacagtcccctgtccgctcagctgacaagcgaatatcggattgatgatcataactcaaatggaaagaacaagtacaaaaatttgttgatttcagaccttaagatggaacgcgaagcaagagaaaatggatcaaagtccccagcacatagttatagttcttatgacagcggaaagaatgaatcagtcgatcgcggggctgaagacctgtcgcttaacaggggtgatgaggacgaagacgaccacgaggaccacgacgacagtgagaaagtgaatgaaaccgatggggtcgaggctgaacgtctgaaggcctttaatatgttcgtgcggctgtttgtcgatgaaaacctagataggatggtcccaatatcaaagcaaccaaaggaaaaaatccaggccatcattgactcctgtcgccggcagttccctgaatatcaagagcgggcccgcaagagaatccgaacatatctcaagtcttgtagacggatgaaaagatcgggattcgagatgtcccgaccaatccccagtcacctgacatctgctgtggccgagtcaattctcgccagcgcctgcgagtctgaaagccggaacgcggcaaagcggatgaggctcgaacggcaacaggacgagagcgcccctgccgacaagcagtgtaagcccgaggctacgcaagcgacctactccacatcagctgtccccggatcccaggacgtcttgtatattaacggcaacggtacatactcctatcattcatatcgcgggcttggggggggattgctgaacctgaatgacgcctcatcctccggtccaacagatctgtcaatgaaaagacagctggcgacatcctcgggctcatctagtagttccaactccaggcctcagctctctcccaccgaaatcaatgctgtgagacagctggtcgcgggctatcgggaatcagccgcctttctcctgcgaagcgccgatgagctggagaatctgatcttgcagcagaattag

SEQ ID NO: 75724 - DNA, 1062 bp, Artificial Sequence
  derived and/or modified sequence
atgggcgattcaaattccgatggaaaaactgggctagaacaagacgaacagcccctgaacctcagcgattctcccttgagtgcacaactgacatctgagtatagaatagacgatcacaacagcaacggcaagaataagtacaagaatctcttaatttctgatctgaagatggagagggaagctcgagagaatggaagtaaatctcccgctcactcttatagcagctatgactcaggtaagaatgagtctgttgatcggggtgccgaagacctaagcctgaaccgcggagacgaagatgaagatgaccatgaggatcatgatgacagcgaaaaagtgaatgaaacggacggcgtcgaggctgaaaggttaaaagctttcaatatgttcgtgagattatttgttgatgagaatctcgacaggatggtgccaatttcaaagcagcctaaagagaaaattcaggctattatagatagctgtagacgacagttccccgaataccaagagcgtgctaggaagaggattcgaacctatctgaaatcatgtcgaaggatgaaaaggagcggcttcgaaatgtcgcgtcccatcccctcacacctgacatcagctgtagccgagtcaatattagcctccgcctgtgaatcagagagcagaaacgcagccaaacgaatgaggctggagaggcagcaggacgaatccgctcctgctgataagcaatgcaaacccgaagcaacccaagcgacatactctacatctgcagttcctggcagccaagacgtgctgtatattaatggaaatggtacttattcgtaccatagttaccgcggattgggcggaggactcttaaatctcaacgatgccagctccagtgggccaacagacctttccatgaaacgtcaactggctaccagctctggaagttcgtcctcttcaaatagccgaccccagttgagtccaactgaaattaacgcggtgcggcagctcgtggctgggtatagagagagcgccgcatttctcctgcgatccgcagacgagcttgagaatcttatactccagcagaactag

SEQ ID NO: 75725 - DNA, 1062 bp, Artificial Sequence
  derived and/or modified sequence
atgggcgacagcaacagcgacggcaagaccggcctggagcaggacgagcagcccctgaacctgagcgacagccccctgagcgcccagctgaccagcgagtacagaatcgacgaccacaacagcaacggcaagaacaagtacaagaacctgctgatcagcgacctgaagatggagagagaggccagagagaacggcagcaagagccccgcccacagctacagcagctacgacagcggcaagaacgagagcgtggacagaggcgccgaggacctgagcctgaacagaggcgacgaggacgaggacgaccacgaggaccacgacgacagcgagaaggtgaacgagaccgacggcgtggaggccgagagactgaaggccttcaacatgttcgtgagactgttcgtggacgagaacctggacagaatggtgcccatcagcaagcagcccaaggagaagatccaggccatcatcgacagctgcagaagacagttccccgagtaccaggagagagccagaaagagaatcagaacctacctgaagagctgcagaagaatgaagagaagcggcttcgagatgagcagacccatccccagccacctgaccagcgccgtggccgagagcatcctggccagcgcctgcgagagcgagagcagaaacgccgccaagagaatgagactggagagacagcaggacgagagcgcccccgccgacaagcagtgcaagcccgaggccacccaggccacctacagcaccagcgccgtgcccggcagccaggacgtgctgtacatcaacggcaacggcacctacagctaccacagctacagaggcctgggcggcggcctgctgaacctgaacgacgccagcagcagcggccccaccgacctgagcatgaagagacagctggccaccagcagcggcagcagcagcagcagcaacagcagaccccagctgagccccaccgagatcaacgccgtgagacagctggtggccggctacagagagagcgccgccttcctgctgagaagcgccgacgagctggagaacctgatcctgcagcagaactag

SEQ ID NO: 75726 - protein, 302 aa, Artificial Sequence
  derived and/or modified sequence
MEKGYSTVTFDGTPSYGHTPSHHAAQFPNHSFKHEDPMGQQGSLGEQQYSVPPPVYGCHTPTDSCTGSQALLLRTPYSSDNLYQMTSQLECMTWNQMNLGATLKGVAAGSSSSVKWTEGQSNHSTGYESDNHTTPILCGAQYRIHTHGVFRGIQDVRRVPGVAPTLVRSASETSEKRPFMCAYPGCNKRYFKLSHLQMHSRKHTGEKPYQCDFKDCERRFSRSDQLKRHQRRHTGVKPFQCKTCQRKFSRSDHLKTHTRTHTGEKPFSCRWPSCQKKFARSDELVRHHNMHQRNMTKLQLAL

SEQ ID NO: 75727 - protein, 131 aa, Artificial Sequence
  derived and/or modified sequence
MGQQGSLGEQQYSVPPPVYGCHTPTDSCTGSQALLLRTPYSSDNLYQMTSQLECMTWNQMNLGATLKGVAAGSSSSVKWTEGQSNHSTGYESDNHTTPILCGAQYRIHTHGVFRGIQDVRRVPGVAPTLVR

SEQ ID NO: 75728 - DNA, 909 bp, Artificial Sequence
  derived and/or modified sequence
atggagaagggctacagcaccgtgaccttcgacggcacccccagctacggccacacccccagccaccacgccgcccagttccccaaccacagcttcaagcacgaggaccccatgggccagcagggcagcctgggcgagcagcagtacagcgtgcccccccccgtgtacggctgccacacccccaccgacagctgcaccggcagccaggccctgctgctgagaaccccctacagcagcgacaacctgtaccagatgaccagccagctggagtgcatgacctggaaccagatgaacctgggcgccaccctgaagggcgtggccgccggcagcagcagcagcgtgaagtggaccgagggccagagcaaccacagcaccggctacgagagcgacaaccacaccacccccatcctgtgcggcgcccagtacagaatccacacccacggcgtgttcagaggcatccaggacgtgagaagagtgcccggcgtggcccccaccctggtgagaagcgccagcgagaccagcgagaagagacccttcatgtgcgcctaccccggctgcaacaagagatacttcaagctgagccacctgcagatgcacagcagaaagcacaccggcgagaagccctaccagtgcgacttcaaggactgcgagagaagattcagcagaagcgaccagctgaagagacaccagagaagacacaccggcgtgaagcccttccagtgcaagacctgccagagaaagttcagcagaagcgaccacctgaagacccacaccagaacccacaccggcgagaagcccttcagctgcagatggcccagctgccagaagaagttcgccagaagcgacgagctggtgagacaccacaacatgcaccagagaaacatgaccaagctgcagctggccctgtag

SEQ ID NO: 75729 - DNA, 396 bp, Artificial Sequence
  derived and/or modified sequence
atgggccagcagggcagcctgggcgagcagcagtacagcgtgcccccccccgtgtacggctgccacacccccaccgacagctgcaccggcagccaggccctgctgctgagaaccccctacagcagcgacaacctgtaccagatgaccagccagctggagtgcatgacctggaaccagatgaacctgggcgccaccctgaagggcgtggccgccggcagcagcagcagcgtgaagtggaccgagggccagagcaaccacagcaccggctacgagagcgacaaccacaccacccccatcctgtgcggcgcccagtacagaatccacacccacggcgtgttcagaggcatccaggacgtgagaagagtgcccggcgtggcccccaccctggtgagatag

SEQ ID NO: 75730 - DNA, 909 bp, Artificial Sequence
  derived and/or modified sequence
atggagaagggctactcaactgtgacattcgatggcacaccttcctatggacataccccttctcatcatgccgcacagttcccaaaccattccttcaagcatgaggaccccatggggcagcaaggcagcctgggcgagcaacaatactctgtacctccgcctgtctatggctgccatacacccactgactcgtgcaccggatctcaagctttgctgctccgtactccatacagtagcgacaatctttaccagatgaccagtcagctggaatgtatgacgtggaaccagatgaacttgggtgccactcttaagggcgttgcggcgggttcctcttctagtgtgaagtggaccgagggacagtcgaaccacagtaccgggtatgaatctgacaaccacacaacgcctatcctctgcggcgctcagtaccggatacatacacacggcgtcttccgcggtatccaagatgtccgcagagtacccggagtggctccaaccctggtgagaagcgcctcggagacttccgagaagaggccatttatgtgcgcctatcccggctgtaataagcgatactttaaactcagtcacctgcaaatgcactctaggaaacatacaggggaaaaaccgtaccaatgcgatttcaaggattgtgagcgaagattctcccgaagtgatcagttaaagagacatcagcgccgccacacgggagtgaagccattccaatgcaaaacgtgtcagcggaagttttctcgtagcgatcaccttaagacacatactagaacgcataccggtgagaagccctttagttgtagatggccatcttgccagaagaaatttgcaaggagtgatgaactggtgcgccaccacaatatgcaccagagaaacatgaccaagcttcaattggctttatag

SEQ ID NO: 75731 - DNA, 396 bp, Artificial Sequence
  derived and/or modified sequence
atgggacaacagggctccttaggtgagcaacagtactctgtgcccccccctgtttatggttgtcacacacctactgactcttgcacaggctctcaggcactcttgcttagaaccccttactcctcggacaatctgtatcaaatgacctcacagttggagtgcatgacctggaaccaaatgaacctgggtgcgactctgaagggcgtcgccgctggctcgagttcaagtgtgaagtggaccgagggtcagagcaaccactccaccgggtatgaatcggataatcacaccacgccaattctgtgtggcgcacagtatcggatccacacccatggtgtatttagaggaattcaagatgtgcgacgtgtaccaggcgtcgctcccacattggtgcggtag

SEQ ID NO: 75732 - DNA, 909 bp, Artificial Sequence
  derived and/or modified sequence
atggagaagggctacagcacagtgacctttgatggcacccccagctatggccacacccccagccaccacgccgcccagttccccaaccacagcttcaagcatgaggaccccatgggccagcagggcagcctgggggagcagcagtacagcgtgcccccacctgtgtatggctgccacacccccacagacagctgcaccggcagccaggccctgctgctgcggaccccctacagcagtgacaacctgtaccagatgaccagccagctggagtgcatgacctggaaccagatgaacctgggcgccaccctgaagggcgtggccgccggcagcagcagctctgtgaagtggacagagggccagagcaaccacagcacaggctatgaaagtgacaaccacaccacccccatcctgtgtggggcccagtaccgcatccacacccatggagtcttccggggcatccaggatgtgagaagagtgcctggggtggcccccaccctggtgcgcagcgccagcgagaccagcgagaagaggcccttcatgtgtgcctacccaggctgcaacaagcgctacttcaagctgagccacctgcagatgcacagcaggaagcacactggagagaagccctaccagtgtgacttcaaggactgtgagcggcgcttcagcagaagtgaccagctgaagaggcaccagaggaggcacactggagtgaagcccttccagtgcaagacctgccagaggaagttcagcagaagtgaccacctgaagacccacaccaggacccacactggagagaagcccttcagctgccgctggcccagctgccagaagaagtttgcccggagtgatgagctggtgcgccaccacaacatgcaccagaggaacatgaccaagctgcagctggccctgtag

SEQ ID NO: 75733 - DNA, 396 bp, Artificial Sequence
  derived and/or modified sequence
atgggccagcagggcagcctgggggagcagcagtacagcgtgcccccacctgtgtatggctgccacacccccacagacagctgcaccggcagccaggccctgctgctgcggaccccctacagcagtgacaacctgtaccagatgaccagccagctggagtgcatgacctggaaccagatgaacctgggcgccaccctgaagggcgtggccgccggcagcagcagctctgtgaagtggacagagggccagagcaaccacagcacaggctatgaaagtgacaaccacaccacccccatcctgtgtggggcccagtaccgcatccacacccacggcgtcttccggggcatccaggatgtgcggcgggtgcctggggtggcccccaccctggtgaggtag

SEQ ID NO: 75734 - DNA, 909 bp, Artificial Sequence
  derived and/or modified sequence
atggagaagggctacagcaccgtgaccttcgacggcacccccagctacgggcacacaccctcacatcatgctgctcaattccccaatcactcattcaaacacgaagatcccatgggtcagcaggggtcattaggagaacagcagtatagtgttcccccgcccgtttacgggtgtcacaccccaaccgattcatgtacgggctctcaggccttgttacttcggaccccttattctagtgataacttgtaccaaatgacctcccagcttgagtgtatgacgtggaatcagatgaacttgggcgccaccctgaagggggtggcggcaggttcttctagctctgtgaagtggaccgaggggcagtctaaccattctacgggctatgaatccgataaccacactacacccatcctgtgcggagctcagtatcggatacacacacatggggtttttcggggaatccaagatgtgcgacgcgtgccgggggtggcccctaccctggtgcggtcagcttccgaaacttccgagaagcgccctttcatgtgcgcctaccccggttgcaacaaacggtacttcaagctgtctcatttgcagatgcatagtcgcaaacataccggagaaaaaccatatcagtgcgacttcaaagactgcgaacgcagattcagccgctctgatcagctgaagcgacatcagaggagacataccggcgtcaaaccctttcagtgcaaaacatgccaaaggaaattcagtcgctcagatcaccttaagactcacacccggacacacaccggagaaaaaccattctcatgcagatggccaagctgccagaagaagtttgctcggagcgacgaacttgttaggcaccacaacatgcaccagcgtaacatgactaagcttcagctagccctctag

SEQ ID NO: 75735 - DNA, 396 bp, Artificial Sequence
  derived and/or modified sequence
atgggccagcagggcagcctgggcgagcagcagtacagcgtgcccccgcctgtctacgggtgccacacacccaccgatagctgcaccggaagccaggccctcctcttgaggacaccttatagtagcgataacctctaccagatgacaagtcaactggaatgcatgacctggaatcagatgaacctgggggccacattgaaaggcgttgccgctggttcctccagctcagtcaaatggacagaagggcagagcaaccatagcacaggttatgagtcagacaaccatacaacgcctattctttgtggggcccaatacaggattcatacacacggggtgttcaggggaattcaggacgtccggagggtgcctggcgtggcccccacactggtaagatag

SEQ ID NO: 75736 - DNA, 909 bp, Artificial Sequence
  derived and/or modified sequence
atggagaagggttactcaacagtgacctttgatggcaccccatcctacgggcacaccccttcacaccacgcggctcaattccctaatcattccttcaagcacgaggatcctatgggccaacagggtagcctaggggagcagcagtacagcgtgccaccaccagtgtacggttgccatacaccaacagattcctgcactggaagccaggctctgcttttacgaacaccctacagctcagataacctgtaccaaatgacatctcagctcgagtgcatgacgtggaatcagatgaatttaggagcaacattgaaaggggtagctgccggtagttcatcttctgtgaagtggaccgaggggcagagtaaccattcaacagggtatgagagcgacaaccatacaaccccaattttgtgtggtgcccagtacagaatacatacccacggcgtcttccggggaatccaggacgtgaggcgcgtgcccggtgtcgcgcctaccctggtgaggtcggcatctgaaacatccgagaaaagaccctttatgtgtgcgtaccctgggtgcaacaagaggtactttaagcttagccacctacagatgcattcccgcaagcacacaggcgaaaaaccttatcagtgtgattttaaggactgcgaaagacgcttctcaagatccgaccagctaaaacgccatcagcgcagacatacaggcgtgaagcccttccagtgtaagacctgtcagcgtaagttttctaggtcggaccacctgaaaacacacacaaggacccatacgggagagaagccattcagttgccgttggccatcatgccagaagaagtttgctcgatccgacgaactcgtgcgacatcacaacatgcaccaacgaaatatgaccaagttgcagctggcgctctag

SEQ ID NO: 75737 - DNA, 396 bp, Artificial Sequence
  derived and/or modified sequence
atgggccaacaggggtcgctgggagagcagcagtacagtgtgcccccaccagtgtatgggtgccacaccccaactgattcctgtacggggtcacaagccttgttgttgcgaaccccatactccagtgacaatctgtatcaaatgacgtctcagctggaatgtatgacatggaatcagatgaatctgggtgctaccttaaaaggcgtcgctgccggatccagttctagtgtgaaatggacagaaggccagtctaaccactcaacaggatacgaaagcgacaaccacaccacaccaattttatgcggggctcagtatcgcatccacactcatggggtgtttcgagggatccaggatgtgcgccgagtacctggagtggcacctacgctggtccggtag

SEQ ID NO: 75738 - DNA, 2466 bp, Artificial Sequence
  derived and/or modified sequence
gctttcaccactgcccctcccggggggacctgaaggagagggtttgaggccggtctttgcccgccgaggtctgcgtgtccggtctgggaggaggcctaggagggctcgcgggccacgggcatccttgggcccgagttctggggtgcggacggacgtctcgagagtgggtgccgcgactcgggacccacggccctcgccgggcacggacagttgcggagcagggctctgaggattgtgcagtgccctgggtccctgcctactcctgggctcaggaatggagaagggttacagcacggtcaccttcgacgggacgcccagctacggtcacacgccctcgcaccatgcggcgcagttccccaaccactcattcaagcatgaggatcccatgggccagcagggctcgctgggtgagcagcagtactcggtgccgcccccggtctatggctgccacacccccaccgacagctgcaccggcagccaggctttgctgctgaggacgccctacagcagtgacaatttataccaaatgacatcccagcttgaatgcatgacctggaatcagatgaacttaggagccaccttaaagggagttgctgctgggagctccagctcagtgaaatggacagaagggcagagcaaccacagcacagggtacgagagcgataaccacacaacgcccatcctctgcggagcccaatacagaatacacacgcacggtgtcttcagaggcattcaggatgtgcgacgtgtgcctggagtagccccgactcttgtacggtcggcatctgagaccagtgagaaacgccccttcatgtgtgcttacccaggctgcaataagagatattttaagctgtcccacttacagatgcacagcaggaagcacactggtgagaaaccataccagtgtgacttcaaggactgtgaacgaaggttttctcgttcagaccagctcaaaagacaccaaaggagacatacaggtgtgaaaccattccagtgtaaaacttgtcagcgaaagttctcccggtccgaccacctgaagacccacaccaggactcatacaggtgaaaagcccttcagctgtcggtggccaagttgtcagaaaaagtttgcccggtcagatgaattagtccgccatcacaacatgcatcagagaaacatgaccaaactccagctggcgctttgaggggtctccctcggggaccgttcagtgtcccaggcagcacagtgtgtgaactgctttcaagtctgactctccactcctcctcactaaaaaggaaacttcagttgatcttcttcatccaacttccaagacaagataccggtgcttctggaaactaccaggtgtgcctggaagagttggtctctgccctgcctacttttagttgactcacaggccctggagaagcagctaacaatgtctggttagttaaaagcccattgccatttggtgtggattttctactgtaagaagagccatagctgatcatgtccccctgacccttcccttctttttttatgctcgttttcgctggggatggaattattgtaccattttctatcatggaatatttataggccagggcatgtgtatgtgtctgctaatgtaaactttgtcatggtttccatttactaacagcaacagcaagaaataaatcagagagcaaggcatcgggggtgaatcttgtctaacattcccgaggtcagccaggctgctaacctggaaagcaggatgtagttctgccaggcaacttttaaagctcatgcatttcaagcagctgaagaaaaaatcagaactaaccagtacctctgtatagaaatctaaaagaattttaccattcagttaattcaatgtgaacactggcacactgctcttaagaaactatgaagatctgagatttttttgtgtatgtttttgactcttttgagtggtaatcatatgtgtctttatagatgtacatacctccttgcacaaatggaggggaattcattttcatcactgggagtgtccttagtgtataaaaaccatgctggtatatggcttcaagttgtaaaaatgaaagtgactttaaaagaaaataggggatggtccaggatctccactgataagactgtttttaagtaacttaaggacctttgggtctacaagtatatgtgaaaaaaatgagacttactgggtgaggaaatccattgtttaaagatggtcgtgtgtgtgtgtgtgtgtgtgtgtgtgtgtgtgttgtgttgtgttttgttttttaagggagggaatttattatttaccgttgcttgaaattactgtgtaaatatatgtctgataatgatttgctctttgacaactaaaattaggactgtataagtactagatgcatcactgggtgttgatcttacaagatattgatgataacacttaaaattgtaacctgcatttttcactttgctctcaattaaagtctattcaaaaggaaa

SEQ ID NO: 75739 - DNA, 578 bp, Artificial Sequence
  derived and/or modified sequence
agattcatttcgcttgcccgcgctgctcctgcggaagagctgcagtttatttttggggggtgaacaaccttctctgtcgatcaggttacagcacggtcaccttcgacgggacgcccagctacggtcacacgccctcgcaccatgcggcgcagttccccaaccactcattcaagcatgaggatcccatgggccagcagggctcgctgggtgagcagcagtactcggtgccgcccccggtctatggctgccacacccccaccgacagctgcaccggcagccaggctttgctgctgaggacgccctacagcagtgacaatttataccaaatgacatcccagcttgaatgcatgacctggaatcagatgaacttaggagccaccttaaagggagttgctgctgggagctccagctcagtgaaatggacagaagggcagagcaaccacagcacagggtacgagagcgataaccacacaacgcccatcctctgcggagcccaatacagaatacacacgcacggtgtcttcagaggcattcaggatgtgcgacgtgtgcctggagtagccccgactcttgtacgg

SEQ ID NO: 75740 - protein, 288 aa, Artificial Sequence
  derived and/or modified sequence
MEKGYSTVTFDGTPSYGHTPSHHAAQFPNHSFKHEDPMGQQGSLGEQQYSVPPPVYGCHTPTDSCTGSQALLLRTPYSSDNLYQMTSQLECMTWNQMNLGATLKGHSTGYESDNHTTPILCGAQYRIHTHGVFRGIQDVRRVPGVAPTLVRSASETSEKRPFMCAYPGCNKRYFKLSHLQMHSRKHTGEKPYQCDFKDCERRFSRSDQLKRHQRRHTGVKPFQCKTCQRKFSRSDHLKTHTRTHTGKTSEKPFSCRWPSCQKKFARSDELVRHHNMHQRNMTKLQLAL

SEQ ID NO: 75741 - DNA, 867 bp, Artificial Sequence
  derived and/or modified sequence
atggagaagggctacagcaccgtgaccttcgacggcacccccagctacggccacacccccagccaccacgccgcccagttccccaaccacagcttcaagcacgaggaccccatgggccagcagggcagcctgggcgagcagcagtacagcgtgcccccccccgtgtacggctgccacacccccaccgacagctgcaccggcagccaggccctgctgctgagaaccccctacagcagcgacaacctgtaccagatgaccagccagctggagtgcatgacctggaaccagatgaacctgggcgccaccctgaagggccacagcaccggctacgagagcgacaaccacaccacccccatcctgtgcggcgcccagtacagaatccacacccacggcgtgttcagaggcatccaggacgtgagaagagtgcccggcgtggcccccaccctggtgagaagcgccagcgagaccagcgagaagagacccttcatgtgcgcctaccccggctgcaacaagagatacttcaagctgagccacctgcagatgcacagcagaaagcacaccggcgagaagccctaccagtgcgacttcaaggactgcgagagaagattcagcagaagcgaccagctgaagagacaccagagaagacacaccggcgtgaagcccttccagtgcaagacctgccagagaaagttcagcagaagcgaccacctgaagacccacaccagaacccacaccggcaagaccagcgagaagcccttcagctgcagatggcccagctgccagaagaagttcgccagaagcgacgagctggtgagacaccacaacatgcaccagagaaacatgaccaagctgcagctggccctgtag

SEQ ID NO: 75742 - DNA, 867 bp, Artificial Sequence
  derived and/or modified sequence
atggaaaaaggctactcgaccgtgaccttcgatggcactcctagctacggccacacaccgtcacatcacgctgcccaattcccgaaccactcttttaagcacgaggatcctatgggccagcaagggtccctcggtgagcaacagtatagcgtcccgcctccggtgtatgggtgccatacccctaccgactcatgtacaggtagccaagccctgctgctgagaaccccatacagttcagataatctgtaccaaatgacatctcagctggaatgcatgacttggaaccagatgaacctcggagcaacactaaaaggccatagcaccggttacgaatcagacaaccacactacccccattctgtgcggagctcagtataggattcatactcacggcgtgtttcgaggcatacaagacgttagaagggtccctggagtcgcacccaccctggttcggagtgcctcagagacaagcgagaaacgaccctttatgtgtgcctacccaggttgtaacaaaagatactttaaattatcccaccttcagatgcacagccgcaaacacacgggggaaaagccgtatcagtgcgatttcaaagactgtgagcgccggtttagtaggtccgaccagctcaagagacatcaacgtagacacaccggcgtgaagccttttcagtgcaaaacctgtcagagaaaattctccaggtctgaccatttgaaaacacacacccggactcacacagggaagacttccgagaagccatttagctgtcggtggcctagctgccagaaaaagttcgcacgttctgatgaactggtccggcaccataacatgcaccaacgcaacatgacgaagctgcagctggcattatag

SEQ ID NO: 75743 - DNA, 867 bp, Artificial Sequence
  derived and/or modified sequence
atggagaagggctacagcacagtgacctttgatggcacccccagctatggccacacccccagccaccacgccgcccagttccccaaccacagcttcaagcatgaggaccccatgggccagcagggcagcctgggggagcagcagtacagcgtgcccccacctgtgtatggctgccacacccccacagacagctgcaccggcagccaggccctgctgctgcggaccccctacagcagtgacaacctgtaccagatgaccagccagctggagtgcatgacctggaaccagatgaacctgggcgccaccctgaagggccacagcacaggctatgaaagtgacaaccacaccacccccatcctgtgtggggcccagtaccgcatccacacccacggcgtcttccggggcatccaggatgtgcggcgggtgcctggggtggcccccaccctggtgcgcagcgccagcgagaccagcgagaagaggcccttcatgtgtgcctacccaggctgcaacaagcgctacttcaagctgagccacctgcagatgcacagcaggaagcacactggagagaagccctaccagtgtgacttcaaggactgtgaaagacgcttcagcagaagtgaccagctgaagaggcaccagaggaggcacactggagtgaagcccttccagtgcaagacctgccagaggaagttcagcagaagtgaccacctgaagacccacaccaggacccacacaggcaagaccagcgagaagcccttcagctgccgctggcccagctgccagaagaagtttgcccggagtgatgagctggtgcgccaccacaacatgcaccagaggaacatgaccaagctgcagctggccctgtag

SEQ ID NO: 75744 - DNA, 867 bp, Artificial Sequence
  derived and/or modified sequence
atggagaagggctacagcaccgtgaccttcgacggcacccccagctacgggcatacaccctcacaccacgccgcgcagtttcctaatcattcttttaagcatgaagatccaatgggacagcagggaagcctgggggaacagcaatactcagtccctcctcctgtgtatggctgccacactcccactgatagttgcacagggtctcaggctctgctcctgagaacgccatattcctcggacaacctatatcagatgaccagccagctcgagtgcatgacttggaaccagatgaacctgggtgccaccctcaagggacactccaccgggtacgagagcgataaccatacgacgccaattctgtgtggagcgcagtacaggattcacacacatggggttttccgcgggattcaggatgtcagacgagtgcctggtgtggctcctacactggtgcggtctgcttcagagacaagtgaaaagcgccccttcatgtgtgcttatccaggctgtaataagagatacttcaaacttagccatctgcagatgcactctcgaaagcacaccggggaaaagccctaccagtgtgatttcaaggactgcgagcgccgcttctctcgatccgaccagctgaaaagacaccagagacgccacactggtgtcaagccttttcagtgcaagacatgccaacgcaagttcagccggtcagatcacctgaaaacacatacaagaacgcatactggtaaaaccagtgaaaaaccgtttagctgtaggtggccttcctgccaaaaaaagtttgccagatcagatgagctggtaagacatcacaatatgcatcagcgcaacatgaccaaactccagctggccctttag

SEQ ID NO: 75745 - DNA, 867 bp, Artificial Sequence
  derived and/or modified sequence
atggaaaaaggctacagcacagtgaccttcgacggcaccccaagctacggccacacccctagccaccacgcagctcaattcccaaaccactcctttaagcacgaggacccaatgggccagcagggttccctcggagagcaacagtattcagtgccacccccagtgtacggctgtcacacacctaccgactcgtgcacagggtcacaggcgttgttgctgaggacaccgtatagcagcgataatctgtatcagatgacatctcagcttgagtgcatgacctggaatcagatgaatctcggcgctacattgaagggccattcgacagggtacgagagcgacaatcacacaacaccgatcctgtgcggtgcccagtaccgcatccacacacatggtgtgttccggggaatacaagatgtccgtcgggtccccggagtggccccaacgttggtgcggagcgcctcagaaacatccgagaagaggcctttcatgtgcgcctaccctgggtgtaataaaaggtatttcaagctgtcgcacctgcagatgcacagcagaaagcatacaggagaaaagccttatcagtgcgattttaaagactgtgagcgacgcttctccagatcagaccagcttaaacgccaccagaggcgacacaccggggttaaaccattccagtgtaagacctgtcagaggaagttttctaggtctgaccacctgaagacacacactcggacacacaccggcaagaccagcgagaagcctttctcgtgtcggtggcccagctgtcagaagaagttcgcacgtagcgatgagttagtacgacatcacaacatgcatcagcgcaacatgacaaagcttcagcttgctctttag

SEQ ID NO: 75746 - DNA, 2421 bp, Artificial Sequence
  derived and/or modified sequence
gctttcaccactgcccctcccggggggacctgaaggagagggtttgaggccggtctttgcccgccgaggtctgcgtgtccggtctgggaggaggcctaggagggctcgcgggccacgggcatccttgggcccgagttctggggtgcggacggacgtctcgagagtgggtgccgcgactcgggacccacggccctcgccgggcacggacagttgcggagcagggctctgaggattgtgcagtgccctgggtccctgcctactcctgggctcaggaatggagaagggttacagcacggtcaccttcgacgggacgcccagctacggtcacacgccctcgcaccatgcggcgcagttccccaaccactcattcaagcatgaggatcccatgggccagcagggctcgctgggtgagcagcagtactcggtgccgcccccggtctatggctgccacacccccaccgacagctgcaccggcagccaggctttgctgctgaggacgccctacagcagtgacaatttataccaaatgacatcccagcttgaatgcatgacctggaatcagatgaacttaggagccaccttaaagggccacagcacagggtacgagagcgataaccacacaacgcccatcctctgcggagcccaatacagaatacacacgcacggtgtcttcagaggcattcaggatgtgcgacgtgtgcctggagtagccccgactcttgtacggtcggcatctgagaccagtgagaaacgccccttcatgtgtgcttacccaggctgcaataagagatattttaagctgtcccacttacagatgcacagcaggaagcacactggtgagaaaccataccagtgtgacttcaaggactgtgaacgaaggttttctcgttcagaccagctcaaaagacaccaaaggagacatacaggtgtgaaaccattccagtgtaaaacttgtcagcgaaagttctcccggtccgaccacctgaagacccacaccaggactcatacaggtaaaacaagtgaaaagcccttcagctgtcggtggccaagttgtcagaaaaagtttgcccggtcagatgaattagtccgccatcacaacatgcatcagagaaacatgaccaaactccagctggcgctttgaggggtctccctcggggaccgttcagtgtcccaggcagcacagtgtgtgaactgctttcaagtctgactctccactcctcctcactaaaaaggaaacttcagttgatcttcttcatccaacttccaagacaagataccggtgcttctggaaactaccaggtgtgcctggaagagttggtctctgccctgcctacttttagttgactcacaggccctggagaagcagctaacaatgtctggttagttaaaagcccattgccatttggtgtggattttctactgtaagaagagccatagctgatcatgtccccctgacccttcccttctttttttatgctcgttttcgctggggatggaattattgtaccattttctatcatggaatatttataggccagggcatgtgtatgtgtctgctaatgtaaactttgtcatggtttccatttactaacagcaacagcaagaaataaatcagagagcaaggcatcgggggtgaatcttgtctaacattcccgaggtcagccaggctgctaacctggaaagcaggatgtagttctgccaggcaacttttaaagctcatgcatttcaagcagctgaagaaaaaatcagaactaaccagtacctctgtatagaaatctaaaagaattttaccattcagttaattcaatgtgaacactggcacactgctcttaagaaactatgaagatctgagatttttttgtgtatgtttttgactcttttgagtggtaatcatatgtgtctttatagatgtacatacctccttgcacaaatggaggggaattcattttcatcactgggagtgtccttagtgtataaaaaccatgctggtatatggcttcaagttgtaaaaatgaaagtgactttaaaagaaaataggggatggtccaggatctccactgataagactgtttttaagtaacttaaggacctttgggtctacaagtatatgtgaaaaaaatgagacttactgggtgaggaaatccattgtttaaagatggtcgtgtgtgtgtgtgtgtgtgtgtgtgtgtgtgtgttgtgttgtgttttgttttttaagggagggaatttattatttaccgttgcttgaaattactgtgtaaatatatgtctgataatgatttgctctttgacaactaaaattaggactgtataagtactagatgcatcactgggtgttgatcttacaagatattgatgataacacttaaaattgtaacctgcatttttcactttgctctcaattaaagtctattcaaaagg

SEQ ID NO: 75747 - protein, 479 aa, Artificial Sequence
  derived and/or modified sequence
MLLLLLPLLWGRERAEGQTSKLLTMQSSVTVQEGLCVHVPCSFSYPSHGWIYPGPVVHGYWFREGANTDQDAPVATNNPARAVWEETRDRFHLLGDPHTKNCTLSIRDARRSDAGRYFFRMEKGSIKWNYKHHRLSVNVTALTHRPNILIPGTLESGCPQNLTCSVPWACEQGTPPMISWIGTSVSPLDPSTTRSSVLTLIPQPQDHGTSLTCQVTFPGASVTTNKTVHLNVSYPPQNLTMTVFQGDGTVSTVLGNGSSLSLPEGQSLRLVCAVDAVDSNPPARLSLSWRGLTLCPSQPSNPGVLELPWVHLRDAAEFTCRAQNPLGSQQVYLNVSLQSKATSGVTQGVVGGAGATALVFLSFCVIFVVVRSCRKKSARPAAGVGDTGIEDANAVRGSASQILNHFIGFPTFLGLGFEFLLNLRDLCCHPDSEFYVYHFSHFRLIKNIAGEIVWSLEGKILWLLDVSDFFHWFFLICVG

SEQ ID NO: 75748 - DNA, 1440 bp, Artificial Sequence
  derived and/or modified sequence
atgctcctgcttttgctgccccttttatggggcagagagcgagccgagggccagacgtccaagcttctcacgatgcagtccagcgttaccgttcaggagggtctctgtgtgcatgttccttgttctttttcttacccttcacacggctggatctaccctggacccgtcgttcacgggtactggttccgggaaggcgcaaacacagatcaggatgctccagtcgcaactaacaatcccgccagagctgtttgggaagagactcgggatcgctttcatctgctgggggatcctcataccaaaaattgcaccctgagcatcagggatgcaagacgcagcgacgcaggacgctacttcttccgcatggaaaagggtagcattaaatggaactacaagcaccaccggctgagcgtcaacgtgaccgctctgacgcatcgccccaacatactgattcctggcaccctggaatcaggatgtccccaaaacctaacgtgctctgttccctgggcttgcgaacagggtactccccccatgatctcatggatcggaacaagtgtcagtccccttgatcctagcaccactaggtcaagcgtgcttacactaatcccccaaccacaggaccacgggacttcgctcacctgtcaggtgacttttccaggagccagtgtgactaccaacaagacagtgcatctcaatgtgtcttacccaccccaaaatctgacaatgaccgtatttcagggcgatggcacggtttctactgtgcttgggaacggttcaagcctgagtttgcctgaaggacagtccttacgactggtatgcgccgtcgatgccgtggatagcaaccctccggcccgactaagcttgtcatggagaggcctgacattgtgcccaagccagccttcaaacccgggggtcctggagctgccctgggtgcaccttcgcgatgcggcggagtttacttgccgcgcacagaaccccctgggaagccagcaggtctacctcaatgtctccctgcagtctaaggcgaccagcggggtgacgcaaggtgtggtgggaggcgccggagccactgctttagtgtttttgagtttctgcgtgatcttcgtggtagtgcgatcctgtaggaaaaagagtgcgcgtccagctgccggtgttggcgacacaggaatcgaggacgctaacgccgttaggggctcagccagtcaaatcctcaaccatttcatcggcttcccgacgttcctcgggttgggattcgagtttctgctcaatctacgcgatctgtgctgtcatcctgattcagaattttacgtgtatcacttcagccatttccgtctcattaaaaacatagctggagagatcgtttggagtcttgagggcaaaattctatggttactagacgtcagtgacttcttccactggttttttctaatttgcgtcggatag

SEQ ID NO: 75749 - DNA, 1440 bp, Artificial Sequence
  derived and/or modified sequence
atgctgctgctgctgctgcccctgctgtggggccgggagagagctgagggccagaccagcaagctgctgaccatgcagagctctgtgacagtgcaggagggcctgtgtgtgcacgtgccctgcagcttctcctaccccagccacggctggatctacccaggccctgtggtgcacggctactggttccgggagggcgccaacacagaccaggatgcccctgtggccaccaacaacccagcccgggctgtgtgggaggagacccgggaccgcttccacctgctgggggacccccacaccaagaactgcaccctgagcatcagagatgcccggcggagtgatgctggccgctacttcttcaggatggagaagggcagcatcaagtggaactacaagcaccaccggctgtctgtgaatgtgacagccctgacccaccggcccaacatcctgatccctggcaccctggagagcggctgcccccagaacctgacctgcagcgtgccctgggcctgtgagcagggcaccccacccatgatctcctggattggcacctctgtgagccccctggaccccagcaccaccaggagctctgtgctgaccctcatcccccagccccaggaccacggcaccagcctgacctgccaggtgaccttccctggggcctctgtgaccaccaacaagacagtgcacctgaatgtgtcctacccaccccagaacctgaccatgaccgtcttccagggagatggcaccgtgtccacagtgctgggcaatggcagcagcctgagcctgcctgagggccagagcctgcggctggtgtgtgctgtggatgctgtggacagcaaccccccagcccggctgagcctgtcctggaggggcctgaccctgtgccccagccagcccagcaaccctggggtgctggagctgccctgggtgcacctgagagatgctgctgagttcacctgccgggcccagaaccccctgggcagccagcaggtgtacctgaatgtgtccctgcagagcaaggccaccagcggcgtgacccagggcgtggtgggcggggccggggccacagccctggtgttcctgtccttctgtgtgatctttgtggtggtgcgcagctgcaggaagaagagcgcccggcctgctgctggggtgggggacacaggaattgaagatgccaatgctgtgcggggcagcgccagccagatcctgaaccacttcatcggcttccccaccttcctgggcctgggctttgagttcctgctgaacctgcgggacctgtgctgccacccagacagcgagttctacgtgtaccacttcagccacttccgcctcatcaagaacattgctggggagatcgtgtggagcctggagggcaagatcctgtggctgctggatgtgtctgacttcttccactggttcttcctgatctgtgtgggctag

SEQ ID NO: 75750 - DNA, 1440 bp, Artificial Sequence
  derived and/or modified sequence
atgctgctgctgctgctgcccctgctgtggggccgggagcgggccgagggccaaaccagcaagctgctgaccatgcaatcttccgtgacagtgcaagaagggctgtgcgtgcatgtaccatgctctttttcatatcccagtcacggctggatttaccccggacctgtggtgcacggctactggttccgggagggcgccaacaccgaccaggatgcacctgttgctactaacaaccctgctcgggccgtgtgggaggaaacccgggaccgcttccacctcctgggcgatccccataccaaaaattgcacgctgagtattcgggacgctcgcagatccgacgctggcaggtacttcttcaggatggaaaagggcagtattaagtggaattacaagcatcaccgcctgtccgtgaacgtgaccgctttaacgcaccgacctaacatactcatccccggaacgctggagtcagggtgtccccagaatctcacatgctctgtcccttgggcatgtgagcagggcacacctcctatgatcagctggatagggacctctgtgagcccccttgacccttccacgacaagatcatctgtgctgacactgattccacaacctcaagatcacggcacgagtctcacctgtcaagtcacctttcctggggcatcggtcacaaccaacaaaactgtacatctgaatgttagctaccccccccagaatctgacgatgactgttttccagggcgatggaacggtgtcaaccgtgctggggaacggaagcagcttatccctgccagaaggccagagtctgcgacttgtctgcgccgtggatgcggtcgatagtaatccccctgcacgcctctcactgagctggagaggattgacattgtgtcccagccagcccagcaatccgggcgtgctggagctcccgtgggtgcacctgagagatgcggccgagttcacatgtagggctcagaaccccctgggatcacagcaggtctacttgaacgtatccttacagtcaaaagctacttctggtgtaacgcagggagtagtgggcggtgccggcgctactgccttggtgttcctgagcttttgcgtgatcttcgtggtggtgcggagctgtcggaaaaaatctgccaggcctgccgcgggcgtaggagatacaggcatagaggacgccaatgcagtgcgcggttcagccagtcagattctgaatcactttataggttttccgaccttcctcggattggggttcgaatttctgctgaacttaagagacctctgttgccatcctgattctgaattttacgtgtatcatttttcacatttccgtttaatcaagaatatcgcgggggaaatcgtttggtctcttgagggcaagattctgtggctgctcgatgtgtctgacttttttcactggttctttttgatttgcgttggctag

SEQ ID NO: 75751 - DNA, 1440 bp, Artificial Sequence
  derived and/or modified sequence
atgcttttgctgttgttgcctctgttgtgggggagggagcgtgcagagggacaaacttcaaagcttctgactatgcagtcaagcgtgacagtccaggaaggtctgtgtgttcatgttccatgcagtttcagctatccctcacacggctggatctatcctggaccagtggttcatggttattggttcagggagggggcaaacaccgaccaggacgcccctgtggcaaccaacaaccccgcacgcgctgtctgggaagagacacgagatagattccacttactgggtgatccccatacaaaaaattgtaccttgtcaatccgagacgctcgcaggagcgatgcaggcagatacttttttagaatggagaaaggctcgattaagtggaactataagcatcataggctgagcgtgaacgttacagccttgacgcacagacccaacattcttattcctggcactcttgagtccgggtgtcctcagaaccttacctgttccgtgccatgggcatgtgagcaaggcacccctcccatgatatcctggattgggacatctgtgagtcctctggatccttccaccaccaggtcctctgtgttgactctgatcccgcagccccaagaccacggcacaagcctgacttgccaggtcactttcccaggcgcttcagtgaccacgaataaaaccgtgcacctgaatgtgtcatatccaccacagaacttaactatgaccgtcttccagggtgacggcacagtgagtactgtgttgggaaacggctctagcctcagtctgcctgagggccagtccctgaggctcgtgtgtgccgtagacgctgtggattctaatccccctgctaggttaagtctgtcttggcggggtctgacactttgcccttcccagccctcaaaccctggagtgctggagctcccatgggtgcacctaagagatgcagcggagttcacatgtcgggctcagaatcccctcgggtcccagcaggtatacttaaacgtgagcctccagtccaaggctactagtggcgtcacgcagggagtcgtgggaggagcaggcgctacagctctggtgtttctgtctttctgtgtgatctttgtggtggtgcggagttgccgcaagaagtccgcccgacctgccgcaggtgtcggagacacagggattgaggatgctaatgctgtcaggggaagtgcgtcacagattttaaatcactttatcggctttccaaccttcctcggactgggttttgagttcttgctgaatcttagggacctgtgttgtcatccggacagcgagttctacgtgtaccacttttctcactttaggctgatcaagaacatcgccggagaaatagtgtggagcttagaggggaagatactttggctgctcgatgtgtctgatttttttcactggttcttcctgatctgcgtgggctag

SEQ ID NO: 75752 - DNA, 1572 bp, Artificial Sequence
  derived and/or modified sequence
agttcctgagagaagaaccctgaggaacagacgttccctcgcggccctggcacctctaaccccagacatgctgctgctgctgctgcccctgctctgggggagggagagggcggaaggacagacaagtaaactgctgacgatgcagagttccgtgacggtgcaggaaggcctgtgtgtccatgtgccctgctccttctcctacccctcgcatggctggatttaccctggcccagtagttcatggctactggttccgggaaggggccaatacagaccaggatgctccagtggccacaaacaacccagctcgggcagtgtgggaggagactcgggaccgattccacctccttggggacccacataccaagaattgcaccctgagcatcagagatgccagaagaagtgatgcggggagatacttctttcgtatggagaaaggaagtataaaatggaattataaacatcaccggctctctgtgaatgtgacagccttgacccacaggcccaacatcctcatcccaggcaccctggagtccggctgcccccagaatctgacctgctctgtgccctgggcctgtgagcaggggacaccccctatgatctcctggatagggacctccgtgtcccccctggacccctccaccacccgctcctcggtgctcaccctcatcccacagccccaggaccatggcaccagcctcacctgtcaggtgaccttccctggggccagcgtgaccacgaacaagaccgtccatctcaacgtgtcctacccgcctcagaacttgaccatgactgtcttccaaggagacggcacagtatccacagtcttgggaaatggctcatctctgtcactcccagagggccagtctctgcgcctggtctgtgcagttgatgcagttgacagcaatccccctgccaggctgagcctgagctggagaggcctgaccctgtgcccctcacagccctcaaacccgggggtgctggagctgccttgggtgcacctgagggatgcagctgaattcacctgcagagctcagaaccctctcggctctcagcaggtctacctgaacgtctccctgcagagcaaagccacatcaggagtgactcagggggtggtcgggggagctggagccacagccctggtcttcctgtccttctgcgtcatcttcgttgtagtgaggtcctgcaggaagaaatcggcaaggccagcagcgggcgtgggagatacgggcatagaggatgcaaacgctgtcaggggttcagcctctcagatcttgaatcattttattggatttcctacattccttggactgggtttcgagtttctcctgaatctccgtgatctttgttgccatccagattctgaattctatgtctatcatttcagtcatttcagactcattaagaacattgctggggagatagtgtggtcacttgaaggtaaaatactctggcttttggatgtgtcagatttctttcactggttcttcctcatctgtgtgggctgatgttcctttaatctttgaagttgctgttctttggatagggctctttgcttttatattctctgatg

SEQ ID NO: 75753 - DNA, 1440 bp, Artificial Sequence
  derived and/or modified sequence
atgctgctgctgctgctgcccctgctgtggggcagagagagagccgagggccagaccagcaagctgctgaccatgcagagcagcgtgaccgtgcaggagggcctgtgcgtgcacgtgccctgcagcttcagctaccccagccacggctggatctaccccggccccgtggtgcacggctactggttcagagagggcgccaacaccgaccaggacgcccccgtggccaccaacaaccccgccagagccgtgtgggaggagaccagagacagattccacctgctgggcgacccccacaccaagaactgcaccctgagcatcagagacgccagaagaagcgacgccggcagatacttcttcagaatggagaagggcagcatcaagtggaactacaagcaccacagactgagcgtgaacgtgaccgccctgacccacagacccaacatcctgatccccggcaccctggagagcggctgcccccagaacctgacctgcagcgtgccctgggcctgcgagcagggcaccccccccatgatcagctggatcggcaccagcgtgagccccctggaccccagcaccaccagaagcagcgtgctgaccctgatcccccagccccaggaccacggcaccagcctgacctgccaggtgaccttccccggcgccagcgtgaccaccaacaagaccgtgcacctgaacgtgagctaccccccccagaacctgaccatgaccgtgttccagggcgacggcaccgtgagcaccgtgctgggcaacggcagcagcctgagcctgcccgagggccagagcctgagactggtgtgcgccgtggacgccgtggacagcaacccccccgccagactgagcctgagctggagaggcctgaccctgtgccccagccagcccagcaaccccggcgtgctggagctgccctgggtgcacctgagagacgccgccgagttcacctgcagagcccagaaccccctgggcagccagcaggtgtacctgaacgtgagcctgcagagcaaggccaccagcggcgtgacccagggcgtggtgggcggcgccggcgccaccgccctggtgttcctgagcttctgcgtgatcttcgtggtggtgagaagctgcagaaagaagagcgccagacccgccgccggcgtgggcgacaccggcatcgaggacgccaacgccgtgagaggcagcgccagccagatcctgaaccacttcatcggcttccccaccttcctgggcctgggcttcgagttcctgctgaacctgagagacctgtgctgccaccccgacagcgagttctacgtgtaccacttcagccacttcagactgatcaagaacatcgccggcgagatcgtgtggagcctggagggcaagatcctgtggctgctggacgtgagcgacttcttccactggttcttcctgatctgcgtgggctag

SEQ ID NO: 75754 - protein, 155 aa, Artificial Sequence
  derived and/or modified sequence
MSESKSGPEYASFFAVMGASAAMVFSALGAAYGTAKSGTGIAAMSVMRPEQIMKSIIPVVMAGIIAIYGLVVAVLIANSLNDDISLYKSFLQLGAGLSVGLSGLAAGFAIGIVGDAGVRGTAQQPRLFVGMILILIFAEVLGLYGLIVALILSTK

SEQ ID NO: 75755 - DNA, 468 bp, Artificial Sequence
  derived and/or modified sequence
atgtccgaatccaagtccggcccagagtatgcaagcttttttgccgtgatgggagcatctgcagctatggttttcagtgcactgggcgctgcatacgggacagccaagtccggtaccggcattgccgccatgtctgtgatgcggccggagcaaatcatgaaaagcatcatacctgtagtgatggcagggatcatagccatttacggcctagttgttgctgttcttatagccaactctctcaacgatgacattagcctctataaaagtttcctgcagttaggcgctggtctcagtgtgggtttaagcgggctagccgccggctttgccatcggcatagtgggcgacgcaggtgtcaggggaacagcacagcagcctcgcctcttcgtcgggatgattctcatcttgatttttgccgaagtgctggggctctacggactgatcgtggccctcattctctccacaaagtag

SEQ ID NO: 75756 - DNA, 468 bp, Artificial Sequence
  derived and/or modified sequence
atgtctgagagcaagagcggcccagaatatgccagcttctttgctgtgatgggcgccagcgctgccatggtgttcagcgccctgggcgccgcctacggcacagccaagtctggaactggaattgctgccatgtctgtgatgaggcctgagcagatcatgaagagcatcatccctgtggtgatggccggcatcatcgccatctacggcctggtggtggccgtgctgattgccaacagcctgaatgatgacatcagcctgtacaagagcttcctgcagctgggcgccggcctgtctgtgggcctgagcggcctggccgccggctttgccatcggcatcgtgggagatgctggggtgcggggcacagcccagcagccccggctgtttgtgggcatgatcctgatcctgatctttgctgaggtgctgggcctgtatggcctgattgtggccctgatcctgagcaccaagtag

SEQ ID NO: 75757 - DNA, 468 bp, Artificial Sequence
  derived and/or modified sequence
atgagcgagagcaagagcggccccgagtacgccagcttcttcgccgttatgggggcctctgcagcaatggtgtttagcgcactcggggcagcttacggaacagccaagtcaggtacaggcatagcagccatgtccgtaatgcgccctgaacagatcatgaaatctataataccggtggtgatggccggaattatagcaatatacggcctggtcgtagccgtgctcatcgccaactcgttgaacgacgacatctcactctacaagtcctttcttcagctgggggccggccttagtgttgggctatccggtttggccgctggattcgcgatcggaattgttggagacgccggagtgaggggcacagcgcagcagccaagactgttcgtaggcatgattctgatcctcatctttgcagaggtcctggggctgtatggcctaatcgtcgcccttattctgtccacaaaatag

SEQ ID NO: 75758 - DNA, 468 bp, Artificial Sequence
  derived and/or modified sequence
atgagcgaatccaagtcaggaccggaatacgcttcttttttcgctgtcatgggagcttctgccgcaatggtgttctctgctctcggcgctgcctatgggacagcaaagtctggaaccggcatcgccgcaatgtctgtgatgagaccagagcagattatgaaaagcatcatacccgtggtgatggcaggcatcatcgcgatctatggcctggtcgttgccgtacttatcgccaactctctgaacgacgacatctcattgtacaaatcttttctacagctgggcgcagggctgtcagtggggctctccggcctagcggctggctttgccatcggaatagttggggacgcaggcgtccgaggtacagctcagcagcccaggctgttcgtgggaatgatactgatcttaatattcgccgaggtgttgggattgtacggtctgatcgtggccctcattctctcaactaagtag

SEQ ID NO: 75759 - DNA, 1175 bp, Artificial Sequence
  derived and/or modified sequence
acgcgtctcccccacggtgcgaagtggtacggctcgcaggggcggggcccaggtcatgtgacgcggccgcggccgccattttgttctgcggtgctggtatttagagcgcagcggctgacgggccggatcgccttcgccgccgcccgcccgcaaaccttcgtgcccggcccgtcctcgcccccgcctccgccaccgcctcggcccgcagagcttgccccctccccacccgcagacatgtccgagtccaagagcggccccgagtatgcttcgtttttcgccgtcatgggcgcctcggccgccatggtcttcagcgccctgggcgctgcctatggcacagccaagagcggtaccggcattgcggccatgtctgtcatgcggccggagcagatcatgaagtccatcatcccagtggtcatggctggcatcatcgccatctacggcctggtggtggcagtcctcatcgccaactccctgaatgacgacatcagcctctacaagagcttcctccagctgggcgccggcctgagcgtgggcctgagcggcctggcagccggctttgccatcggcatcgtgggggacgctggcgtgcggggcaccgcccagcagccccgactattcgtgggcatgatcctgattctcatcttcgccgaggtgctcggcctctacggtctcatcgtcgccctcatcctctccacaaagtagaccctctccgagcccaccagccacagaatattatgtaaagaccacccctcctcattccagaacgaacagcctgacacatacgcacggggccgccgcccccagtagttggtcttgtacatgcgcagtgtcctagtgcccatcgtctgtttccccggccttgcccccgcccgccccgtgccgtggacatctgggcccactcatcgcccctccaggcccccggcgccccaccccctagagtgctctgtgtatgcggatgatttagaattgtcatttctctttactggatgtttatttataaagatctggcctgttcctgcgtctgcggagcggcccttgtctcccagctatctataaccttagctagagtgtcgccttgtgggttcctgttgctgagacttcctggatggagccgccctcaccgccgggcccgtggccctgcgcggagctgtgtccaataaagttcttggatgtga

SEQ ID NO: 75760 - DNA, 468 bp, Artificial Sequence
  derived and/or modified sequence
atgagcgagagcaagagcggccccgagtacgccagcttcttcgccgtgatgggcgccagcgccgccatggtgttcagcgccctgggcgccgcctacggcaccgccaagagcggcaccggcatcgccgccatgagcgtgatgagacccgagcagatcatgaagagcatcatccccgtggtgatggccggcatcatcgccatctacggcctggtggtggccgtgctgatcgccaacagcctgaacgacgacatcagcctgtacaagagcttcctgcagctgggcgccggcctgagcgtgggcctgagcggcctggccgccggcttcgccatcggcatcgtgggcgacgccggcgtgagaggcaccgcccagcagcccagactgttcgtgggcatgatcctgatcctgatcttcgccgaggtgctgggcctgtacggcctgatcgtggccctgatcctgagcaccaagtag

SEQ ID NO: 75761 - protein, 1158 aa, Artificial Sequence
  derived and/or modified sequence
MCSTNPGKWVTFDDDPAVQSSQKSKNFPLENQGVCRPNGLKLNLPGLREFPSGSSSTSSTPLSSPIVDFYFSPGPPSNSPLSTPTKDFPGFPGIPKAGTHVLYPIPESSSDSPLAISGGESSLLPTRPTCLSHALLPSDHSCTHPTPKVGLPDEVNPQQAESLGFQSDDLPQFQYFREDCAFSSPFWKDEGSDSHFTLDPPGSKKMFSSRNKEMPIDQKSLNKCSLNYICEKLEHLQSAENQDSLRSLSMHCLCAEENASSFVPHTLFRSQPKSGWSFMLRIPEKKNMMSSRQWGPIFLKVLPGGILQMYYEQGLEKPFKEIQLDPYCRLSEPKVENFSVAGKIHTVKIEHVSYTEKRKYHSKTEVVHEPDIEQMLKLGSTSYHDFLDFLTTVEEELMKLPAVSKPKKNYEEQEISLEIVDNFWGKVTKEGKFVESAVITQIYCLCFVNGNLECFLTLNDLELPKRDESYYEKDSEKKGIDILDYHFHKCVNVQEFEQSRIIKFVPLDACRFELMRFKTLYNGDNLPFSLKSVVVVQGAYVELQAFVNMASLAQRSSYAGSLRSCDNIRIHFPVPSQWIKALWTMNLQRQKSLKAKMNRRACLGSLQELESEPVIQVTVGSAKYESAYQAVVWKIDRLPDKNSSLDHPHCLSYKLELGSDQEIPSDWYPFATVQFSVPDTCASRTEVRSLGVESDVQPQKHVQQRACYNIQPKLYRSVIEDVIEGVRNLFAEEGIEEQVLKDLKQLWETKVLQSKATEDFFRNSIQSPLFTLQLPHSLHQTLQSSTASLVIPAGRTLPSFTTAELGTSNSSANFTFPGYPIHVPAGVTLQTVSGHLYKVNVPIMVTETSGRAGILQHPIQQVFQQLGQPSVIQTSVPQLNPWSLQATTEKSQRIETVLQQPAILPSGPVDRKHLENATSDILVSPGNEHKIVPEALLCHQESSHYISLPGVVFSPQVSQTNSNVESVLSGSASMAQNLHDESLSTSPHGALHQHVTDIQLHILKNRMYGCDSVKQPRNIEEPSNIPVSEKDSNSQVDLSIRVTDDDIGEIIQVDGSGDTSSNEEIGSTRDADENEFLGNIDGGDLKVPEEEADSISNEDSATNSSDNEDPQVNIVEEDPLNSGDDVSEQDVPDLFDTDNVIVCQYDKQGDTRVRHGQQ

SEQ ID NO: 75762 - DNA, 3477 bp, Artificial Sequence
  derived and/or modified sequence
atgtgcagcaccaaccccggcaagtgggtgaccttcgacgacgaccccgccgtgcagagcagccagaagagcaagaacttccccctggagaaccagggcgtgtgcagacccaacggcctgaagctgaacctgcccggcctgagagagttccccagcggcagcagcagcaccagcagcacccccctgagcagccccatcgtggacttctacttcagccccggcccccccagcaacagccccctgagcacccccaccaaggacttccccggcttccccggcatccccaaggccggcacccacgtgctgtaccccatccccgagagcagcagcgacagccccctggccatcagcggcggcgagagcagcctgctgcccaccagacccacctgcctgagccacgccctgctgcccagcgaccacagctgcacccaccccacccccaaggtgggcctgcccgacgaggtgaacccccagcaggccgagagcctgggcttccagagcgacgacctgccccagttccagtacttcagagaggactgcgccttcagcagccccttctggaaggacgagggcagcgacagccacttcaccctggacccccccggcagcaagaagatgttcagcagcagaaacaaggagatgcccatcgaccagaagagcctgaacaagtgcagcctgaactacatctgcgagaagctggagcacctgcagagcgccgagaaccaggacagcctgagaagcctgagcatgcactgcctgtgcgccgaggagaacgccagcagcttcgtgccccacaccctgttcagaagccagcccaagagcggctggagcttcatgctgagaatccccgagaagaagaacatgatgagcagcagacagtggggccccatcttcctgaaggtgctgcccggcggcatcctgcagatgtactacgagcagggcctggagaagcccttcaaggagatccagctggacccctactgcagactgagcgagcccaaggtggagaacttcagcgtggccggcaagatccacaccgtgaagatcgagcacgtgagctacaccgagaagagaaagtaccacagcaagaccgaggtggtgcacgagcccgacatcgagcagatgctgaagctgggcagcaccagctaccacgacttcctggacttcctgaccaccgtggaggaggagctgatgaagctgcccgccgtgagcaagcccaagaagaactacgaggagcaggagatcagcctggagatcgtggacaacttctggggcaaggtgaccaaggagggcaagttcgtggagagcgccgtgatcacccagatctactgcctgtgcttcgtgaacggcaacctggagtgcttcctgaccctgaacgacctggagctgcccaagagagacgagagctactacgagaaggacagcgagaagaagggcatcgacatcctggactaccacttccacaagtgcgtgaacgtgcaggagttcgagcagagcagaatcatcaagttcgtgcccctggacgcctgcagattcgagctgatgagattcaagaccctgtacaacggcgacaacctgcccttcagcctgaagagcgtggtggtggtgcagggcgcctacgtggagctgcaggccttcgtgaacatggccagcctggcccagagaagcagctacgccggcagcctgagaagctgcgacaacatcagaatccacttccccgtgcccagccagtggatcaaggccctgtggaccatgaacctgcagagacagaagagcctgaaggccaagatgaacagaagagcctgcctgggcagcctgcaggagctggagagcgagcccgtgatccaggtgaccgtgggcagcgccaagtacgagagcgcctaccaggccgtggtgtggaagatcgacagactgcccgacaagaacagcagcctggaccacccccactgcctgagctacaagctggagctgggcagcgaccaggagatccccagcgactggtaccccttcgccaccgtgcagttcagcgtgcccgacacctgcgccagcagaaccgaggtgagaagcctgggcgtggagagcgacgtgcagccccagaagcacgtgcagcagagagcctgctacaacatccagcccaagctgtacagaagcgtgatcgaggacgtgatcgagggcgtgagaaacctgttcgccgaggagggcatcgaggagcaggtgctgaaggacctgaagcagctgtgggagaccaaggtgctgcagagcaaggccaccgaggacttcttcagaaacagcatccagagccccctgttcaccctgcagctgccccacagcctgcaccagaccctgcagagcagcaccgccagcctggtgatccccgccggcagaaccctgcccagcttcaccaccgccgagctgggcaccagcaacagcagcgccaacttcaccttccccggctaccccatccacgtgcccgccggcgtgaccctgcagaccgtgagcggccacctgtacaaggtgaacgtgcccatcatggtgaccgagaccagcggcagagccggcatcctgcagcaccccatccagcaggtgttccagcagctgggccagcccagcgtgatccagaccagcgtgccccagctgaacccctggagcctgcaggccaccaccgagaagagccagagaatcgagaccgtgctgcagcagcccgccatcctgcccagcggccccgtggacagaaagcacctggagaacgccaccagcgacatcctggtgagccccggcaacgagcacaagatcgtgcccgaggccctgctgtgccaccaggagagcagccactacatcagcctgcccggcgtggtgttcagcccccaggtgagccagaccaacagcaacgtggagagcgtgctgagcggcagcgccagcatggcccagaacctgcacgacgagagcctgagcaccagcccccacggcgccctgcaccagcacgtgaccgacatccagctgcacatcctgaagaacagaatgtacggctgcgacagcgtgaagcagcccagaaacatcgaggagcccagcaacatccccgtgagcgagaaggacagcaacagccaggtggacctgagcatcagagtgaccgacgacgacatcggcgagatcatccaggtggacggcagcggcgacaccagcagcaacgaggagatcggcagcaccagagacgccgacgagaacgagttcctgggcaacatcgacggcggcgacctgaaggtgcccgaggaggaggccgacagcatcagcaacgaggacagcgccaccaacagcagcgacaacgaggacccccaggtgaacatcgtggaggaggaccccctgaacagcggcgacgacgtgagcgagcaggacgtgcccgacctgttcgacaccgacaacgtgatcgtgtgccagtacgacaagcagggcgacaccagagtgagacacggccagcagtag

SEQ ID NO: 75763 - DNA, 3477 bp, Artificial Sequence
  derived and/or modified sequence
atgtgttccacaaaccccgggaagtgggttacatttgacgacgaccccgccgtgcagtccagccagaagtcaaagaattttccactcgagaatcaaggcgtctgtcgacccaacgggttgaaactgaatctacccggccttcgggaatttccctcgggctctagctccaccagcagtactcctctgagcagccccatcgtggatttctactttagtcctggcccacccagcaactctcctctgagcacccctacaaaggatttccccggatttccaggcattcccaaggccggtactcatgtactctacccgattccagagtcgtcatcagattctcccctggccatttctggaggcgagagctcactgctccctacacggcctacctgcttaagccatgcgctactgccatcagaccattcatgcacccacccaacccctaaggtgggactcccagacgaagtaaatccacagcaggccgagtctttgggcttccagtcagatgatctcccacagtttcagtatttccgcgaggattgcgccttttcgagtcctttctggaaagacgagggaagtgactcacattttactcttgatccgcctggctctaagaaaatgttcagttctcggaataaagagatgcctattgatcaaaagtcactgaacaagtgctctctgaactacatctgtgaaaaattggaacatcttcagtcagctgagaatcaggactccctgagatctctttctatgcattgtctgtgcgcagaagagaacgctagtagctttgtgcctcacacactcttcaggtcacagccaaaatctgggtggtcattcatgctcaggatccccgaaaagaagaacatgatgtcctcgagacagtggggacctatcttcctcaaggtgttgcctggggggatcctgcagatgtactacgagcagggactcgagaagcctttcaaagaaatacagctggatccttattgccgattatccgagcccaaagtggagaatttctctgttgcaggaaaaatacacacggtcaaaatcgagcatgtgtcatatacggagaagcgcaaatatcacagtaaaacggaggtggttcatgagccggacatcgaacagatgttaaagctggggtcgactagttatcacgacttcctggattttctaactacagtggaggaagagctgatgaagctgcctgccgtgtcgaagcccaaaaagaattacgaggagcaagaaatctcccttgaaattgtcgacaacttttgggggaaggtcactaaagagggcaagtttgtggaatcagcggtgataactcagatctattgtttgtgttttgtgaacggcaacttagaatgtttccttacactgaatgatctggaactgccgaaaagagatgagagttactatgagaaggactcggaaaagaaagggatcgatatcttggattatcacttccataaatgtgtgaatgtacaggaatttgaacagtctcgtatcatcaaattcgtccccctcgatgcatgtaggtttgaactaatgagattcaagaccctttacaacggagataatctgcccttttcactgaaatctgtggtggtggtgcagggcgcctacgttgagttgcaggcatttgtgaacatggcaagcctggcccaacgctccagctacgctgggtcgctgcggtcctgcgacaatatcagaatccattttccagtgccaagtcagtggattaaggccctgtggactatgaatctgcaaaggcagaagagcttgaaggctaaaatgaaccggcgagcctgcctcggaagcctgcaggagctggagtcagagccagtgatccaggttacagtggggtccgcaaagtacgagtcagcctaccaggcagtcgtgtggaaaatcgaccgactgcccgacaaaaacagcagtttagatcatccccactgccttagctacaaactggagctggggtctgatcaggaaataccatccgactggtacccattcgctacggtgcagttttcggtccccgatacctgtgccagcaggacagaggtgagatccctgggggtggagagcgacgtgcagccacagaagcatgtgcagcagagagcgtgctataacatccaaccaaagctgtacaggtccgtgatcgaagacgtgattgagggtgtgagaaacctattcgctgaagagggaattgaagaacaggtgctcaaggatctgaaacagctttgggaaacaaaggtcttgcagtccaaggcaaccgaggattttttccgcaactccatacagtcccccctgtttacattacagttgccccattctttgcaccagacccttcagagtagcacagcctctctcgtgatccccgccggacggacgttgcctagctttacaacggctgagctcggaacctccaactcaagtgccaatttcacatttcccggttaccctattcacgtgccggctggcgtgactttgcagacggtgagcgggcatctgtataaagtcaacgtgcccattatggtaacggaaacatcaggcagggccgggatcctgcagcatcctatacaacaggtctttcaacagctgggccaaccctccgtgattcagactagcgtgccacagctgaacccatggtcgctccaggcgacgacagagaaaagccagaggattgaaaccgtcctccagcaacccgcaatcctgccttctggccctgttgataggaagcacctcgaaaatgctacatctgatatccttgtgtcccctggtaatgagcataaaatcgtgcccgaggccttactgtgtcaccaagagagctcccattacatcagtctgcctggcgtagtattctcgccacaggtgagccaaacaaacagcaacgtagaaagcgtgctgagcgggtccgcatctatggcacagaatctgcacgacgaatcactgtccacctcccctcatggcgcactgcaccagcacgttactgacatccaactccacattctgaagaacaggatgtacgggtgcgatagcgtcaaacaaccacgtaatatagaggaaccttcaaatatccccgtgagcgaaaaggacagcaacagccaggtggaccttagcattcgggtgaccgatgacgatataggggagattattcaagtagacggatccggtgacacatctagcaacgaagaaatcggctccacacgggatgcagatgagaacgaattcctaggaaatattgatgggggggatctcaaagtgccagaggaagaggctgatagcatttccaatgaggacagtgccactaatagcagcgacaatgaggacccccaagtgaacattgtggaggaggacccgttgaattctggcgacgatgtatcagagcaggacgtccccgatctgttcgatacggacaacgtcattgtttgccagtacgacaagcagggtgatacaagagttcggcacggccagcagtag

SEQ ID NO: 75764 - DNA, 3477 bp, Artificial Sequence
  derived and/or modified sequence
atgtgcagcaccaaccctgggaagtgggtgacctttgatgatgatcctgctgtgcagagcagccagaagagcaagaacttccccctggagaaccagggcgtgtgccggcccaacggcctgaagctgaacctgcccggcctgcgggagttccccagcggcagcagcagcaccagcagcacccccctgagcagccccatcgtggacttctacttcagccctggcccccccagcaacagccccctgagcacccccaccaaggacttccctggcttccctggcatccccaaggccggcacccacgtgctgtaccccatccctgagagcagcagtgacagccccctggccatctctggaggagagagcagcctgctgcccacccggcccacctgcctgagccacgccctgctgcccagcgaccacagctgcacccaccccacccccaaggtgggcctgcctgatgaggtgaacccccagcaggccgagagcctgggcttccagagtgatgacctgccccagttccagtacttccgggaggactgtgccttcagcagccccttctggaaggatgagggcagtgacagccacttcaccctggaccccccaggcagcaagaagatgttcagcagcaggaacaaggagatgcccatcgaccagaagagcctgaacaagtgcagcctgaactacatctgtgagaagctggagcacctgcagagcgctgagaaccaggacagcctgcggagcctgtccatgcactgcctgtgtgccgaggagaatgccagcagctttgtgccccacaccctcttccgcagccagcccaagagcggctggagcttcatgctgcgcatccctgagaagaagaacatgatgagcagccggcagtggggccccatcttcctgaaggtgctgcccggcggcatcctgcagatgtactatgagcagggcctggagaagcccttcaaggagatccagctggacccctactgccgcctgtctgagcccaaggtggagaacttctctgtggccggcaagatccacacagtgaagattgaacatgtgtcctacacagagaagaggaagtaccacagcaagacagaggtggtgcatgagccagacatcgagcagatgctgaagctgggcagcaccagctaccatgacttcctggacttcctgaccaccgtggaggaggagctgatgaagctgcctgctgtgtccaagcccaagaagaactatgaggagcaggagatcagcctggagatcgtggacaacttctggggcaaggtgaccaaggagggcaagtttgtggagagcgctgtgatcacccagatctactgcctgtgctttgtgaatggaaacctggagtgcttcctgaccctgaatgacctggagctgcccaagagagatgagagctactatgagaaggacagcgagaagaagggcatcgacatcctggactaccacttccacaagtgtgtgaatgtgcaggagtttgagcagagccgcatcatcaagtttgtgcccctggatgcctgccgctttgagctgatgaggttcaagaccctgtacaacggggacaacctgcccttcagcctgaagtctgtggtggtggtgcagggcgcctacgtggagctgcaggcctttgtgaacatggccagcctggcccagaggagcagctatgccggcagcctgcggagctgtgacaacatccgcatccacttccctgtgcccagccagtggatcaaggccctgtggaccatgaacctgcagaggcagaagagcctgaaggccaagatgaacagaagagcctgcctgggcagcctgcaggagctggagagcgagcctgtgatccaggtgacagtgggcagcgccaagtatgagagcgcctaccaggccgtggtgtggaagattgaccggctgcctgacaagaacagcagcctggaccacccccactgcctgagctacaagctggagctgggcagtgaccaggagatccccagcgactggtacccctttgccaccgtgcagttctctgtgcctgacacctgtgccagcaggacagaggtgcgcagcctgggcgtggagagtgatgtgcagccccagaagcacgtgcagcagagggcctgctacaacatccagcccaagctgtacagatctgtgattgaagatgtgattgaaggagtgaggaacctgtttgctgaggagggcatcgaggagcaggtgctgaaggacctgaagcagctgtgggagaccaaggtgctgcagagcaaggccacagaggacttcttcaggaacagcatccagagccccctcttcaccctgcagctgccccacagcctgcaccagaccctgcagagcagcacagccagcctggtgatcccagctggccgcaccctgcccagcttcaccacagctgagctgggcaccagcaacagcagcgccaacttcaccttccctggctaccccatccacgtgcctgctggggtgaccctgcagacagtgtctggccacctgtacaaggtgaatgtgcccatcatggtgacagagaccagcggccgggccggcatcctgcagcaccccatccagcaggtgttccagcagctgggccagcccagcgtcatccagacctctgtgccccagctgaacccctggagcctgcaggccaccacagagaagagccagagaattgagaccgtgctgcagcagcctgccatcctgcccagcggccctgtggacaggaagcacctggagaatgccaccagtgacatcctggtgtccccaggaaatgagcacaagatcgtgcctgaggccctgctgtgccaccaggagagcagccactacatcagcctgcccggggtggtgttcagcccccaggtgtcccagaccaacagcaatgtggagagcgtgctgagcggcagcgcctccatggcccagaacctgcatgatgagagcctgagcaccagcccccacggggccctgcaccagcacgtgacagacatccagctgcacatcctgaagaacaggatgtatggctgtgacagcgtgaagcagcccagaaatattgaggagcccagcaacatccctgtgtctgagaaggacagcaacagccaggtggacctgagcatccgggtgacagatgatgacattggagagatcatccaggtggatggcagcggggacaccagcagcaatgaggagatcggcagcaccagagatgctgatgaaaatgagttcctgggcaacattgatggaggagacctgaaggtgcctgaggaggaggccgacagcatcagcaatgaagacagcgccaccaacagcagtgacaatgaagacccccaggtgaacatcgtggaggaggaccccctgaacagcggagatgatgtgtctgagcaggatgtgcctgacctgtttgacacagacaacgtgattgtgtgccagtatgacaagcagggcgacaccagggtgagacatggccagcagtag

SEQ ID NO: 75765 - DNA, 3477 bp, Artificial Sequence
  derived and/or modified sequence
atgtgcagcaccaaccccggcaagtgggtgaccttcgacgacgacccagccgtgcagtcctcccaaaaatccaagaacttccccctcgaaaaccagggcgtgtgtagaccaaacggactgaaacttaatcttccagggctgagggaattcccaagcggaagctcatcaacgagctcgacccccctaagtagcccaatcgtagatttttatttctcccctggacccccctccaattcaccactttccacgccaaccaaagactttcccggatttccaggaatccctaaggccggaacacacgtattgtatcctattcctgagtcatcctccgactcccctttggctatctccggcggcgaatcatctcttctccctacgagaccgacctgcctctcccacgctctgcttccctctgatcacagctgcacgcatccgactcccaaggttggactgcccgacgaagtaaacccacagcaggccgagtcgctcggcttccagtcagacgaccttccccagttccagtactttcgcgaagactgcgcgttcagctctccattttggaaggacgagggctccgactcccattttaccttagaccctcctggctcgaaaaaaatgttttcttctcgtaataaagaaatgcctatcgaccagaaatctctgaataaatgttccctcaattacatttgcgagaaactggaacacctccagtccgctgaaaatcaagactccctgcgatctcttagtatgcactgtctgtgcgccgaagagaacgcgtcgagctttgttcctcatactctgttccgatcgcagcccaaatcaggctggtctttcatgctccgcatcccagagaagaagaatatgatgtcctctcgccagtgggggcccatcttcctcaaagtgttgcctggtgggatcctccagatgtattatgagcagggacttgaaaagcccttcaaggaaatccagttggatccttactgccgcctctcggagccaaaggtggaaaatttttcagttgcaggcaagatacataccgtaaagatcgaacacgtgtcttacactgagaagaggaaataccatagcaagacagaggtggtgcacgagccggatattgaacagatgcttaaactgggaagtacctcataccacgactttctagattttcttaccaccgttgaggaggagctgatgaagctaccagccgtgagcaagcccaaaaaaaactacgaggagcaggagatcagtctggaaattgttgacaacttctggggaaaggtgacaaaggagggtaagtttgtggaatctgctgttattacgcagatttattgtctgtgctttgttaatggcaaccttgaatgttttctcacattgaacgacttggagctccccaaaagggacgaatcatactacgagaaggactctgagaagaaaggtatcgacattctggactaccactttcacaagtgcgtaaatgttcaggagttcgagcagtccagaatcatcaaatttgtgcctttagacgcctgtagatttgaattaatgagattcaagactctgtacaacggtgataatctccccttcagcctaaagtccgtagttgtggtccaaggagcctacgtcgagttgcaggccttcgtgaacatggcctccctagcccagaggtcctcttacgcgggctccttaagaagttgcgacaatattcgtatccatttcccagtgccttcccagtggattaaggctctatggactatgaatctacagcgacagaaatccctgaaagctaaaatgaaccggagggcatgtttggggtctctacaggagctcgagagcgagccggtgatccaagtgacagtcggcagcgcaaagtacgagtcagcctaccaggcagtggtctggaagatagatcgcctgcccgataagaatagctccctagaccacccccactgcctttcctataagctcgagctcggttccgaccaggagatcccgagcgattggtatccttttgcaactgtacagttcagtgtccctgacacatgtgcttcccgcaccgaagtacgcagtttgggggtagaaagcgacgtccagcctcaaaaacacgtgcagcagcgtgcttgctataacatccagcccaagctgtacagaagtgtcattgaggacgtgatcgagggcgtacgcaacctcttcgctgaagaaggcatagaggaacaagtcctaaaagatctgaagcagttatgggagaccaaggtgctgcaatccaaagctacagaggacttcttccgcaacagcatacagtcaccattgttcactctccagctacctcacagtctacaccagaccttgcagtcctccacggcaagcctagtgattccagccggccgtacgctgcctagttttaccactgctgagctgggcacgagtaacagttccgctaacttcacctttcctggctacccaatccacgttcccgctggcgtaaccctgcagactgtgagcggacatctgtataaggttaacgtgcccatcatggtgactgagacatctggccgggcagggatccttcagcatcccatccaacaggtctttcaacagcttggtcaaccttctgttattcagaccagtgtgccccagctgaatccgtggagcttacaggccacgaccgagaagtcccagcgaatcgagactgtccttcaacagcctgcaattttgccctcaggacccgtggaccgcaagcacttggagaacgccactagcgacatcctggtgagccccgggaacgaacacaagatcgtgccagaagctcttctttgccaccaggaatcaagtcactatatttcactgccaggagtcgttttcagcccccaggtttctcagaccaactctaacgtcgagagcgtgctgagtggatctgcttctatggcacaaaacctgcacgatgagtcactcagcacctctccgcacggagctctgcatcagcatgtcacggacatacagcttcacattctgaagaatcggatgtacggttgcgatagtgtgaagcaacccaggaatatcgaggagccatccaatattccagtcagcgagaaagatagcaattcccaggtggatctgtctattagggtcacagacgacgatattggggaaattattcaggttgacgggtctggcgacaccagctccaacgaggagatcggcagcactcgagacgctgatgagaacgaatttcttggaaacatcgatggaggcgatctgaaggttccagaggaagaggctgactctatttcaaatgaggactctgcgacaaactccagtgacaacgaagacccccaggtcaacatcgttgaggaggaccctctcaactctggcgatgacgtgtcagagcaggatgtacccgacctctttgacaccgataatgttattgtctgccaatatgacaaacagggcgatacaagggtgaggcatggccagcaatag

SEQ ID NO: 75766 - DNA, 3477 bp, Artificial Sequence
  derived and/or modified sequence
atgtgttcaactaaccctggcaaatgggtgacgttcgatgatgaccccgctgtgcagtcatctcagaagtccaaaaattttccactcgaaaatcagggggtgtgtaggcccaacggactgaaacttaatcttccagggttacgcgagttcccctctggctcttcttctacctcatctacccccctctcatctcctattgtggacttttacttctcacccggacctccctcgaactctccactgagcacaccaaccaaggactttcctggctttcccggaatccccaaagcaggcacccatgtgctgtatccgatacccgagagtagcagcgactcaccactcgcaatcagcggtggtgaatcctcacttctgcctacccggcctacctgcttgagtcatgctctcctgccttcagaccacagctgtacgcatccgacaccaaaggtgggactccccgacgaagtcaacccacagcaagctgaatctctgggtttccaaagtgatgatctgccccagttccagtactttcgagaggactgcgctttctctagcccattctggaaggacgaaggaagtgacagccactttacgttggacccacctggaagcaaaaagatgttctcgtctagaaataaagagatgccgatcgatcaaaaaagtctgaataagtgttcactcaattatatttgcgaaaaacttgaacacctgcagtcggcagagaaccaggattccctccgctccctgtccatgcactgcctttgtgctgaagaaaacgcttccagcttcgtcccacataccctctttaggtctcagcccaaaagtggctggagttttatgctgaggatcccagagaaaaaaaacatgatgtcaagcagacagtggggtcccatttttttgaaggtattgccaggtggaatcctccagatgtattacgaacagggtctggagaagccgttcaaggagatccagttagacccttactgcaggttaagcgagcctaaagttgaaaacttctccgtcgcaggtaagatacacaccgtgaaaatcgaacacgtctcgtacaccgaaaagaggaagtatcattcaaagacagaagtcgtacatgagccggatatcgaacagatgctgaagctaggaagtactagttaccacgattttttagactttctgaccactgtagaagaagagctcatgaagttacctgctgtgtctaagccgaagaaaaattacgaggaacaggagatcagcctggagattgttgataacttttgggggaaagtaacgaaggagggtaagtttgtggagagtgctgttattacgcaaatctactgtctgtgttttgtgaacggaaatctggaatgcttcttgactctgaatgacttggagctgcctaaaagggacgagagttattatgaaaaggacagcgagaaaaaagggattgacattctcgactatcattttcacaagtgcgttaacgttcaggagttcgaacagagccgcattatcaagttcgttccattggacgcctgcagattcgagctgatgcgcttcaaaaccctttataatggagacaacttgcccttcagtcttaagagcgtggtggtggtgcagggggcatacgtggagctgcaggcttttgtgaacatggcttcgttggctcagaggagcagctacgccggaagcctccgatcctgtgataatattcggatccacttccctgtgccatcgcagtggatcaaagctctctggactatgaatcttcagcgacagaagtcactgaaggctaagatgaatcggcgagcatgcctgggatctctccaggagctcgaatctgaaccagttatccaagtcaccgttggaagcgctaaatatgaaagcgcctatcaagccgtggtgtggaaaatcgatagactccccgataagaactcaagcctggatcatcctcactgtctgtcatataaactggagctgggaagtgatcaggagatacccagcgactggtatcctttcgccacggttcagttctccgtgccagacacttgcgcgagtaggacggaagtccgtagcttaggggtggagagtgacgtccagcctcagaagcacgtgcagcaacgtgcttgctataacattcagcctaaactgtatagaagcgtgatcgaggatgtaatcgagggggtaaggaacctttttgcagaggaaggaatcgaggagcaggtcctgaaggacctaaaacagctatgggaaaccaaggttcttcagagcaaggctacagaggacttcttccgcaattctatccagtctccgctgtttacgcttcagctgccccattctctgcaccagaccctgcagtcttccactgctagcctagtaatacccgctggacgtaccttgcctagctttacaaccgccgaactcggaacctctaactctagtgccaacttcaccttccctggctatcctattcacgtgccagcgggtgtgacgctccagaccgtgtctggccatctgtacaaggtgaacgtgcccatcatggtcactgaaacctctggtcgcgctggcattctgcagcacccaattcagcaggtattccaacagctgggacaaccctccgtgatccagacctctgtaccacagttgaacccttggtccctccaggcaaccacagagaaatcgcaacggatcgagactgtccttcaacagccagctatcctcccaagcggtcctgtcgatcgcaagcacctggagaatgcgacctccgacatactggtatctcctggcaacgaacacaagatcgtacccgaagccttactgtgccaccaagaaagtagccactacatctccctgcccggagtggttttttctccgcaggtgagccagactaactcaaacgtcgagtctgttctgtccggttctgcaagtatggcccagaaccttcatgacgaaagtttgagtacttctccccacggagcgctgcatcagcacgttacagatatccagctgcacattctgaagaaccgaatgtatgggtgcgacagcgtgaagcagcctcgaaatatcgaggagcctagcaatatcccagtgtccgagaaagactcaaacagccaagttgatctctctatcagggtaactgacgatgatatcggcgaaatcattcaggtggacggaagtggggacacctctagtaacgaagaaatcggcagtacccgggatgcagacgagaatgagtttctggggaatatagacggcggagatctgaaagtccccgaagaggaggcagattccatctctaatgaggatagcgctaccaattcttctgacaatgaagatccacaggtcaacattgtggaggaagatcctttgaattcaggagacgacgtctctgagcaggacgtccccgatttgttcgacactgataacgtgatcgtatgtcagtatgacaagcaaggagataccagagttcgacacgggcagcagtag

SEQ ID NO: 75767 - DNA, 3772 bp, Artificial Sequence
  derived and/or modified sequence
agaagatgcgctggagggaagagaacggagcgtcggacaccagaaaaactttgggggattcgggagtcaacctatttgatttcttgacaagaccacaatctgatcccaaagatgtgctccacaaatccaggcaaatgggtcacctttgatgatgatcctgctgttcaatcttctcaaaagtcaaagaattttcctctggagaatcaaggtgtctgtagaccaaatggactgaagctgaaccttcctggcctcagggaatttcccagtggatcttcctccaccagcagcactcctctctcctcccccattgtagatttttatttcagtccaggacctccaagtaactctcctctttctacacctaccaaagacttcccaggttttcctggcatccccaaagcagggactcatgtgctttatcctattccagaatcatcttcagacagcccactcgcaatatcaggaggagaatcttccttactgcctaccagaccaacatgtttatcccatgccttgttacccagtgaccactcatgtacacatccaactcccaaagtaggtcttccagatgaagttaatcctcaacaggctgaaagcctaggattccaaagtgatgatctcccccagtttcagtattttcgagaggactgtgctttttcaagtccattttggaaagatgaaggcagtgattcccatttcacccttgacccaccaggaagcaaaaagatgttctcatcaagaaacaaggagatgcctattgaccaaaaaagcctaaataagtgttcactcaactatatctgtgagaagcttgaacatctccagtcagctgagaaccaagactcacttagaagtttgtctatgcactgtctatgtgctgaagaaaatgcctcttcctttgtcccccacacactcttcaggagtcagccaaaatccggatggtctttcatgctgagaattcctgagaagaagaatatgatgtcttcccggcaatggggaccaatttttctgaaagttttgcctggaggaattttgcagatgtattatgaacagggattagaaaaaccatttaaagagatacagcttgatccatattgtaggctttctgaacccaaggttgagaacttcagtgtagcaggaaaaatccacactgtgaagattgaacatgtgtcttacacagaaaaaaggaaataccattctaagacagaagtagttcatgaacctgacatagagcagatgctgaagttggggtccacatcgtaccatgacttccttgactttctgactactgtggaggaggagctgatgaagttgccagctgtttcaaaaccaaaaaagaactacgaggagcaagaaatttccttggaaattgtggacaacttttggggtaaagtcacaaaagaaggaaaatttgttgaaagtgctgtgataactcaaatttattgcctctgctttgtgaatgggaacctggaatgctttttaaccttgaatgaccttgagttgccgaagcgagatgaatcctattatgagaaggactcagaaaaaaaggggattgatattcttgactaccattttcataagtgtgtgaatgtacaagaatttgagcaatcaagaatcattaagtttgtacctctggatgcctgccggtttgagctgatgcgtttcaagactttgtataatggggataatcttcccttttccttgaagtctgtagtggttgtccagggagcatacgtggaacttcaggcttttgtcaacatggcctcattggcgcagaggtcatcctatgctggttccttaaggtcctgtgacaatataaggatacactttcctgtcccatcgcagtggatcaaggccctttggaccatgaacctccagaggcagaagtctctgaaagctaaaatgaaccgccgagcatgtctggggagtttacaggaacttgaatctgaacctgtcattcaagtcactgtggggtcagcaaaatatgagagtgcctaccaggcagtggtatggaagatagatcggcttccagacaaaaattcaagtctagatcatccccattgtctgtcatacaaattagagcttggatcagaccaagaaattccctctgattggtatccatttgctactgttcagttttccgtgcctgacacctgtgcctcaaggacagaggtcaggtctctgggagtggagagtgatgtccagccacagaaacatgttcagcagcgagcttgctacaacatccagcctaaactctacagatctgtaattgaagatgtaattgaaggagttcggaatctatttgctgaagaaggtatagaggaacaagttttaaaagacttgaagcagctctgggaaaccaaggttttgcagtctaaagcaacagaagacttcttcagaaatagcatccaatcacctctgtttactcttcagttgccgcacagcttgcaccaaacattgcaatcgtcaacagcatcattagttattcctgctggtagaactcttccaagttttaccacagcagaactgggcacttcaaactccagtgcaaactttacttttcctggttatcccattcatgtaccagcaggtgtgacactacagactgtatctggtcacctttataaagtcaatgtaccaattatggtgacagagacttctggaagagcaggtattcttcagcatccaattcagcaagtatttcaacagcttggccagccttcagtaatacaaactagtgttccacaattgaatccatggtctcttcaagcaactactgaaaaatcacagagaattgaaaccgtgctacagcaacccgcaattctaccttctgggccagtagataggaaacacttagaaaatgccaccagtgatatacttgtatctcctggaaatgagcataaaatcgtgcctgaagctttgttgtgtcatcaggaaagttctcactatatcagtcttccaggtgttgtattttctccacaggtctctcaaacaaattctaatgtggagtcagtgctcagtggttcagctagcatggctcaaaatctgcatgatgagtccctctccacaagccctcatggggctctccaccagcacgtgactgatattcagcttcatattcttaaaaataggatgtatggatgtgattctgtaaagcaaccaagaaatatagaggaacccagcaacatacctgtatcagagaaggattctaattctcaggtggatttaagcattcgggttactgatgatgatattggtgaaataattcaagtagatggaagcggtgatacatcttccaatgaagaaataggaagtacaagagatgcagatgagaatgaatttctagggaatattgacgggggagatctgaaggtacctgaagaagaagctgacagtatttcaaatgaggattcagccacaaacagtagtgataatgaagaccctcaagtaaacattgtagaagaggaccctttaaattctggagatgatgttagtgaacaggatgtgccagacctgtttgacacggataatgttattgtctgtcagtatgataagcagggagataccagggttcgtcatgggcagcaatgactacgatggacaagaagatagaggccctaatcctaattttctgagcaccatggaagccccctggattctagggagaccttgaggagaaagaagactcctgtaaatgcctgacattgaaattcctgcaagtctaggagcatgtgaactcaaaatggaaattaatttgatttaataaaaataaaga

SEQ ID NO: 75768 - protein, 1135 aa, Artificial Sequence
  derived and/or modified sequence
MCSTNPGKWVTFDDDPAVQSSQKSKNFPLENQGVCRPNGLKLNLPGLREFPSGSSSTSSTPLSSPIVDFYFSPGPPSNSPLSTPTKDFPGFPGIPKAGTHVLYPIPESSSDSPLAISGGESSLLPTRPTCLSHALLPSDHSCTHPTPKVGLPDEVNPQQAESLGFQSDDLPQFQYFREDCAFSSPFWKDEGSDSHFTLDPPGSKKMFSSRNKEMPIDQKSLNKCSLNYICEKLEHLQSAENQDSLRSLSMHCLCAEENASSFVPHTLFRSQPKSGWSFMLRIPEKKNMMSSRQWGPIFLKVLPGGILQMYYEQGLEKPFKEIQLDPYCRLSEPKVENFSVAGKIHTVKIEHVSYTEKRKYHSKTEVVHEPDIEQMLKLGSTSYHDFLDFLTTVEEELMKLPAVSKPKKNYEEQEISLEIVDNFWGKVTKEGKFVESAVITQIYCLCFVNGNLECFLTLNDLELPKRDESYYEKDSEKKGIDILDYHFHKCVNVQEFEQSRIIKFVPLDACRFELMRFKTLYNGDNLPFSLKSVVVVQGAYVELQAFVNMASLAQRSSYAGSLRSCDNIRIHFPVPSQWIKALWTMNLQRQKSLKAKMNRRACLGSLQELESEPVIQVTVGSAKYESAYQAVVWKIDRLPDKNSSLDHPHCLSYKLELGSDQEIPSDWYPFATVQFSVPDTCASRTEVRSLGVESDVQPQKHVQQRACYNIQPKLYRSVIEDVIEGVRNLFAEEGIEEQVLKDLKQLWETKVLQSKATEDFFRNSIQSPLFTLQLPHSLHQTLQSSTGHLYKVNVPIMVTETSGRAGILQHPIQQVFQQLGQPSVIQTSVPQLNPWSLQATTEKSQRIETVLQQPAILPSGPVDRKHLENATSDILVSPGNEHKIVPEALLCHQESSHYISLPGVVFSPQVSQTNSNVESVLSGSASMAQNLHDESLSTSPHGALHQHVTDIQLHILKNRMYGCDSVKQPRNIEEPSNIPVSEKDSNSQVDLSIRVTDDDIGEIIQVDGSGDTSSNEEIGSTRDADENEFLGNIDGGDLKVPEEEADSISNEDSATNSSDNEDPQVNIVEEDPLNSGDDVSEQDVPDLFDTDNVIVCQYDKIHRSKNKWKFYLKDGVMCFGGRDYVFAKAIGDAEW

SEQ ID NO: 75769 - DNA, 3408 bp, Artificial Sequence
  derived and/or modified sequence
atgtgcagcaccaaccccggcaagtgggtgaccttcgacgacgaccccgccgtgcagagcagccagaagagcaagaacttccccctggagaaccagggcgtgtgcagacccaacggcctgaagctgaacctgcccggcctgagagagttccccagcggcagcagcagcaccagcagcacccccctgagcagccccatcgtggacttctacttcagccccggcccccccagcaacagccccctgagcacccccaccaaggacttccccggcttccccggcatccccaaggccggcacccacgtgctgtaccccatccccgagagcagcagcgacagccccctggccatcagcggcggcgagagcagcctgctgcccaccagacccacctgcctgagccacgccctgctgcccagcgaccacagctgcacccaccccacccccaaggtgggcctgcccgacgaggtgaacccccagcaggccgagagcctgggcttccagagcgacgacctgccccagttccagtacttcagagaggactgcgccttcagcagccccttctggaaggacgagggcagcgacagccacttcaccctggacccccccggcagcaagaagatgttcagcagcagaaacaaggagatgcccatcgaccagaagagcctgaacaagtgcagcctgaactacatctgcgagaagctggagcacctgcagagcgccgagaaccaggacagcctgagaagcctgagcatgcactgcctgtgcgccgaggagaacgccagcagcttcgtgccccacaccctgttcagaagccagcccaagagcggctggagcttcatgctgagaatccccgagaagaagaacatgatgagcagcagacagtggggccccatcttcctgaaggtgctgcccggcggcatcctgcagatgtactacgagcagggcctggagaagcccttcaaggagatccagctggacccctactgcagactgagcgagcccaaggtggagaacttcagcgtggccggcaagatccacaccgtgaagatcgagcacgtgagctacaccgagaagagaaagtaccacagcaagaccgaggtggtgcacgagcccgacatcgagcagatgctgaagctgggcagcaccagctaccacgacttcctggacttcctgaccaccgtggaggaggagctgatgaagctgcccgccgtgagcaagcccaagaagaactacgaggagcaggagatcagcctggagatcgtggacaacttctggggcaaggtgaccaaggagggcaagttcgtggagagcgccgtgatcacccagatctactgcctgtgcttcgtgaacggcaacctggagtgcttcctgaccctgaacgacctggagctgcccaagagagacgagagctactacgagaaggacagcgagaagaagggcatcgacatcctggactaccacttccacaagtgcgtgaacgtgcaggagttcgagcagagcagaatcatcaagttcgtgcccctggacgcctgcagattcgagctgatgagattcaagaccctgtacaacggcgacaacctgcccttcagcctgaagagcgtggtggtggtgcagggcgcctacgtggagctgcaggccttcgtgaacatggccagcctggcccagagaagcagctacgccggcagcctgagaagctgcgacaacatcagaatccacttccccgtgcccagccagtggatcaaggccctgtggaccatgaacctgcagagacagaagagcctgaaggccaagatgaacagaagagcctgcctgggcagcctgcaggagctggagagcgagcccgtgatccaggtgaccgtgggcagcgccaagtacgagagcgcctaccaggccgtggtgtggaagatcgacagactgcccgacaagaacagcagcctggaccacccccactgcctgagctacaagctggagctgggcagcgaccaggagatccccagcgactggtaccccttcgccaccgtgcagttcagcgtgcccgacacctgcgccagcagaaccgaggtgagaagcctgggcgtggagagcgacgtgcagccccagaagcacgtgcagcagagagcctgctacaacatccagcccaagctgtacagaagcgtgatcgaggacgtgatcgagggcgtgagaaacctgttcgccgaggagggcatcgaggagcaggtgctgaaggacctgaagcagctgtgggagaccaaggtgctgcagagcaaggccaccgaggacttcttcagaaacagcatccagagccccctgttcaccctgcagctgccccacagcctgcaccagaccctgcagagcagcaccggccacctgtacaaggtgaacgtgcccatcatggtgaccgagaccagcggcagagccggcatcctgcagcaccccatccagcaggtgttccagcagctgggccagcccagcgtgatccagaccagcgtgccccagctgaacccctggagcctgcaggccaccaccgagaagagccagagaatcgagaccgtgctgcagcagcccgccatcctgcccagcggccccgtggacagaaagcacctggagaacgccaccagcgacatcctggtgagccccggcaacgagcacaagatcgtgcccgaggccctgctgtgccaccaggagagcagccactacatcagcctgcccggcgtggtgttcagcccccaggtgagccagaccaacagcaacgtggagagcgtgctgagcggcagcgccagcatggcccagaacctgcacgacgagagcctgagcaccagcccccacggcgccctgcaccagcacgtgaccgacatccagctgcacatcctgaagaacagaatgtacggctgcgacagcgtgaagcagcccagaaacatcgaggagcccagcaacatccccgtgagcgagaaggacagcaacagccaggtggacctgagcatcagagtgaccgacgacgacatcggcgagatcatccaggtggacggcagcggcgacaccagcagcaacgaggagatcggcagcaccagagacgccgacgagaacgagttcctgggcaacatcgacggcggcgacctgaaggtgcccgaggaggaggccgacagcatcagcaacgaggacagcgccaccaacagcagcgacaacgaggacccccaggtgaacatcgtggaggaggaccccctgaacagcggcgacgacgtgagcgagcaggacgtgcccgacctgttcgacaccgacaacgtgatcgtgtgccagtacgacaagatccacagaagcaagaacaagtggaagttctacctgaaggacggcgtgatgtgcttcggcggcagagactacgtgttcgccaaggccatcggcgacgccgagtggtag

SEQ ID NO: 75770 - DNA, 3408 bp, Artificial Sequence
  derived and/or modified sequence
atgtgcagtactaatccaggcaaatgggtgacctttgacgacgatcctgccgttcaatcttcccagaaaagcaagaactttccgctcgagaatcaaggagtttgcagaccgaatggactgaagctgaacctgcccggccttagagagtttccgtcgggtagcagttccacaagctcaacaccgctctcctctccgattgttgacttctacttctcacccggcccccctagcaacagccccctctcaacacccactaaggacttccccggttttccggggattccaaaagccggaacccatgtgctgtatcccattcccgagagttccagcgacagcccactggccatttcagggggcgaaagtagtctcctgcccacccgtcccacgtgcttgagccacgcgctcctgccctctgaccactcatgcacccaccctacaccgaaggtgggccttcccgacgaggtgaacccacaacaggccgaaagtctcggcttccagtccgacgatctgccccagtttcagtactttagagaagactgtgctttctcctcacccttttggaaggacgaaggctccgacagtcattttacattggacccaccaggaagcaagaagatgttctcatcaagaaataaagaaatgcctatagatcagaagtctctgaataagtgctccttgaattacatttgtgaaaaacttgaacatttacaatcagctgagaatcaggatagcctgcgaagcttgtcaatgcattgcctttgtgccgaagaaaacgcaagttcgttcgttccccataccctgttcagaagccagcccaaatccggttggtcttttatgctgcgcattcccgaaaagaaaaacatgatgtcaagccggcagtggggccccatttttctgaaggtgctgcccggcggtattctgcagatgtattatgagcagggactcgaaaagccctttaaagaaatacaactcgacccttattgtcgtctttccgaacctaaggtggagaacttctctgtggcaggcaagatccacactgttaagattgaacatgtgtcttacaccgaaaaacgaaagtaccattccaagaccgaggttgtgcacgagcctgacatagaacagatgttgaaacttggttccactagctaccacgacttcctcgactttctgaccacagtggaggaagagctgatgaaactacctgcagtgtcaaagccaaagaaaaactatgaagaacaggagatcagcctcgagatcgttgacaacttctggggcaaggtgactaaggaagggaaattcgtggaaagcgcggttatcacacagatctactgcctctgtttcgttaacggaaatcttgaatgtttcctgactctgaacgacctggagctgccaaaacgagatgagtcatactacgagaaagactcagaaaaaaaagggatcgacatattggactatcacttccacaagtgcgttaacgtccaggagtttgagcagtcccgtatcattaagtttgttcctctggatgcctgtaggttcgagctgatgcgttttaagactctctacaatggcgataatttacctttttccctgaagtcagtggtggtggtgcagggtgcgtacgtcgagctccaggccttcgtcaatatggccagcctagcacagcgatcctcttatgctggcagcctccgcagctgcgataacatcagaatccactttcccgtcccttcacagtggatcaaagctttatggactatgaatttacagcgacagaagtccctgaaagctaagatgaataggcgagcgtgcctggggagcctgcaggaactggagagtgaaccggtcatccaggtaactgtgggatctgcaaaatacgagagtgcttaccaggctgtggtgtggaagattgatagactgccagacaagaacagtagcctcgatcatcctcattgtttatcatacaagctagagctcggtagtgatcaagagattccgtccgactggtacccttttgccaccgtccagttctccgtgcctgatacatgcgcgagtcgcacagaagtccggagcctgggcgtggagagcgatgtgcaaccccagaagcacgtgcagcagagggcctgctataacattcaaccaaaactctacaggtccgtgatcgaggacgttattgagggcgtgagaaatctgttcgcagaagaaggaattgaggagcaagtgctcaaggacctcaaacaactctgggaaacaaaggtcctccagtccaaagccaccgaggattttttccggaactcgatccaatcacccttgttcacactccagctcccccactcattacaccagactctacaaagtagcaccggtcacctgtacaaggtcaatgtacctataatggttacagaaacctctggcagagcgggcatcctgcagcatccaatccagcaggtgttccagcagctcggccagccaagtgttatacagaccagcgtgccccagctgaacccgtggtcgctacaggctacgacagagaagtcccaaagaatagagactgtgttgcagcaacctgccatcttgcctagcggccctgttgaccggaaacatttggaaaacgcgacaagtgatattttggttagccctggcaatgagcacaaaattgtgccagaggcattgctctgtcaccaagaaagctcgcattatatcagccttcccggggtagtgttcagtcctcaggttagccagaccaattctaatgtggaaagtgtcttaagtggcagcgcctccatggcccaaaacctgcatgatgagtcgctttccacttctccacatggggccctccatcagcacgtgacagacatccaactgcatatactgaagaacagaatgtacggctgcgacagcgtaaaacagccacgtaatatagaagagccctctaacatcccggtatccgagaaggatagcaacagtcaggtcgaccttagcatacgcgtaactgacgatgacataggtgagatcatccaggtggacggatccggggataccagctcgaatgaggagataggatcaacgcgggatgccgatgagaacgaattcctggggaacatcgacggaggggatctgaaagtacccgaggaggaagccgactctatttccaacgaggattcagcgacaaatagcagtgacaacgaagaccctcaggtcaacatcgtggaggaagaccccctcaatagcggcgatgatgtcagtgaacaggacgttcctgatctctttgacacagataacgtcattgtctgccaatatgataagattcatagatccaaaaacaagtggaagttctatttgaaggatggtgtgatgtgtttcggaggaagggactacgtttttgcgaaagctatcggcgacgctgaatggtag

SEQ ID NO: 75771 - DNA, 3408 bp, Artificial Sequence
  derived and/or modified sequence
atgtgcagcaccaaccctgggaagtgggtgacctttgatgatgatcctgctgtgcagagcagccagaagagcaagaacttccccctggagaaccagggcgtgtgccggcccaacggcctgaagctgaacctgcccggcctgcgggagttccccagcggcagcagcagcaccagcagcacccccctgagcagccccatcgtggacttctacttcagccctggcccccccagcaacagccccctgagcacccccaccaaggacttccctggcttccctggcatccccaaggccggcacccacgtgctgtaccccatccctgagagcagcagtgacagccccctggccatctctggaggagagagcagcctgctgcccacccggcccacctgcctgagccacgccctgctgcccagcgaccacagctgcacccaccccacccccaaggtgggcctgcctgatgaggtgaacccccagcaggccgagagcctgggcttccagagtgatgacctgccccagttccagtacttccgggaggactgtgccttcagcagccccttctggaaggatgagggcagtgacagccacttcaccctggaccccccaggcagcaagaagatgttcagcagcaggaacaaggagatgcccatcgaccagaagagcctgaacaagtgcagcctgaactacatctgtgagaagctggagcacctgcagagcgctgagaaccaggacagcctgcggagcctgtccatgcactgcctgtgtgccgaggagaatgccagcagctttgtgccccacaccctcttccgcagccagcccaagagcggctggagcttcatgctgcgcatccctgagaagaagaacatgatgagcagccggcagtggggccccatcttcctgaaggtgctgcccggcggcatcctgcagatgtactatgagcagggcctggagaagcccttcaaggagatccagctggacccctactgccgcctgtctgagcccaaggtggagaacttctctgtggccggcaagatccacacagtgaagattgaacatgtgtcctacacagagaagaggaagtaccacagcaagacagaggtggtgcatgagccagacatcgagcagatgctgaagctgggcagcaccagctaccatgacttcctggacttcctgaccaccgtggaggaggagctgatgaagctgcctgctgtgtccaagcccaagaagaactatgaggagcaggagatcagcctggagatcgtggacaacttctggggcaaggtgaccaaggagggcaagtttgtggagagcgctgtgatcacccagatctactgcctgtgctttgtgaatggaaacctggagtgcttcctgaccctgaatgacctggagctgcccaagagagatgagagctactatgagaaggacagcgagaagaagggcatcgacatcctggactaccacttccacaagtgtgtgaatgtgcaggagtttgagcagagccgcatcatcaagtttgtgcccctggatgcctgccgctttgagctgatgaggttcaagaccctgtacaacggggacaacctgcccttcagcctgaagtctgtggtggtggtgcagggcgcctacgtggagctgcaggcctttgtgaacatggccagcctggcccagaggagcagctatgccggcagcctgcggagctgtgacaacatccgcatccacttccctgtgcccagccagtggatcaaggccctgtggaccatgaacctgcagaggcagaagagcctgaaggccaagatgaacagaagagcctgcctgggcagcctgcaggagctggagagcgagcctgtgatccaggtgacagtgggcagcgccaagtatgagagcgcctaccaggccgtggtgtggaagattgaccggctgcctgacaagaacagcagcctggaccacccccactgcctgagctacaagctggagctgggcagtgaccaggagatccccagcgactggtacccctttgccaccgtgcagttctctgtgcctgacacctgtgccagcaggacagaggtgcgcagcctgggcgtggagagtgatgtgcagccccagaagcacgtgcagcagagggcctgctacaacatccagcccaagctgtacagatctgtgattgaagatgtgattgaaggagtgaggaacctgtttgctgaggagggcatcgaggagcaggtgctgaaggacctgaagcagctgtgggagaccaaggtgctgcagagcaaggccacagaggacttcttcaggaacagcatccagagccccctcttcaccctgcagctgccccacagcctgcaccagaccctgcagagcagcacaggccacctgtacaaggtgaatgtgcccatcatggtgacagagaccagcggccgggccggcatcctgcagcaccccatccagcaggtgttccagcagctgggccagcccagcgtcatccagacctctgtgccccagctgaacccctggagcctgcaggccaccacagagaagagccagagaattgaaacagtgctgcagcagcctgccatcctgcccagcggccctgtggacaggaagcacctggagaatgccaccagtgacatcctggtgtccccaggaaatgagcacaagatcgtgcctgaggccctgctgtgccaccaggagagcagccactacatcagcctgcccggggtggtgttcagcccccaggtgtcccagaccaacagcaatgtggagagcgtgctgagcggcagcgcctccatggcccagaacctgcatgatgagagcctgagcaccagcccccatggagccctgcaccagcacgtgacagacatccagctgcacatcctgaagaacaggatgtatggctgtgacagcgtgaagcagcccaggaacatcgaggagcccagcaacatccctgtgtctgagaaggacagcaacagccaggtggacctgagcatccgggtgacagatgatgacatcggggagatcatccaggtggatggcagcggggacaccagcagcaatgaggagatcggcagcaccagagatgctgatgaaaatgagttcctgggcaacattgatggaggagacctgaaggtgcctgaggaggaggccgacagcatcagcaatgaagattctgccaccaacagcagtgacaatgaagacccccaggtgaacatcgtggaggaggaccccctgaacagcggagatgatgtgtctgagcaggatgtgcctgacctgtttgacacagacaacgtcatcgtgtgccagtatgacaagatccacaggagcaagaacaagtggaagttctacctgaaggatggagtgatgtgctttggaggccgggactatgtgtttgccaaggccatcggagatgctgagtggtag

SEQ ID NO: 75772 - DNA, 3408 bp, Artificial Sequence
  derived and/or modified sequence
atgtgcagcaccaaccccggcaagtgggtgaccttcgacgacgaccccgccgtgcagagctcccagaagtcgaaaaacttccccctagagaatcagggcgtatgtagaccaaatggacttaagctgaacttgccggggctgagagaatttccttccgggagcagttcaaccagctcaaccccccttagttctcccatcgtggatttttatttttctcctggaccaccatctaactcacctctgagtacaccaaccaaagactttcctggattcccaggcatccctaaagccgggacccacgtgctgtatcctattcctgagtcaagtagcgactccccactggccatttccggtggcgaatcctccctgctcccaacacgccccacttgcctgtcacacgctttgttgccctcggatcatagctgcacccaccccactccaaaggtgggactccctgatgaagtgaacccccagcaggcggagagcctgggctttcagagcgacgacttgcctcagttccagtatttcagggaagactgcgcctttagctctcctttttggaaggacgagggctcagattcacatttcaccctggatccccccggatctaaaaagatgttctcatcccgcaacaaagaaatgccaatcgaccagaaaagcctaaacaagtgcagtctgaactacatatgtgaaaagctggagcacctccaatctgccgagaaccaggatagccttcggtcactatctatgcactgcttatgtgccgaagagaatgccagctcattcgttccccatacccttttcagaagtcagccaaaatccgggtggtcttttatgttgcggatccccgaaaagaagaatatgatgagtagtcggcagtggggcccaatcttccttaaggtccttcccgggggcatcttgcaaatgtactacgaacagggactggaaaagcctttcaaagaaatccagctcgacccctactgcaggttgagcgaaccaaaggtggaaaacttttctgtcgccggcaagatccacacggtcaagatcgagcacgtgagttacaccgaaaaacgcaaataccacagtaagacagaggttgttcacgagcccgatatcgaacaaatgctaaaacttggttcgacttcatatcacgactttttggattttttgacaactgttgaggaggagcttatgaagctgcctgcagtctcaaaaccaaaaaagaattatgaggagcaggagatctccctagagatcgtcgacaatttttggggcaaagtgaccaaagagggcaaattcgtagaatccgccgtgataacccagatatactgcctttgtttcgtgaacggcaacctggaatgctttctcacactcaacgacctggagctacctaagagagacgagagctactacgaaaaggatagtgaaaaaaagggcatcgacatcttggactaccactttcacaaatgcgtaaatgtgcaggagtttgaacaaagtaggatcatcaagtttgtgcccttggatgcctgtcgattcgaactcatgaggttcaaaaccctgtacaacggcgataacctgcccttttcgttgaaaagcgtagtggtcgtgcagggcgcctacgtggaactccaggcctttgtgaatatggccagcctggcacagcgaagttcctatgcgggatctctcaggtcctgtgataacattcgcatccacttcccagtgccttcccagtggataaaggcgctctggaccatgaacctgcagcgccagaaatcactaaaagctaaaatgaatcgcagagcctgtctcggaagtttgcaagaactcgagtccgagcccgtaattcaggtcacagtgggctctgcgaagtatgagagcgcctaccaggctgtggtgtggaagatcgatagactccccgacaagaattcgagcctcgaccacccccactgcctttcgtacaaactggaacttggtagtgatcaggagatcccatccgactggtaccctttcgccacagttcagttctcagtgcccgatacttgtgcttcgaggactgaggtgcgatcccttggggtggagtctgatgtccaaccacagaagcacgtccagcaacgagcttgctataacatccagccaaaactgtacaggtctgtcatcgaagatgttattgaaggcgtccggaatctgtttgcggaagagggcattgaggagcaggtgctgaaggatctgaagcagctctgggaaactaaagtactgcagagcaaagcaactgaggacttcttcagaaacagcatccagtctccgctctttacactgcagctgccacattctctgcaccagacgctgcagtcttctaccggccatctgtacaaagtgaatgtgcctatcatggtaacggagacatctgggcgcgctggaatcctgcagcatcctattcagcaggtattccagcaactgggacagccttccgtgatacaaaccagcgtgcctcagcttaacccctggagcctgcaggctaccacagaaaagagtcaacggatcgagactgtacttcagcagcccgcgattctcccatcaggtcccgtggataggaaacacttagaaaatgccaccagtgacatactcgtgagcccaggtaacgagcacaagattgtccccgaagccttgctgtgccaccaggagtcaagccattatatttctctgccaggcgtagtgttttccccccaggtctctcaaactaacagcaatgtcgaatcagtcttaagtggatctgcgtccatggcccagaacctgcacgatgaatcactgtccacaagccctcatggggcactccatcagcatgtaaccgacattcaactgcacatactgaagaaccggatgtatggttgcgattcggtcaaacagcctcgaaacatcgaagagccttccaatatacccgtaagcgaaaaagattctaattctcaggtcgatctgtccattagagtcactgatgacgacatcggagagatcatccaggttgacggcagtggagatacctcaagcaatgaagagatagggtccactcgggatgcagatgagaatgagttcctgggcaatattgacggtggtgacctgaaggtccctgaggaggaagctgattctatttcaaacgaagactctgctacaaattcttccgataacgaagatccacaagtgaacatcgtggaagaggacccactgaacagtggggacgatgtaagcgagcaggacgtccccgacttatttgacaccgacaacgtaattgtgtgccagtacgataagatccatcgctccaaaaataaatggaagttctatctgaaagacggagtcatgtgctttggcgggcgcgactatgtgttcgctaaagccatcggcgatgcggagtggtag

SEQ ID NO: 75773 - DNA, 3408 bp, Artificial Sequence
  derived and/or modified sequence
atgtgctcaacaaatcccggaaagtgggttaccttcgatgatgacccagctgtccagagctcccaaaaatcaaagaacttcccactggaaaaccagggggtctgtcgtcctaatggcctgaaactgaatcttccaggcttgcgagaatttcctagcgggtctagttccacgtcaagcacgccactgtcgtcacccattgtggacttctacttcagcccgggtccaccgagtaactccccactatctacgccaacgaaggactttcccggtttcccgggaattcccaaagcgggaacccatgtcctttatcccatacctgagagcagctctgatagccccctggcgattagcgggggagaatcatccctgcttcccacacgcccaacatgcctctcccatgctctgctgccctctgatcacagttgtacccatcccaccccgaaggtgggactgccagatgaggtgaatccccaacaggccgagagtctaggcttccagtccgatgatttgcctcagtttcagtacttccgggaggattgtgcctttagtagtcctttttggaaagatgagggctcagatagccattttactttggaccctcccggttctaagaagatgttcagctctagaaataaagaaatgcccatcgatcagaagtccctgaataagtgttccctgaactacatatgcgaaaagttagaacacctacagtccgccgaaaaccaggatagcctgaggagcctgtcgatgcactgtctgtgcgcagaagagaatgcctcatccttcgtgccacacacattgttcagaagccagcctaaatctggatggagttttatgctgcggattcccgagaagaagaacatgatgtctagcaggcagtggggacctatcttcttaaaggtcctacccggaggtattctccagatgtactacgaacagggactcgaaaagccgtttaaggaaatccagctggacccatactgcagactgagtgagccaaaagttgaaaatttttcggtggccggtaaaattcataccgttaagatcgaacacgtttcctacactgagaagagaaagtaccacagcaagacggaggtggtgcacgaacctgacattgaacagatgctaaagttgggcagtacaagttaccacgactttttggacttccttacaaccgttgaggaggagttgatgaagcttcccgcagtgtcgaaacctaaaaaaaactacgaggagcaggaaattagtctggagatagttgacaatttttggggaaaggtgaccaaggaaggcaaatttgtcgagagtgcagtgataactcagatctattgtttgtgctttgtgaatgggaacctcgagtgtttcctcacccttaacgacttggaactgcctaagagagacgagtcgtattacgagaaagactctgagaaaaaaggcattgacattctagactatcattttcacaagtgcgttaatgtacaggagtttgaacagtccagaattatcaaatttgtccctttggatgcttgcaggtttgagctgatgagattcaagacactgtacaacggggataacttgccgttcagcttgaagagcgttgtggtagtacaaggagcttatgtcgaattgcaggctttcgtcaatatggctagccttgctcagcgctcatcttacgccggttctctgcgatcatgcgacaatataagaattcactttcccgtgccctcgcagtggattaaagcattgtggacaatgaacctgcagcggcagaagtccctcaaagcaaaaatgaacaggcgtgcctgcctggggtcactgcaggagctggagtcggagcctgtgatacaggtgaccgtcggctccgctaaatatgaaagcgcataccaggcggtggtctggaagatagaccggctgccagataaaaattcaagccttgatcacccccattgtctgagctacaaactggagctaggtagcgatcaagaaattccaagtgactggtacccttttgcgactgtgcagtttagtgtgcctgacacttgcgcctcacgtactgaagttagatcactaggggtggaatcagacgtccagcctcaaaaacacgtgcagcagcgggcatgttacaacatccaaccgaaattataccggagcgtgattgaagacgttattgagggagtccggaatctgttcgccgaggaaggaatagaagaacaggtcctaaaggacctaaaacagctgtgggaaacgaaagtgctgcagtccaaggcaaccgaggactttttcagaaattcaattcaaagtccactctttactttacaattgcctcatagtctccaccagacattacagtcaagcaccggccacctgtacaaagttaacgtcccaatcatggtcacagagacatccggcagagcaggtattctgcaacatcccatacagcaggtgtttcagcaactaggccaacccagtgtcatccaaacttccgtgccccagctcaacccctggtcactgcaggctaccaccgaaaaaagccagagaattgagacagtgctacaacaaccagcaatcttaccaagcggccctgtggatcggaaacacctggagaacgcaacttctgacatactcgtgtcacctggaaatgaacataaaatagtgcccgaggcgctcctgtgccaccaggaatcttctcactatattagcctgcccggtgtggtgttttcccctcaagtttctcagacaaatagcaatgtcgaatcagtcctgtccgggtccgccagcatggcacagaacttgcacgacgaatccttgagtacgagtccgcacggagccctgcatcagcacgtcacagatatacagctgcacatccttaagaaccgcatgtacgggtgcgatagcgtcaagcagcccaggaacatcgaagaaccttccaatattcccgtgtcagaaaaagactctaattcccaggtggacctgagtataagggtcactgacgacgatatcggtgaaatcatccaggtagacggctccggtgatacatccagcaacgaggagatcggatcaaccagagacgcggacgagaacgaattcctggggaacattgatggaggagacttgaaggtccccgaagaggaagccgactccatcagcaatgaggacagcgctaccaactccagcgacaacgaggaccctcaggttaacattgtagaggaggaccctcttaattcgggggatgatgtgtcagaacaggacgtcccagacttgtttgataccgataacgtgattgtctgtcagtacgacaaaatccacaggtctaaaaataagtggaagttctatctgaaggatggcgttatgtgtttcggtggaagggattacgtattcgctaaagctatcggcgatgctgagtggtag

SEQ ID NO: 75774 - DNA, 3534 bp, Artificial Sequence
  derived and/or modified sequence
tgacaagaccacaatctgatcccaaagatgtgctccacaaatccaggcaaatgggtcacctttgatgatgatcctgctgttcaatcttctcaaaagtcaaagaattttcctctggagaatcaaggtgtctgtagaccaaatggactgaagctgaaccttcctggcctcagggaatttcccagtggatcttcctccaccagcagcactcctctctcctcccccattgtagatttttatttcagtccaggacctccaagtaactctcctctttctacacctaccaaagacttcccaggttttcctggcatccccaaagcagggactcatgtgctttatcctattccagaatcatcttcagacagcccactcgcaatatcaggaggagaatcttccttactgcctaccagaccaacatgtttatcccatgccttgttacccagtgaccactcatgtacacatccaactcccaaagtaggtcttccagatgaagttaatcctcaacaggctgaaagcctaggattccaaagtgatgatctcccccagtttcagtattttcgagaggactgtgctttttcaagtccattttggaaagatgaaggcagtgattcccatttcacccttgacccaccaggaagcaaaaagatgttctcatcaagaaacaaggagatgcctattgaccaaaaaagcctaaataagtgttcactcaactatatctgtgagaagcttgaacatctccagtcagctgagaaccaagactcacttagaagtttgtctatgcactgtctatgtgctgaagaaaatgcctcttcctttgtcccccacacactcttcaggagtcagccaaaatccggatggtctttcatgctgagaattcctgagaagaagaatatgatgtcttcccggcaatggggaccaatttttctgaaagttttgcctggaggaattttgcagatgtattatgaacagggattagaaaaaccatttaaagagatacagcttgatccatattgtaggctttctgaacccaaggttgagaacttcagtgtagcaggaaaaatccacactgtgaagattgaacatgtgtcttacacagaaaaaaggaaataccattctaagacagaagtagttcatgaacctgacatagagcagatgctgaagttggggtccacatcgtaccatgacttccttgactttctgactactgtggaggaggagctgatgaagttgccagctgtttcaaaaccaaaaaagaactacgaggagcaagaaatttccttggaaattgtggacaacttttggggtaaagtcacaaaagaaggaaaatttgttgaaagtgctgtgataactcaaatttattgcctctgctttgtgaatgggaacctggaatgctttttaaccttgaatgaccttgagttgccgaagcgagatgaatcctattatgagaaggactcagaaaaaaaggggattgatattcttgactaccattttcataagtgtgtgaatgtacaagaatttgagcaatcaagaatcattaagtttgtacctctggatgcctgccggtttgagctgatgcgtttcaagactttgtataatggggataatcttcccttttccttgaagtctgtagtggttgtccagggagcatacgtggaacttcaggcttttgtcaacatggcctcattggcgcagaggtcatcctatgctggttccttaaggtcctgtgacaatataaggatacactttcctgtcccatcgcagtggatcaaggccctttggaccatgaacctccagaggcagaagtctctgaaagctaaaatgaaccgccgagcatgtctggggagtttacaggaacttgaatctgaacctgtcattcaagtcactgtggggtcagcaaaatatgagagtgcctaccaggcagtggtatggaagatagatcggcttccagacaaaaattcaagtctagatcatccccattgtctgtcatacaaattagagcttggatcagaccaagaaattccctctgattggtatccatttgctactgttcagttttccgtgcctgacacctgtgcctcaaggacagaggtcaggtctctgggagtggagagtgatgtccagccacagaaacatgttcagcagcgagcttgctacaacatccagcctaaactctacagatctgtaattgaagatgtaattgaaggagttcggaatctatttgctgaagaaggtatagaggaacaagttttaaaagacttgaagcagctctgggaaaccaaggttttgcagtctaaagcaacagaagacttcttcagaaatagcatccaatcacctctgtttactcttcagttgccgcacagcttgcaccaaacattgcaatcgtcaacaggtcacctttataaagtcaatgtaccaattatggtgacagagacttctggaagagcaggtattcttcagcatccaattcagcaagtatttcaacagcttggccagccttcagtaatacaaactagtgttccacaattgaatccatggtctcttcaagcaactactgaaaaatcacagagaattgaaaccgtgctacagcaacccgcaattctaccttctgggccagtagataggaaacacttagaaaatgccaccagtgatatacttgtatctcctggaaatgagcataaaatcgtgcctgaagctttgttgtgtcatcaggaaagttctcactatatcagtcttccaggtgttgtattttctccacaggtctctcaaacaaattctaatgtggagtcagtgctcagtggttcagctagcatggctcaaaatctgcatgatgagtccctctccacaagccctcatggggctctccaccagcacgtgactgatattcagcttcatattcttaaaaataggatgtatggatgtgattctgtaaagcaaccaagaaatatagaggaacccagcaacatacctgtatcagagaaggattctaattctcaggtggatttaagcattcgggttactgatgatgatattggtgaaataattcaagtagatggaagcggtgatacatcttccaatgaagaaataggaagtacaagagatgcagatgagaatgaatttctagggaatattgacgggggagatctgaaggtacctgaagaagaagctgacagtatttcaaatgaggattcagccacaaacagtagtgataatgaagaccctcaagtaaacattgtagaagaggaccctttaaattctggagatgatgttagtgaacaggatgtgccagacctgtttgacacggataatgttattgtctgtcagtatgataagattcatcgaagcaagaacaaatggaaattctatttgaaagatggtgttatgtgttttggagggagagactatgtatttgcaaaagccattggtgatgcagagtggtaaaccttgtgagctcagtacatctattttgtgaacatcagttggattatattgcatattgtgaattcatttttattttgaatatagtccagcacagagctg

SEQ ID NO: 75775 - protein, 735 aa, Artificial Sequence
  derived and/or modified sequence
MCSTNPGKWVTFDDDPAVQSSQKSKNFPLENQGVCRPNGLKLNLPGLREFPSGSSSTSSTPLSSPIVDFYFSPGPPSNSPLSTPTKDFPGFPGIPKAGTHVLYPIPESSSDSPLAISGGESSLLPTRPTCLSHALLPSDHSCTHPTPKVGLPDEVNPQQAESLGFQSDDLPQFQYFREDCAFSSPFWKDEGSDSHFTLDPPGSKKMFSSRNKEMPIDQKSLNKCSLNYICEKLEHLQSAENQDSLRSLSMHCLCAEENASSFVPHTLFRSQPKSGWSFMLRIPEKKNMMSSRQWGPIFLKVLPGGILQMYYEQGLEKPFKEIQLDPYCRLSEPKVENFSVAGKIHTVKIEHVSYTEKRKYHSKTEVVHEPDIEQMLKLGSTSYHDFLDFLTTVEEELMKLPAVSKPKKNYEEQEISLEIVDNFWGKVTKEGKFVESAVITQIYCLCFVNGNLECFLTLNDLELPKRDESYYEKDSEKKGIDILDYHFHKCVNVQEFEQSRIIKFVPLDACRFELMRFKTLYNGDNLPFSLKSVVVVQGAYVELQAFVNMASLAQRSSYAGSLRSCDNIRIHFPVPSQWIKALWTMNLQRQKSLKAKMNRRACLGSLQELESEPVIQVTVGSAKYESAYQAVVWKIDRLPDKNSSLDHPHCLSYKLELGSDQEIPSDWYPFATVQFSVPDTCASRTEVRSLGVESDVQPQKHVQQRACYNIQVEIEKKWIKIDGEDPDKIGDCITQ

SEQ ID NO: 75776 - DNA, 5822 bp, Artificial Sequence
  derived and/or modified sequence
gatcccaaagatgtgctccacaaatccaggcaaatgggtcacctttgatgatgatcctgctgttcaatcttctcaaaagtcaaagaattttcctctggagaatcaaggtgtctgtagaccaaatggactgaagctgaaccttcctggcctcagggaatttcccagtggatcttcctccaccagcagcactcctctctcctcccccattgtagatttttatttcagtccaggacctccaagtaactctcctctttctacacctaccaaagacttcccaggttttcctggcatccccaaagcagggactcatgtgctttatcctattccagaatcatcttcagacagcccactcgcaatatcaggaggagaatcttccttactgcctaccagaccaacatgtttatcccatgccttgttacccagtgaccactcatgtacacatccaactcccaaagtaggtcttccagatgaagttaatcctcaacaggctgaaagcctaggattccaaagtgatgatctcccccagtttcagtattttcgagaggactgtgctttttcaagtccattttggaaagatgaaggcagtgattcccatttcacccttgacccaccaggaagcaaaaagatgttctcatcaagaaacaaggagatgcctattgaccaaaaaagcctaaataagtgttcactcaactatatctgtgagaagcttgaacatctccagtcagctgagaaccaagactcacttagaagtttgtctatgcactgtctatgtgctgaagaaaatgcctcttcctttgtcccccacacactcttcaggagtcagccaaaatccggatggtctttcatgctgagaattcctgagaagaagaatatgatgtcttcccggcaatggggaccaatttttctgaaagttttgcctggaggaattttgcagatgtattatgaacagggattagaaaaaccatttaaagagatacagcttgatccatattgtaggctttctgaacccaaggttgagaacttcagtgtagcaggaaaaatccacactgtgaagattgaacatgtgtcttacacagaaaaaaggaaataccattctaagacagaagtagttcatgaacctgacatagagcagatgctgaagttggggtccacatcgtaccatgacttccttgactttctgactactgtggaggaggagctgatgaagttgccagctgtttcaaaaccaaaaaagaactacgaggagcaagaaatttccttggaaattgtggacaacttttggggtaaagtcacaaaagaaggaaaatttgttgaaagtgctgtgataactcaaatttattgcctctgctttgtgaatgggaacctggaatgctttttaaccttgaatgaccttgagttgccgaagcgagatgaatcctattatgagaaggactcagaaaaaaaggggattgatattcttgactaccattttcataagtgtgtgaatgtacaagaatttgagcaatcaagaatcattaagtttgtacctctggatgcctgccggtttgagctgatgcgtttcaagactttgtataatggggataatcttcccttttccttgaagtctgtagtggttgtccagggagcatacgtggaacttcaggcttttgtcaacatggcctcattggcgcagaggtcatcctatgctggttccttaaggtcctgtgacaatataaggatacactttcctgtcccatcgcagtggatcaaggccctttggaccatgaacctccagaggcagaagtctctgaaagctaaaatgaaccgccgagcatgtctggggagtttacaggaacttgaatctgaacctgtcattcaagtcactgtggggtcagcaaaatatgagagtgcctaccaggcagtggtatggaagatagatcggcttccagacaaaaattcaagtctagatcatccccattgtctgtcatacaaattagagcttggatcagaccaagaaattccctctgattggtatccatttgctactgttcagttttccgtgcctgacacctgtgcctcaaggacagaggtcaggtctctgggagtggagagtgatgtccagccacagaaacatgttcagcagcgagcttgctacaacatccaggttgaaatagaaaagaagtggattaaaatcgatggagaagacccagataaaattggtgactgcataactcagtaggagtagcaagagtttatgatgacagcccacttgtcaaatatgtaattcaccgaaaccacaccaagtcctgctactgtagagtggaaatgacttctgaatagcggttttaggacaggtctgatggctgtgtttagagaagtttagacctaaaaccgaacaatctgtattttttgcttttcatgtgtttttgtcctaggggttcgatctaaaatgtttctataattcgtgtgatgttttgcttcctattgaaactcaaaggcactgttactcgttgtgtgaccccgcagccagtatgatttttgattactcagtggctgactgttttgctctctggattactgaggtgccgtcttcatttcttcccatctcttcttgctgcttagtgtctgtactagagggtaagggaatcaaaggagacataaaccaaaatagttaattttccctctttcttgcctctgaaatgtggctaggtgtagaatgatgttgaaaccacaggctaaaatgtagatctggaagtatctgtgcttttgaattacttatttacctgtcctcttaccgttggtaaataataattggctatatttggtacctgtctctctcctactgtattgtcattttcaaaatgtgtttgttttctggcgcgtgctgcaaagaagctatttctgttgtcctacatattttagtataaatcactaagacatatttcctttcacttggcaggattcctttcaaaatggaatctgagtattagacactagttaacatatttgtgtatattaaatatgaatttttaaaatttataaatactattttccaaaagtacagactctaaggacatattttgataaagtattatttgtaatgaacacaagcctctcttgagtagaagtctaaatcacattatgattattttatactagttctgctatcatgctgttttatgctaattctgcttattttagagtatttttcattaaaaggtgagcaaagtgaaagatacttggtattttacccagatttctaagtggcaacatttttattcttcagagtcaggtaaatgactataatagtttggtttctaatgaaaagtcaatagcattagcagttataattctgtttataatttcctttcagcatttacagtgaaaagtgagaattttaaaatttatgaaatctatattccaggtattgtttttagtctgaaaaacaaactcccccatgtggtattaatataccttcaatttatgttgagtcttaaacataattaggagatatttttctctatttgctagatttgttttgagtcaaaactgatttagtgttcttccaaacaacatttatgtgttggcctacagagtttatttcatgtgttttttttaatatttaatattatattacattcattgaaatctgttcaaaaacagattaagacaaacatttatgatggtctgtatcaatcagcagattttattgcttttcattattttactgtaaaggcaaagaatgcaataggtgatggttggttgaaaggaattgttattgctgtttttattttttactttttttgagacagagtctcactctgttgcccagcctggagtgcagtgtgtcatcttggctcactgcaacctccgcctcctgggttcaagggattctcctgcctcagcctccaactagctgggattacaggcacaagccaccatgcctggctaaaattcttttgtatttttactacagacggagtttccccatgttggccgggctagtctcgaactcctgacctcaggtgatccaccagcctcggcctcccaaagttctgggattaaatgcgtgagccaccatgcccggccgctattgctctttttaacttcatttgatgccttgcttataatatcatatgcttgaggctcactgttgatgtagagtagggcaaatctgtgtgtgtatgtcattaaaaaaattctaccatctttctttatcatctggtgtgggcgcactctacagtgacttcagtctgctcagaacgaatgtggaggccggccgaaactgatgctgcccacagtcccagtgaagttaggtgggttaattactgccattcctttctaagtgtgttttatggcatcctgcccacaaagaactcacagtctgattaggatgaacttaatgactatttacacctcaaaatatattcagcaaagggttcacttagttgcccctcatgcttcacaggttgactagtatctgtgggtacctccctgcccaggttattcactcacaagccaccgggccttcaggacatctcaagattcagtcttgacaatataatagcaaaagctggactaaagcccaaatggattgtctgtggcaatgcagaagctgatagcattaacagcagggtgttacagcataattgttaattcgcacatctattaggatccttaaatattcattacttaatgttaaattaacattctgtgtagggaggggaggcttattcaattcttctgacctcagaactggcagaaggtcagatgtgactacagaactctaggtgaaaaatcaggtagggttcaaattaagtagaactgcccttgccggaatagtgatcttcaaaaaacccttgcttttaggggagggaagcggggaaggaaaggaatgagggaggaaatattcctttctagcattcattttgcttagatcactccattgtgagtttgaccattttggagtcaaatgagcagacttccaaggagttgaccagtttgtgactagtctggtcacctttccagttacaggatcatattaactgtgtaaatgaattcatgggtagatgatttgtgcagatctgaatttaagaacatttcctttttctgtgggaatcacaagagtttatccactaaaaaaagatatgtaaaaaagatactttccagcacataaataaaggctggaattttacaacctgatgtatatattagacagttctaggatgttagttcccttcattccagagctatgcttgtgatacagccccttttcttataaagtcagttagaaggacttccttaacaatgactattataatgtcttacttaaaatacagttttgtattctgtcaatgcaaatataagacaggttgagccttaatcatgtaacaaaatattttgtagattacatattgatttttcaaaaattaaaaatgtatttcaaactattcttactgtgctgtgaatttatatcttcttctgcaagacctggggctatttttttttcttaaggtatgaaatcaatttcaataaccttaaacaattgaccctctgtcaggcatatgtcaggctccactcttaaggagtcagtgaccatgacctctttgcatatcctggaaaaatgacatcatcaaagtatagttgataatgttataaaggatgattttaaaaatagggtataatcatgactcacaaagatatgaggctgggtgtggtggctcacgcctgtaatcccagctctttgggaggctgaagcgggtggatcatgaggtcagaagatcaagaccatactggctaacacggtgaaaccccgtctctactaaaaatacaaaaaaaaaaaa

SEQ ID NO: 75777 - DNA, 2208 bp, Artificial Sequence
  derived and/or modified sequence
atgtgcagcaccaaccccggcaagtgggtgaccttcgacgacgaccccgccgtgcagagcagccagaagagcaagaacttccccctggagaaccagggcgtgtgcagacccaacggcctgaagctgaacctgcccggcctgagagagttccccagcggcagcagcagcaccagcagcacccccctgagcagccccatcgtggacttctacttcagccccggcccccccagcaacagccccctgagcacccccaccaaggacttccccggcttccccggcatccccaaggccggcacccacgtgctgtaccccatccccgagagcagcagcgacagccccctggccatcagcggcggcgagagcagcctgctgcccaccagacccacctgcctgagccacgccctgctgcccagcgaccacagctgcacccaccccacccccaaggtgggcctgcccgacgaggtgaacccccagcaggccgagagcctgggcttccagagcgacgacctgccccagttccagtacttcagagaggactgcgccttcagcagccccttctggaaggacgagggcagcgacagccacttcaccctggacccccccggcagcaagaagatgttcagcagcagaaacaaggagatgcccatcgaccagaagagcctgaacaagtgcagcctgaactacatctgcgagaagctggagcacctgcagagcgccgagaaccaggacagcctgagaagcctgagcatgcactgcctgtgcgccgaggagaacgccagcagcttcgtgccccacaccctgttcagaagccagcccaagagcggctggagcttcatgctgagaatccccgagaagaagaacatgatgagcagcagacagtggggccccatcttcctgaaggtgctgcccggcggcatcctgcagatgtactacgagcagggcctggagaagcccttcaaggagatccagctggacccctactgcagactgagcgagcccaaggtggagaacttcagcgtggccggcaagatccacaccgtgaagatcgagcacgtgagctacaccgagaagagaaagtaccacagcaagaccgaggtggtgcacgagcccgacatcgagcagatgctgaagctgggcagcaccagctaccacgacttcctggacttcctgaccaccgtggaggaggagctgatgaagctgcccgccgtgagcaagcccaagaagaactacgaggagcaggagatcagcctggagatcgtggacaacttctggggcaaggtgaccaaggagggcaagttcgtggagagcgccgtgatcacccagatctactgcctgtgcttcgtgaacggcaacctggagtgcttcctgaccctgaacgacctggagctgcccaagagagacgagagctactacgagaaggacagcgagaagaagggcatcgacatcctggactaccacttccacaagtgcgtgaacgtgcaggagttcgagcagagcagaatcatcaagttcgtgcccctggacgcctgcagattcgagctgatgagattcaagaccctgtacaacggcgacaacctgcccttcagcctgaagagcgtggtggtggtgcagggcgcctacgtggagctgcaggccttcgtgaacatggccagcctggcccagagaagcagctacgccggcagcctgagaagctgcgacaacatcagaatccacttccccgtgcccagccagtggatcaaggccctgtggaccatgaacctgcagagacagaagagcctgaaggccaagatgaacagaagagcctgcctgggcagcctgcaggagctggagagcgagcccgtgatccaggtgaccgtgggcagcgccaagtacgagagcgcctaccaggccgtggtgtggaagatcgacagactgcccgacaagaacagcagcctggaccacccccactgcctgagctacaagctggagctgggcagcgaccaggagatccccagcgactggtaccccttcgccaccgtgcagttcagcgtgcccgacacctgcgccagcagaaccgaggtgagaagcctgggcgtggagagcgacgtgcagccccagaagcacgtgcagcagagagcctgctacaacatccaggtggagatcgagaagaagtggatcaagatcgacggcgaggaccccgacaagatcggcgactgcatcacccagtag

SEQ ID NO: 75778 - DNA, 2208 bp, Artificial Sequence
  derived and/or modified sequence
atgtgctctacaaatcccgggaagtgggtgactttcgatgatgatccagccgtgcaatccagtcagaaaagtaagaacttccctctggaaaaccaaggcgtgtgcagacctaatggacttaagctcaacctgcctggactccgcgaattccctagtggttcctcctcaacctcctctacacctttgagctcaccaatagtcgacttctatttcagtccaggccctccgtctaatagccctctatctacccccacgaaggacttccctggttttcccggaattccgaaggcaggcacccacgtcttatacccaatcccagaaagcagtagcgattcaccactggcgatcagcggcggggagagcagtttgctgcccacccgccccacctgcttaagccacgcactgctcccgagcgaccactcatgcacacatccaacaccgaaagtgggcctgcccgacgaggtcaatccacagcaagcggaaagcctgggcttccaatcggatgacctgcctcagttccaatacttccgggaggattgcgccttctcttcccctttctggaaagacgaaggatcagacagtcattttacactggatcctcctggctctaagaagatgttctcatctcgcaacaaggagatgcctatcgaccagaaaagtttaaacaaatgctcattaaattacatttgcgaaaaactcgagcatctgcagtctgctgagaaccaggactccttgagatcactctctatgcactgcctttgtgcagaggagaacgcatcatccttcgtgccacacaccctgttccggagtcagcctaagtcaggttggagcttcatgttgcgcattcctgagaaaaaaaatatgatgtcttcacgtcaatgggggcctatcttcttgaaagtgctgcctggcggaattttgcagatgtattatgaacaggggctggagaagccatttaaggagatccaattggatccctattgcagactgagcgagcctaaagtggagaacttttctgtcgcaggaaagattcacacagtcaagatagaacatgtcagctatactgaaaagaggaagtaccattctaagactgaagttgtccatgagcccgatatagaacagatgttaaagctggggtctacgtcataccatgatttcctggactttctaacaaccgtcgaagaggaattgatgaagctccccgcagtgtcaaagcccaagaagaactacgaagaacaggaaattagcctggagatcgtcgataacttttgggggaaagtaaccaaggaggggaaattcgtggaaagcgctgtgatcacccaaatatactgcctgtgtttcgttaacggtaatctcgaatgcttccttactttaaatgatctggaactgcctaaaagagacgagtcctattacgaaaaagactcagagaaaaagggtatcgacatccttgactaccatttccacaaatgcgtgaacgtgcaggagttcgaacagtctcgaattattaagtttgtcccacttgacgcctgtcgtttcgagctaatgcgctttaagacactgtacaatggagacaatctgcctttcagcctaaagtccgtcgtggtggtccagggtgcctatgttgagcttcaggccttcgttaacatggcctccctggctcagaggtcttcctatgccggctcactgaggtcctgcgataatatccgcatacactttcccgtgccatcccagtggatcaaagccctgtggacgatgaatctgcagagacaaaaaagtctgaaagccaagatgaatcgacgcgcctgtctcggcagcctgcaggagctggagtctgagcctgtgattcaggtgaccgtgggatcagccaagtatgaaagcgcctaccaagcagtggtctggaagattgaccgattgcccgacaaaaacagctcactcgaccatccacattgtctgagttacaagctggagctgggcagcgaccaggaaataccatcagactggtatcccttcgccactgtgcagttctccgttccagatacttgcgcttcccggacggaggtgcggtctctgggagtagaatccgacgtgcagccacagaaacacgtgcagcagcgcgcctgttacaatattcaggttgaaatcgagaagaaatggattaaaattgacggggaggacccagataaaatcggcgactgcattacccagtag

SEQ ID NO: 75779 - DNA, 2208 bp, Artificial Sequence
  derived and/or modified sequence
atgtgtagtactaaccccggcaagtgggtcacgttcgatgatgaccccgccgttcagagttcccagaaatccaagaatttccccttagaaaatcagggcgtgtgcaggcccaacgggctgaagttgaacttgcctggactcagggaatttcccagcggatcatctagtacttcatcaacgcccttaagttcaccgattgtggacttctatttctcgcctgggcccccttctaactcacctttgtctaccccaactaaagattttcctgggtttcccggcatccccaaagccggtacacacgtcctgtaccctatccctgagtcaagcagcgactcccccctggctatctccggcggcgaatcaagcctcctgcccacacggccaacgtgtctgtcccacgccttgctcccatccgatcacagctgcacccaccctacacccaaggtggggctaccagacgaagtcaatccccagcaggctgagagcttggggttccagtcggacgatctgccacaattccaatattttagggaggattgcgcgttcagctcgcctttctggaaggatgagggtagcgacagccactttacactggacccccctggtagcaagaaaatgtttagcagtagaaacaaggagatgcctatcgatcaaaaaagtctgaataagtgttccctgaattacatttgcgagaagctcgagcatctacagagcgcagaaaaccaggactcgctgcgctcactgtccatgcactgtctgtgtgccgaggagaacgcttcttctttcgtcccgcatactctatttaggagccagcccaaaagcggttggtcatttatgttaagaatccctgaaaagaaaaatatgatgagttcccggcagtggggccctatttttttgaaagtcctgccaggaggaattttgcaaatgtattacgaacagggccttgagaagcctttcaaagagatccagctggacccatactgccggctctcagaacctaaggtggagaatttttccgtggcaggaaagatccacacggtgaagatcgagcacgtctcttacacagagaagaggaagtaccacagcaagactgaggtggtccacgaacccgacattgagcagatgctgaaacttggaagtaccagctatcatgacttcctagattttttaactactgtggaggaagaactcatgaagttgcctgccgttagtaagccgaagaagaattatgaggaacaggaaatctcgctcgaaatcgttgataacttttgggggaaggtgacgaaggagggaaaattcgtggaaagtgccgttatcacacagatatattgtctctgttttgtaaacggtaatttggagtgtttcttaacactcaatgaccttgagctgcctaagcgcgatgagtcctattatgaaaaagactcggagaagaagggtattgacattctggattatcattttcacaagtgcgtgaacgtgcaagagttcgagcagtcgaggattattaagttcgttcccctcgatgcctgccgcttcgagctcatgcgttttaagaccctctacaacggagacaaccttcctttctccctcaagtccgtggttgtcgtacaaggcgcttacgtcgagcttcaggcctttgtgaatatggcttccctcgcacagcgctccagctatgcgggctcactgaggtcctgcgataacatccgtatccatttccctgtgccctctcagtggattaaagccttgtggactatgaatctccagaggcagaaaagtctgaaggctaagatgaacagacgggcctgcctgggttcccttcaggagcttgaaagcgagccggttatccaagtaacggttggttctgctaagtatgagtcggcctatcaggccgtagtctggaagattgatcgtctgccagacaagaactccagtttggatcatccacactgtctgagctataaactggaactgggctccgaccaagagattccctccgattggtatccctttgccaccgtccaattttctgtccctgatacctgtgccagccgcaccgaagtaaggagcctgggagttgagagcgatgtgcaaccacagaaacacgttcagcagagggcttgctataacatacaggtcgagatcgagaagaaatggataaaaatcgacggggaggatcctgacaagattggggattgcatcacccagtag

SEQ ID NO: 75780 - DNA, 2208 bp, Artificial Sequence
  derived and/or modified sequence
atgtgttcgaccaatcctgggaagtgggtgaccttcgatgatgatcccgccgtgcaatcttctcagaaatctaaaaattttccgcttgaaaaccaaggcgtctgccggccaaatggtttgaagttaaatcttcctggtctgcgtgaattcccctccggaagcagctccacttcatcgacaccactttcctccccaatcgttgacttttacttctctccagggcccccatctaactcccccctctcaaccccaacaaaggattttcccggtttcccaggcattcctaaggctgggactcacgtcctgtaccccataccggaatcttcctctgactccccgcttgccattagcggcggggaaagctctctcctgccaacaaggcctacatgtctctcccacgccctgctcccatctgaccactcatgtacccacccaacaccaaaggtaggactgcctgatgaagtgaaccctcagcaggccgagtcactaggctttcagtccgatgacctcccgcagtttcagtattttagagaggactgcgctttctccagcccattctggaaggatgaggggagcgattcccatttcacactagatccacccgggtcaaagaaaatgttctcaagtaggaataaggagatgccaatagaccagaaaagtttaaataagtgctccctgaattatatttgcgagaaactggagcacttgcagtccgctgagaatcaggactccctccggtctttatcaatgcattgcctctgcgctgaggaaaacgcatcatcctttgtgccccacactcttttccggagccaacccaaatccgggtggtctttcatgctccgaatcccagagaaaaaaaatatgatgtcttctcgccagtgggggccaattttcttgaaggtgctgcccgggggaatcctacaaatgtactacgagcaaggtctggaaaaacctttcaaggaaattcagctggatccctactgcaggctcagcgagccaaaggtggagaatttctctgttgccggcaaaatccacaccgtgaagattgagcatgtgagctatacggaaaaacggaaatatcactcgaaaacggaggtcgtccatgaacccgatattgaacagatgctcaagttgggatccacttcttaccacgattttctggatttcctgaccacagttgaggaggagctcatgaagctccctgctgtatcaaaacctaaaaagaactatgaggagcaggagatttccctggagatcgtggataacttttggggcaaagtaactaaagagggaaagttcgtcgagtcggccgtgattacacagatctactgtttatgctttgtcaacggcaatctggagtgcttccttactctcaacgacctggagttacccaagagagatgagtcttattacgagaaggattccgaaaagaaaggcatcgatatacttgattatcatttccataagtgtgtgaacgtgcaggagtttgagcagagccgaataattaagtttgtgcctctagatgcttgccgttttgaactgatgcggtttaagactctgtataatggggataacctgccctttagcctcaaatccgtggtcgtcgttcaaggggcgtacgtggagttgcaggctttcgttaacatggctagccttgcacagcgatcctcctacgccggctccctccggtcttgcgacaatattcggatacactttcccgtgccgtcccagtggatcaaggcgctgtggacaatgaatctacaaaggcaaaagtctctgaaagctaagatgaaccgacgggcctgcttgggctctctccaggagctggaatccgagcctgtgatccaggtaaccgtgggatccgctaaatacgagagcgcctatcaggccgtggtgtggaagattgaccgactccctgataagaacagttcactcgatcacccgcactgtctctcatataaactcgagctgggttccgaccaggagatccctagcgattggtatcccttcgcaacggtccagttctcagtgcccgacacgtgcgcatcacgcacagaggtgagaagcctcggtgtcgaaagtgacgtgcaacctcaaaagcatgtgcagcagcgtgcctgctataatatacaggtggaaattgagaaaaagtggatcaagatcgatggggaagaccccgataaaataggcgattgcattacccagtag

SEQ ID NO: 75781 - DNA, 2208 bp, Artificial Sequence
  derived and/or modified sequence
atgtgcagcaccaaccctgggaagtgggtgacctttgatgatgatcctgctgtgcagagcagccagaagagcaagaacttccccctggagaaccagggcgtgtgccggcccaacggcctgaagctgaacctgcccggcctgcgggagttccccagcggcagcagcagcaccagcagcacccccctgagcagccccatcgtggacttctacttcagccctggcccccccagcaacagccccctgagcacccccaccaaggacttccctggcttccctggcatccccaaggccggcacccacgtgctgtaccccatccctgagagcagcagtgacagccccctggccatctctggaggagagagcagcctgctgcccacccggcccacctgcctgagccacgccctgctgcccagcgaccacagctgcacccaccccacccccaaggtgggcctgcctgatgaggtgaacccccagcaggccgagagcctgggcttccagagtgatgacctgccccagttccagtacttccgggaggactgtgccttcagcagccccttctggaaggatgagggcagtgacagccacttcaccctggaccccccaggcagcaagaagatgttcagcagcaggaacaaggagatgcccatcgaccagaagagcctgaacaagtgcagcctgaactacatctgtgagaagctggagcacctgcagagcgctgagaaccaggacagcctgcggagcctgtccatgcactgcctgtgtgccgaggagaatgccagcagctttgtgccccacaccctcttccgcagccagcccaagagcggctggagcttcatgctgcgcatccctgagaagaagaacatgatgagcagccggcagtggggccccatcttcctgaaggtgctgcccggcggcatcctgcagatgtactatgagcagggcctggagaagcccttcaaggagatccagctggacccctactgccgcctgtctgagcccaaggtggagaacttctctgtggccggcaagatccacacagtgaagattgaacatgtgtcctacacagagaagaggaagtaccacagcaagacagaggtggtgcatgagccagacatcgagcagatgctgaagctgggcagcaccagctaccatgacttcctggacttcctgaccaccgtggaggaggagctgatgaagctgcctgctgtgtccaagcccaagaagaactatgaggagcaggagatcagcctggagatcgtggacaacttctggggcaaggtgaccaaggagggcaagtttgtggagagcgctgtgatcacccagatctactgcctgtgctttgtgaatggaaacctggagtgcttcctgaccctgaatgacctggagctgcccaagagagatgagagctactatgagaaggacagcgagaagaagggcatcgacatcctggactaccacttccacaagtgtgtgaatgtgcaggagtttgagcagagccgcatcatcaagtttgtgcccctggatgcctgccgctttgagctgatgaggttcaagaccctgtacaacggggacaacctgcccttcagcctgaagtctgtggtggtggtgcagggcgcctacgtggagctgcaggcctttgtgaacatggccagcctggcccagaggagcagctatgccggcagcctgcggagctgtgacaacatccgcatccacttccctgtgcccagccagtggatcaaggccctgtggaccatgaacctgcagaggcagaagagcctgaaggccaagatgaacagaagagcctgcctgggcagcctgcaggagctggagagcgagcctgtgatccaggtgacagtgggcagcgccaagtatgagagcgcctaccaggccgtggtgtggaagattgaccggctgcctgacaagaacagcagcctggaccacccccactgcctgagctacaagctggagctgggcagtgaccaggagatccccagcgactggtacccctttgccaccgtgcagttctctgtgcctgacacctgtgccagcaggacagaggtgcgcagcctgggcgtggagagtgatgtgcagccccagaagcacgtgcagcagagggcctgctacaacatccaggtggagattgagaagaagtggatcaagattgatggagaggaccctgacaagattggagactgcatcacccagtag

SEQ ID NO: 75782 - DNA, 2208 bp, Artificial Sequence
  derived and/or modified sequence
atgtgcagcaccaaccccggcaagtgggtgaccttcgacgacgaccctgctgtgcagtccagccagaagagtaaaaacttccccctggaaaatcagggcgtgtgtcgccctaacggactcaagctcaacctgcccggcctgagggaattcccatccggaagttcatccaccagcagcacaccactgtcatcccctatcgtggacttttatttcagccccggccctcccagcaactcccccctaagcaccccgacgaaagatttccctggtttcccaggaatcccaaaggccggcacccatgtactctatcctatccctgagagcagcagcgactcaccattggctattagcgggggtgaatcgagcttactgccaacgagacccacgtgcttaagccacgctctactgccctctgatcacagctgcacccacccaactcctaaagttgggctgcctgatgaagttaatccacaacaggcagaatctcttggatttcaatctgacgacctgccccagtttcagtattttcgggaggattgcgctttcagcagcccattctggaaagacgaaggatcggacagccactttacccttgatcctcccggatccaaaaagatgttcagttcgagaaataaagagatgcccatcgaccagaagtctcttaataagtgctcacttaactacatctgcgagaagctcgagcacctgcagtccgcagagaatcaggacagcctacgatctctgagtatgcactgcttatgtgccgaagaaaatgcatcaagctttgttccccacaccctctttagaagccagcctaaatctgggtggagtttcatgttgcgcattcctgagaagaagaatatgatgtctagtagacagtgggggccgatctttttaaaagtcctccccggggggatcttacaaatgtactacgagcagggattggagaagccattcaaggagatacagcttgacccttactgtaggctgtcggaacccaaagtcgagaactttagtgtggccggtaagattcacacagtgaagattgagcatgtttcgtataccgagaagcgcaaataccactccaaaacagaggtcgtgcatgagcctgacatcgagcagatgctgaagctcggctcaacctcctaccacgacttcctggactttcttaccaccgtagaggaagaactgatgaagttaccagccgttagtaagccaaaaaagaactacgaggagcaggagattagtctcgagatcgtcgacaacttttggggtaaagtgaccaaggaagggaagtttgtcgaatccgcagtcatcacacaaatatattgtctgtgcttcgtgaacggcaacctggagtgttttcttacgctgaacgacctcgagttgcccaaacgagacgagagttattatgaaaaggacagtgagaaaaaaggaatcgatatccttgattaccatttccacaaatgtgtcaacgtgcaggagtttgaacaatctaggattatcaaatttgtccccctagatgcctgtcggtttgaattgatgagatttaaaacactctataatggcgataacctgccattcagccttaaaagcgtggtggtagttcaaggtgcctatgtggagctgcaggcttttgtcaacatggcttcactggcccaacgctcaagctacgcaggtagcctgcgatcttgcgataatatccggattcactttccagtcccatcccagtggataaaggctctctggacaatgaacctccagaggcagaagtcattgaaggccaagatgaataggagggcttgcctggggagccttcaggagcttgaaagtgagccagtgatacaggtcactgtgggatccgccaaatacgaaagtgcttaccaggccgtagtgtggaagatagacagactgcccgacaaaaatagttcattggatcacccgcactgcttgtcctataagctggaactcggctccgatcaggaaatcccgtccgattggtaccctttcgcgaccgtgcaattctctgtgcctgatacatgcgcatcccgtactgaagtgcgctcattgggagtcgagagcgacgttcagccacagaaacacgtgcagcagcgggcctgctacaatattcaggtggaaattgagaaaaagtggataaaaatagacggagaagatcctgataaaataggagattgcattacccaatag

SEQ ID NO: 75783 - DNA, 2208 bp, Artificial Sequence
  derived and/or modified sequence
atgtgcagcaccaaccccggcaagtgggtgaccttcgacgacgacccagccgttcagagtagtcagaaaagcaaaaattttccgttggaaaatcagggggtctgccgtcccaacgggttaaagttgaatctgcctggactgagggaattcccctctggctcaagtagtacatcttccacgcccctgtcatctccaatagttgatttctacttttctccagggcctccgtctaactcacccctgtccacacccactaaggactttcccgggtttcccgggatccctaaagccgggactcacgttttatatcctatccccgagtcttcctctgactcccccttagccataagcggaggcgagtcaagtctgctgccaacccggccaacctgtctgtcccacgcgctcctgccttcggaccacagctgtacacaccccacaccaaaagtaggactccctgacgaggttaatccacagcaggccgagtcactgggcttccagtctgacgacttgcctcagttccagtattttcgggaggactgcgcttttagttcccccttttggaaagacgaaggatcagatagccattttacgctcgacccaccagggagtaaaaagatgttctcctcacgcaataaggagatgccaattgatcagaaaagtctcaacaagtgttctctgaattatatttgcgaaaagttggagcaccttcaatccgctgaaaaccaggactctctgcgatccctcagcatgcactgtttgtgtgcagaggagaatgccagtagctttgtaccccatactctctttcgctctcagcctaagtcagggtggtccttcatgctgagaattcctgaaaaaaagaatatgatgtctagcagacaatgggggccgatctttctgaaggtgctcccaggcggcattctgcaaatgtattatgagcagggcttggagaaacccttcaaagagattcagctcgacccctactgccggctgagtgagccaaaggttgaaaatttctccgtagctggcaaaattcataccgtcaagattgagcatgtgtcatatacagaaaaacgaaaataccattcgaaaactgaggtggttcacgagcccgatattgaacagatgcttaaacttggatctacgtcatatcacgatttcctggacttcctgactactgtggaagaggaactgatgaagctgcctgccgtttcaaaacctaagaagaattacgaagagcaggagatctccctggagattgtcgacaatttttggggtaaggttaccaaagaaggcaaattcgtggagtcagctgttataactcaaatatattgtctttgcttcgtcaatggcaacctggaatgtttcttgaccctcaacgacctggaattgccaaagcgtgacgaatcctattacgagaaggattccgaaaaaaagggtatcgatatcctggactaccattttcacaagtgcgtgaacgtccaagagttcgagcagagtagaattattaaattcgtacccctggacgcttgcagattcgagttgatgcggttcaagaccctgtacaatggcgacaacctgcccttttccctaaagagcgtggtagtggttcagggagcctatgtggaattacaggcctttgtcaacatggcttcactggcacagcggagttcttacgccggtagcttacgctcatgtgacaacattagaattcactttccggtaccaagccagtggattaaagctttgtggaccatgaacctgcagagacagaaaagcctgaaagccaagatgaacaggcgcgcatgcctcgggtctctgcaggaactcgaaagcgaacctgttatacaagtgaccgtgggcagcgcaaagtatgaatctgcataccaggctgtggtgtggaagatcgacagattaccggacaaaaacagctcactggatcatccccactgcttgagctacaagttagaactgggttcggaccaagagatcccctccgactggtacccatttgcgactgtgcagtttagcgtgccagatacctgtgcatctaggaccgaggtccgctccttaggggtggaatcagacgtccagccacagaagcacgtgcagcaaagagcatgttacaacatccaagtcgaaattgagaagaagtggattaagattgacggagaggaccccgataagatcggggactgcatcacccaatag

SEQ ID NO: 75784 - DNA, 2208 bp, Artificial Sequence
  derived and/or modified sequence
atgtgcagcaccaaccccggcaagtgggtgaccttcgacgacgacccagctgtacagtcctcccagaagtcaaagaacttcccactggagaaccaaggcgtgtgtcgccccaacggtctgaaactcaatctacctgggctgcgcgagttcccaagcggtagttcatcgacaagcagcacaccgttgtcttctccaatcgtcgatttctactttagcccaggccccccctccaattcccccttgagtacccccaccaaagactttccaggcttcccaggaatccctaaagccggaacacatgtgctgtatccaatcccagagtcttcttcagattccccgctggcaatctcaggaggagagagctcacttcttccaacccgacctacctgcctcagccatgccttacttcccagtgaccattcttgtactcacccaacccctaaagtgggactgcccgacgaagtgaacccccaacaagcggagtctctaggcttccagagcgatgatctcccccaattccaatacttccgggaggactgcgctttcagcagtccattctggaaagacgagggtagcgactcccattttacactagaccccccgggatccaaaaaaatgttttcatctagaaacaaggagatgcctatagaccagaagtccctgaacaaatgttctctgaactacatctgtgagaagctggagcacctccaatcggccgaaaatcaagacagccttcgatcgctcagtatgcactgcttgtgtgccgaggaaaatgcaagtagcttcgtgccccacactttgtttaggagccagcccaaatctggctggtcattcatgctgcgtatacccgaaaagaaaaatatgatgtcatcaagacagtggggaccaatcttcctgaaagtccttcccgggggaattctgcagatgtactatgagcaagggctcgagaaaccattcaaagagattcagctcgatccctactgcagactgtcagaaccgaaggttgagaatttctcagtggctgggaagatccacacagtgaagatcgagcatgtgtcctacacagagaagcgaaaatatcacagcaagaccgaagttgtccatgaacctgatattgagcagatgctgaagctgggaagcacgtcttatcacgatttcctggatttccttacaaccgtagaggaggagctgatgaaacttccggcggtatctaagcctaagaaaaactatgaagaacaagagatctcattggaaatagtggataacttttggggaaaagtcacaaaggagggcaagttcgtggaaagtgccgtcattactcaaatctattgcctctgctttgtgaatgggaacctggagtgtttcctgactttgaacgacctcgaactgccaaagcgagacgaatcgtattacgagaaggactccgaaaagaaaggtattgatatcctggattatcattttcacaagtgcgtgaatgtgcaggaattcgagcagtcccggataattaaattcgtgcctttggacgcctgccgattcgagctgatgcgcttcaagaccctatataacggcgacaacctgccattctctcttaagtctgtagtggttgtgcagggggcgtatgtggaactgcaggcatttgttaatatggccagcctggctcagaggtcaagttatgctggatccttgaggtcgtgtgataacatcaggatacacttccctgtgcccagccagtggatcaaagccctgtggaccatgaatttgcagagacaaaagtccttgaaggccaagatgaaccgacgggcctgtctgggcagtctccaggagttagagtccgaacctgtgattcaggtcaccgttggttccgctaaatacgaaagcgcataccaggccgtcgtgtggaaaattgacaggctgcccgacaaaaactcctcattggatcatccccattgtcttagctataagctggagctggggtcagatcaagagatcccgtctgattggtacccttttgcaaccgtgcaattctctgtgccagatacctgcgcatctcggaccgaagtcagatctcttggagttgagtccgatgtgcagccccaaaaacatgttcagcaaagagcatgctacaacatccaggtcgaaattgagaagaagtggatcaagattgatggggaagatccagacaaaataggtgactgtatcacacaatag

SEQ ID NO: 75785 - DNA, 2208 bp, Artificial Sequence
  derived and/or modified sequence
atgtgctccaccaaccctggaaagtgggtcaccttcgatgatgatccggctgtacagtcctcacaaaagagcaagaacttccccctcgagaatcaaggcgtttgccgtcccaacggtctcaaacttaacttaccaggcctgcgggagtttccgagcggaagttcaagtacgtcctccacaccactgtcctcaccaatagtcgacttttatttttctcctggtcctcctagcaattcccccttaagcacacccaccaaagacttcccaggttttcctggaattccaaaagcgggaacacatgttctgtaccccatacctgaatcctcatctgattcacccctggccattagcgggggagaatcatccctgctgcccactagacccacgtgtctcagtcatgccctgctgccaagtgatcattcctgtacacacccgacgccaaaagtcggtctccccgacgaggttaatccacagcaggccgaatctctcggtttccagtcagacgatctgccccagtttcagtattttcgcgaagactgcgcgttcagctctccattctggaaggatgagggaagtgatagccattttacgctggatcctccagggagcaaaaaaatgttttctagcagaaataaagagatgcccattgaccagaaatcgcttaataaatgctcactaaactacatctgcgagaagttggagcacctccagtccgctgaaaatcaagatagcttgcgttcgctgtctatgcactgcctatgtgctgaggaaaacgcttcctccttcgtgccacacacactctttagatcacaaccaaaaagcggatggtctttcatgctgaggatccctgagaagaagaacatgatgtctagccggcagtggggtcctattttcctgaaggtgctgcccggtggcatattgcagatgtactacgaacagggccttgagaagcctttcaaggaaatccagttggatccatactgtcgattgtcagagccgaaagtggagaatttttcagttgccggaaagatccacaccgtcaagatcgagcacgtgtcctacacggagaagaggaaataccattcaaaaacagaggtggtacatgaaccagatattgaacaaatgctgaaattggggtctaccagttaccacgatttcctggattttcttactactgtcgaggaggagctgatgaaactccctgctgtctctaaacccaaaaagaactacgaagagcaagagattagccttgaaattgtggacaacttctggggaaaggtgacaaaggaaggtaaatttgtggagagcgcagtgatcacacagatctattgtctctgcttcgtgaacgggaaccttgagtgctttcttaccctgaacgatctggagctgccgaaacgagacgagtcttattacgaaaaggacagcgagaaaaagggcattgatatcctcgactaccactttcacaaatgtgtcaacgtgcaggaattcgaacaatctaggattattaaattcgtccctctggacgcttgcagatttgagctcatgcgttttaagactctttacaatggcgataatctgcctttcagtctcaaaagcgtagtagttgtgcaaggggcatacgttgagctgcaggcttttgtgaacatggcctcactggcacaaagaagcagctatgccggatcccttaggagttgcgataatatcagaatccacttcccggtaccttcacagtggatcaaagccttgtggactatgaatttacaacggcagaaatcgcttaaagctaaaatgaatcgtagagcctgccttggttctctccaggaattggagtccgaacctgtgattcaggtgacagtggggtccgctaaatatgagtccgcttaccaggccgttgtctggaagatcgataggttgcccgacaaaaactccagcctcgaccacccccattgcctgagctacaaactggagttgggctctgaccaggaaattccctctgactggtatccatttgctactgtacagttctccgtgcccgacacctgcgcatcccgcacagaggttaggagcctcggggtggagtccgatgtgcagccccagaaacatgttcaacaaagggcttgttataatatccaggtcgagattgaaaagaaatggattaagatcgacggcgaggatccggacaaaatcggtgattgtattactcaatag

SEQ ID NO: 75786 - DNA, 2208 bp, Artificial Sequence
  derived and/or modified sequence
atgtgtagcactaacccagggaaatgggtaacttttgacgatgacccagcagtgcagtcatcacagaagagcaaaaacttccctctcgaaaatcagggggtgtgtaggcctaacggcctaaaactgaatttgcccggtctcagggagtttccctcggggtcctcctccaccagttcaacaccgttgagtagcccaattgtggacttttatttcagccctggacctccctccaactcacccttatcaacccccaccaaggatttccctgggtttccaggaataccaaaggccggaacccacgtgttgtatcccattccagaatcctcttctgattccccgttggccatctctggaggtgagtcatcacttctccccaccaggcccacatgcctgtctcatgctctactgcccagcgaccattcctgtacacacccaacaccaaaagtaggattgcctgatgaggtaaaccctcagcaggccgagtcactggggtttcagagtgatgatttgccacagttccagtacttccgtgaggactgcgccttcagcagccctttctggaaggatgagggctccgacagccacttcacactcgaccccccaggaagtaaaaagatgttttcttcccggaataaagagatgcctatcgaccagaaaagcctcaataagtgttcgctcaattatatctgtgagaagctcgaacacctgcagtcagccgagaatcaggatagtttgaggtcattgtccatgcactgtctgtgcgccgaagagaacgcatcgagcttcgtaccccatacgctgttccggtcacaacctaaaagtggatggagtttcatgctgagaatccccgagaaaaaaaacatgatgagcagccgacagtggggcccaattttcttgaaggtgctcccaggcggtatcttgcaaatgtattacgagcagggtctcgaaaagcctttcaaagagatccagctggacccctattgtaggttgagcgaacccaaggtggagaactttagcgtcgccggaaaaattcataccgtgaagatcgagcatgtgtcttacaccgaaaagcgaaagtaccacagcaaaactgaggtggttcatgaaccggatatagaacaaatgttgaagcttggctccacttcgtatcacgattttctcgattttcttacgactgtcgaggaggagttaatgaagcttccagccgtcagcaaaccaaaaaagaactatgaggaacaggagatcagcctggagattgtggacaacttttggggaaaggtaaccaaggaaggcaaatttgtggagtccgctgtgattacccagatttattgtctttgtttcgtgaatggcaacctggaatgctttctgactcttaatgacctggaactcccaaagcgggatgaatcttactacgagaaggatagcgagaagaagggcatcgatattttggactatcatttccacaagtgtgtcaatgtccaagaattcgagcagagccgcatcataaaattcgtgcctttagacgcttgtcgctttgagctaatgagatttaaaacactgtataacggtgataatctgcctttttcactgaagtctgtggtcgttgtgcagggagcctatgtagagctgcaggctttcgtgaacatggcttcactcgcacagcggtcttcctatgcgggatcactgcgaagctgtgataacatacggattcatttcccggtgcccagccagtggataaaagctctctggaccatgaatctgcagagacagaagagcctgaaggccaaaatgaatcgcagggcgtgcttagggtccctgcaagaactagaatctgaacccgttattcaagtgactgttggatccgcaaaatacgaatccgcataccaggcggtcgtgtggaaaatcgatagactgcccgataaaaactccagcctcgaccacccgcattgcctgagttacaaactggagctaggctccgatcaggagattccaagcgactggtatcctttcgcaacagtgcaattctcagtgcccgacacatgtgcttcccgcacggaggtgcggagtctcggcgtagaaagcgatgtacagccacagaaacacgttcagcagagggcctgttataatatacaggtggaaatcgagaagaaatggatcaagattgatggggaagacccagacaaaattggggactgcatcacacagtag

SEQ ID NO: 75787 - DNA, 2208 bp, Artificial Sequence
  derived and/or modified sequence
atgtgcagtaccaatcctggaaaatgggtgacctttgacgacgatcctgctgtgcagtcaagtcagaagtcaaaaaattttccgctggaaaaccaaggcgtatgtcgcccaaatggtcttaaactgaacctccccggattaagagagttcccaagcggcagttcctccacatctagtactcctctgtcctccccgatcgtggacttctacttctctcctggacctccgagtaatagtcctttgtctacgcctaccaaggatttccccggtttccccggtatccccaaggccggtactcacgtcctgtaccccatcccggagtcaagctccgattcacccctagcaataagtggcggtgaaagtagtctgctgcccacacgaccgacctgtctgagccacgcattacttcctagcgatcattcctgcacccaccctactcccaaggttgggcttccagatgaggtaaaccctcagcaggcagaaagtcttggcttccaatctgacgatttgccccagtttcaatattttagggaagactgcgccttctcaagtccattctggaaggatgaggggtcagactcgcatttcacactggaccctcccggatccaagaaaatgtttagtagccgcaacaaagagatgcccatagatcagaaatcccttaataagtgtagtctgaactacatctgtgagaaactcgagcatctccagtctgccgaaaatcaggattctctcagaagcttgtcaatgcattgcctatgcgctgaggagaacgcatcctcctttgtccctcacacgctgtttagaagccagccaaagagcgggtggtctttcatgctcaggattcccgaaaaaaaaaacatgatgtcatctaggcaatggggtccaatctttctaaaggtgctacccggaggcatcctgcagatgtactacgaacagggtctggagaagccctttaaagagatccagctggatccttactgtcggctgtccgagcctaaagttgagaacttttctgtggccggaaagattcacactgtgaagattgagcatgtgtcgtacaccgaaaagcggaagtatcatagcaaaacggaagtggtccacgaaccagacatcgaacagatgttaaagctcggatcgacctcataccatgatttccttgatttccttacgacagtggaggaagaattaatgaagctccctgcagtgtcgaaaccgaagaaaaattacgaggagcaggagatctccctagagatcgtcgataatttctgggggaaagttacaaaagaaggtaaattcgtggaatctgccgtgataacccagatctattgtctgtgctttgtgaatggcaatctggagtgttttctgacgttaaacgacctggagctccctaaacgagacgaatcatactacgagaaagattccgaaaaaaagggaattgacatattggactaccatttccataaatgtgttaacgtgcaggagttcgaacagtcgagaataatcaaattcgtgcctctggacgcgtgcaggttcgaactaatgaggttcaaaaccctgtacaacggcgataatttacctttcagcttgaagagcgtcgtggtcgtgcagggggcatacgttgagctgcaggcgttcgtaaatatggcctccctcgcccagcgatcctcatacgcaggcagcctgaggtcatgcgataacatacggatccacttccccgttccgtcacagtggattaaagcattgtggaccatgaacctccagcgtcaaaaatctctgaaggctaagatgaacagacgcgcatgtctaggtagcctgcaggaactggagagcgaacctgttatacaagtcacagtcggcagcgcaaagtatgagtcagcttatcaggctgtggtatggaagatcgatagactacctgacaagaatagctccctggatcacccgcattgcctcagctacaaactcgaactcggaagcgaccaggaaattccctcggactggtatcccttcgccaccgtccagttctcagtgcccgacacctgtgcatctcgcacagaggttaggagcctgggagttgaaagtgatgttcaaccacagaaacatgtccagcagagagcctgttacaatatccaggtggaaatcgaaaaaaaatggataaagattgacggtgaggaccccgataagattggagactgtattactcagtag

SEQ ID NO: 75788 - DNA, 5802 bp, Artificial Sequence
  derived and/or modified sequence
gatcccaaagatgtgctccacaaatccaggcaaatgggtcacctttgatgatgatcctgctgttcaatcttctcaaaagtcaaagaattttcctctggagaatcaaggtgtctgtagaccaaatggactgaagctgaaccttcctggcctcagggaatttcccagtggatcttcctccaccagcagcactcctctctcctcccccattgtagatttttatttcagtccaggacctccaagtaactctcctctttctacacctaccaaagacttcccaggttttcctggcatccccaaagcagggactcatgtgctttatcctattccagaatcatcttcagacagcccactcgcaatatcaggaggagaatcttccttactgcctaccagaccaacatgtttatcccatgccttgttacccagtgaccactcatgtacacatccaactcccaaagtaggtcttccagatgaagttaatcctcaacaggctgaaagcctaggattccaaagtgatgatctcccccagtttcagtattttcgagaggactgtgctttttcaagtccattttggaaagatgaaggcagtgattcccatttcacccttgacccaccaggaagcaaaaagatgttctcatcaagaaacaaggagatgcctattgaccaaaaaagcctaaataagtgttcactcaactatatctgtgagaagcttgaacatctccagtcagctgagaaccaagactcacttagaagtttgtctatgcactgtctatgtgctgaagaaaatgcctcttcctttgtcccccacacactcttcaggagtcagccaaaatccggatggtctttcatgctgagaattcctgagaagaagaatatgatgtcttcccggcaatggggaccaatttttctgaaagttttgcctggaggaattttgcagatgtattatgaacagggattagaaaaaccatttaaagagatacagcttgatccatattgtaggctttctgaacccaaggttgagaacttcagtgtagcaggaaaaatccacactgtgaagattgaacatgtgtcttacacagaaaaaaggaaataccattctaagacagaagtagttcatgaacctgacatagagcagatgctgaagttggggtccacatcgtaccatgacttccttgactttctgactactgtggaggaggagctgatgaagttgccagctgtttcaaaaccaaaaaagaactacgaggagcaagaaatttccttggaaattgtggacaacttttggggtaaagtcacaaaagaaggaaaatttgttgaaagtgctgtgataactcaaatttattgcctctgctttgtgaatgggaacctggaatgctttttaaccttgaatgaccttgagttgccgaagcgagatgaatcctattatgagaaggactcagaaaaaaaggggattgatattcttgactaccattttcataagtgtgtgaatgtacaagaatttgagcaatcaagaatcattaagtttgtacctctggatgcctgccggtttgagctgatgcgtttcaagactttgtataatggggataatcttcccttttccttgaagtctgtagtggttgtccagggagcatacgtggaacttcaggcttttgtcaacatggcctcattggcgcagaggtcatcctatgctggttccttaaggtcctgtgacaatataaggatacactttcctgtcccatcgcagtggatcaaggccctttggaccatgaacctccagaggcagaagtctctgaaagctaaaatgaaccgccgagcatgtctggggagtttacaggaacttgaatctgaacctgtcattcaagtcactgtggggtcagcaaaatatgagagtgcctaccaggcagtggtatggaagatagatcggcttccagacaaaaattcaagtctagatcatccccattgtctgtcatacaaattagagcttggatcagaccaagaaattccctctgattggtatccatttgctactgttcagttttccgtgcctgacacctgtgcctcaaggacagaggtcaggtctctgggagtggagagtgatgtccagccacagaaacatgttcagcagcgagcttgctacaacatccaggttgaaatagaaaagaagtggattaaaatcgatggagaagacccagataaaattggtgactgcataactcagtaggagtagcaagagtttatgatgacagcccacttgtcaaatatgtaattcaccgaaaccacaccaagtcctgctactgtagagtggaaatgacttctgaatagcggttttaggacaggtctgatggctgtgtttagagaagtttagacctaaaaccgaacaatctgtattttttgcttttcatgtgtttttgtcctaggggttcgatctaaaatgtttctataattcgtgtgatgttttgcttcctattgaaactcaaaggcactgttactcgttgtgtgaccccgcagccagtatgatttttgattactcagtggctgactgttttgctctctggattactgaggtgccgtcttcatttcttcccatctcttcttgctgcttagtgtctgtactagagggtaagggaatcaaaggagacataaaccaaaatagttaattttccctctttcttgcctctgaaatgtggctaggtgtagaatgatgttgaaaccacaggctaaaatgtagatctggaagtatctgtgcttttgaattacttatttacctgtcctcttaccgttggtaaataataattggctatatttggtacctgtctctctcctactgtattgtcattttcaaaatgtgtttgttttctggcgcgtgctgcaaagaagctatttctgttgtcctacatattttagtataaatcactaagacatatttcctttcacttggcaggattcctttcaaaatggaatctgagtattagacactagttaacatatttgtgtatattaaatatgaatttttaaaatttataaatactattttccaaaagtacagactctaaggacatattttgataaagtattatttgtaatgaacacaagcctctcttgagtagaagtctaaatcacattatgattattttatactagttctgctatcatgctgttttatgctaattctgcttattttagagtatttttcattaaaaggtgagcaaagtgaaagatacttggtattttacccagatttctaagtggcaacatttttattcttcagagtcaggtaaatgactataatagtttggtttctaatgaaaagtcaatagcattagcagttataattctgtttataatttcctttcagcatttacagtgaaaagtgagaattttaaaatttatgaaatctatattccaggtattgtttttagtctgaaaaacaaactcccccatgtggtattaatataccttcaatttatgttgagtcttaaacataattaggagatatttttctctatttgctagatttgttttgagtcaaaactgatttagtgttcttccaaacaacatttatgtgttggcctacagagtttatttcatgtgttttttttaatatttaatattatattacattcattgaaatctgttcaaaaacagattaagacaaacatttatgatggtctgtatcaatcagcagattttattgcttttcattattttactgtaaaggcaaagaatgcaataggtgatggttggttgaaaggaattgttattgctgtttttattttttactttttttgagacagagtctcactctgttgcccagcctggagtgcagtgtgtcatcttggctcactgcaacctccgcctcctgggttcaagggattctcctgcctcagcctccaactagctgggattacaggcacaagccaccatgcctggctaaaattcttttgtatttttactacagacggagtttccccatgttggccgggctagtctcgaactcctgacctcaggtgatccaccagcctcggcctcccaaagttctgggattaaatgcgtgagccaccatgcccggccgctattgctctttttaacttcatttgatgccttgcttataatatcatatgcttgaggctcactgttgatgtagagtagggcaaatctgtgtgtgtatgtcattaaaaaaattctaccatctttctttatcatctggtgtgggcgcactctacagtgacttcagtctgctcagaacgaatgtggaggccggccgaaactgatgctgcccacagtcccagtgaagttaggtgggttaattactgccattcctttctaagtgtgttttatggcatcctgcccacaaagaactcacagtctgattaggatgaacttaatgactatttacacctcaaaatatattcagcaaagggttcacttagttgcccctcatgcttcacaggttgactagtatctgtgggtacctccctgcccaggttattcactcacaagccaccgggccttcaggacatctcaagattcagtcttgacaatataatagcaaaagctggactaaagcccaaatggattgtctgtggcaatgcagaagctgatagcattaacagcagggtgttacagcataattgttaattcgcacatctattaggatccttaaatattcattacttaatgttaaattaacattctgtgtagggaggggaggcttattcaattcttctgacctcagaactggcagaaggtcagatgtgactacagaactctaggtgaaaaatcaggtagggttcaaattaagtagaactgcccttgccggaatagtgatcttcaaaaaacccttgcttttaggggagggaagcggggaaggaaaggaatgagggaggaaatattcctttctagcattcattttgcttagatcactccattgtgagtttgaccattttggagtcaaatgagcagacttccaaggagttgaccagtttgtgactagtctggtcacctttccagttacaggatcatattaactgtgtaaatgaattcatgggtagatgatttgtgcagatctgaatttaagaacatttcctttttctgtgggaatcacaagagtttatccactaaaaaaagatatgtaaaaaagatactttccagcacataaataaaggctggaattttacaacctgatgtatatattagacagttctaggatgttagttcccttcattccagagctatgcttgtgatacagccccttttcttataaagtcagttagaaggacttccttaacaatgactattataatgtcttacttaaaatacagttttgtattctgtcaatgcaaatataagacaggttgagccttaatcatgtaacaaaatattttgtagattacatattgatttttcaaaaattaaaaatgtatttcaaactattcttactgtgctgtgaatttatatcttcttctgcaagacctggggctatttttttttcttaaggtatgaaatcaatttcaataaccttaaacaattgaccctctgtcaggcatatgtcaggctccactcttaaggagtcagtgaccatgacctctttgcatatcctggaaaaatgacatcatcaaagtatagttgataatgttataaaggatgattttaaaaatagggtataatcatgactcacaaagatatgaggctgggtgtggtggctcacgcctgtaatcccagctctttgggaggctgaagcgggtggatcatgaggtcagaagatcaagaccatactggctaacacggtgaaaccccgtctctact

SEQ ID NO: 75789 - DNA, 5511 bp, Artificial Sequence
  derived and/or modified sequence
ggtgtggctggctgcggccagaatcggagccccaaccgcgctgccgagtcaacctatttgatttcttgacaagaccacaatctgatcccaaagatgtgctccacaaatccaggcaaatgggtcacctttgatgatgatcctgctgttcaatcttctcaaaagtcaaagaattttcctctggagaatcaaggtgtctgtagaccaaatggactgaagctgaaccttcctggcctcagggaatttcccagtggatcttcctccaccagcagcactcctctctcctcccccattgtagatttttatttcagtccaggacctccaagtaactctcctctttctacacctaccaaagacttcccaggttttcctggcatccccaaagcagggactcatgtgctttatcctattccagaatcatcttcagacagcccactcgcaatatcaggaggagaatcttccttactgcctaccagaccaacatgtttatcccatgccttgttacccagtgaccactcatgtacacatccaactcccaaagtaggtcttccagatgaagttaatcctcaacaggctgaaagcctaggattccaaagtgatgatctcccccagtttcagtattttcgagaggactgtgctttttcaagtccattttggaaagatgaaggcagtgattcccatttcacccttgacccaccaggaagcaaaaagatgttctcatcaagaaacaaggagatgcctattgaccaaaaaagcctaaataagtgttcactcaactatatctgtgagaagcttgaacatctccagtcagctgagaaccaagactcacttagaagtttgtctatgcactgtctatgtgctgaagaaaatgcctcttcctttgtcccccacacactcttcaggagtcagccaaaatccggatggtctttcatgctgagaattcctgagaagaagaatatgatgtcttcccggcaatggggaccaatttttctgaaagttttgcctggaggaattttgcagatgtattatgaacagggattagaaaaaccatttaaagagatacagcttgatccatattgtaggctttctgaacccaaggttgagaacttcagtgtagcaggaaaaatccacactgtgaagattgaacatgtgtcttacacagaaaaaaggaaataccattctaagacagaagtagttcatgaacctgacatagagcagatgctgaagttggggtccacatcgtaccatgacttccttgactttctgactactgtggaggaggagctgatgaagttgccagctgtttcaaaaccaaaaaagaactacgaggagcaagaaatttccttggaaattgtggacaacttttggggtaaagtcacaaaagaaggaaaatttgttgaaagtgctgtgataactcaaatttattgcctctgctttgtgaatgggaacctggaatgctttttaaccttgaatgaccttgagttgccgaagcgagatgaatcctattatgagaaggactcagaaaaaaaggggattgatattcttgactaccattttcataagtgtgtgaatgtacaagaatttgagcaatcaagaatcattaagtttgtacctctggatgcctgccggtttgagctgatgcgtttcaagactttgtataatggggataatcttcccttttccttgaagtctgtagtggttgtccagggagcatacgtggaacttcaggcttttgtcaacatggcctcattggcgcagaggtcatcctatgctggttccttaaggtcctgtgacaatataaggatacactttcctgtcccatcgcagtggatcaaggccctttggaccatgaacctccagaggcagaagtctctgaaagctaaaatgaaccgccgagcatgtctggggagtttacaggaacttgaatctgaacctgtcattcaagtcactgtggggtcagcaaaatatgagagtgcctaccaggcagtggtatggaagatagatcggcttccagacaaaaattcaagtctagatcatccccattgtctgtcatacaaattagagcttggatcagaccaagaaattccctctgattggtatccatttgctactgttcagttttccgtgcctgacacctgtgcctcaaggacagaggtcaggtctctgggagtggagagtgatgtccagccacagaaacatgttcagcagcgagcttgctacaacatccaggttgaaatagaaaagaagtggattaaaatcgatggagaagacccagataaaattggtgactgcataactcagtaggagtagcaagagtttatgatgacagcccacttgtcaaatatgtaattcaccgaaaccacaccaagtcctgctactgtagagtggaaatgacttctgaatagcggttttaggacaggtctgatggctgtgtttagagaagtttagacctaaaaccgaacaatctgtattttttgcttttcatgtgtttttgtcctaggggttcgatctaaaatgtttctataattcgtgtgatgttttgcttcctattgaaactcaaaggcactgttactcgttgtgtgaccccgcagccagtatgatttttgattactcagtggctgactgttttgctctctggattactgaggtgccgtcttcatttcttcccatctcttcttgctgcttagtgtctgtactagagggtaagggaatcaaaggagacataaaccaaaatagttaattttccctctttcttgcctctgaaatgtggctaggtgtagaatgatgttgaaaccacaggctaaaatgtagatctggaagtatctgtgcttttgaattacttatttacctgtcctcttaccgttggtaaataataattggctatatttggtacctgtctctctcctactgtattgtcattttcaaaatgtgtttgttttctggcgcgtgctgcaaagaagctatttctgttgtcctacatattttagtataaatcactaagacatatttcctttcacttggcaggattcctttcaaaatggaatctgagtattagacactagttaacatatttgtgtatattaaatatgaatttttaaaatttataaatactattttccaaaagtacagactctaaggacatattttgataaagtattatttgtaatgaacacaagcctctcttgagtagaagtctaaatcacattatgattattttatactagttctgctatcatgctgttttatgctaattctgcttattttagagtatttttcattaaaaggtgagcaaagtgaaagatacttggtattttacccagatttctaagtggcaacatttttattcttcagagtcaggtaaatgactataatagtttggtttctaatgaaaagtcaatagcattagcagttataattctgtttataatttcctttcagcatttacagtgaaaagtgagaattttaaaatttatgaaatctatattccaggtattgtttttagtctgaaaaacaaactcccccatgtggtattaatataccttcaatttatgttgagtcttaaacataattaggagatatttttctctatttgctagatttgttttgagtcaaaactgatttagtgttcttccaaacaacatttatgtgttggcctacagagtttatttcatgtgttttttttaatatttaatattatattacattcattgaaatctgttcaaaaacagattaagacaaacatttatgatggtctgtatcaatcagcagattttattgcttttcattattttactgtaaaggcaaagaatgcaataggtgatggttggttgaaaggaattgttattgctgtttttattttttactttttttgagacagagtctcactctgttgcccagcctggagtgcagtgtgtcatcttggctcactgcaacctccgcctcctgggttcaagggattctcctgcctcagcctccaactagctgggattacaggcacaagccaccatgcctggctaaaattcttttgtatttttactacagacggagtttccccatgttggccgggctagtctcgaactcctgacctcaggtgatccaccagcctcggcctcccaaagttctgggattaaatgcgtgagccaccatgcccggccgctattgctctttttaacttcatttgatgccttgcttataatatcatatgcttgaggctcactgttgatgtagagtagggcaaatctgtgtgtgtatgtcattaaaaaaattctaccatctttctttatcatctggtgtgggcgcactctacagtgacttcagtctgctcagaacgaatgtggaggccggccgaaactgatgctgcccacagtcccagtgaagttaggtgggttaattactgccattcctttctaagtgtgttttatggcatcctgcccacaaagaactcacagtctgattaggatgaacttaatgactatttacacctcaaaatatattcagcaaagggttcacttagttgcccctcatgcttcacaggttgactagtatctgtgggtacctccctgcccaggttattcactcacaagccaccgggccttcaggacatctcaagattcagtcttgacaatataatagcaaaagctggactaaagcccaaatggattgtctgtggcaatgcagaagctgatagcattaacagcagggtgttacagcataattgttaattcgcacatctattaggatccttaaatattcattacttaatgttaaattaacattctgtgtagggaggggaggcttattcaattcttctgacctcagaactggcagaaggtcagatgtgactacagaactctaggtgaaaaatcaggtagggttcaaattaagtagaactgcccttgccggaatagtgatcttcaaaaaacccttgcttttaggggagggaagcggggaaggaaaggaatgagggaggaaatattcctttctagcattcattttgcttagatcactccattgtgagtttgaccattttggagtcaaatgagcagacttccaaggagttgaccagtttgtgactagtctggtcacctttccagttacaggatcatattaactgtgtaaatgaattcatgggtagatgatttgtgcagatctgaatttaagaacatttcctttttctgtgggaatcacaagagtttatccactaaaaaaagatatgtaaaaaagatactttccagcacataaataaaggctggaattttacaacctgatgtatatattagacagttctaggatgttagttcccttcattccagagctatgcttgtgatacagccccttttcttataaagtcagttagaaggacttccttaacaatgactattataatgtcttacttaaaatacagttttgtattctgtcaatgcaaatataagacaggttgagccttaatcatgtaacaaaatattttgtagattacatattgatttttcaaaaattaaaaatgtatttcaaact

SEQ ID NO: 75790 - DNA, 5614 bp, Artificial Sequence
  derived and/or modified sequence
ggccagaatcggagccccaaccgcgctgccgctcggaccttagcctgtgcctgcagcccggagtcccctcctgccctggaaggcaaggagccaggccacggggccacagccgcgggggccaccacactggcccaaatatttcctgcagagtcaacctatttgatttcttgacaagaccacaatctgatcccaaagatgtgctccacaaatccaggcaaatgggtcacctttgatgatgatcctgctgttcaatcttctcaaaagtcaaagaattttcctctggagaatcaaggtgtctgtagaccaaatggactgaagctgaaccttcctggcctcagggaatttcccagtggatcttcctccaccagcagcactcctctctcctcccccattgtagatttttatttcagtccaggacctccaagtaactctcctctttctacacctaccaaagacttcccaggttttcctggcatccccaaagcagggactcatgtgctttatcctattccagaatcatcttcagacagcccactcgcaatatcaggaggagaatcttccttactgcctaccagaccaacatgtttatcccatgccttgttacccagtgaccactcatgtacacatccaactcccaaagtaggtcttccagatgaagttaatcctcaacaggctgaaagcctaggattccaaagtgatgatctcccccagtttcagtattttcgagaggactgtgctttttcaagtccattttggaaagatgaaggcagtgattcccatttcacccttgacccaccaggaagcaaaaagatgttctcatcaagaaacaaggagatgcctattgaccaaaaaagcctaaataagtgttcactcaactatatctgtgagaagcttgaacatctccagtcagctgagaaccaagactcacttagaagtttgtctatgcactgtctatgtgctgaagaaaatgcctcttcctttgtcccccacacactcttcaggagtcagccaaaatccggatggtctttcatgctgagaattcctgagaagaagaatatgatgtcttcccggcaatggggaccaatttttctgaaagttttgcctggaggaattttgcagatgtattatgaacagggattagaaaaaccatttaaagagatacagcttgatccatattgtaggctttctgaacccaaggttgagaacttcagtgtagcaggaaaaatccacactgtgaagattgaacatgtgtcttacacagaaaaaaggaaataccattctaagacagaagtagttcatgaacctgacatagagcagatgctgaagttggggtccacatcgtaccatgacttccttgactttctgactactgtggaggaggagctgatgaagttgccagctgtttcaaaaccaaaaaagaactacgaggagcaagaaatttccttggaaattgtggacaacttttggggtaaagtcacaaaagaaggaaaatttgttgaaagtgctgtgataactcaaatttattgcctctgctttgtgaatgggaacctggaatgctttttaaccttgaatgaccttgagttgccgaagcgagatgaatcctattatgagaaggactcagaaaaaaaggggattgatattcttgactaccattttcataagtgtgtgaatgtacaagaatttgagcaatcaagaatcattaagtttgtacctctggatgcctgccggtttgagctgatgcgtttcaagactttgtataatggggataatcttcccttttccttgaagtctgtagtggttgtccagggagcatacgtggaacttcaggcttttgtcaacatggcctcattggcgcagaggtcatcctatgctggttccttaaggtcctgtgacaatataaggatacactttcctgtcccatcgcagtggatcaaggccctttggaccatgaacctccagaggcagaagtctctgaaagctaaaatgaaccgccgagcatgtctggggagtttacaggaacttgaatctgaacctgtcattcaagtcactgtggggtcagcaaaatatgagagtgcctaccaggcagtggtatggaagatagatcggcttccagacaaaaattcaagtctagatcatccccattgtctgtcatacaaattagagcttggatcagaccaagaaattccctctgattggtatccatttgctactgttcagttttccgtgcctgacacctgtgcctcaaggacagaggtcaggtctctgggagtggagagtgatgtccagccacagaaacatgttcagcagcgagcttgctacaacatccaggttgaaatagaaaagaagtggattaaaatcgatggagaagacccagataaaattggtgactgcataactcagtaggagtagcaagagtttatgatgacagcccacttgtcaaatatgtaattcaccgaaaccacaccaagtcctgctactgtagagtggaaatgacttctgaatagcggttttaggacaggtctgatggctgtgtttagagaagtttagacctaaaaccgaacaatctgtattttttgcttttcatgtgtttttgtcctaggggttcgatctaaaatgtttctataattcgtgtgatgttttgcttcctattgaaactcaaaggcactgttactcgttgtgtgaccccgcagccagtatgatttttgattactcagtggctgactgttttgctctctggattactgaggtgccgtcttcatttcttcccatctcttcttgctgcttagtgtctgtactagagggtaagggaatcaaaggagacataaaccaaaatagttaattttccctctttcttgcctctgaaatgtggctaggtgtagaatgatgttgaaaccacaggctaaaatgtagatctggaagtatctgtgcttttgaattacttatttacctgtcctcttaccgttggtaaataataattggctatatttggtacctgtctctctcctactgtattgtcattttcaaaatgtgtttgttttctggcgcgtgctgcaaagaagctatttctgttgtcctacatattttagtataaatcactaagacatatttcctttcacttggcaggattcctttcaaaatggaatctgagtattagacactagttaacatatttgtgtatattaaatatgaatttttaaaatttataaatactattttccaaaagtacagactctaaggacatattttgataaagtattatttgtaatgaacacaagcctctcttgagtagaagtctaaatcacattatgattattttatactagttctgctatcatgctgttttatgctaattctgcttattttagagtatttttcattaaaaggtgagcaaagtgaaagatacttggtattttacccagatttctaagtggcaacatttttattcttcagagtcaggtaaatgactataatagtttggtttctaatgaaaagtcaatagcattagcagttataattctgtttataatttcctttcagcatttacagtgaaaagtgagaattttaaaatttatgaaatctatattccaggtattgtttttagtctgaaaaacaaactcccccatgtggtattaatataccttcaatttatgttgagtcttaaacataattaggagatatttttctctatttgctagatttgttttgagtcaaaactgatttagtgttcttccaaacaacatttatgtgttggcctacagagtttatttcatgtgttttttttaatatttaatattatattacattcattgaaatctgttcaaaaacagattaagacaaacatttatgatggtctgtatcaatcagcagattttattgcttttcattattttactgtaaaggcaaagaatgcaataggtgatggttggttgaaaggaattgttattgctgtttttattttttactttttttgagacagagtctcactctgttgcccagcctggagtgcagtgtgtcatcttggctcactgcaacctccgcctcctgggttcaagggattctcctgcctcagcctccaactagctgggattacaggcacaagccaccatgcctggctaaaattcttttgtatttttactacagacggagtttccccatgttggccgggctagtctcgaactcctgacctcaggtgatccaccagcctcggcctcccaaagttctgggattaaatgcgtgagccaccatgcccggccgctattgctctttttaacttcatttgatgccttgcttataatatcatatgcttgaggctcactgttgatgtagagtagggcaaatctgtgtgtgtatgtcattaaaaaaattctaccatctttctttatcatctggtgtgggcgcactctacagtgacttcagtctgctcagaacgaatgtggaggccggccgaaactgatgctgcccacagtcccagtgaagttaggtgggttaattactgccattcctttctaagtgtgttttatggcatcctgcccacaaagaactcacagtctgattaggatgaacttaatgactatttacacctcaaaatatattcagcaaagggttcacttagttgcccctcatgcttcacaggttgactagtatctgtgggtacctccctgcccaggttattcactcacaagccaccgggccttcaggacatctcaagattcagtcttgacaatataatagcaaaagctggactaaagcccaaatggattgtctgtggcaatgcagaagctgatagcattaacagcagggtgttacagcataattgttaattcgcacatctattaggatccttaaatattcattacttaatgttaaattaacattctgtgtagggaggggaggcttattcaattcttctgacctcagaactggcagaaggtcagatgtgactacagaactctaggtgaaaaatcaggtagggttcaaattaagtagaactgcccttgccggaatagtgatcttcaaaaaacccttgcttttaggggagggaagcggggaaggaaaggaatgagggaggaaatattcctttctagcattcattttgcttagatcactccattgtgagtttgaccattttggagtcaaatgagcagacttccaaggagttgaccagtttgtgactagtctggtcacctttccagttacaggatcatattaactgtgtaaatgaattcatgggtagatgatttgtgcagatctgaatttaagaacatttcctttttctgtgggaatcacaagagtttatccactaaaaaaagatatgtaaaaaagatactttccagcacataaataaaggctggaattttacaacctgatgtatatattagacagttctaggatgttagttcccttcattccagagctatgcttgtgatacagccccttttcttataaagtcagttagaaggacttccttaacaatgactattataatgtcttacttaaaatacagttttgtattctgtcaatgcaaatataagacaggttgagccttaatcatgtaacaaaatattttgtagattacatattgatttttcaaaaattaaaaatgtatttcaaacta

SEQ ID NO: 75791 - protein, 734 aa, Artificial Sequence
  derived and/or modified sequence
MPGSATALRHERLKKTNARPIPLGLFTINEEDEQQKNGNSRRPKAPDSYKVQDKKNASSRPASAISGQNNNHSGNKPDPPPVLRVDDRQRLARERREEREKQLAAREIVWLEREERARQHYEKHLEERKKRLEEQRQKEERRRAAVEEKRRQRLEEDKERHEAVVRRTMERSQKPKQKHNRWSWGGSLHGSPSIHSAARRLQLSPWESSVVNRLLTPTHSFLARSKSTAALSGEAASCSPIIMPYKAAHSRNSMDRPKLFVTPPEGSSRRRIIHGTASYKKERERENVLFLTSGTRRAVSPSNPKARQPARSRLWLPSKSLPHLPGTPRPTSSLPPGSVKAAPAQVRPPSPGNIRPVKREVKVEPEKKDPEKEPQKVANEPSLKGRAPLVKVEEATVEERTPAEPEVGPAAPAMAPAPASAPAPASAPAPAPVPTPAMVSAPSSTVNASASVKTSAGTTDPEEATRLLAEKRRLAREQREKEERERREQEELERQKREELAQRVAEERTTRREEESRRLEAEQAREKEEQLQRQAEERALREREEAERAQRQKEEEARVREEAERVRQEREKHFQREEQERLERKKRLEEIMKRTRRTEATDKKTSDQRNGDIAKGALTGGTEVSALPCTTNAPGNGKPVGSPHVVTSHQSKVTVESTPDLEKQPNENGVSVQNENFEEIINLPIGSKPSRLDVTNSESPEIPLNPILAFDDEGTLGPLPQVDGVQTQQTAEVI

SEQ ID NO: 75792 - DNA, 2205 bp, Artificial Sequence
  derived and/or modified sequence
atgcccggcagcgccaccgccctgagacacgagagactgaagaagaccaacgccagacccatccccctgggcctgttcaccatcaacgaggaggacgagcagcagaagaacggcaacagcagaagacccaaggcccccgacagctacaaggtgcaggacaagaagaacgccagcagcagacccgccagcgccatcagcggccagaacaacaaccacagcggcaacaagcccgaccccccccccgtgctgagagtggacgacagacagagactggccagagagagaagagaggagagagagaagcagctggccgccagagagatcgtgtggctggagagagaggagagagccagacagcactacgagaagcacctggaggagagaaagaagagactggaggagcagagacagaaggaggagagaagaagagccgccgtggaggagaagagaagacagagactggaggaggacaaggagagacacgaggccgtggtgagaagaaccatggagagaagccagaagcccaagcagaagcacaacagatggagctggggcggcagcctgcacggcagccccagcatccacagcgccgccagaagactgcagctgagcccctgggagagcagcgtggtgaacagactgctgacccccacccacagcttcctggccagaagcaagagcaccgccgccctgagcggcgaggccgccagctgcagccccatcatcatgccctacaaggccgcccacagcagaaacagcatggacagacccaagctgttcgtgaccccccccgagggcagcagcagaagaagaatcatccacggcaccgccagctacaagaaggagagagagagagagaacgtgctgttcctgaccagcggcaccagaagagccgtgagccccagcaaccccaaggccagacagcccgccagaagcagactgtggctgcccagcaagagcctgccccacctgcccggcacccccagacccaccagcagcctgccccccggcagcgtgaaggccgcccccgcccaggtgagaccccccagccccggcaacatcagacccgtgaagagagaggtgaaggtggagcccgagaagaaggaccccgagaaggagccccagaaggtggccaacgagcccagcctgaagggcagagcccccctggtgaaggtggaggaggccaccgtggaggagagaacccccgccgagcccgaggtgggccccgccgcccccgccatggcccccgcccccgccagcgcccccgcccccgccagcgcccccgcccccgcccccgtgcccacccccgccatggtgagcgcccccagcagcaccgtgaacgccagcgccagcgtgaagaccagcgccggcaccaccgaccccgaggaggccaccagactgctggccgagaagagaagactggccagagagcagagagagaaggaggagagagagagaagagagcaggaggagctggagagacagaagagagaggagctggcccagagagtggccgaggagagaaccaccagaagagaggaggagagcagaagactggaggccgagcaggccagagagaaggaggagcagctgcagagacaggccgaggagagagccctgagagagagagaggaggccgagagagcccagagacagaaggaggaggaggccagagtgagagaggaggccgagagagtgagacaggagagagagaagcacttccagagagaggagcaggagagactggagagaaagaagagactggaggagatcatgaagagaaccagaagaaccgaggccaccgacaagaagaccagcgaccagagaaacggcgacatcgccaagggcgccctgaccggcggcaccgaggtgagcgccctgccctgcaccaccaacgcccccggcaacggcaagcccgtgggcagcccccacgtggtgaccagccaccagagcaaggtgaccgtggagagcacccccgacctggagaagcagcccaacgagaacggcgtgagcgtgcagaacgagaacttcgaggagatcatcaacctgcccatcggcagcaagcccagcagactggacgtgaccaacagcgagagccccgagatccccctgaaccccatcctggccttcgacgacgagggcaccctgggccccctgccccaggtggacggcgtgcagacccagcagaccgccgaggtgatctag

SEQ ID NO: 75793 - DNA, 2205 bp, Artificial Sequence
  derived and/or modified sequence
atgcccgggagcgctaccgctcttcgtcatgagcggttaaaaaagactaacgctcggcccattcccttagggctgtttacgattaatgaggaggatgagcaacaaaagaacggcaacagcagaagaccaaaggcaccggactcatacaaagtgcaagacaagaagaacgcttctagccgtccagcttcggctatctccggccaaaataacaatcattcaggcaacaaacccgacccaccccccgttctgagagtggatgatcgtcagcgccttgcacgcgaacgccgagaagagcgagaaaagcagctggcagcaagggagattgtgtggctggagcgagaagagcgggctaggcagcactatgaaaaacacctcgaagagcggaagaagaggctagaggagcagagacagaaggaagaacgcagaagagcagcagttgaggagaagagacgccagcgcctggaagaagataaggagcggcatgaagccgtggtgcggaggacaatggagcggagccagaagcccaagcaaaaacataaccgttggtcttggggcggatccctgcacggatccccctccattcactcagctgcgcgcagactgcagctgagtccgtgggaatcatctgtagtgaatcgcttactgactcccacacattctttcctggctaggtcaaaatctacggccgcccttagtggcgaggccgcgtcatgtagcccaatcattatgccatacaaggccgctcactctcgcaattctatggaccggccaaaacttttcgtgactccacccgagggatcgtcccgaagaagaatcattcacggaactgcctcttataaaaaggaaagggagagagagaatgtgctatttcttacatccggaacaagacgagctgtgtccccttccaatcccaaagcccgccaaccagccaggtccaggctatggctgccatcaaaatcgctgccccacctgcctggcaccccgcggcccacctcatcgctcccaccaggcagcgttaaggcggccccggctcaggtgcgcccaccaagtccaggcaatataaggcccgtgaaacgggaagtcaaagtagagccggaaaagaaggatccagagaaagagcctcagaaagtagccaacgagccttccctgaaagggcgcgctcccctggtcaaggtggaggaggcaactgttgaagagcggactccagccgagcctgaggtgggaccagctgccccggctatggcccctgccccagcctcagctccagcccctgcttcagcccccgcaccagctcccgtgcccactccagctatggtcagtgcccccagctccacagtcaatgccagtgcgtccgtgaaaacatctgccggcacaactgaccccgaagaggcgacacggctgttggctgagaaacggaggctggccagggaacagcgagaaaaggaggagcgcgaacgcagagaacaggaagaactggagaggcagaagagagaagagcttgcccagagagtagctgaagagagaacaactagacgggaagaagagtcaagaaggcttgaagccgagcaagctcgggaaaaggaagaacaactacagaggcaagccgaggagcgtgcccttcgagagagagaagaagcagaaagagctcagcggcagaaagaggaggaagcaagggtacgagaagaagctgagagggtgagacaagagagggaaaagcatttccagcgggaagagcaggaacgacttgagaggaaaaaacggcttgaggaaattatgaagagaactcggaggaccgaagccaccgacaagaagacttctgatcagcgtaatggtgatatcgcaaaaggcgccttgaccggtggaacggaggtgtccgcgctcccctgcaccacaaacgcccccggcaacggcaagccagtgggttctcctcacgtcgttacgtcccaccagtcaaaagtaacggtcgaatcaacgcccgatctcgagaagcagccgaatgagaatggcgtgtctgtgcagaacgaaaatttcgaggagattattaaccttccaattggaagcaagcccagccgcctggatgttaccaactcagaatctccagaaatccccctgaaccctatcctggccttcgacgacgaagggactttaggcccgcttccacaagtcgacggggtgcagactcaacaaactgctgaagtgatctag

SEQ ID NO: 75794 - DNA, 2205 bp, Artificial Sequence
  derived and/or modified sequence
atgcctggcagcgccacagccctgcggcatgagcggctgaagaagaccaatgcccggcccatccccctgggcctcttcaccatcaatgaagaagatgagcagcagaagaatggaaacagcagaagacccaaggccccagacagctacaaggtgcaggacaagaagaatgccagcagcaggcctgccagcgccatcagcggccagaacaacaaccacagcggcaacaagccagaccccccacctgtgctgcgggtggatgaccggcagaggctggcccgggagcggcgggaggagcgggagaagcagctggccgcccgggagatcgtgtggctggagcgggaggagcgggcccggcagcactatgagaagcacctggaggagaggaagaagaggctggaggagcagaggcagaaggaggagcggcggcgggctgctgtggaggagaagaggcggcagaggctggaggaggacaaggagagacatgaagctgtggtgcggaggaccatggagaggagccagaagcccaagcagaagcacaaccgctggagctggggcggcagcctgcacggcagccccagcatccacagcgctgcccggcggctgcagctgagcccctgggagagctctgtggtgaaccggctgctgacccccacccacagcttcctggcccggagcaagagcacagctgccctgagcggggaggccgccagctgcagccccatcatcatgccctacaaggccgcccacagcagaaattccatggaccggcccaagctgtttgtgaccccacctgagggcagcagcagaagacgcatcatccacggcacagccagctacaagaaggagcgggagcgggagaatgtgctcttcctgaccagcggcacccggcgggctgtgagccccagcaaccccaaggcccggcagcctgcccggagccggctgtggctgcccagcaagagcctgccccacctgcccggcaccccccggcccaccagcagcctgcccccaggctctgtgaaggccgccccagcccaggtgcggccccccagccctggcaacatccggcctgtgaagcgggaggtgaaggtggagcctgagaagaaggaccctgagaaggagccccagaaggtggccaatgagcccagcctgaagggccgggcccccctggtgaaggtggaggaggccaccgtggaggagaggaccccagctgagcctgaggtgggccctgctgccccagccatggccccagccccagccagcgccccagccccagccagcgccccagccccagcccctgtgcccaccccagccatggtgtctgcccccagcagcacagtgaatgccagcgcctctgtgaagaccagcgctggcaccacagatcctgaggaggccacccggctgctggccgagaagaggcggctggcccgggagcagcgggagaaggaggagcgggagcggcgggagcaggaggagctggagcggcagaagcgggaggagctggcccagagggtggccgaggagaggaccacccggcgggaggaggagagccggcggctggaggccgagcaggcccgggagaaggaggagcagctgcagaggcaggccgaggagcgggccctgcgggagcgggaggaggccgagcgggcccagaggcagaaggaggaggaggcccgggtgcgggaggaggccgagcgggtgcggcaggagcgggagaagcacttccagcgggaggagcaggagcggctggagaggaagaagaggctggaggagatcatgaagaggaccaggagaacagaggccacagacaagaagaccagtgaccagagaaatggagacatcgccaagggggccctgactggaggaacagaggtgtctgccctgccctgcaccaccaatgcccctggaaatggcaagcctgtgggcagcccccacgtggtgaccagccaccagagcaaggtgacagtggagagcaccccagacctggagaagcagcccaatgaaaatggagtgtctgtgcagaatgaaaattttgaggagatcatcaacctgcccatcggcagcaagcccagccggctggatgtgaccaacagcgagagccctgagatccccctgaaccccatcctggcctttgatgatgagggcaccctgggccccctgccccaggtggatggagtgcagacccagcagacagctgaggtgatctag

SEQ ID NO: 75795 - DNA, 2622 bp, Artificial Sequence
  derived and/or modified sequence
aaaaacaagtagcagcggtatgcctggatcagctacagctctccgacatgagagactgaagaagaccaatgcaaggccaattcctcttggtttattcaccattaatgaggaagacgaacagcaaaagaatggaaattccagaagaccaaaagcacccgacagctacaaagtgcaagataagaaaaatgcctccagccgccctgcctctgcaatttcaggacaaaataacaaccactcaggaaataaaccagaccctccgcctgtgttacgtgttgatgaccggcagcggctggcccgggagcgacgtgaggaacgggagaaacagctagctgcaagagaaatagtgtggttagaaagagaagagcgagccaggcagcactacgagaagcacctggaagagcggaagaagaggttggaggagcagaggcagaaggaggagcggaggagggctgctgtggaggagaagcggaggcagagacttgaggaggacaaagaacgccacgaagctgttgtacggcgcacaatggaaaggagccagaagccaaaacagaagcataaccgttggtcgtggggaggctctctccatgggagccctagcatccacagtgcagctcgccgcctgcagctcagcccatgggagagcagcgttgttaacagactcctgacgcccacacattcgttcctggccagaagtaaaagcacagctgccttgtctggagaagcagcatcttgcagccccatcatcatgccctacaaagctgcacactctagaaattcgatggatcgaccaaaactctttgtaacaccacctgagggctcttctcgcaggaggatcattcatggcacagcgagctataaaaaagaaagagagagagaaaatgtactcttcctcacatctggcacccgaagggctgtatctccatctaatcccaaagcaagacaaccagctcgctcccgactttggcttccgtccaagtctcttcctcatttgcctggcacacccagaccgacatcctccttgccacccggctcagtcaaagctgctcctgctcaggtccggcccccatcccccggcaacatccgccctgtcaagagggaagtcaaagtggagcctgagaagaaagatcctgagaaggaacctcagaaagttgccaatgagccctcactaaagggcagagcacctttagtgaaggtagaagaagccacagttgaagagcggacacctgctgaaccagaagttggccctgctgctccagccatggccccagctccagcctcggccccagctccagcctcggccccagctccagccccggtccccaccccagccatggtctcagccccgtcatccactgtgaatgccagtgcttctgttaagacttctgcaggcaccaccgacccagaggaggccacaaggcttctagctgagaagaggcggctggcccgagagcagagagaaaaggaagaaagggagaggagggagcaggaagagcttgaaagacaaaagagagaggaattggctcaacgtgtggctgaagagaggacgactcgccgtgaggaggagtcgcgcaggctggaagccgagcaggcccgggagaaggaggagcagctgcagcggcaggcggaggagcgggcgctgcgcgagcgggaggaggcagagcgcgcccagaggcagaaagaagaagaagctcgcgttcgtgaagaagcagagagggtccggcaggaacgagagaagcatttccagagagaagagcaagagcgcctggagagaaagaagcgacttgaggagattatgaaaagaaccaggagaacagaagctacagataagaaaaccagtgatcagagaaacggtgatatagccaagggagctctcactggaggaacagaggtgtctgcacttccatgtacaacaaacgctccgggaaatggaaagccagttggcagcccacatgtggttacctcacaccagtcaaaagtgacagtggagagcactcccgatttggaaaaacaaccaaatgaaaatggtgtatctgttcagaatgaaaattttgaagaaattataaacttacccattggatctaaaccatccagattagatgtcaccaacagtgagagcccagaaattcctttgaatccaattttggcctttgatgatgaagggacacttgggcccctgcctcaggtagatggtgttcagacacagcagactgcagaagttatatgagtgtttcttctgaagaaccaaagctgaaatttaatgagaatttctacaattaatggaattcctttcctgctataaaggagcatcccctccacccgttttctagagttcttgaccatcattttgaaaagatttattaaaactagctaaagacaacagactggatagcttttctaataattttcatcaataggaaaaaagaaatacgtctcattcttcaatactttaaaatggctttttccagtgtgctccttcttagcaatcaatatttttctgcattctttaaaagacaagagaatttggttataaaagaaatgggctgactaggcatgatttttttggtcttaaaagcttaacatgtaaaattggcaaaaaaaattttttaccttttataatacttg

SEQ ID NO: 75796 - DNA, 2205 bp, Artificial Sequence
  derived and/or modified sequence
atgcccggcagcgccaccgccctgcggcacgagcggctgaagaagactaatgctcgccctataccactgggcctgtttacaatcaacgaagaggacgaacagcagaaaaacggtaactcacgaaggccgaaggcacccgatagctacaaggtccaggacaaaaaaaacgcaagtagtcgacctgcatccgcaatctcaggccaaaataataaccactctggcaataaacccgatccgccacctgttctccgggtggacgatcgccaaagactcgcaagagagcggcgtgaagagcgggaaaaacagctggctgcgcgcgaaatagtgtggctggagagagaagaacgggccagacagcactacgagaagcacctcgaggagcgcaagaagaggctagaggaacagcggcaaaaggaggagcgtcgccgtgctgcagttgaggaaaagagaagacagcgactggaagaggacaaggaacgccacgaggccgtcgtgaggcgaactatggagcgatctcaaaagcccaaacagaagcacaatagatggtcctggggcggaagtcttcatggcagccccagcatacattcagctgcgcgtcgcttgcagctgagcccctgggaaagctccgtggttaatagactgctgactccaacccacagcttcctagccagatccaaatctaccgccgcccttagcggggaggcagcctcgtgttcccccatcatcatgccgtacaaagctgcacactcccgcaattctatggataggcccaaactctttgtgacaccccccgagggaagctcaagaagacggatcattcatggaactgcatcgtacaagaaggagcgggaacgtgaaaatgttctatttctgaccagtggcactcggcgagcggtgtctccatcaaatcccaaagccaggcagccagcccgtagtagactctggctaccgtcgaagtccctgccccatctgcctgggactccccggcctacctcatcactgccacccgggtccgtgaaagccgcccctgcccaagtgcgccccccttcacctggtaatatccggccagtcaagcgggaggtgaaggtggagcctgaaaagaaagatcctgagaaggagccccagaaagttgcaaatgagcccagcctcaaggggcgcgcccctctcgttaaggtcgaagaagccaccgtagaggagcgcaccccagccgaacctgaggtcggccctgctgctcccgccatggcacccgccccagccagcgcacccgccccagctagcgccccagcaccggcccctgtacccaccccggccatggtttctgccccaagcagcactgtgaacgcttcggccagcgtaaaaacgagcgccggcactactgatccagaggaggctacacgcctccttgccgagaagcgacgtttggctcgagaacagagggagaaggaagagcgagaaagaagagagcaagaagagctggagcggcaaaagcgggaagagctggcgcaacgtgtcgctgaggagaggacaacccgccgggaagaggagtccagaagactggaggccgaacaggcccgggaaaaagaggaacagctccagcggcaggcggaagaaagagcattgcgcgagcgagaggaggcggagcgcgcacagaggcagaaggaggaggaggccagggtgcgagaagaagctgagcgggtgcgacaggagcgtgaaaagcactttcaacgggaagaacaggaacgactggagagaaagaagcggctggaggagatcatgaaaaggacacgcagaaccgaggcaacagataagaagacatccgatcagcgcaacggagacatcgccaagggcgcattgactggaggcaccgaagtttctgccctgccttgcacgaccaatgctcccggaaatggtaagcccgtgggctcaccccacgtggttactagccatcaaagcaaggtgacagtggaatcaacgccggatctggaaaaacagccgaatgagaatggcgtgtcggttcagaacgagaatttcgaggaaatcattaacctgccgattggttctaaaccatccagactagatgttaccaattcggagagcccggaaattccgctgaatccaattctcgcgttcgatgatgaaggaaccctgggcccacttcctcaggtcgatggagttcagacccagcagactgcggaagtcatctag

SEQ ID NO: 75797 - DNA, 2205 bp, Artificial Sequence
  derived and/or modified sequence
atgcccggatcagcaacagccctcaggcacgaacggctgaagaagaccaacgctcgtccaatcccactggggctcttcactatcaatgaagaggacgaacagcaaaagaacgggaatagccgcaggccaaaagccccagatagctacaaagtgcaagacaagaaaaatgcaagctcccggccagcatctgccatttctggacaaaacaataatcactcagggaataagcctgatccccctccggtgctgagggttgacgaccgtcagaggcttgcaagggaaagacgggaggagagggagaagcagctcgcagccagggagattgtgtggcttgaaagagaagagcgcgcaagacagcattacgaaaaacacctagaggagcgcaagaaacgcctggaggaacaaagacagaaagaagaaagacgtagggccgctgtggaggagaagcggcgtcagagactggaggaggacaaggaaaggcatgaggcagtggtgaggagaacgatggagagaagccagaagcccaaacagaaacacaaccgctggtcatgggggggtagtctacatggctcaccatctattcatagcgctgcaaggcgccttcagctgtctccatgggaatcatctgtggtgaatagattactgacccccacacatagctttctggcacgctccaagtcaactgctgctttatctggcgaggcggcttcctgcagccccattattatgccatataaagccgctcactccaggaatagcatggaccgaccaaaattattcgtcacgcctccagaaggttccagccggcgacgcattatccacggcactgcctcttataagaaggaaagagaacgagagaatgttttgttcctgacatccgggacaaggagggctgtgtcccctagcaatcctaaggctcggcagcccgctagaagtcgattgtggctgccgtccaaatctctgcctcatttgcctggcacacctcggcctacctcatctctacctccaggatctgtaaaggctgctcccgctcaagtgcggcctccgtcacccggaaacatccgccctgtaaaaagagaggtgaaggtggagccggagaagaaagaccctgaaaaggagccccagaaggtcgccaacgaaccctcactgaagggaagagcaccactggtgaaggttgaagaagccacagttgaggagcgtacgccagctgagccagaagtgggtcctgccgcaccggctatggctcccgctcctgcgtcagccccagctcctgcttccgcgcctgccccagcgccagtcccgaccccagccatggtaagcgcgccttcaagcactgtaaatgccagcgcttcggtgaaaacaagcgccggaaccactgatccagaggaagcgacacggttacttgccgagaaaagaaggttggcgcgagagcagcgtgagaaagaggagagagaacgcagggaacaggaggaactggagagacaaaagcgggaggaactagcccagcgcgtcgctgaggaaagaaccactcgcagggaggaggagtcccggcgactggaagctgaacaggcccgtgagaaggaggaacaattgcagagacaagccgaggaaagggccctccgagagcgagaggaggcggagcgtgcccaaagacagaaagaagaggaggctcgcgtgcgagaggaggcagaaagggttcggcaagaacgggaaaaacacttccagcgcgaggagcaagaaaggttggaacggaagaaaaggcttgaagagattatgaagagaacacggcgaaccgaagcaactgataagaagacaagtgaccaacgcaacggagatatagctaaaggcgctctgacaggtggtacagaagtgagcgctttaccgtgcaccaccaatgcccctggcaatgggaaaccggtaggatcaccacatgtggtgacttcacatcaatcaaaggtgaccgtagagtccacccccgacctggagaaacaacccaatgagaacggtgtgtctgtgcagaatgagaacttcgaggagatcatcaacctgcctattggttcaaagccctcaagactggatgtgaccaactcagagagcccagaaatcccacttaaccctatacttgcctttgacgacgagggcacactgggtcctctcccccaagtagatggcgtccaaacacagcagaccgcggaggttatctag

SEQ ID NO: 75798 - protein, 771 aa, Artificial Sequence
  derived and/or modified sequence
MPGSATALRHERLKKTNARPIPLGLFTINEEDEQQKNGNSRRPKAPDSYKVQDKKNASSRPASAISGQNNNHSGNKPDPPPVLRVDDRQRLARERREEREKQLAAREIVWLEREERARQHYEKHLEERKKRLEEQRQKEERRRAAVEEKRRQRLEEDKERHEAVVRRTMERSQKPKQKHNRWSWGGSLHGSPSIHSADPDRRSVSTMNLSKYVDPVISKRLSSSSATLLNSPDRARRLQLSPWESSVVNRLLTPTHSFLARSKSTAALSGEAASCSPIIMPYKAAHSRNSMDRPKLFVTPPEGSSRRRIIHGTASYKKERERENVLFLTSGTRRAVSPSNPKARQPARSRLWLPSKSLPHLPGTPRPTSSLPPGSVKAAPAQVRPPSPGNIRPVKREVKVEPEKKDPEKEPQKVANEPSLKGRAPLVKVEEATVEERTPAEPEVGPAAPAMAPAPASAPAPASAPAPAPVPTPAMVSAPSSTVNASASVKTSAGTTDPEEATRLLAEKRRLAREQREKEERERREQEELERQKREELAQRVAEERTTRREEESRRLEAEQAREKEEQLQRQAEERALREREEAERAQRQKEEEARVREEAERVRQEREKHFQREEQERLERKKRLEEIMKRTRRTEATDKKTSDQRNGDIAKGALTGGTEVSALPCTTNAPGNGKPVGSPHVVTSHQSKVTVESTPDLEKQPNENGVSVQNENFEEIINLPIGSKPSRLDVTNSESPEIPLNPILAFDDEGTLGPLPQVDGVQTQQTAEVI

SEQ ID NO: 75799 - DNA, 2316 bp, Artificial Sequence
  derived and/or modified sequence
atgcccggcagcgccaccgccctgagacacgagagactgaagaagaccaacgccagacccatccccctgggcctgttcaccatcaacgaggaggacgagcagcagaagaacggcaacagcagaagacccaaggcccccgacagctacaaggtgcaggacaagaagaacgccagcagcagacccgccagcgccatcagcggccagaacaacaaccacagcggcaacaagcccgaccccccccccgtgctgagagtggacgacagacagagactggccagagagagaagagaggagagagagaagcagctggccgccagagagatcgtgtggctggagagagaggagagagccagacagcactacgagaagcacctggaggagagaaagaagagactggaggagcagagacagaaggaggagagaagaagagccgccgtggaggagaagagaagacagagactggaggaggacaaggagagacacgaggccgtggtgagaagaaccatggagagaagccagaagcccaagcagaagcacaacagatggagctggggcggcagcctgcacggcagccccagcatccacagcgccgaccccgacagaagaagcgtgagcaccatgaacctgagcaagtacgtggaccccgtgatcagcaagagactgagcagcagcagcgccaccctgctgaacagccccgacagagccagaagactgcagctgagcccctgggagagcagcgtggtgaacagactgctgacccccacccacagcttcctggccagaagcaagagcaccgccgccctgagcggcgaggccgccagctgcagccccatcatcatgccctacaaggccgcccacagcagaaacagcatggacagacccaagctgttcgtgaccccccccgagggcagcagcagaagaagaatcatccacggcaccgccagctacaagaaggagagagagagagagaacgtgctgttcctgaccagcggcaccagaagagccgtgagccccagcaaccccaaggccagacagcccgccagaagcagactgtggctgcccagcaagagcctgccccacctgcccggcacccccagacccaccagcagcctgccccccggcagcgtgaaggccgcccccgcccaggtgagaccccccagccccggcaacatcagacccgtgaagagagaggtgaaggtggagcccgagaagaaggaccccgagaaggagccccagaaggtggccaacgagcccagcctgaagggcagagcccccctggtgaaggtggaggaggccaccgtggaggagagaacccccgccgagcccgaggtgggccccgccgcccccgccatggcccccgcccccgccagcgcccccgcccccgccagcgcccccgcccccgcccccgtgcccacccccgccatggtgagcgcccccagcagcaccgtgaacgccagcgccagcgtgaagaccagcgccggcaccaccgaccccgaggaggccaccagactgctggccgagaagagaagactggccagagagcagagagagaaggaggagagagagagaagagagcaggaggagctggagagacagaagagagaggagctggcccagagagtggccgaggagagaaccaccagaagagaggaggagagcagaagactggaggccgagcaggccagagagaaggaggagcagctgcagagacaggccgaggagagagccctgagagagagagaggaggccgagagagcccagagacagaaggaggaggaggccagagtgagagaggaggccgagagagtgagacaggagagagagaagcacttccagagagaggagcaggagagactggagagaaagaagagactggaggagatcatgaagagaaccagaagaaccgaggccaccgacaagaagaccagcgaccagagaaacggcgacatcgccaagggcgccctgaccggcggcaccgaggtgagcgccctgccctgcaccaccaacgcccccggcaacggcaagcccgtgggcagcccccacgtggtgaccagccaccagagcaaggtgaccgtggagagcacccccgacctggagaagcagcccaacgagaacggcgtgagcgtgcagaacgagaacttcgaggagatcatcaacctgcccatcggcagcaagcccagcagactggacgtgaccaacagcgagagccccgagatccccctgaaccccatcctggccttcgacgacgagggcaccctgggccccctgccccaggtggacggcgtgcagacccagcagaccgccgaggtgatctag

SEQ ID NO: 75800 - DNA, 2316 bp, Artificial Sequence
  derived and/or modified sequence
atgccaggctccgcaactgctcttcggcacgagcgcctgaaaaagacaaacgctagaccaatccctctgggactgtttacaatcaatgaggaggatgaacagcaaaaaaacggcaactcccgcagaccaaaggcgcccgacagttataaggtccaggacaaaaagaatgcttcatccaggcctgcctccgccatcagtggtcagaacaataatcattcaggcaataagcctgaccccccccccgtgctgcgcgtggatgaccgtcagcggctagctcgtgaacgaagggaagaacgggaaaaacagttggcggcaagagagatcgtgtggctggaacgcgaagaaagggccaggcagcactacgaaaaacacttggaggaacggaagaaacgcctcgaagaacaacgacagaaggaagagcgcagacgcgcagccgttgaagagaagaggcggcagagactggaagaagacaaggagcggcacgaggccgtggttcgtagaactatggagcggagccagaagcctaagcaaaaacacaataggtggtcttggggagggtctctgcacggttcgccctctattcactcagctgatcctgatagacggagtgtctcaaccatgaacctgagcaaatatgtggaccctgtgatcagcaagcgcttgtcttcctcatccgccacattgctcaattcacctgatcgcgcaaggcgactgcagctgtctccgtgggagtcatctgtagtgaaccggttgcttactcccactcactctttcctggcaagaagcaagtcgaccgctgccttgtctggagaggccgctagctgtagtccaatcattatgccttataaggcagcgcatagtagaaatagcatggaccggccaaagctatttgtgactccccccgaaggctcctcacggcgacggatcatccacggtaccgcctcctacaaaaaagagcgcgagcgggagaatgtgctgttcctgacttctggtactcgaagagctgtgtccccatctaacccaaaggccaggcagcccgccaggtccagactttggctcccttcaaagtccctaccgcatctcccaggaacccccaggcctacttctagcttgccacctgggagcgtaaaggctgcacccgctcaggtgcgccctcccagtcctgggaacatccgcccagtgaaacgtgaggtgaaagtggagcctgagaagaaagacccggaaaaagaaccccaaaaggtagccaacgaacctagcctcaagggtagggcccctttggtgaaggttgaggaagcaactgtggaagagcgaacacctgcagaaccggaggtgggcccagctgctcccgcaatggcccccgctcccgcttccgctcccgcaccagcctccgcacccgcccctgcacccgtaccgacacctgctatggtgtctgcaccttcttctacagtgaacgcttcagctagcgttaagacaagcgctgggaccacagaccccgaggaagccactcgactgctggcagagaagcggcgcctagcccgggagcagcgggagaaggaagagcgggaacggcgtgagcaagaagaactggagaggcagaaacgggaagagctggctcagcgagtggcagaggaaagaactactaggagggaggaagagtcacggaggttagaggccgagcaagcgagagaaaaggaggaacagttacagagacaagcggaggaacgcgcactgagagagcgggaggaggcagaaagggcccagcggcaaaaggaggaagaagccagagtgcgcgaggaggccgagcgggtccgtcaggaaagagaaaaacattttcagcgagaagagcaggagcgccttgaacggaaaaagcggcttgaagaaattatgaagcggaccagacgcacagaggctacagacaaaaagaccagcgaccagcggaatggcgatatcgcaaagggagcgctgaccggcggtaccgaggtgtctgccttaccttgcacgacaaatgcgcctggtaatggaaagcccgtcgggagtcctcacgtggtgacatcgcaccagagtaaagtcacggtagagtctacgcccgaccttgagaagcagcctaacgaaaatggcgtttctgtacaaaacgagaacttcgaagaaattatcaatttgccaatcggttctaagccatcccgcctcgacgttactaacagcgagtctcctgaaatccctctgaatcccatcctggcttttgacgacgagggtacgctgggaccgctgccgcaggtggatggtgtgcaaactcagcaaaccgctgaggtgatctag

SEQ ID NO: 75801 - DNA, 2316 bp, Artificial Sequence
  derived and/or modified sequence
atgcctggcagcgccacagccctgcggcatgagcggctgaagaagaccaatgcccggcccatccccctgggcctcttcaccatcaatgaagaagatgagcagcagaagaatggaaacagcagaagacccaaggccccagacagctacaaggtgcaggacaagaagaatgccagcagcaggcctgccagcgccatcagcggccagaacaacaaccacagcggcaacaagccagaccccccacctgtgctgcgggtggatgaccggcagaggctggcccgggagcggcgggaggagcgggagaagcagctggccgcccgggagatcgtgtggctggagcgggaggagcgggcccggcagcactatgagaagcacctggaggagaggaagaagaggctggaggagcagaggcagaaggaggagcggcggcgggctgctgtggaggagaagaggcggcagaggctggaggaggacaaggagagacatgaagctgtggtgcggaggaccatggagaggagccagaagcccaagcagaagcacaaccgctggagctggggcggcagcctgcacggcagccccagcatccacagcgctgaccctgacagaagatctgtgtccaccatgaacctgagcaaatatgtggaccctgtgatcagcaagaggctgagcagcagcagcgccaccctgctgaacagcccagaccgggcccggcggctgcagctgagcccctgggagagctctgtggtgaaccggctgctgacccccacccacagcttcctggcccggagcaagagcacagctgccctgtctggagaggccgccagctgcagccccatcatcatgccctacaaggccgcccacagcaggaacagcatggaccggcccaagctgtttgtgaccccacctgagggcagcagcagaagacgcatcatccatggaacagccagctacaagaaggagcgggagagagaaaatgtgctcttcctgaccagcggcaccaggagagctgtgagccccagcaaccccaaggcccggcagcctgcccggagccggctgtggctgcccagcaagagcctgccccacctgcccggcaccccccggcccaccagcagcctgcccccaggctctgtgaaggccgccccagcccaggtgcggccccccagccctggcaacatccggcctgtgaagcgggaggtgaaggtggagcctgagaagaaggaccctgagaaggagccccagaaggtggccaatgagcccagcctgaagggccgggcccccctggtgaaggtggaggaggccaccgtggaggagaggaccccagctgagcctgaggtgggccctgctgccccagccatggccccagccccagccagcgccccagccccagccagcgccccagccccagcccctgtgcccaccccagccatggtgtctgcccccagcagcacagtgaatgccagcgcctctgtgaagaccagcgctggcaccacagatcctgaggaggccacccggctgctggccgagaagaggcggctggcccgggagcagcgggagaaggaggagcgggagcggcgggagcaggaggagctggagcggcagaagcgggaggagctggcccagagggtggccgaggagaggaccacccggcgggaggaggagagccggcggctggaggccgagcaggcccgggagaaggaggagcagctgcagaggcaggccgaggagcgggccctgcgggagcgggaggaggccgagcgggcccagaggcagaaggaggaggaggcccgggtgcgggaggaggccgagcgggtgcggcaggagcgggagaagcacttccagcgggaggagcaggagcggctggagaggaagaagaggctggaggagatcatgaagaggaccaggagaacagaggccacagacaagaagaccagtgaccagagaaatggagacatcgccaagggggccctgaccggcggcacagaggtgtctgccctgccctgcaccaccaatgcccctggaaatggcaagcctgtgggcagcccccacgtggtgaccagccaccagagcaaggtgacagtggagagcaccccagacctggagaagcagcccaatgaaaatggagtgtctgtgcagaatgaaaattttgaggagatcatcaacctgcccatcggcagcaagcccagccggctggatgtgaccaacagcgagagccctgagatccccctgaaccccatcctggcctttgatgatgagggcaccctgggccccctgccccaggtggatggagtgcagacccagcagacagctgaggtgatctag

SEQ ID NO: 75802 - DNA, 3119 bp, Artificial Sequence
  derived and/or modified sequence
atatcatattttcccctctctgctgtgggctgaatattttactgtgtggtagcaggaagaagattggaaaaaggtgctgcagcaggaagaagctgggatctgattgaacagcagcggtatgcctggatcagctacagctctccgacatgagagactgaagaagaccaatgcaaggccaattcctcttggtttattcaccattaatgaggaagacgaacagcaaaagaatggaaattccagaagaccaaaagcacccgacagctacaaagtgcaagataagaaaaatgcctccagccgccctgcctctgcaatttcaggacaaaataacaaccactcaggaaataaaccagaccctccgcctgtgttacgtgttgatgaccggcagcggctggcccgggagcgacgtgaggaacgggagaaacagctagctgcaagagaaatagtgtggttagaaagagaagagcgagccaggcagcactacgagaagcacctggaagagcggaagaagaggttggaggagcagaggcagaaggaggagcggaggagggctgctgtggaggagaagcggaggcagagacttgaggaggacaaagaacgccacgaagctgttgtacggcgcacaatggaaaggagccagaagccaaaacagaagcataaccgttggtcgtggggaggctctctccatgggagccctagcatccacagtgcagatccagacaggcggtcagtttccaccatgaatctttcgaaatatgttgatcccgtcattagcaagcggctctcctcttcatctgcaactttactaaattctccagatagagctcgccgcctgcagctcagcccatgggagagcagcgttgttaacagactcctgacgcccacacattcgttcctggccagaagtaaaagcacagctgccttgtctggagaagcagcatcttgcagccccatcatcatgccctacaaagctgcacactctagaaattcgatggatcgaccaaaactctttgtaacaccacctgagggctcttctcgcaggaggatcattcatggcacagcgagctataaaaaagaaagagagagagaaaatgtactcttcctcacatctggcacccgaagggctgtatctccatctaatcccaaagcaagacaaccagctcgctcccgactttggcttccgtccaagtctcttcctcatttgcctggcacacccagaccgacatcctccttgccacccggctcagtcaaagctgctcctgctcaggtccggcccccatcccccggcaacatccgccctgtcaagagggaagtcaaagtggagcctgagaagaaagatcctgagaaggaacctcagaaagttgccaatgagccctcactaaagggcagagcacctttagtgaaggtagaagaagccacagttgaagagcggacacctgctgaaccagaagttggccctgctgctccagccatggccccagctccagcctcggccccagctccagcctcggccccagctccagccccggtccccaccccagccatggtctcagccccgtcatccactgtgaatgccagtgcttctgttaagacttctgcaggcaccaccgacccagaggaggccacaaggcttctagctgagaagaggcggctggcccgagagcagagagaaaaggaagaaagggagaggagggagcaggaagagcttgaaagacaaaagagagaggaattggctcaacgtgtggctgaagagaggacgactcgccgtgaggaggagtcgcgcaggctggaagccgagcaggcccgggagaaggaggagcagctgcagcggcaggcggaggagcgggcgctgcgcgagcgggaggaggcagagcgcgcccagaggcagaaagaagaagaagctcgcgttcgtgaagaagcagagagggtccggcaggaacgagagaagcatttccagagagaagagcaagagcgcctggagagaaagaagcgacttgaggagattatgaaaagaaccaggagaacagaagctacagataagaaaaccagtgatcagagaaacggtgatatagccaagggagctctcactggaggaacagaggtgtctgcacttccatgtacaacaaacgctccgggaaatggaaagccagttggcagcccacatgtggttacctcacaccagtcaaaagtgacagtggagagcactcccgatttggaaaaacaaccaaatgaaaatggtgtatctgttcagaatgaaaattttgaagaaattataaacttacccattggatctaaaccatccagattagatgtcaccaacagtgagagcccagaaattcctttgaatccaattttggcctttgatgatgaagggacacttgggcccctgcctcaggtagatggtgttcagacacagcagactgcagaagttatatgagtgtttcttctgaagaaccaaagctgaaatttaatgagaatttctacaattaatggaattcctttcctgctataaaggagcatcccctccacccgttttctagagttcttgaccatcattttgaaaagatttattaaaactagctaaagacaacagactggatagcttttctaataattttcatcaataggaaaaaagaaatacgtctcattcttcaatactttaaaatggctttttccagtgtgctccttcttagcaatcaatatttttctgcattctttaaaagacaagagaatttggttataaaagaaatgggctgactaggcatgatttttttggtcttaaaagcttaacatgtaaaattggcaaaaaaaattttttaccttttataatacttgaaaaataagtacctctttgttctacaagtagaatgaataggagaagagtttaagcctgtttttttaaaatattattgcaaagagctctatttgtagaagcaaattataggcagattaccaggttcttataaatacagcttgtacatggacattctgcaaacccagctgtcacatttttcttgcaactccttttgcaaaagcagactaaaatgttttaaaatgtgaaaaaacattattttttcaaagcaagaaaataatttactgccctcttacataatgtatttata

SEQ ID NO: 75803 - DNA, 2316 bp, Artificial Sequence
  derived and/or modified sequence
atgcccggcagcgccaccgccctgcggcacgagcggctgaagaagacgaatgcaagaccgatccccctgggcctgtttaccatcaatgaggaggatgagcaacagaaaaatgggaacagccggcgccccaaggcccccgatagctacaaggtgcaagataagaaaaatgcttcttcccgacccgcaagtgcaattagtggtcagaacaacaatcatagcgggaacaagcccgatcctccaccggtactgagggtagatgacaggcagcgattagcgagagaaagaagggaggaacgggaaaaacagttggccgcacgcgagattgtatggctggagagagaggagcgagcaaggcagcattacgagaaacaccttgaagagcgcaaaaagcgattagaagagcagcgtcagaaagaggagcgccgacgggccgctgtggaagaaaaacggcgccagcgtctcgaggaagataaggaaaggcacgaggccgtggtgcgacgcaccatggagcggtcccagaagcctaagcagaaacataatagatggtcatgggggggctctctccacggtagcccttccattcactctgcagatccagatcgcagatctgtgtctaccatgaacctgtccaagtacgtggatccagtgatctctaaaagattaagctcttccagtgcgaccctactcaactccccagaccgggctcggaggctgcaactttccccctgggaatctagtgttgtcaacaggctgctaaccccaacccactctttcctcgcccggtcgaagtccacagcagccctgtccggggaggccgcatcttgttcacccattattatgccctacaaggccgctcactcaagaaactccatggaccggcctaaattgtttgtgacaccacctgaggggtcgtcacgtagacggataattcacggaacggcatcctacaaaaaagaacgagagcgggaaaacgtcctgttcttgacgtctggaactcggcgggccgtcagcccgagcaatccaaaggctcgccaacccgcccggagtcgcctttggctcccttctaagtctctgccccacctgcccggaacccctcgacctactagcagtctgccacctggatccgtgaaggccgcccccgcccaggtgagacccccctccccaggcaacatcaggcctgtgaaaagggaagtcaaggttgaacccgaaaagaaagatcccgagaaagagccccagaaggtggcaaacgagccaagcctaaaggggcgggctccattggtgaaagttgaggaagccacagtggaggagcgtactcccgctgaaccagaagtcggcccggctgcccctgctatggccccggctcccgcttcagcccctgcaccagcctcagcccccgcacccgcccctgtgcctaccccagcgatggtctctgctccctcctccaccgtaaacgcatctgcgtctgtcaaaacatctgccggtacaaccgatcctgaggaggcgacacggctgctggcagaaaaaaggaggctagcccgagagcagagagaaaaggaagagagggagcgacgcgagcaggaggagttggagcggcaaaagcgcgaggagctggctcagcgggtcgctgaagagcgtactacaaggcgggaagaggagagcaggcgactggaggccgaacaggcaagagagaaggaagagcaattgcagagacaggccgaagagcgcgctttgagagaaagggaggaggcagagagagcccagcggcaaaaggaggaagaagcgagagtacgcgaggaggccgaacgtgtgcgccaggaaagagagaagcacttccaacgagaggagcaggagagactggagagaaagaaaaggcttgaggagataatgaagaggactcggcgaactgaagccacagataagaaaacatcagatcagaggaatggcgacatcgcaaaaggtgccctcaccggaggtacagaggtatccgcacttccttgcactacaaacgcaccgggcaatggcaaacccgtgggatcaccacacgtggtcacatcacatcagagcaaggtgaccgttgagagcacccccgacctggaaaagcaaccaaacgaaaatggagtgtccgtgcaaaatgaaaatttcgaggagattatcaatctgcccatcggcagcaagccttcaagactggacgttactaattcagagagccctgagatccctctgaatcccatactcgcattcgacgatgaaggcacactcggtccactccctcaagtggatggagtgcagacgcagcagacggcagaggttatctag

SEQ ID NO: 75804 - DNA, 2316 bp, Artificial Sequence
  derived and/or modified sequence
atgccgggttccgccacagcactgagacacgagcggcttaagaagacaaacgctcgccctatccccctgggcttatttaccattaacgaggaggacgagcagcagaaaaatgggaatagcaggaggccaaaggctccggactcttacaaggtgcaggataagaagaatgctagcagtcggcctgcatctgctatatcagggcaaaacaacaaccatagcggcaataaaccggaccctccacccgtgctgcgcgttgacgacagacagcgtctcgccagggagcgccgtgaagaacgggaaaagcagctggccgcacgggagatcgtatggctggaaagggaggaacgagctaggcagcattatgaaaaacatctggaggagcgcaagaagcggctggaggaacagagacagaaggaagaacgcagacgggctgctgttgaagagaagcggaggcagaggctagaagaagacaaagaacgccacgaagccgtagtaaggaggacaatggaaaggtcccagaagcccaagcagaaacataaccgttggagttggggaggcagtcttcacggctcacccagtatccattcagccgaccccgacaggcggtccgtgtctactatgaatttaagcaaatacgttgatcctgtgatatccaagaggttgagtagcagttccgcaacgctactcaactcacctgaccgcgcacgacggctgcaacttagcccctgggagtctagcgtggtaaaccgcctcctgactccaacgcacagtttccttgctcggagcaagtcaactgcggctctctctggagaggcagcttcatgctcacccattattatgccatataaggctgcccactcgagaaacagtatggaccgaccaaaattgttcgtgacccctcccgaagggtcctctcggaggcgcattattcacgggaccgctagttataagaaggagcgggagagggagaacgttctattcttgacatctggcactaggagggcagtgtctcccagcaatccaaaagcacgccagcccgcacggtcccgtctgtggttgccctctaagtcactgccgcatctaccagggacgcccaggccaacgtccagtctgcccccaggtagcgtcaaagccgctccagcccaggttcggccaccaagtcctggtaatatcaggcccgtaaagagagaagtgaaggtcgaacctgagaagaaggatcccgagaaagagcctcagaaggtggccaatgaaccaagcctgaagggcagagcaccactcgtaaaggtcgaggaagctaccgtcgaggagcgaacccctgctgagccagaggtcggtcctgcagcccctgctatggctccagctcccgcttctgctcccgcacctgcgtcggcccctgccccagcgccagtgcctaccccggcaatggtctcagccccatcctctaccgtgaatgcaagtgcatcagtgaagacaagcgccggaaccacggacccggaggaggctacaagactactggcagaaaaaaggcggctggcccgtgaacagcgtgagaaggaggagagggaaaggagagaacaggaggaactggaacgtcaaaaacgcgaggagctcgctcagagagttgccgaggagcggacaacccggcgagaggaagagagcagaaggctggaggccgaacaggcaagagagaaggaagaacagttacagaggcaggccgaggagcgcgctctgagagaacgcgaggaggcagaaagagcccaacggcaaaaggaggaggaagcaagggtcagggaggaagctgagcgcgttaggcaagaaagggagaaacatttccagcgtgaagaacaggagcggttggagcgcaaaaaacgcttagaagagatcatgaagcggacgcggagaactgaggctacagacaagaagacctcagaccaaagaaacggggatattgccaagggcgcactgactggcggtactgaagttagcgcgctgccgtgtacaaccaacgctcccggtaatgggaagcctgtaggaagcccccatgtcgtgactagtcaccagtctaaggttacagttgagagcactcctgatctagaaaagcagccaaacgagaatggcgtaagtgtacagaacgaaaacttcgaagaaatcataaatttgcctataggcagcaagccctcacggctggacgttaccaattccgagagtcctgagatccccctcaacccgatcctggcctttgacgacgagggaactctcggacccctcccccaggtggatggagtccagacccaacagactgccgaggtgatttag

SEQ ID NO: 75805 - protein, 734 aa, Artificial Sequence
  derived and/or modified sequence
MEDTKLYSPDSYKVQDKKNASSRPASAISGQNNNHSGNKPDPPPVLRVDDRQRLARERREEREKQLAAREIVWLEREERARQHYEKHLEERKKRLEEQRQKEERRRAAVEEKRRQRLEEDKERHEAVVRRTMERSQKPKQKHNRWSWGGSLHGSPSIHSADPDRRSVSTMNLSKYVDPVISKRLSSSSATLLNSPDRARRLQLSPWESSVVNRLLTPTHSFLARSKSTAALSGEAASCSPIIMPYKAAHSRNSMDRPKLFVTPPEGSSRRRIIHGTASYKKERERENVLFLTSGTRRAVSPSNPKARQPARSRLWLPSKSLPHLPGTPRPTSSLPPGSVKAAPAQVRPPSPGNIRPVKREVKVEPEKKDPEKEPQKVANEPSLKGRAPLVKVEEATVEERTPAEPEVGPAAPAMAPAPASAPAPASAPAPAPVPTPAMVSAPSSTVNASASVKTSAGTTDPEEATRLLAEKRRLAREQREKEERERREQEELERQKREELAQRVAEERTTRREEESRRLEAEQAREKEEQLQRQAEERALREREEAERAQRQKEEEARVREEAERVRQEREKHFQREEQERLERKKRLEEIMKRTRRTEATDKKTSDQRNGDIAKGALTGGTEVSALPCTTNAPGNGKPVGSPHVVTSHQSKVTVESTPDLEKQPNENGVSVQNENFEEIINLPIGSKPSRLDVTNSESPEIPLNPILAFDDEGTLGPLPQVDGVQTQQTAEVI

SEQ ID NO: 75806 - DNA, 2205 bp, Artificial Sequence
  derived and/or modified sequence
atggaggacaccaagctgtacagccccgacagctacaaggtgcaggacaagaagaacgccagcagcagacccgccagcgccatcagcggccagaacaacaaccacagcggcaacaagcccgaccccccccccgtgctgagagtggacgacagacagagactggccagagagagaagagaggagagagagaagcagctggccgccagagagatcgtgtggctggagagagaggagagagccagacagcactacgagaagcacctggaggagagaaagaagagactggaggagcagagacagaaggaggagagaagaagagccgccgtggaggagaagagaagacagagactggaggaggacaaggagagacacgaggccgtggtgagaagaaccatggagagaagccagaagcccaagcagaagcacaacagatggagctggggcggcagcctgcacggcagccccagcatccacagcgccgaccccgacagaagaagcgtgagcaccatgaacctgagcaagtacgtggaccccgtgatcagcaagagactgagcagcagcagcgccaccctgctgaacagccccgacagagccagaagactgcagctgagcccctgggagagcagcgtggtgaacagactgctgacccccacccacagcttcctggccagaagcaagagcaccgccgccctgagcggcgaggccgccagctgcagccccatcatcatgccctacaaggccgcccacagcagaaacagcatggacagacccaagctgttcgtgaccccccccgagggcagcagcagaagaagaatcatccacggcaccgccagctacaagaaggagagagagagagagaacgtgctgttcctgaccagcggcaccagaagagccgtgagccccagcaaccccaaggccagacagcccgccagaagcagactgtggctgcccagcaagagcctgccccacctgcccggcacccccagacccaccagcagcctgccccccggcagcgtgaaggccgcccccgcccaggtgagaccccccagccccggcaacatcagacccgtgaagagagaggtgaaggtggagcccgagaagaaggaccccgagaaggagccccagaaggtggccaacgagcccagcctgaagggcagagcccccctggtgaaggtggaggaggccaccgtggaggagagaacccccgccgagcccgaggtgggccccgccgcccccgccatggcccccgcccccgccagcgcccccgcccccgccagcgcccccgcccccgcccccgtgcccacccccgccatggtgagcgcccccagcagcaccgtgaacgccagcgccagcgtgaagaccagcgccggcaccaccgaccccgaggaggccaccagactgctggccgagaagagaagactggccagagagcagagagagaaggaggagagagagagaagagagcaggaggagctggagagacagaagagagaggagctggcccagagagtggccgaggagagaaccaccagaagagaggaggagagcagaagactggaggccgagcaggccagagagaaggaggagcagctgcagagacaggccgaggagagagccctgagagagagagaggaggccgagagagcccagagacagaaggaggaggaggccagagtgagagaggaggccgagagagtgagacaggagagagagaagcacttccagagagaggagcaggagagactggagagaaagaagagactggaggagatcatgaagagaaccagaagaaccgaggccaccgacaagaagaccagcgaccagagaaacggcgacatcgccaagggcgccctgaccggcggcaccgaggtgagcgccctgccctgcaccaccaacgcccccggcaacggcaagcccgtgggcagcccccacgtggtgaccagccaccagagcaaggtgaccgtggagagcacccccgacctggagaagcagcccaacgagaacggcgtgagcgtgcagaacgagaacttcgaggagatcatcaacctgcccatcggcagcaagcccagcagactggacgtgaccaacagcgagagccccgagatccccctgaaccccatcctggccttcgacgacgagggcaccctgggccccctgccccaggtggacggcgtgcagacccagcagaccgccgaggtgatctag

SEQ ID NO: 75807 - DNA, 2205 bp, Artificial Sequence
  derived and/or modified sequence
atggaagatactaagctgtatagcccagactcgtacaaggttcaggacaagaagaacgcatcttccagacctgcttcggccatctcaggacagaataacaaccactctggtaataaacccgatcctccccctgtgcttcgggtcgatgacaggcagaggttggcacgggagcggagggaggaacgcgagaaacaactcgcagccagggaaatcgtgtggttagagcgcgaggaacgagctcggcagcattatgagaagcacctggaggagcggaagaagcgcctcgaagaacagagacagaaggaggaacggcgcagggcggcagtcgaggaaaagcgtcggcagaggttagaagaggacaaggagcggcacgaagcggtcgttaggagaacaatggagaggtctcagaagccaaaacaaaaacacaaccgctggtcctggggtggatccctgcatgggtctccatcgattcactccgcagaccctgatagaaggtctgtatcaaccatgaatttatcaaagtacgttgatccggtcattagtaaaagactgtctagcagttccgccactctgctgaattcccctgaccgggcaagaaggctgcagctgtctccatgggagagctccgttgtaaacagattgttgacgcccacacacagcttcttagccaggagcaagagcaccgcagctctatccggggaagccgctagctgctccccaattatcatgccatacaaggccgcccacagcaggaacagcatggaccggcctaagctatttgtaactcctcctgaaggcagctcccggaggcgaatcatccacgggacagcttcctacaagaaggagagggagcgagaaaacgtgttgtttctgactagcggcacccgccgggcagtgtcaccctccaacccgaaggcgcggcagccagcaagatcacgcctgtggctgccatccaagtccctcccgcatctgcctggaactccgcgcccaactagttcactaccccctggatcggtgaaggcagccccggcgcaagttaggcctccctccccgggcaatatcaggccagtcaaacgggaggtcaaggttgagccagagaagaaagatccggaaaaagagccccagaaagttgctaatgagccgagcctcaaggggcgtgcaccattggtgaaagtcgaagaggcaacagtcgaggaacggacgccagccgagccggaagtcggccccgccgccccagcaatggccccagcccccgcgagtgcccctgcacctgcctccgccccagcccccgccccagtgccaacaccggccatggtgtctgctcccagctcaaccgtaaatgcctcagcctctgtaaagacatccgccggtactactgatccagaggaggccaccaggctgctcgcagaaaagcgcaggctcgctcgcgaacagcgggagaaggaggagcgagagaggcgcgagcaggaggagcttgaacgacaaaaaagggaagagctggcacaaagggtggctgaggaaaggacaacccggcgagaggaggagtcccggaggctcgaagcggagcaggcccgcgagaaagaggagcagctacaacggcaagctgaggaaagggctttgagggagagggaggaagcagaacgtgcccagagacaaaaagaagaggaagcccgggtccgcgaagaagctgaaagagttcggcaggagagggaaaagcattttcagcgcgaggagcaggaacgtctggaacggaagaagcgcctcgaagaaattatgaaaaggacacggagaactgaagctactgataagaagacgtcagaccagcgcaatggtgatatagctaaaggagctttaacgggtgggactgaagtgagtgcactaccatgcactacaaatgccccgggcaacgggaagcccgtgggctccccccatgtagtcacttcccatcagagtaaggtgactgtcgagtcgacacccgatctggaaaagcagccaaacgagaatggtgtttccgtgcagaacgagaactttgaagagatcatcaatctccctataggatcgaaaccttcgagactggatgtgaccaatagtgaatcccccgagatcccactcaacccaattcttgcctttgatgacgaaggcaccctcgggccattaccacaggtggatggggtgcagacccagcaaaccgctgaggtgatttag

SEQ ID NO: 75808 - DNA, 2205 bp, Artificial Sequence
  derived and/or modified sequence
atggaggacaccaagctgtacagcccagacagctacaaggtgcaggacaagaagaatgccagcagcaggcctgccagcgccatcagcggccagaacaacaaccacagcggcaacaagccagaccccccacctgtgctgcgggtggatgaccggcagaggctggcccgggagcggcgggaggagcgggagaagcagctggccgcccgggagatcgtgtggctggagcgggaggagcgggcccggcagcactatgagaagcacctggaggagaggaagaagaggctggaggagcagaggcagaaggaggagaggagaagagctgctgtggaggagaagaggcggcagaggctggaggaggacaaggagagacatgaggccgtggtgcggaggaccatggagaggagccagaagcccaagcagaagcacaaccgctggagctggggcggcagcctgcacggcagccccagcatccacagcgctgaccctgaccggcgctctgtgtccaccatgaacctgagcaaatatgtggaccccgtcatcagcaagaggctgagcagcagcagcgccaccctgctgaacagcccagaccgggcccggcggctgcagctgagcccctgggagagctctgtggtgaaccggctgctgacccccacccacagcttcctggcccggagcaagagcacagctgccctgagcggggaggccgccagctgcagccccatcatcatgccctacaaggccgcccacagcagaaattccatggaccggcccaagctgtttgtgaccccacctgagggcagcagcagaagacgcatcatccacggcacagccagctacaagaaggagcgggagcgggagaatgtgctcttcctgaccagcggcacccggcgggctgtgagccccagcaaccccaaggcccggcagcctgcccggagccggctgtggctgcccagcaagagcctgccccacctgcccggcaccccccggcccaccagcagcctgcccccaggctctgtgaaggccgccccagcccaggtgcggccccccagccctggcaacatccggcctgtgaagcgggaggtgaaggtggagcctgagaagaaggaccctgagaaggagccccagaaggtggccaatgagcccagcctgaagggccgggcccccctggtgaaggtggaggaggccaccgtggaggagaggaccccagctgagcctgaggtgggccctgctgccccagccatggccccagccccagccagcgccccagccccagccagcgccccagccccagcccctgtgcccaccccagccatggtgtctgcccccagcagcacagtgaatgccagcgcctctgtgaagaccagcgctggcaccacagatcctgaggaggccacccggctgctggccgagaagaggcggctggcccgggagcagcgggagaaggaggagcgggagcggcgggagcaggaggagctggagcggcagaagcgggaggagctggcccagagggtggccgaggagaggaccacccggcgggaggaggagagccggcggctggaggccgagcaggcccgggagaaggaggagcagctgcagaggcaggccgaggagcgggccctgcgggagcgggaggaggccgagcgggcccagaggcagaaggaggaggaggcccgggtgcgggaggaggccgagcgggtgcggcaggagcgggagaagcacttccagcgggaggagcaggagcggctggagaggaagaagaggctggaggagatcatgaagaggaccaggagaacagaggccacagacaagaagaccagtgaccagagaaatggagacatcgccaagggggccctgactggaggaacagaggtgtctgccctgccctgcaccaccaatgcccctggaaatggcaagcctgtgggcagcccccacgtggtgaccagccaccagagcaaggtgacagtggagagcaccccagacctggagaagcagcccaatgaaaatggagtgtctgtgcagaatgaaaattttgaggagatcatcaacctgcccatcggcagcaagcccagccggctggatgtgaccaacagcgagagccctgagatccccctgaaccccatcctggcctttgatgatgagggcaccctgggccccctgccccaggtggatggagtgcagacccagcagacagctgaggtgatctag

SEQ ID NO: 75809 - DNA, 2744 bp, Artificial Sequence
  derived and/or modified sequence
gatatttggtctttgcctggctgagggacacaaagcaagaagagggagacatgcagatatgttgcaggatattcaagaaagaaggattttagcatggaagacactaaactgtactcacccgacagctacaaagtgcaagataagaaaaatgcctccagccgccctgcctctgcaatttcaggacaaaataacaaccactcaggaaataaaccagaccctccgcctgtgttacgtgttgatgaccggcagcggctggcccgggagcgacgtgaggaacgggagaaacagctagctgcaagagaaatagtgtggttagaaagagaagagcgagccaggcagcactacgagaagcacctggaagagcggaagaagaggttggaggagcagaggcagaaggaggagcggaggagggctgctgtggaggagaagcggaggcagagacttgaggaggacaaagaacgccacgaagctgttgtacggcgcacaatggaaaggagccagaagccaaaacagaagcataaccgttggtcgtggggaggctctctccatgggagccctagcatccacagtgcagatccagacaggcggtcagtttccaccatgaatctttcgaaatatgttgatcccgtcattagcaagcggctctcctcttcatctgcaactttactaaattctccagatagagctcgccgcctgcagctcagcccatgggagagcagcgttgttaacagactcctgacgcccacacattcgttcctggccagaagtaaaagcacagctgccttgtctggagaagcagcatcttgcagccccatcatcatgccctacaaagctgcacactctagaaattcgatggatcgaccaaaactctttgtaacaccacctgagggctcttctcgcaggaggatcattcatggcacagcgagctataaaaaagaaagagagagagaaaatgtactcttcctcacatctggcacccgaagggctgtatctccatctaatcccaaagcaagacaaccagctcgctcccgactttggcttccgtccaagtctcttcctcatttgcctggcacacccagaccgacatcctccttgccacccggctcagtcaaagctgctcctgctcaggtccggcccccatcccccggcaacatccgccctgtcaagagggaagtcaaagtggagcctgagaagaaagatcctgagaaggaacctcagaaagttgccaatgagccctcactaaagggcagagcacctttagtgaaggtagaagaagccacagttgaagagcggacacctgctgaaccagaagttggccctgctgctccagccatggccccagctccagcctcggccccagctccagcctcggccccagctccagccccggtccccaccccagccatggtctcagccccgtcatccactgtgaatgccagtgcttctgttaagacttctgcaggcaccaccgacccagaggaggccacaaggcttctagctgagaagaggcggctggcccgagagcagagagaaaaggaagaaagggagaggagggagcaggaagagcttgaaagacaaaagagagaggaattggctcaacgtgtggctgaagagaggacgactcgccgtgaggaggagtcgcgcaggctggaagccgagcaggcccgggagaaggaggagcagctgcagcggcaggcggaggagcgggcgctgcgcgagcgggaggaggcagagcgcgcccagaggcagaaagaagaagaagctcgcgttcgtgaagaagcagagagggtccggcaggaacgagagaagcatttccagagagaagagcaagagcgcctggagagaaagaagcgacttgaggagattatgaaaagaaccaggagaacagaagctacagataagaaaaccagtgatcagagaaacggtgatatagccaagggagctctcactggaggaacagaggtgtctgcacttccatgtacaacaaacgctccgggaaatggaaagccagttggcagcccacatgtggttacctcacaccagtcaaaagtgacagtggagagcactcccgatttggaaaaacaaccaaatgaaaatggtgtatctgttcagaatgaaaattttgaagaaattataaacttacccattggatctaaaccatccagattagatgtcaccaacagtgagagcccagaaattcctttgaatccaattttggcctttgatgatgaagggacacttgggcccctgcctcaggtagatggtgttcagacacagcagactgcagaagttatatgagtgtttcttctgaagaaccaaagctgaaatttaatgagaatttctacaattaatggaattcctttcctgctataaaggagcatcccctccacccgttttctagagttcttgaccatcattttgaaaagatttattaaaactagctaaagacaacagactggatagcttttctaataattttcatcaataggaaaaaagaaatacgtctcattcttcaatactttaaaatggctttttccagtgtgctccttcttagcaatcaatatttttctgcattctttaaaagacaagagaatttggttataaaagaaatgggctgactaggcatgatttttttggtcttaaaagcttaacatgtaaaattggcaaaaaaaattttttaccttttataatacttgaaaaataagtacctctttgttctacaagtagaatgaataggagaagag

SEQ ID NO: 75810 - DNA, 2205 bp, Artificial Sequence
  derived and/or modified sequence
atggaggacaccaagctgtacagccccgacagctacaaggtgcaggataaaaaaaatgcatcatctcgccccgcttctgccatcagtggccagaacaataatcactccggtaacaagcccgatcccccccccgtgttgcgggtagatgatcgccagaggctggcacgtgaaaggcgcgaagagcgggaaaaacagcttgcagctcgcgagatagtttggctagaacgtgaggagcgggcacgccaacactacgagaagcatctggaggaacgcaagaagaggctcgaggagcagagacaaaaggaagagaggaggcgagccgctgtcgaagaaaagcgtcgtcaaaggctcgaggaagataaagagaggcacgaggcagtggtgcgccggacgatggaaagatcgcagaaaccgaagcagaaacacaaccgatggtcctggggaggaagtctgcatggatccccctcaatccacagcgccgacccggacaggcgctccgtgtccacaatgaatctgtccaaatacgtggaccccgtaatttccaagaggctctcatcgtcaagcgcaactttgctgaacagcccagaccgcgctcgcaggctgcagctaagcccatgggagagtagtgtagtaaatcgccttctgacaccaacccatagtttcctcgcccggtccaaaagtacagctgcgcttagcggcgaagccgcgtcctgctcccctatcatcatgccttataaagccgcacatagtcgtaactccatggatcgtccaaaactcttcgtgacacccccagagggcagctctcggcggcggatcatccacgggactgccagttacaagaaagaacgagagcgggagaatgtcctgttcttgacatctggcaccaggcgcgccgtctcaccaagcaatcccaaggccaggcagcccgctcgaagtcgactttggcttccttccaaaagcctacctcatctgcctgggactcctaggccaacaagctcactccctcctggatccgtcaaagccgctccagcccaagtgcggccgcccagtcctggaaacatccgaccagtgaagcgggaggttaaggtcgaacccgagaagaaggaccctgaaaaagagcctcaaaaggtggcaaacgagccgtctctgaagggtcgagctcctctagtgaaggttgaagaagcaacagtggaggaacgtacaccagctgaacccgaggtggggcctgctgcccctgcgatggctcctgcccccgcatccgcccccgccccagcttctgccccagcgcctgcacccgtacctactcccgcaatggtttccgcaccaagttcaaccgtgaatgctagcgcctccgtcaaaacctctgcaggcaccacggacccagaagaagccacacgcttgctcgcagaaaagcggaggcttgcgagagaacagcgtgaaaaagaagagagggaacgccgcgagcaggaggagttggagcgtcagaagagagaagagcttgcacagcgggtcgcagaagaacggactacacggcgggaagaagaaagccgccggcttgaggcggaacaggcccgcgagaaagaagagcagcttcaacgtcaagcggaggaaagggccctcagggagcgcgaggaagccgagagagcccagcgtcagaaagaagaagaagcgagagtgcgcgaggaagccgagagggtccgacaggaaagggaaaagcattttcaaagggaagagcaggagagattggagaggaagaaaaggttggaggaaattatgaagcggacgagacgcactgaagccacagataaaaagacatccgaccagcggaacggcgacattgccaaaggagcccttaccggcggaactgaagtgagtgcattaccttgtacgacaaacgctcctggtaatgggaaacccgtggggagcccacacgtcgtgacctcccaccaaagcaaggtgaccgtagagtctacccctgatctggaaaagcagcctaatgagaacggggtgagcgtacaaaatgagaactttgaagaaatcataaacctcccgattggatcaaaaccatcacgcctcgacgtaactaattccgagagccccgaaattcctttgaacccaattctggcatttgatgatgaagggacgttgggaccattgcctcaggtggatggggtgcagacacaacagacggctgaagtaatctag

SEQ ID NO: 75811 - DNA, 2205 bp, Artificial Sequence
  derived and/or modified sequence
atggaggacacgaagctctattcacctgattcctataaggttcaggacaaaaagaacgcttcttcaagacctgccagcgcgatctctggtcagaataataaccattcaggaaataagcccgatcccccacctgttctgcgtgtggatgaccgacaacgattagcacgagagagaagagaagaaagggaaaagcagctcgctgctagagaaatcgtctggctcgaaagggaggagagggcgagacagcactatgagaaacatctggaggagcgcaaaaaaaggctggaggagcagcgccagaaagaggaaagaaggagagctgctgtcgaggagaagcgcaggcagcgcttggaggaggacaaagagaggcatgaggccgtggttagacgtactatggagcggtcacagaaacccaaacaaaagcacaatagatggagctggggcggatcactgcacggatctccatctatccactctgccgaccctgacaggcggtccgtgagcacgatgaatttatccaaatatgtggatcctgttatcagcaagagactaagctcctctagcgccaccctgttgaactctcccgatcgcgcaagacgattgcagttgtccccctgggaaagttctgttgtcaatcggctgctgactcctacacatagtttcctggctcgcagtaagtccaccgcagcactcagcggagaggccgctagctgttctccaataattatgccctacaaagccgcacacagtaggaactcaatggaccgccctaaactgttcgtcactcctcccgaaggtagtagccgcaggaggatcatccacggtaccgcttcgtataagaaggaacgggagagggagaacgtactgttccttaccagcgggactaggagagcggtgtctccatctaacccaaaggctcggcagcccgcaagatcccgactgtggctgccgagcaaaagtttacctcacttgccagggacaccaagacctactagcagtcttccacccggatccgtgaaagcagctcccgctcaggtgagaccacccagtcccggaaacattagacccgtgaaaagggaagtgaaggtggaaccagagaagaaagacccggagaaagagccccagaaggtcgccaacgagccatctttgaagggtagggctccacttgtgaaagtggaggaggctacagtcgaggaacgcactcccgctgaacctgaagtgggtccagctgcgcctgccatggccccagcaccggcatctgcacccgctcctgccagcgccccagctccggctccagtaccaacaccggcaatggtctccgccccttccagcactgtcaatgcttcagcctccgtaaaaaccagtgccggaaccaccgaccccgaggaggcaacccgactgctcgcagagaagcgcagattggcacgagagcaacgcgagaaggaagaacgtgaacgtagggaacaggaggaactagagcggcaaaaacgcgaagaactcgcacagagagtggccgaagagagaactaccagacgggaggaggaatcccggagattagaagcagagcaggcaagagaaaaggaggaacagcttcaaagacaagccgaggagagagccttaagggagagggaggaggccgagcgggctcagaggcagaaggaagaggaagctagagttcgagaagaagcggagcgcgtgcggcaggaaagggagaaacacttccaacgtgaagaacaagaaaggcttgaacgcaagaaacggctggaggagattatgaagcgaactcgaagaaccgaggctacagataaaaagacgtcagaccagcgcaacggcgacattgccaagggggctctcaccgggggaacagaggtctcagccctgccttgcactacgaacgcgccagggaacggtaaacccgtcgggtccccccacgtggtaacaagccatcaaagtaaggtgaccgtggaatctacacccgacttggagaaacagcccaacgagaatggggtgagtgtgcaaaacgagaacttcgaagaaatcattaatcttcccatcggcagcaagccgtccagacttgacgtaacaaattccgaatcacccgagattcctctcaatccaatcctcgcttttgatgatgaaggaacactgggtccacttcctcaggttgatggcgtgcaaacacagcagactgctgaggtcatttag

SEQ ID NO: 75812 - protein, 655 aa, Artificial Sequence
  derived and/or modified sequence
MAELGAGGDGHRGGDGAVRSETAPDSYKVQDKKNASSRPASAISGQNNNHSGNKPDPPPVLRVDDRQRLARERREEREKQLDPDRRSVSTMNLSKYVDPVISKRLSSSSATLLNSPDRARRLQLSPWESSVVNRLLTPTHSFLARSKSTAALSGEAASCSPIIMPYKAAHSRNSMDRPKLFVTPPEGSSRRRIIHGTASYKKERERENVLFLTSGTRRAVSPSNPKARQPARSRLWLPSKSLPHLPGTPRPTSSLPPGSVKAAPAQVRPPSPGNIRPVKREVKVEPEKKDPEKEPQKVANEPSLKGRAPLVKVEEATVEERTPAEPEVGPAAPAMAPAPASAPAPASAPAPAPVPTPAMVSAPSSTVNASASVKTSAGTTDPEEATRLLAEKRRLAREQREKEERERREQEELERQKREELAQRVAEERTTRREEESRRLEAEQAREKEEQLQRQAEERALREREEAERAQRQKEEEARVREEAERVRQEREKHFQREEQERLERKKRLEEIMKRTRRTEATDKKTSDQRNGDIAKGALTGGTEVSALPCTTNAPGNGKPVGSPHVVTSHQSKVTVESTPDLEKQPNENGVSVQNENFEEIINLPIGSKPSRLDVTNSESPEIPLNPILAFDDEGTLGPLPQVDGVQTQQTAVVI

SEQ ID NO: 75813 - DNA, 1968 bp, Artificial Sequence
  derived and/or modified sequence
atggccgagctgggcgccggcggcgacggccacagaggcggcgacggcgccgtgagaagcgagaccgcccccgacagctacaaggtgcaggacaagaagaacgccagcagcagacccgccagcgccatcagcggccagaacaacaaccacagcggcaacaagcccgaccccccccccgtgctgagagtggacgacagacagagactggccagagagagaagagaggagagagagaagcagctggaccccgacagaagaagcgtgagcaccatgaacctgagcaagtacgtggaccccgtgatcagcaagagactgagcagcagcagcgccaccctgctgaacagccccgacagagccagaagactgcagctgagcccctgggagagcagcgtggtgaacagactgctgacccccacccacagcttcctggccagaagcaagagcaccgccgccctgagcggcgaggccgccagctgcagccccatcatcatgccctacaaggccgcccacagcagaaacagcatggacagacccaagctgttcgtgaccccccccgagggcagcagcagaagaagaatcatccacggcaccgccagctacaagaaggagagagagagagagaacgtgctgttcctgaccagcggcaccagaagagccgtgagccccagcaaccccaaggccagacagcccgccagaagcagactgtggctgcccagcaagagcctgccccacctgcccggcacccccagacccaccagcagcctgccccccggcagcgtgaaggccgcccccgcccaggtgagaccccccagccccggcaacatcagacccgtgaagagagaggtgaaggtggagcccgagaagaaggaccccgagaaggagccccagaaggtggccaacgagcccagcctgaagggcagagcccccctggtgaaggtggaggaggccaccgtggaggagagaacccccgccgagcccgaggtgggccccgccgcccccgccatggcccccgcccccgccagcgcccccgcccccgccagcgcccccgcccccgcccccgtgcccacccccgccatggtgagcgcccccagcagcaccgtgaacgccagcgccagcgtgaagaccagcgccggcaccaccgaccccgaggaggccaccagactgctggccgagaagagaagactggccagagagcagagagagaaggaggagagagagagaagagagcaggaggagctggagagacagaagagagaggagctggcccagagagtggccgaggagagaaccaccagaagagaggaggagagcagaagactggaggccgagcaggccagagagaaggaggagcagctgcagagacaggccgaggagagagccctgagagagagagaggaggccgagagagcccagagacagaaggaggaggaggccagagtgagagaggaggccgagagagtgagacaggagagagagaagcacttccagagagaggagcaggagagactggagagaaagaagagactggaggagatcatgaagagaaccagaagaaccgaggccaccgacaagaagaccagcgaccagagaaacggcgacatcgccaagggcgccctgaccggcggcaccgaggtgagcgccctgccctgcaccaccaacgcccccggcaacggcaagcccgtgggcagcccccacgtggtgaccagccaccagagcaaggtgaccgtggagagcacccccgacctggagaagcagcccaacgagaacggcgtgagcgtgcagaacgagaacttcgaggagatcatcaacctgcccatcggcagcaagcccagcagactggacgtgaccaacagcgagagccccgagatccccctgaaccccatcctggccttcgacgacgagggcaccctgggccccctgccccaggtggacggcgtgcagacccagcagaccgccgtggtgatctag

SEQ ID NO: 75814 - DNA, 1968 bp, Artificial Sequence
  derived and/or modified sequence
atggcggagttgggcgcaggtggtgatggccaccgaggtggagacggagcggtcagatccgaaactgctcccgattcctataaagtccaggacaaaaaaaacgcttcctcaagacctgcctcggccattagcggtcaaaataataatcatagcggcaataagccagacccgcccccagtcctgagagtggatgaccgccagagattggctagagagaggcgcgaggagcgggagaagcaactcgacccggatcggcgaagtgtatctaccatgaatctgtccaagtacgtcgatcccgtgatctccaagcggctgagctcttcttcagccactcttctgaactcaccggatcgggctagacgcctgcagctcagcccatgggagtccagtgtcgtgaataggctacttacccctacacacagtttcttagctaggtccaaaagcacagccgccctgagcggtgaagcagcttcctgttccccaattatcatgccctacaaggctgcacactccagaaatagcatggaccggcccaaactttttgtgactcctcccgagggtagctcccggaggagaatcattcacggcacagcctcctacaagaaagagagggagcgagagaacgtcctcttcctgacctcaggcacacggagagctgtaagtcccagtaacccaaaggctcggcagcctgcaagatcaaggctgtggctgcccagtaagtctcttccccacctgccgggcacacctagacccacttcaagcctcccccccggaagcgtgaaagcggcacctgcccaggtaaggccccccagcccggggaatatccgccccgtaaagagggaggttaaggtggagcccgaaaagaaagatcccgagaaggagccgcaaaaggtggctaacgaaccttccctgaaagggagagcccccctggtcaaggttgaggaagcaactgtagaagagcggactccagccgagcctgaagttggacccgcggctcccgctatggcacccgcacctgcctccgcaccagcccccgcgagcgctccagcccccgctcctgtccctactcccgccatggtgagcgcaccctcttcaaccgttaacgcctctgccagtgtcaaaacctcagccggaaccacagatcctgaagaggcaacccgtctcctcgcggagaagcgcagactagccagagagcaaagggagaaggaggagcgagaacgtcgagagcaggaggagttagagcgacagaaacgggaggagctagcccagcgcgttgcagaggagcgcaccactcggagagaggaagaatctaggcgtctggaagcagagcaggccagagagaaggaggagcagctgcagagacaggcagaggagagagccctgcgggaaagagaggaggcggaaagagctcagcgccagaaagaggaagaggcccgcgtgagggaggaagcagagagagttaggcaagaacgggagaagcactttcagcgggaagagcaggaaagattggagcgtaagaaacgcctggaagagatcatgaagcgcacgcggcgaactgaggcaactgacaaaaagacatcagatcagaggaatggcgacatagcaaagggcgccctgacaggcgggactgaggtctcagctctaccatgcactaccaacgctccaggtaatggcaaaccagtgggcagcccccacgtggtgacatctcatcagtccaaggtgacagtggagtccacacccgatctcgagaagcagcctaacgaaaacggcgtgtcagttcagaatgaaaacttcgaggaaatcatcaatctgcccatcggctcaaagccgagtcgcttagatgtgacaaacagcgagtcgccagaaattcctctgaacccgatactggccttcgatgatgaagggaccctgggcccgctgcctcaagtggacggagtccagacgcagcagacagcggtcgttatttag

SEQ ID NO: 75815 - DNA, 1968 bp, Artificial Sequence
  derived and/or modified sequence
atggccgagctgggcgctggaggagatggccacagaggaggagatggagctgtgcgctcagaaacagccccagacagctacaaggtgcaggacaagaagaatgccagcagcaggcctgccagcgccatcagcggccagaacaacaaccacagcggcaacaagccagaccccccacctgtgctgcgggtggatgaccggcagaggctggcccgggagcggcgggaggagcgggagaagcagctggaccctgacagaagatctgtgtccaccatgaacctgagcaaatatgtggaccctgtgatcagcaagaggctgagcagcagcagcgccaccctgctgaacagcccagaccgggcccggcggctgcagctgagcccctgggagagctctgtggtgaaccggctgctgacccccacccacagcttcctggcccggagcaagagcacagctgccctgtctggagaggccgccagctgcagccccatcatcatgccctacaaggccgcccacagcaggaacagcatggaccggcccaagctgtttgtgaccccacctgagggcagcagcagaagacgcatcatccatggaacagccagctacaagaaggagcgggagagagaaaatgtgctcttcctgaccagcggcaccaggagagctgtgagccccagcaaccccaaggcccggcagcctgcccggagccggctgtggctgcccagcaagagcctgccccacctgcccggcaccccccggcccaccagcagcctgcccccaggctctgtgaaggccgccccagcccaggtgcggccccccagccctggcaacatccggcctgtgaagcgggaggtgaaggtggagcctgagaagaaggaccctgagaaggagccccagaaggtggccaatgagcccagcctgaagggccgggcccccctggtgaaggtggaggaggccaccgtggaggagaggaccccagctgagcctgaggtgggccctgctgccccagccatggccccagccccagccagcgccccagccccagccagcgccccagccccagcccctgtgcccaccccagccatggtgtctgcccccagcagcacagtgaatgccagcgcctctgtgaagaccagcgctggcaccacagatcctgaggaggccacccggctgctggccgagaagaggcggctggcccgggagcagcgggagaaggaggagcgggagcggcgggagcaggaggagctggagcggcagaagcgggaggagctggcccagagggtggccgaggagaggaccacccggcgggaggaggagagccggcggctggaggccgagcaggcccgggagaaggaggagcagctgcagaggcaggccgaggagcgggccctgcgggagcgggaggaggccgagcgggcccagaggcagaaggaggaggaggcccgggtgcgggaggaggccgagcgggtgcggcaggagcgggagaagcacttccagcgggaggagcaggagcggctggagaggaagaagaggctggaggagatcatgaagaggaccaggagaacagaggccacagacaagaagaccagtgaccagagaaatggagacatcgccaagggggccctgaccggcggcacagaggtgtctgccctgccctgcaccaccaatgcccctggaaatggcaagcctgtgggcagcccccacgtggtgaccagccaccagagcaaggtgacagtggagagcaccccagacctggagaagcagcccaatgaaaatggagtgtctgtgcagaatgaaaattttgaggagatcatcaacctgcccatcggcagcaagcccagccggctggatgtgaccaacagcgagagccctgagatccccctgaaccccatcctggcctttgatgatgagggcaccctgggccccctgccccaggtggatggagtgcagacccagcagacagctgtggtgatctag

SEQ ID NO: 75816 - DNA, 2211 bp, Artificial Sequence
  derived and/or modified sequence
gttccgcccgccgctcttccagccgagactcggcagcggcggtcggagcggctgccacgccgcacctgcccgcgagggggcgcgccaggcccaggccgcagccgactgccgcgctctctgtccccgccctccgccatccccggactgcgctcacctgtctgggccgctggcctgggaggcgggggccggcgggagccaagccgaggaaagggcggagcggctctccgggcgcgtcatcggagcaccatggcggagctaggagctggcggcgacggccacaggggcggcgacggcgcagtgcgaagcgaaacagcacccgacagctacaaagtgcaagataagaaaaatgcctccagccgccctgcctctgcaatttcaggacaaaataacaaccactcaggaaataaaccagaccctccgcctgtgttacgtgttgatgaccggcagcggctggcccgggagcgacgtgaggaacgggagaaacagctagatccagacaggcggtcagtttccaccatgaatctttcgaaatatgttgatcccgtcattagcaagcggctctcctcttcatctgcaactttactaaattctccagatagagctcgccgcctgcagctcagcccatgggagagcagcgttgttaacagactcctgacgcccacacattcgttcctggccagaagtaaaagcacagctgccttgtctggagaagcagcatcttgcagccccatcatcatgccctacaaagctgcacactctagaaattcgatggatcgaccaaaactctttgtaacaccacctgagggctcttctcgcaggaggatcattcatggcacagcgagctataaaaaagaaagagagagagaaaatgtactcttcctcacatctggcacccgaagggctgtatctccatctaatcccaaagcaagacaaccagctcgctcccgactttggcttccgtccaagtctcttcctcatttgcctggcacacccagaccgacatcctccttgccacccggctcagtcaaagctgctcctgctcaggtccggcccccatcccccggcaacatccgccctgtcaagagggaagtcaaagtggagcctgagaagaaagatcctgagaaggaacctcagaaagttgccaatgagccctcactaaagggcagagcacctttagtgaaggtagaagaagccacagttgaagagcggacacctgctgaaccagaagttggccctgctgctccagccatggccccagctccagcctcggccccagctccagcctcggccccagctccagccccggtccccaccccagccatggtctcagccccgtcatccactgtgaatgccagtgcttctgttaagacttctgcaggcaccaccgacccagaggaggccacaaggcttctagctgagaagaggcggctggcccgagagcagagagaaaaggaagaaagggagaggagggagcaggaagagcttgaaagacaaaagagagaggaattggctcaacgtgtggctgaagagaggacgactcgccgtgaggaggagtcgcgcaggctggaagccgagcaggcccgggagaaggaggagcagctgcagcggcaggcggaggagcgggcgctgcgcgagcgggaggaggcagagcgcgcccagaggcagaaagaagaagaagctcgcgttcgtgaagaagcagagagggtccggcaggaacgagagaagcatttccagagagaagagcaagagcgcctggagagaaagaagcgacttgaggagattatgaaaagaaccaggagaacagaagctacagataagaaaaccagtgatcagagaaacggtgatatagccaagggagctctcactggaggaacagaggtgtctgcacttccatgtacaacaaacgctccgggaaatggaaagccagttggcagcccacatgtggttacctcacaccagtcaaaagtgacagtggagagcactcccgatttggaaaaacaaccaaatgaaaatggtgtatctgttcagaatgaaaattttgaagaaattataaacttacccattggatctaaaccatccagattagatgtcaccaacagtgagagcccagaaattcctttgaatccaattttggcctttgatgatgaagggacacttgggcccctgcctcaggtagatggtgttcagacacagcagactgcagtagtcatc

SEQ ID NO: 75817 - DNA, 1968 bp, Artificial Sequence
  derived and/or modified sequence
atggccgagctgggcgccggcggcgacggccaccggggcggcgacggcgccgtccggagtgaaaccgcacccgatagctacaaagtgcaggacaagaagaacgcttcatcccggccagcgtctgccatttccggacagaacaataaccatagcgggaataaaccagatccccctccagtacttagagtagatgatcgacagcgacttgcacgggaaagaagggaggagcgggagaaacaattggatcccgaccgacgctcagttagtactatgaatctgagtaagtacgttgacccagtgatctctaagcgcttaagtagctcttctgccacactgttgaacagccctgaccgagcccgcaggttgcaactatccccgtgggaaagttccgtagtgaatagacttttgaccccgactcactcttttctggccaggtcaaaatctacggccgctctctctggtgaggcagcctcttgctcccctattatcatgccctataaggctgctcattcccgcaactcgatggatagacccaaactgttcgtaacacctccagaaggtagcagcaggcggcggatcattcacggaactgctagctacaagaaggagcgggagagagaaaatgtcctgtttcttactagcggcactcgacgggctgtgtccccgagcaacccaaaagcccgacagcccgctcgaagcaggctgtggctgccgagtaagagtctgccacaccttccggggactcctagacccacgtcatcactgcccccaggttccgtcaaggcggctccagctcaagtcaggccaccctcacctggaaacatccgtccggtgaagcgggaggtcaaagtcgagcccgagaaaaaagatccagaaaaggagccccagaaggtcgccaatgagccatcactcaaggggagagccccgctagtcaaggtggaagaggccaccgttgaagagaggacacctgcagagcctgaggtgggacccgccgctccagccatggcacctgcacctgcctcagctccagctcccgcttctgctcctgctccggctccagtgcccacacctgccatggtcagcgccccaagcagcacagtcaacgcctcagcctccgtgaagactagcgcaggcacaaccgatcccgaggaggctaccaggctgctggccgaaaagcgcaggctcgctcgcgaacagagggagaaggaggaaagagagagacgtgaacaggaggagctggagcgccagaagcgagaggagctggcccagcgcgtggccgaggagcgcaccaccaggagagaggaagaaagtaggagactggaggccgagcaagcccgggagaaggaggagcagttgcaacgacaagccgaggagcgcgcgcttcgggagagggaggaagctgagcgagcccagagacagaaagaggaagaggccagagtccgcgaggaggccgaaagagtgaggcaggagcgcgagaagcactttcaaagggaagagcaagagcgcctcgagcgtaagaagcgattagaagagatcatgaagcggactcggaggacagaggcgaccgacaagaaaacttctgatcagcggaatggggatatcgctaaaggggcgctcactggaggaaccgaggtttccgctttgccatgtaccaccaacgccccaggtaacggcaaaccagtcggatcaccacatgtggtcacatcacatcaatctaaggtgacagtagagtctactcccgacttggaaaaacagccaaatgagaacggtgtgtctgtccagaacgagaatttcgaggaaattatcaatctgcccataggctccaaaccctcacggctggacgtcacaaatagcgaatcccccgagattccacttaatccaattttagcgttcgatgacgaaggcacattaggccccctgccacaagtcgacggcgtccagacccaacagacggccgtggtgatctag

SEQ ID NO: 75818 - DNA, 1968 bp, Artificial Sequence
  derived and/or modified sequence
atggccgaactcggcgctggaggggacggtcataggggaggcgacggagccgttcggagcgagacggccccagacagttacaaggtccaggacaagaagaatgccagctctcggccagcctccgctatcagcggtcagaataataatcattccggcaataagcccgatccgcctcctgtgctgcgagtggatgaccggcaaaggcttgctagagagaggcgggaagaacgggaaaagcagctagacccagaccggaggagtgtgtcaaccatgaacctttccaaatatgtagaccctgttatttcaaagcggctgagcagcagctcagccactttgctgaattcgccggatcgcgctcgcaggctgcagctaagtccctgggagtctagcgttgtgaataggttgctcacaccaactcatagtttcctcgccagaagcaagtcaacagcggctctgagcggggaagctgccagttgttctcctattattatgccctacaaggccgcacattccaggaattcaatggataggccaaaactcttcgtaaccccccctgaagggagcagtagacggaggataatacacgggacagcctcttataaaaaggaacgcgagcgcgagaatgtgctgttcctgacgtcagggacccgcagggctgtgtcaccctccaatccgaaagcgaggcagcccgctaggagtaggttgtggcttccgtccaaatcgttaccccatttgccagggacccccaggccaacctcatccttaccacccggttcggtgaaggccgctcctgcacaggttcgccctcccagtcccggaaacatccgtcccgttaagagggaggtgaaagtggagcccgagaaaaaagacccggagaaggaaccacagaaggttgccaacgagccttcccttaagggtagggcccctctggtgaaggtggaggaagctactgtggaagaacgtacacccgcagagccagaggttggcccagctgcacctgccatggctcccgctcctgcaagcgctccagctcctgctagcgccccagctcctgcccctgtacccactcctgctatggtgagcgcaccatcaagcactgtcaacgcatctgcctccgtgaagacaagtgccggaacaaccgatcctgaagaggctactagactcctcgcagagaagagacgtctggccagggaacagcgtgaaaaggaggaacgagagaggagagagcaagaggaattagagcgccagaaacgcgaagagctcgcacaacgcgtggcagaagagaggactaccagaagagaagaagaatctagacggctggaggccgaacaggctcgcgaaaaagaagagcaactgcagcgacaggccgaagagagggctcttagagagagggaagaagccgagagggctcagagacagaaggaggaggaggctagagtgcgggaggaagccgagagggtgcgccaggaaagggagaagcattttcaacgtgaggaacaagaacggctcgagcgaaagaaacgcctggaggagatcatgaagcggacccggaggaccgaagccactgacaaaaaaaccagtgatcaacggaatggggatatagctaaaggtgctttaacaggcggtaccgaagtgagcgcactcccttgtactacaaatgcccctgggaacgggaaacctgtcggttcgccacatgtggtaaccagccaccagtctaaagtgactgttgagagcacaccggatctggagaagcagccaaatgagaacggggtttcagttcagaatgagaacttcgaggagattattaacctgccgatcggttcaaagccatcgcgactcgacgtgactaactccgagagtcccgagattcccctaaaccctatcctcgccttcgacgacgagggaacattaggccctctaccccaggtggacggcgtgcagacccagcagacagctgttgttatatag

SEQ ID NO: 75819 - protein, 603 aa, Artificial Sequence
  derived and/or modified sequence
MERSQKPKQKHNRWSWGGSLHGSPSIHSADPDRRSVSTMNLSKYVDPVISKRLSSSSATLLNSPDRARRLQLSPWESSVVNRLLTPTHSFLARSKSTAALSGEAASCSPIIMPYKAAHSRNSMDRPKLFVTPPEGSSRRRIIHGTASYKKERERENVLFLTSGTRRAVSPSNPKARQPARSRLWLPSKSLPHLPGTPRPTSSLPPGSVKAAPAQVRPPSPGNIRPVKREVKVEPEKKDPEKEPQKVANEPSLKGRAPLVKVEEATVEERTPAEPEVGPAAPAMAPAPASAPAPASAPAPAPVPTPAMVSAPSSTVNASASVKTSAGTTDPEEATRLLAEKRRLAREQREKEERERREQEELERQKREELAQRVAEERTTRREEESRRLEAEQAREKEEQLQRQAEERALREREEAERAQRQKEEEARVREEAERVRQEREKHFQREEQERLERKKRLEEIMKRTRRTEATDKKTSDQRNGDIAKGALTGGTEVSALPCTTNAPGNGKPVGSPHVVTSHQSKVTVESTPDLEKQPNENGVSVQNENFEEIINLPIGSKPSRLDVTNSESPEIPLNPILAFDDEGTLGPLPQVDGVQTQQTAEVI

SEQ ID NO: 75820 - DNA, 1812 bp, Artificial Sequence
  derived and/or modified sequence
atggagagaagccagaagcccaagcagaagcacaacagatggagctggggcggcagcctgcacggcagccccagcatccacagcgccgaccccgacagaagaagcgtgagcaccatgaacctgagcaagtacgtggaccccgtgatcagcaagagactgagcagcagcagcgccaccctgctgaacagccccgacagagccagaagactgcagctgagcccctgggagagcagcgtggtgaacagactgctgacccccacccacagcttcctggccagaagcaagagcaccgccgccctgagcggcgaggccgccagctgcagccccatcatcatgccctacaaggccgcccacagcagaaacagcatggacagacccaagctgttcgtgaccccccccgagggcagcagcagaagaagaatcatccacggcaccgccagctacaagaaggagagagagagagagaacgtgctgttcctgaccagcggcaccagaagagccgtgagccccagcaaccccaaggccagacagcccgccagaagcagactgtggctgcccagcaagagcctgccccacctgcccggcacccccagacccaccagcagcctgccccccggcagcgtgaaggccgcccccgcccaggtgagaccccccagccccggcaacatcagacccgtgaagagagaggtgaaggtggagcccgagaagaaggaccccgagaaggagccccagaaggtggccaacgagcccagcctgaagggcagagcccccctggtgaaggtggaggaggccaccgtggaggagagaacccccgccgagcccgaggtgggccccgccgcccccgccatggcccccgcccccgccagcgcccccgcccccgccagcgcccccgcccccgcccccgtgcccacccccgccatggtgagcgcccccagcagcaccgtgaacgccagcgccagcgtgaagaccagcgccggcaccaccgaccccgaggaggccaccagactgctggccgagaagagaagactggccagagagcagagagagaaggaggagagagagagaagagagcaggaggagctggagagacagaagagagaggagctggcccagagagtggccgaggagagaaccaccagaagagaggaggagagcagaagactggaggccgagcaggccagagagaaggaggagcagctgcagagacaggccgaggagagagccctgagagagagagaggaggccgagagagcccagagacagaaggaggaggaggccagagtgagagaggaggccgagagagtgagacaggagagagagaagcacttccagagagaggagcaggagagactggagagaaagaagagactggaggagatcatgaagagaaccagaagaaccgaggccaccgacaagaagaccagcgaccagagaaacggcgacatcgccaagggcgccctgaccggcggcaccgaggtgagcgccctgccctgcaccaccaacgcccccggcaacggcaagcccgtgggcagcccccacgtggtgaccagccaccagagcaaggtgaccgtggagagcacccccgacctggagaagcagcccaacgagaacggcgtgagcgtgcagaacgagaacttcgaggagatcatcaacctgcccatcggcagcaagcccagcagactggacgtgaccaacagcgagagccccgagatccccctgaaccccatcctggccttcgacgacgagggcaccctgggccccctgccccaggtggacggcgtgcagacccagcagaccgccgaggtgatctag

SEQ ID NO: 75821 - DNA, 1812 bp, Artificial Sequence
  derived and/or modified sequence
atggaacgctcccagaaacccaagcagaaacataatcgctggagctggggcggctccctgcacgggtctccctccattcattccgcagatcctgatcgtcgatccgtatcaactatgaatctgtctaaatatgtagatccagtgatcagtaaacggttaagctcgagcagcgccacactgttgaatagccccgacagagcgcgcaggcttcagctgtcgccttgggagagttcagttgtaaaccgccttctaactccaacacatagcttcctggcccgtagcaagagcactgccgccctgtcaggcgaggctgcttcttgttcaccgatcattatgccctacaaggccgctcacagccgcaattccatggataggcccaagcttttcgtaaccccccctgagggtagtagccggagacggatcattcacgggacagcctcctataagaaggaacgagaaagagaaaacgtgctgttcctgacatccgggacccgaagagccgtgagccctagcaatcccaaggcacggcagcccgcgcggagccgcttatggttaccttctaagtccctgccgcacctgcccggcaccccccgcccaacctctagcctgcctccaggatcagtgaaagccgcccccgcgcaggtcagacccccttcgccaggaaacatacgacccgtaaagagagaagtgaaagtggagccggaaaaaaaggaccccgagaaagagccccagaaggtggctaacgagccctcccttaaaggcagagccccactcgtgaaggtggaggaggcaactgtcgaagaacggactcccgctgagccagaggttgggcctgccgcgcccgctatggcccctgcaccggcttctgcacccgctccagcgagcgcccctgccccggccccagtgccaacccctgcaatggtgtccgccccttcttctacagttaacgctagtgcctctgtgaaaaccagtgcggggacaaccgaccccgaagaggccacacgcctactggctgagaaacgccggttggctcgcgaacagcgtgagaaagaggagcgcgagaggagggagcaagaagagctggagcgtcaaaagcgcgaagaactggcccaacgcgtggctgaggagcggacaaccagacgggaggaagagagccggcggttagaagccgagcaggctcgagagaaggaagaacaactgcagagacaggccgaagagagagctctgcgcgaacgggaagaggcagagagggctcagcgacagaaagaggaagaggcgcgagtgagggaggaagctgaacgggtaagacaggagagagaaaagcattttcagcgggaggagcaagagagattagaacggaagaagcgcctcgaggaaatcatgaaacgcacacgcaggacagaggcgactgacaaaaagacaagcgatcaaagaaacggagatatcgctaagggagccctgaccggtggaacagaggtgagcgcacttccttgtacgacaaacgcgcccgggaacggcaagccggtcggatctcctcacgttgttaccagccaccaatcaaaggtcactgttgagagcactccagatctggagaaacaacccaacgagaatggtgtaagtgtccagaacgaaaactttgaagagatcataaatctgcccattggatcaaagccctcacgcctggatgtgactaacagtgaatcacctgaaatcccactgaaccccatactggctttcgatgacgaaggtacactaggtcctctcccccaggtcgatggagttcagactcagcagacagctgaagttatctag

SEQ ID NO: 75822 - DNA, 1812 bp, Artificial Sequence
  derived and/or modified sequence
atggagaggagccagaagcccaagcagaagcacaaccgctggagctggggcggcagcctgcacggcagccccagcatccacagcgctgaccctgacagaagatctgtgtccaccatgaacctgagcaaatatgtggaccctgtgatcagcaagaggctgagcagcagcagcgccaccctgctgaacagcccagaccgggcccggcggctgcagctgagcccctgggagagctctgtggtgaaccggctgctgacccccacccacagcttcctggcccggagcaagagcacagctgccctgtctggagaggccgccagctgcagccccatcatcatgccctacaaggccgcccacagcaggaacagcatggaccggcccaagctgtttgtgaccccacctgagggcagcagcagaagacgcatcatccatggaacagccagctacaagaaggagcgggagagagaaaatgtgctcttcctgaccagcggcaccaggagagctgtgagccccagcaaccccaaggcccggcagcctgcccggagccggctgtggctgcccagcaagagcctgccccacctgcccggcaccccccggcccaccagcagcctgcccccaggctctgtgaaggccgccccagcccaggtgcggccccccagccctggcaacatccggcctgtgaagcgggaggtgaaggtggagcctgagaagaaggaccctgagaaggagccccagaaggtggccaatgagcccagcctgaagggccgggcccccctggtgaaggtggaggaggccaccgtggaggagaggaccccagctgagcctgaggtgggccctgctgccccagccatggccccagccccagccagcgccccagccccagccagcgccccagccccagcccctgtgcccaccccagccatggtgtctgcccccagcagcacagtgaatgccagcgcctctgtgaagaccagcgctggcaccacagatcctgaggaggccacccggctgctggccgagaagaggcggctggcccgggagcagcgggagaaggaggagcgggagcggcgggagcaggaggagctggagcggcagaagcgggaggagctggcccagagggtggccgaggagaggaccacccggcgggaggaggagagccggcggctggaggccgagcaggcccgggagaaggaggagcagctgcagaggcaggccgaggagcgggccctgcgggagcgggaggaggccgagcgggcccagaggcagaaggaggaggaggcccgggtgcgggaggaggccgagcgggtgcggcaggagcgggagaagcacttccagcgggaggagcaggagcggctggagaggaagaagaggctggaggagatcatgaagaggaccaggagaacagaggccacagacaagaagaccagtgaccagagaaatggagacatcgccaagggggccctgaccggcggcacagaggtgtctgccctgccctgcaccaccaatgcccctggaaatggcaagcctgtgggcagcccccacgtggtgaccagccaccagagcaaggtgacagtggagagcaccccagacctggagaagcagcccaatgaaaatggagtgtctgtgcagaatgaaaattttgaggagatcatcaacctgcccatcggcagcaagcccagccggctggatgtgaccaacagcgagagccctgagatccccctgaaccccatcctggcctttgatgatgagggcaccctgggccccctgccccaggtggatggagtgcagacccagcagacagctgaggtgatctag

SEQ ID NO: 75823 - DNA, 1812 bp, Artificial Sequence
  derived and/or modified sequence
atggagcggagccagaagcccaagcagaagcacaaccggtggagctgggggggctccctccacgggtctccctctatccattcagccgacccagatcggcgctcagtctccactatgaatttaagtaagtacgtcgatcctgttatctctaaaagacttagctccagttcagccaccctcctgaatagccctgatcgggcccgaagattacaactgagcccgtgggaatcaagcgtcgtcaacagacttctgaccccaactcactcgttccttgcacggtccaagtctacagccgcactctccggcgaggccgcgagctgtagccctatcatcatgccttataaagcagcccactcccggaattccatggaccggcccaagctctttgtaacccctccagaggggtcatctcgccgcagaataattcatgggaccgccagttataaaaaggaacgcgagcgcgagaatgtcctgtttttgacttctggcactagaagagccgtctccccttccaaccctaaggcaaggcagcccgcccgctcccgcctatggcttccgtccaaatcactccctcatcttcccggaacccctagacccacaagttctctgcctcctggcagcgtgaaggctgccccggcacaggttagacccccctctcccggaaacatcagacctgtgaaacgcgaggtgaaggtcgaacccgagaaaaaggatcccgagaaagagccccagaaggtggccaacgagccctctctcaagggccgggcaccgctcgttaaagtcgaggaggccaccgttgaggagcgcacacctgcagaacccgaagtgggacccgcagccccggccatggcaccagcacccgcctctgcgcctgcacctgctagcgcccccgcccccgcaccagttcctactcccgctatggtgtccgctccgagcagtactgtgaatgccagcgcaagcgtcaagaccagtgcaggaacgactgaccccgaagaagccacccgcctacttgccgagaagcgtaggctggcacgagaacagcgcgaaaaagaagaacgcgaacggcgagagcaggaggagttggagagacaaaaaagggaggagcttgcgcagcgagtagcagaagagcgtaccacaaggcgggaagaagaaagccggaggctagaagcagaacaggccagggagaaagaagaacagttgcaacgacaggccgaagaaagggccttgcgcgagagagaagaagccgagcgcgctcagcgacaaaaggaagaagaggcaagggttcgggaggaagccgaaagagtcagacaggagagggagaagcattttcaacgtgaggagcaagagcgcctcgagaggaagaagaggctggaggagatcatgaaacgaaccagaaggaccgaggctaccgacaagaagacctccgatcaaaggaatggggacatcgcaaagggtgctttgactggcggcacagaagtgagcgccctgccttgcactacaaacgccccaggaaatggtaagccggtaggtagtccccacgttgtgaccagtcaccagtcaaaagtgaccgtggaaagcaccccagacctggagaagcagcctaacgaaaacggagtgtctgtccaaaacgagaattttgaggaaatcatcaacctgcccattggaagcaaaccgtcccgcctcgacgtaacaaatagcgagtctcccgagattcccctgaaccctattcttgcgttcgacgacgaaggaacactcggaccccttccacaggtggatggtgttcagacccaacagacagccgaggtcatctag

SEQ ID NO: 75824 - DNA, 1812 bp, Artificial Sequence
  derived and/or modified sequence
atggagagatcacaaaaacccaagcaaaaacacaacagatggtcgtggggcggaagcctgcatggtagcccgtcaatccactccgccgacccagatcggaggtcagtgtccaccatgaatttgagcaagtatgttgatcctgtgatcagcaagcgcctaagctcatctagcgccaccttgctgaacagtccggatcgcgctcgaaggctgcagttgagtccatgggagagcagtgtggtgaaccggctgctcaccccgacacatagcttcctggcaaggtcgaagagcacagctgctcttagtggtgaggccgctagttgcagtcctatcatcatgccatacaaggctgctcactctagaaatagcatggatagaccaaaactgttcgtaactcctcctgagggctctagccgtcgtaggattatccacggaactgcatcctacaagaaagagcgagaaagggagaacgtgctgttcttgacctccgggacccggagagccgtgtcaccaagcaacccgaaagctcgccaaccagctaggtctcgtctgtggctgccgtctaagagcctgccacacctcccgggtactcctcggccaacatcatctctccctcccggatccgttaaagctgcccctgctcaagtgcggccaccttctcccggaaacatacggccagtcaagcgggaagtgaaagtggagcctgaaaagaaggatcccgagaaagaacctcagaaagttgccaatgaaccatccctgaaaggtagggctccacttgtcaaagtggaagaggccacagtggaagagagaacgccagcagagccagaggtgggtcccgcagcccctgccatggcacccgcaccggcatccgctccagcacctgccagtgctcccgctccagcaccagtaccaacccccgctatggtgtccgcaccatcctcaacggtcaatgcatccgcctctgtgaaaactagcgctggcaccaccgatcctgaagaggccaccaggttgcttgctgagaaaaggcgcttagcccgtgaacagcgcgagaaagaggagagggagcggagagagcaggaggagctggaaaggcaaaagcgagaagagctggcacagagagtggccgaggagcggacgacacggcgtgaggaagaaagcaggagactcgaagcagaacaggcgagggaaaaggaagagcagctgcagcgacaggcagaggagagagcgttgcgcgagcgagaggaagcagagcgggcacagagacaaaaggaggaggaggctagggtgcgtgaggaagctgaaagagtgcgacaggagcgagagaagcacttccaaagggaggagcaagagcgcttagaaaggaaaaagcgtctggaggaaatcatgaagaggacccgcagaaccgaggctacagacaagaaaacaagcgatcagaggaacggcgacatcgctaaaggcgctctgactggaggtacagaagtgagcgccttaccttgtacaacaaacgcccctggtaacggcaagcctgttggctcaccccacgtggtgactagtcatcagagcaaagtcactgtggagagtacccccgacctggaaaaacagccaaacgagaatggcgtgtcggtgcaaaatgagaacttcgaggagattatcaacctgcctattggctctaaaccgtccagactggatgtgacaaactccgaatccccagagattccactgaaccccatcttggcctttgacgacgagggaacgctgggccctctgcctcaggtcgacggcgtgcagacccagcagaccgccgaggttatttag

SEQ ID NO: 75825 - protein, 1121 aa, Artificial Sequence
  derived and/or modified sequence
MADTQTQVAPTPTMRMATAEDLPLPPPPALEDLPLPPPKESFSKFHQQRQASELRRLYRHIHPELRKNLAEAVAEDLAEVLGSEEPTEGDVQCMRWIFENWRLDAIGEHERPAAKEPVLCGDVQATSRKFEEGSFANSTDQEPTRPQPGGGDVRAARWLFETKPLDELTGQAKELEATVREPAASGDVQGTRMLFETRPLDRLGSRPSLQEQSPLELRSEIQELKGDVKKTVKLFQTEPLCAIQDAEGAIHEVKAACREEIQSNAVRSARWLFETRPLDAINQDPSQVRVIRGISLEEGARPDVSATRWIFETQPLDAIREILVDEKDFQPSPDLIPPGPDVQQQQHLFETRALDTLKGDEEAGAEAPPKEEVVPGDVRSTLWLFETKPLDAFRDKVQVGHLQRVDPQDGEGHLSSDSSSALPFSQSAPQRDELKGDVKTFKNLFETLPLDSIGQGEVLAHGSPSREEGTDSAGQAQGIGSPVYAMQDSKGRLHALTSVSREQIVGGDVQGYRWMFETQPLDQLGRSPSTIDVVRGITRQEVVAGDVGTARWLFETQPLEMIHQREQQERQKEEGKSQGDPQPEAPPKGDVQTIRWLFETCPMSELAEKQGSEVTDPTAKAEAQSCTWMFKPQPVDRPVGSREQHLQVSQVPAGERQTDRHVFETEPLQASGRPCGRRPVRYCSRVEIPSGQVSRQKEVFQALEAGKKEEQEPRVIAGSIPAGSVHKFTWLFENCPMGSLAAESIQGGNLLEEQPMSPSGNRMQESQETAAEGTLRTLHATPGILHHGGILMEARGPGELCLAKYVLSGTGQGHPYIRKEELVSGELPRIICQVLRRPDVDQQGLLVQEDPTGQLQLKPLRLPTPGSSGNIEDMDPELQQLLACGLGTSVARTGLVMQETEQGLVALTAYSLQPRLTSKASERSSVQLLASCIDKGDLSGLHSLRWEPPADPSPVPASEGAQSLHPTESIIHVPPLDPSMGMGHLRASGATPCPPQAIGKAVPLAGEAAAPAQLQNTEKQEDSHSGQKGMAVLGKSEGATTTPPGPGAPDLLAAMQSLRMATAEAQSLHQQVLNKHKQGPTPTATSNPIQDGLRKAGATQSNIRPGGGSDPRIPAAPRKLL

SEQ ID NO: 75826 - DNA, 3366 bp, Artificial Sequence
  derived and/or modified sequence
atggccgacacccagacccaggtggcccccacccccaccatgagaatggccaccgccgaggacctgcccctgccccccccccccgccctggaggacctgcccctgcccccccccaaggagagcttcagcaagttccaccagcagagacaggccagcgagctgagaagactgtacagacacatccaccccgagctgagaaagaacctggccgaggccgtggccgaggacctggccgaggtgctgggcagcgaggagcccaccgagggcgacgtgcagtgcatgagatggatcttcgagaactggagactggacgccatcggcgagcacgagagacccgccgccaaggagcccgtgctgtgcggcgacgtgcaggccaccagcagaaagttcgaggagggcagcttcgccaacagcaccgaccaggagcccaccagaccccagcccggcggcggcgacgtgagagccgccagatggctgttcgagaccaagcccctggacgagctgaccggccaggccaaggagctggaggccaccgtgagagagcccgccgccagcggcgacgtgcagggcaccagaatgctgttcgagaccagacccctggacagactgggcagcagacccagcctgcaggagcagagccccctggagctgagaagcgagatccaggagctgaagggcgacgtgaagaagaccgtgaagctgttccagaccgagcccctgtgcgccatccaggacgccgagggcgccatccacgaggtgaaggccgcctgcagagaggagatccagagcaacgccgtgagaagcgccagatggctgttcgagaccagacccctggacgccatcaaccaggaccccagccaggtgagagtgatcagaggcatcagcctggaggagggcgccagacccgacgtgagcgccaccagatggatcttcgagacccagcccctggacgccatcagagagatcctggtggacgagaaggacttccagcccagccccgacctgatcccccccggccccgacgtgcagcagcagcagcacctgttcgagaccagagccctggacaccctgaagggcgacgaggaggccggcgccgaggccccccccaaggaggaggtggtgcccggcgacgtgagaagcaccctgtggctgttcgagaccaagcccctggacgccttcagagacaaggtgcaggtgggccacctgcagagagtggacccccaggacggcgagggccacctgagcagcgacagcagcagcgccctgcccttcagccagagcgccccccagagagacgagctgaagggcgacgtgaagaccttcaagaacctgttcgagaccctgcccctggacagcatcggccagggcgaggtgctggcccacggcagccccagcagagaggagggcaccgacagcgccggccaggcccagggcatcggcagccccgtgtacgccatgcaggacagcaagggcagactgcacgccctgaccagcgtgagcagagagcagatcgtgggcggcgacgtgcagggctacagatggatgttcgagacccagcccctggaccagctgggcagaagccccagcaccatcgacgtggtgagaggcatcaccagacaggaggtggtggccggcgacgtgggcaccgccagatggctgttcgagacccagcccctggagatgatccaccagagagagcagcaggagagacagaaggaggagggcaagagccagggcgacccccagcccgaggccccccccaagggcgacgtgcagaccatcagatggctgttcgagacctgccccatgagcgagctggccgagaagcagggcagcgaggtgaccgaccccaccgccaaggccgaggcccagagctgcacctggatgttcaagccccagcccgtggacagacccgtgggcagcagagagcagcacctgcaggtgagccaggtgcccgccggcgagagacagaccgacagacacgtgttcgagaccgagcccctgcaggccagcggcagaccctgcggcagaagacccgtgagatactgcagcagagtggagatccccagcggccaggtgagcagacagaaggaggtgttccaggccctggaggccggcaagaaggaggagcaggagcccagagtgatcgccggcagcatccccgccggcagcgtgcacaagttcacctggctgttcgagaactgccccatgggcagcctggccgccgagagcatccagggcggcaacctgctggaggagcagcccatgagccccagcggcaacagaatgcaggagagccaggagaccgccgccgagggcaccctgagaaccctgcacgccacccccggcatcctgcaccacggcggcatcctgatggaggccagaggccccggcgagctgtgcctggccaagtacgtgctgagcggcaccggccagggccacccctacatcagaaaggaggagctggtgagcggcgagctgcccagaatcatctgccaggtgctgagaagacccgacgtggaccagcagggcctgctggtgcaggaggaccccaccggccagctgcagctgaagcccctgagactgcccacccccggcagcagcggcaacatcgaggacatggaccccgagctgcagcagctgctggcctgcggcctgggcaccagcgtggccagaaccggcctggtgatgcaggagaccgagcagggcctggtggccctgaccgcctacagcctgcagcccagactgaccagcaaggccagcgagagaagcagcgtgcagctgctggccagctgcatcgacaagggcgacctgagcggcctgcacagcctgagatgggagccccccgccgaccccagccccgtgcccgccagcgagggcgcccagagcctgcaccccaccgagagcatcatccacgtgccccccctggaccccagcatgggcatgggccacctgagagccagcggcgccaccccctgccccccccaggccatcggcaaggccgtgcccctggccggcgaggccgccgcccccgcccagctgcagaacaccgagaagcaggaggacagccacagcggccagaagggcatggccgtgctgggcaagagcgagggcgccaccaccaccccccccggccccggcgcccccgacctgctggccgccatgcagagcctgagaatggccaccgccgaggcccagagcctgcaccagcaggtgctgaacaagcacaagcagggccccacccccaccgccaccagcaaccccatccaggacggcctgagaaaggccggcgccacccagagcaacatcagacccggcggcggcagcgaccccagaatccccgccgcccccagaaagctgctgtag

SEQ ID NO: 75827 - DNA, 3366 bp, Artificial Sequence
  derived and/or modified sequence
atggcagacacccagacccaggtcgcccctactccaacgatgcgcatggctaccgcagaagacctccctctcccgccacccccggcactagaagacttacctcttcctccacctaaagagagcttctccaagttccaccagcagaggcaggccagcgagttacgcaggctgtatcggcacatccaccccgagttacgcaagaatctggctgaggcggtcgccgaagatcttgccgaagtgttgggttccgaagagcccactgaaggtgatgttcagtgtatgaggtggatattcgaaaactggaggctggacgcaattggagagcacgaaaggcctgccgctaaggagccggtgctctgtggagacgttcaagccacatcacgtaagtttgaagagggctcctttgccaactctacggaccaggagcctacgaggccacagcccggggggggtgatgtcagggcagcccggtggttgtttgaaaccaagccccttgatgaactgaccggccaagcaaaggaactagaggcgacggtgagggagcccgctgccagtggggacgtacaggggacacgtatgttgttcgaaacccgccctctggaccgcttggggtctcgtccctctcttcaggagcagagcccattggagttacggagcgaaattcaagaactcaaaggggacgtgaaaaaaaccgtcaagctcttccagaccgagccactctgtgcaatacaggatgcggaaggggccatccacgaggtgaaggccgcatgccgggaggagatccaaagtaatgccgttaggtcagcccgctggctgtttgaaacgagacccctagacgccatcaaccaggacccatcccaggtgagagtgattcggggcatttccctcgaggaaggtgcacgccctgacgtgtccgcaacccgatggatcttcgagacccaacccctggatgccattagagagattctggtagacgagaaagatttccagccctctcctgatctgattccccccgggcctgatgtgcaacaacagcagcacctattcgaaacccgggcactggacaccctgaagggtgatgaggaggctggggccgaagctcccccgaaagaagaagtagtgcccggggatgtcagatccaccctctggctatttgagactaagccccttgacgcctttcgagacaaggtgcaagtcggtcatttacagcgcgtagatccacaagacggggagggccacctgtccagtgactccagctcggcgttgccgttctcccagtcagccccacagcgggatgagctcaagggcgatgtcaagactttcaagaacctctttgaaaccttgcccctagatagcataggacagggtgaggtgctggctcacggtagcccctctagggaggagggcactgactcagccgggcaggcgcagggcataggctctcctgtatacgctatgcaggactcaaagggacgcttacatgctttaacttcagtaagccgcgaacagatcgttgggggcgacgtgcaggggtacaggtggatgttcgaaacccagcctttagatcagctgggtagatctcccagcacaatcgacgtggtgaggggaatcacaaggcaggaggtggtagccggcgatgttggcaccgccaggtggctattcgagacccaacctctggaaatgattcaccagagggagcagcaggaacgacagaaggaggagggaaaaagtcagggagaccctcagccggaagctcccccaaaaggcgatgttcagactatcagatggctgtttgagacctgccctatgagcgagcttgctgagaaacaggggagtgaagttaccgatccgacagctaaagccgaggcccagtcttgtacctggatgtttaagcctcagcctgtggacaggcctgttggatctcgggaacagcacctccaagtatcacaggtcccagcaggagaaagacaaacagatcgacacgtgttcgagacagaaccgttgcaggccagtggcagaccctgtggaaggaggccagttaggtactgcagccgggttgagataccttccggacaggtgagtagacagaaagaggtatttcaagcactcgaagctgggaagaaggaagagcaggagcctagagtcatcgcagggtctattcccgccggcagtgttcataagttcacatggctattcgagaattgccctatgggaagcctggccgccgaaagcatccaggggggcaaccttctcgaggagcagccaatgagtcctagcggcaatcgtatgcaggagagccaggaaactgcagcagaagggacattaaggaccctgcatgcgacacccggaattctgcaccatggtggcatcttgatggaggctcgagggcctggagagctgtgcttggccaagtacgtcctgtcaggaactggccaagggcacccctacattcgcaaggaggaacttgtctcgggagagctgcctcgcatcatctgtcaagtgctgcggcgcccggatgtcgaccagcaaggcctactcgttcaggaggatcctactggtcagcttcagctgaagcccttgcgactgcctacacccggaagttcggggaacatcgaagatatggaccctgaactgcagcaactgctggcctgcggactgggaacaagcgtggcccgaaccggcctggtgatgcaagaaacagaacagggactagtggcattaaccgcctactctctgcagcctcgcctgacatctaaggcttctgagcgctcatctgtgcagctgcttgccagttgcatcgataaaggtgatctgagcggccttcattcgctgagatgggaaccgcccgcggacccctctccagtacctgcctcagagggggctcagtcactgcatcccactgagagcattatccatgttccgcctctagacccttccatgggtatgggacatcttagggcatcaggcgcaacaccttgtccacctcaggccatcgggaaggctgtgcccctggctggggaggcagccgcgcccgcccaactgcagaacaccgaaaaacaggaggactcccactctggccaaaagggtatggcagtgctcggaaagagcgagggtgcaacgactaccccacctggaccaggcgcaccagatctgctggcagcaatgcaaagcctaaggatggctacagcagaagctcaatcgcttcaccagcaggttctaaataagcataaacagggcccaaccccaactgccaccagcaatcccatccaggacggcctcaggaaggctggggctacacagtctaacatccgcccaggcggcgggagtgatccaaggatcccggctgccccgaggaaattgttatag

SEQ ID NO: 75828 - DNA, 3366 bp, Artificial Sequence
  derived and/or modified sequence
atggctgacacccagacccaggtggcccccacccccaccatgaggatggccacagctgaggacctgcccctgcccccacctccagccctggaggacctgcccctgcccccacccaaggagagcttcagcaagttccaccagcagaggcaggccagcgagctgcggcggctgtaccgccacatccaccctgagctgaggaagaacctggccgaggccgtggccgaggacctggccgaggtgctgggcagcgaggagcccacagaaggagatgtgcagtgcatgcgctggatctttgagaactggaggctggatgccatcggggagcacgagaggcctgctgccaaggagcctgtgctgtgtggagatgtgcaggccaccagcaggaagtttgaggagggcagctttgccaacagcacagaccaggagcccacccggccccagcccggcggcggagatgtgcgggccgcccgctggctgtttgagaccaagcccctggatgagctgaccggccaggccaaggagctggaggccaccgtgcgggagcctgctgccagcggagatgtgcagggcaccaggatgctgtttgagacccggcccctggaccggctgggcagccggcccagcctgcaggagcagagccccctggagctgcggtctgagatccaggagctgaagggagatgtgaagaagacagtgaagctgttccagacagagcccctgtgtgccatccaggatgctgagggcgccatccacgaggtgaaggccgcctgccgggaggagatccagagcaatgctgtgcgcagcgcccgctggctgtttgagacccggcccctggatgccatcaaccaggaccccagccaggtgcgggtcatccggggcatcagcctggaggagggcgcccggccagatgtgtctgccacccgctggatctttgagacccagcccctggatgccatccgggagatcctggtggatgagaaggacttccagcccagcccagacctgatccccccaggcccagatgtgcagcagcagcagcacctgtttgagacccgggccctggacaccctgaagggagatgaggaggccggggctgaggccccacccaaggaggaggtggtgcctggagatgtgcgcagcaccctgtggctgtttgagaccaagcccctggatgccttccgggacaaggtgcaggtgggccacctgcagagggtggacccccaggatggagagggccacctgagcagtgacagcagcagcgccctgcccttcagccagagcgccccccagagagatgagctgaagggagatgtgaagaccttcaagaacctgtttgagaccctgcccctggacagcatcggccagggcgaggtgctggcccacggcagccccagccgggaggagggcacagacagcgctggccaggcccagggcatcggcagccctgtgtatgccatgcaggacagcaagggccgcctgcacgccctgacctctgtgtcccgggagcagatcgtgggcggagatgtgcagggctaccgctggatgtttgagacccagcccctggaccagctgggccgcagccccagcaccattgatgtggtgcggggcatcacccggcaggaggtggtggccggagatgtgggcacagcccgctggctgtttgagacccagcccctggagatgatccaccagcgggagcagcaggagcggcagaaggaggagggcaagagccagggcgacccccagcctgaggccccacccaagggagatgtgcagaccatccgctggctgtttgagacctgccccatgtctgagctggccgagaagcagggcagcgaggtgacagaccccacagccaaggccgaggcccagagctgcacctggatgttcaagccccagcctgtggacaggcctgtgggcagccgggagcagcacctgcaggtgtcccaggtgcctgctggggagcggcagacagacagacatgtgtttgaaacagagcccctgcaggccagcggccggccctgtggcagaagacctgtgcgctactgcagccgggtggagatccccagcggccaggtgtcccggcagaaggaggtgttccaggccctggaggccggcaagaaggaggagcaggagccccgggtgattgctggcagcatcccagctggctctgtgcacaagttcacctggctgtttgagaactgccccatgggcagcctggccgctgagagcatccagggcggcaacctgctggaggagcagcccatgagccccagcggcaacaggatgcaggagagccaggagacagctgctgagggcaccctgcggaccctgcacgccaccccaggcatcctgcaccacggcggcatcctgatggaggcccggggccctggagagctgtgcctggccaagtatgtgctgagcggcaccggccagggccacccctacatcaggaaggaggagctggtgtctggagagctgccccgcatcatctgccaggtgctgcggcggccagatgtggaccagcagggcctgctggtgcaggaggaccccaccggccagctgcagctgaagcccctgcggctgcccaccccaggcagcagcggcaacatcgaggacatggaccctgagctgcagcagctgctggcctgtggcctgggcacctctgtggccaggacaggcctggtgatgcaggagacagagcagggcctggtggccctgacagcctacagcctgcagccccggctgaccagcaaggccagcgagaggagctctgtgcagctgctggccagctgcatcgacaagggggacctgagcggcctgcacagcctgcgctgggagcccccagctgaccccagccctgtgcctgccagcgagggcgcccagagcctgcaccccacagagagcatcatccacgtgccccccctggaccccagcatgggcatgggccacctgcgggccagcggggccaccccctgccccccccaggccatcggcaaggctgtgcccctggccggggaggccgccgccccagcccagctgcagaacacagagaagcaggaggacagccacagcggccagaagggcatggctgtgctgggcaagtctgagggcgccaccaccaccccacctggccctggggccccagacctgctggccgccatgcagagcctgaggatggccacagctgaggcccagagcctgcaccagcaggtgctgaacaagcacaagcagggccccacccccacagccaccagcaaccccatccaggacggcctgaggaaggccggggccacccagagcaacatccggcctgggggcggcagtgacccccgcatcccagctgcccccaggaagctgctgtag

SEQ ID NO: 75829 - DNA, 3366 bp, Artificial Sequence
  derived and/or modified sequence
atggccgacacccagacccaggtggcccccacccccaccatgcggatggccacagccgaggatctacctctgccccccccgcctgcgcttgaagacttgcccctacctccgccgaaagaaagttttagtaagttccaccagcagcgacaagcctcggaactgaggagactgtacaggcatattcatcctgagctgcgtaagaatctggccgaggctgtggcggaggacctagcggaggtgctcggcagcgaggagcccacagagggggacgtgcagtgcatgcgttggatctttgaaaattggcggcttgacgctataggcgagcacgaacgccctgcggcgaaggagcccgttttgtgcggcgacgtacaggctactagtcggaagttcgaagaaggttccttcgccaacagcaccgaccaggagcctaccagaccacagcccgggggtggcgacgtccgggcagctcggtggctattcgagacaaagcctctcgacgaactgacaggccaagctaaggagctggaggcaacagtcagagaacccgccgcctcaggggatgtgcagggcacccgcatgctctttgagacacggcccctagacagactcggatccagaccttctctgcaggaacagagcccattggagctgaggtccgaaatccaggagctgaaaggggatgttaagaaaacagtaaagctgttccagacagaacctttgtgtgcaatccaagatgcggaaggtgccatccacgaggtgaaagccgcttgcagagaagaaatccagagcaacgcagtgcggagcgccaggtggctatttgagacgcgtcctctcgacgctattaaccaagacccctcccaggtccgtgtgatcagagggatctctttagaggaaggagcccgaccagatgtgagtgctacgagatggattttcgagacccagcccttggatgcgattagggagattcttgtggacgagaaggatttccaacctagccccgacctcatcccccccggaccagacgtgcaacaacagcaacatttgtttgaaacacgtgcgctggacaccttgaaaggagacgaagaagccggcgctgaggcacctccgaaagaggaagtcgtgcccggagatgtccggagtacattgtggctgtttgagacaaagcccttggacgcttttagagataaagtgcaggtgggccatctgcagcgcgtggacccacaggatggcgaaggccacctaagctccgactcttctagcgccttgcccttcagtcaatccgcaccacaaagggatgaactcaagggagatgttaaaacgtttaagaatctgtttgaaacattgcccctcgattcaatcggccagggtgaggtgctcgctcacggtagccctagccgggaagagggtaccgattccgccgggcaggcccagggcataggcagccccgtgtacgccatgcaggatagcaagggccgcttacacgccctcacctcagtgtcacgcgagcagatcgttgggggggatgtgcaaggataccggtggatgttcgagacccagccgctcgatcagcttggcaggtctccatccaccattgacgttgtcagaggtataaccagacaggaggtcgtggctggcgacgtaggaactgcccgctggttgttcgagactcagcccctggagatgatacatcagcgagagcagcaggaacgacagaaggaagagggcaaaagccaaggcgatcctcagccagaggcgcctcccaaaggagacgtgcaaacaatacgctggctgtttgaaacttgtccaatgagcgagctggctgaaaaacaaggatccgaggttacagaccccactgctaaggcagaggcgcagtcctgtacttggatgttcaaaccacaacccgtcgatagacccgtgggctctcgcgagcaacacctacaggtgtctcaagtgccggcgggcgagcgccagacagatcggcacgtgtttgagaccgagccactgcaggcttctggcagaccctgcggccgaagacctgttcggtactgttctagagtcgagatcccctctggtcaagtctcacgccagaaggaggtttttcaggcattggaggccggcaagaaggaggaacaggagccccgggtgatagcgggaagcatcccggctggcagcgtccataagttcacttggctattcgagaactgtcccatgggtagtcttgccgccgagtccatccagggaggtaacctgctggaagagcagcccatgtcaccctctgggaacagaatgcaggaatcgcaagagaccgctgccgagggcaccctcaggactctgcacgcaaccccaggcatactccatcacggaggaattctgatggaagccagaggtcccggagaactctgcctagcgaagtatgtgctttcaggcactgggcaggggcacccatatattcgcaaggaagaactggtgagtggtgagctccccagaattatctgccaagtattaagacggcctgatgttgatcagcagggcctcctggtacaagaagatcccacgggccagctgcaacttaagcctctcaggctgcccactcctgggagctcaggcaacattgaggatatggaccccgaacttcaacagctgctggcttgcggattgggaacaagcgtggcgagaacgggtttggtgatgcaggaaaccgagcaggggctggtggccctcaccgcttatagtctgcagccccggcttacttctaaggcttccgaacgttccagcgtccagctcctggcctcttgcatcgacaaaggcgatctgagtggccttcattctctcaggtgggagccccccgcggacccttcccctgtgcctgcctctgaaggcgcacagtctttgcaccccacagagtccatcatccacgtgccgccactagatccctcgatgggcatgggacatctgagggcgagcggagcaaccccatgtcccccacaagctatcggcaaagccgtgccgctcgctggcgaggctgcagcccccgcacagctacaaaatacagaaaaacaggaagacagtcatagcgggcagaagggtatggccgtgttgggaaagtctgaaggcgctacaacaacacctccaggccccggggccccagatctgttggccgccatgcagtcccttaggatggctacagcagaggcccaatccctccaccagcaggttctcaataaacataaacaagggccgacccccactgccacgagtaatccgatacaggacggacttcggaaggcaggtgcgacacagtcaaatatccgtcctgggggaggttccgaccccaggattcccgctgctcctcggaagctgctatag

SEQ ID NO: 75830 - DNA, 3366 bp, Artificial Sequence
  derived and/or modified sequence
atggcagatacccaaacgcaagttgcccctacgccaacgatgcgaatggcgacggcagaggatctgccactgcccccaccaccggcactcgaagacctgcctctcccccctccaaaggaatcattctccaagttccaccagcagaggcaagcgtccgagctgagaagactgtaccgacatatccatcccgagctgcgtaagaatctggctgaggccgtggctgaggacctggctgaggttctagggagtgaagagcctaccgagggcgatgtgcagtgtatgaggtggatcttcgaaaattggcgcctcgatgcgataggtgaacacgaacggccagcggctaaagaacctgtactgtgcggcgatgtgcaggcaactagcagaaagtttgaagaaggctcattcgccaactctactgatcaagagcctacccgccctcaacctggcggaggggacgtgcgcgctgcgcgttggctgttcgagaccaagccgttggacgagctgacaggccaggccaaggaactggaggccactgtaagggagccggctgcatcaggcgatgttcaaggcaccagaatgctgtttgagacccggcctttagaccgcttaggctctcgcccttctcttcaggaacagtcacctctagaattgcgctcagagatccaagaacttaagggagacgtgaagaagactgtcaagctgtttcagaccgagcctctgtgcgcaatccaagacgcagagggggctatccacgaagtaaaggcagcctgtagggaagagatccagagtaacgcagtaagatcagctcgatggcttttcgaaactcgaccgttagatgctatcaaccaagatccctcccaggtgagggtgattaggggtattagcttggaggaaggcgctagacccgatgtcagcgcgacccgatggatcttcgaaactcagccgctggacgccatacgggagatcctagtcgacgagaaagactttcagccatcacctgacttaatcccgccagggccagacgtgcagcaacagcagcacctgtttgagacaagggcactggataccttaaagggagatgaagaggctggagccgaggcacctccaaaggaagaggtcgtgccgggtgacgtgcggtcaaccctgtggctgtttgagacaaagccactggatgcctttagggacaaagtgcaagtaggccacctgcagcgagttgatccacaggacggtgaaggccatctctcaagcgatagcagctcagcgctccctttcagccagtccgccccacagcgagacgagctcaagggggacgtcaagacattcaaaaatctattcgagaccctcccacttgattctatcgggcaaggggaggtcttggcgcatgggagcccgagcagagaagaggggacagacagcgcaggtcaggcccaagggattggaagtcctgtttacgcgatgcaggacagcaaaggcaggctgcacgctctcacctctgtgagtcgtgaacagattgtgggtggcgacgtccagggctaccgatggatgttcgaaacacagccactggaccagttaggccgaagtccaagcactatcgacgtcgtacggggaataactaggcaagaggtggtagccggagatgtcggaacagcaagatggctatttgagacacagccgctggaaatgatccatcaaagggagcagcaggaacgccagaaagaggaaggaaaaagccagggtgatcctcaaccagaggcgcctcccaaaggagacgtacagacgatacggtggctctttgaaacctgcccaatgagcgaactggccgagaaacaggggagtgaggttactgatccaaccgccaaggccgaggcgcagtcctgtacctggatgtttaagccccagcctgtggatagacctgtgggctcccgtgagcagcatctacaggtgagtcaggtaccagcgggtgagcgccagactgatagacacgttttcgaaacagagcccctccaagcctctggcaggccatgcggaaggagacctgtccggtactgttcgagggtggagatcccatctggacaggtttctaggcagaaggaggtgttccaagctctggaggctggcaaaaaagaggaacaggagcctagggtcattgcaggcagcatccccgcaggctccgtgcacaagttcacatggctttttgagaattgtccaatgggatcactggcagcagagagcatccaggggggaaacctgctggaagaacaacctatgagtccatctggtaacaggatgcaggagagccaggagaccgctgccgaaggcacgctccggaccctgcatgccactcccggaatactccatcacggcggaatcttgatggaggctcgagggccaggagagctgtgcttggctaagtacgttctgtccggcacagggcaaggtcacccctacatacgcaaggaagaactggtgtctggagaactgcctcggatcatatgccaggttctacgaagacctgacgtcgatcagcagggacttctagttcaagaagaccccacaggacagctccagcttaaaccactgcggctacccacccccggaagcagtggcaacatcgaggacatggaccccgagctgcagcagcttctcgcatgtgggctgggaacatctgttgctcggacaggcctggtcatgcaagaaacagagcagggactggtcgcacttacagcatattctctgcagcctaggttaactagcaaggcttctgaacggagctccgttcagctcctggcatcctgcatcgacaaaggcgacttgtcaggtctccattcactccgctgggaaccccctgctgatccaagccccgtcccagcgtcagaaggggctcagtcacttcacccaacagaatccatcatccacgttcctcctctagacccttctatggggatgggtcatctgcgggcatccggtgccacgccctgcccaccccaagctattggaaaggcagttcctctggccggagaggcggctgcgccagcccagcttcagaacacagagaagcaggaagatagtcatagcgggcagaaagggatggccgtgctaggaaaaagtgagggcgctaccacaactcccccaggacctggcgcacccgacctcttagccgcaatgcaatctcttcgcatggcaaccgccgaggctcaatctctgcaccagcaggtgctgaataaacacaagcagggtcctacaccaaccgcaacatccaaccctatccaggacgggctgaggaaggctggcgctacacagtctaacatcaggccgggagggggatccgaccctcggattccagcagcccctagaaaactgctgtag

SEQ ID NO: 75831 - DNA, 6040 bp, Artificial Sequence
  derived and/or modified sequence
gacagagacctggagccagggcagcaagaaggtgtctgttggagccagcagaacagaaccaatttgaacaagaacctccagaggaacgacgaaccctgagaccacagctgctacagaccacaaacaccccatcagccaagagagacccttgcatccagcctctaccctgctgaacatctagatctaaggctcccaatcccatcctcatctctgccccttcttctcagaaggatggccgacacccagacacaggtggcccccacaccaaccatgaggatggcaactgcagaggacctgcccctccctccacccccagccctggaggacctgccactgccgccacccaaggaatccttctccaagttccatcagcagcggcaagctagtgagctccgccgcctctacaggcacatccaccctgagctccgcaagaatctggctgaggctgtggccgaggatctggctgaggtcctgggctctgaggaacccaccgagggtgacgttcagtgcatgcgctggatctttgagaactggagactggatgccattggagaacacgagaggccagctgccaaggagcccgtgctgtgtggtgacgtccaggccacctcccgcaagtttgaggaaggctcctttgccaacagcacagaccaggagccaaccaggccccagccaggtggaggagacgttcgtgcagcccgctggctatttgagacaaagccactggacgagctgacagggcaagccaaggaactggaggccactgtgagggagcctgcagccagcggagatgtgcagggtaccaggatgctctttgagacgcggccgctggaccgcctgggctcccgcccctccctgcaggagcagagccccttggaactgcgctcagagatccaggagctgaagggtgatgtgaaaaagacagtgaagctcttccaaacggagcccctgtgtgccatccaggatgcagagggcgccatccatgaggtcaaggccgcatgccgggaggagatccaaagcaacgcggtgaggtctgcccgctggctctttgagacccggcctctggacgccatcaaccaggaccccagccaggtgcgggtgatccgggggatttccctggaggagggggcccggcccgacgtcagtgcaactcgctggatctttgagacacagcccctggatgccatccgggagatcttggtagatgagaaggacttccagccatccccagaccttatcccacctggtccagatgttcagcagcagcagcatctgtttgagacccgagcgctggacactctgaagggggacgaagaggctggagcagaggccccacccaaggaggaagtggtccctggtgatgtccgctccaccctgtggctatttgaaacaaagcccctggatgctttcagagacaaggtccaagtgggtcacctacagcgagtggatccccaggacggtgaggggcatctatccagtgacagctcctcagcactgcccttctctcagagtgccccccagagggatgagctaaagggggatgtgaagacttttaagaacctttttgagacccttcccttggacagcattggacagggtgaggttctggcccatgggagtccaagcagagaagaaggaactgattctgctgggcaggcccagggcatagggtccccagtgtatgccatgcaggacagcaagggccgcctccatgccctgacctctgttagcagagagcagatagtcggaggtgatgtgcagggctacaggtggatgtttgagacacagcccctagaccagctcggccgaagccccagtaccatcgacgtggtgcggggcatcacccggcaggaagtggtggctggggacgttggcacagctcggtggctttttgagacccagcccctggagatgatccaccaacgggagcagcaggaacgacagaaagaagaagggaagagtcagggagacccccagcctgaggcacccccaaagggcgatgtgcagaccatccggtggttgttcgagacttgcccaatgagtgagttggccgaaaagcaggggtcagaggtcacagatcccacagccaaggctgaggcacagtcctgcacctggatgttcaagccccaacctgtggacaggccagtgggctccagggagcagcacctgcaggttagccaggtcccggctggggaaagacagacagacagacacgtctttgagaccgagcctcttcaggcctcaggccgtccctgtggaagacggcctgtgagatactgcagccgcgtggagatcccttcagggcaggtgtctcgtcagaaagaggtttttcaggccctggaggcaggcaagaaggaagaacaggagccccgggtaatcgctgggtccatccccgcgggttctgtccacaagttcacttggctttttgagaattgtcccatgggctccctggcagctgagagcatccaagggggcaacctcctggaagagcagcccatgagcccctcaggcaacaggatgcaagagagccaggagactgcagctgaggggaccctgcggactctgcatgccacacctggcatcctgcaccatggaggcatcctcatggaggcccgagggccaggggagctctgtcttgccaagtatgtgctctcgggcacagggcaggggcacccttatatacgaaaggaggagctggtgtcaggtgaacttcccaggatcatctgccaagtcctgcgccggccagatgtggaccagcaggggctgctggtgcaggaagacccaactggccagctccaactcaagccgctgaggctgccaactccaggcagcagtgggaatattgaagacatggaccctgagctccagcagctgctggcttgcggtcttgggacctccgtggcaaggactgggctggtgatgcaggagacagagcagggcctggtcgcactgactgcctactctctgcagccccggctaactagcaaggcctctgagaggagcagcgtgcagctgttggccagctgcatagataaaggagacctgagtggcctgcacagtctgcggtgggagcccccggctgacccgagtccagtgccagccagcgagggggcccagagcctgcacccaactgagagcatcatccatgttcccccactggaccccagcatggggatggggcatctgagagcctcaggggccaccccttgccctcctcaggccattggaaaggcagtccctctggctggggaagctgcagcaccagcccaattgcaaaacacagaaaagcaggaagacagtcactctggacagaaagggatggcagtcttgggaaagtcagaaggagccacgactacccctccggggcctggggccccagacctcctggccgccatgcagagtctgcggatggcaacagctgaagcccagagcctgcaccagcaagttctgaacaagcacaagcagggccccaccccaacagccacttccaaccccatccaggacggtcttcggaaagctggggctacccaaagcaacataaggcctgggggtggaagtgatccccggatcccagcagcccccagaaagctgctgtgacaggacctgactttccagctggagcccaccgtgctgaggactccatccagcaagcctctgagcccctgaaggacccccttcttcactcccacagcagccctgctggccagagaacccctggagggtcacagacaaagaccccaaaactggaccccaccatgcccccaaagaagaagccgcagctgccccctaaacctgcacacctaacccagagccaccctcctcagaggctgcccaagcccttgcctctatctcccagcttttcctcggaggtggggcaaagagaacaccaacgaggtgagagagatacagccatccctcagccagccaaggttcccactactgtagaccagggccacatacctctggccagatgtcccagtggacatagccagcccagcttacaacatggcctcagcaccacggcccccaggcccaccaagaatcaggctacaggcagcaatgcccagagctctgagccccccaagctcaatgccctcaaccatgatcccacctcaccacagtggggccccggcccctcaggagagcagcccatggaaggttcccaccaaggggcccctgagagccctgacagtctgcaaagaaaccagaaagagctccagggcctcctgaaccaggtgcaagccctggagaaggaggccgcaagcagtgtggacgtgcaggccctgcggaggctctttgaggccgtgccccagctgggaggggctgctcctcaggctcctgctgcccaccaaaagcccgaggcctcagtggagcaggcctttggggagctgacacgggtcagcacggaagttgctcaactgaaggaacagaccttggcaaggctgctggacattgaagaggctgtgcacaaggcactcagctccatgtctagcctccagcctgaggccagtgccagaggccatttccagggacctccaaaagaccacagtgcccacaagatcagtgtcacagtcagcagtagcgccaggcccagtggctcaggccaggaggtcggaggtcaaactgcagtcaagaaccaagccaaggttgaatgccacactgaggcccagagtcaagtcaagatcagaaatcacacagaggccagaggtcacacagcctcaactgccccttccaccaggaggcaggagacatcaagagagtatttgtgccctcctcgggttttaccttccagccgagattctccctcctccccaacatttatctccatccagtcggccacaaggaagcctctagagactcccagctttaagggcaaccctgatgtctcagtgaaaagcacacaactggctcaggacataggccaggccctgctccaccagaaaggtgtccaagacaaaactgggaagaaggacatcacccagtgctctgtgcaacctgaacctgcccctccctcagccagtcccctgcccagagggtggcaaaagagtgttctggagctacagacggggccagggagctcacaacactatggagccatgagaaccgtgactgaacagtatgaggaggtggaccagtttgggaacacagtcctcatgtcttccaccacagtcaccgagcaggcagagccacccaggaacccaggctcccacctcgggctccacgcctcccccttgctgaggcagttcctgcacagcccagctgggttcagcagtgacctgacagaagctgagacggtgcaggtgtcctgcagctactcccagccagctgcccagtgaggcccaccgcctcccaccacacctgccacctgttcctggcctccactgccccaggactgaagtgggtacctgcctcctgtacactggagcaaggaccaagaggaaatggcatcttcagaggattactgtgggccatttccctttcgcagttctttcaataggcccagttcttccaaatggaaaaagaaaggtctggaagaggcccacagagttgcacaggcgtgggggtaggatgggggctcccagctgcttgtggaggatgtaatatatacagacacacacatgtttttcacacaggcctggcccacgcatcgacatgtgtgaatttgcacaccactgcctgaattggagccccccagagtgtccctctacccagagtttttatttctttaattagtctgagtgttcccagccatctgctccttaatccctggagaggaacagagccaactggacacagcgttggtctctgtttggaatcactgtgaggtctccagaaggacctggccgccagccccttcatcaccatctccatcattcagctggtcatctggtggcccaaaggtcacccaaagagtcagcaatcagcatgtccctagaagccaaatgcactgcctttctctgtccccatgactgtcccccactctgcaccccaaatgggaagcatacggtctgaataaatccaagttttattctctactctg

SEQ ID NO: 75832 - protein, 222 aa, Artificial Sequence
  derived and/or modified sequence
MPASSPFLLAPKGPPGNMGGPVREPALSVALWLSWGAALGAVACAMALLTQQTELQSLRREVSRLQGTGGPSQNGEGYPWQSLPEQHSVLHLVPINATSKDDSDVTEVMWQPALRRGRGLQAQGYGVRIQDAGVYLLYSQVLFQDVTFTMGQVVSREGQGRQETLFRCIRSMPSHPDRAYNSCYSAGVFHLHQGDILSVIIPRARAKLNLSPHGTFLGFVKL

SEQ ID NO: 75833 - DNA, 726 bp, Artificial Sequence
  derived and/or modified sequence
cggaaccctgtgtgctggggaggaatcccgcagtggccggggggcttgaggccgctgctttgtctcttcgtccagagccttatcccccaaagggcctccaggcaacatggggggcccagtcagagagccggcactctcagttgccctctggttgagttggggggcagctctgggggccgtggcttgtgccatggctctgctgacccaacaaacagagctgcagagcctcaggagagaggtgagccggctgcaggggacaggaggcccctcccagaatggggaagggtatccctggcagagtctcccggagcagcactctgtcctgcacctggttcccattaacgccacctccaaggatgactccgatgtgacagaggtgatgtggcaaccagctcttaggcgtgggagaggcctacaggcccaaggatatggtgtccgaatccaggatgctggagtttatctgctgtatagccaggtcctgtttcaagacgtgactttcaccatgggtcaggtggtgtctcgagaaggccaaggaaggcaggagactctattccgatgtataagaagtatgccctcccacccggaccgggcctacaacagctgctatagcgcaggtgtcttccatttacaccaaggggatattctgagtgtcataattccccgggcaagggcgaaacttaacctctctccacatggaaccttcctggggtttgtgaaactgtgatt

SEQ ID NO: 75834 - DNA, 669 bp, Artificial Sequence
  derived and/or modified sequence
atgcccgcaagctcaccattccttctggctccaaaaggtccccctggcaacatggggggacccgtcagagaacccgctctgtcagtggccttatggctctcctggggagccgctctcggcgcagtagcctgcgctatggccttgctgacccagcagacggaactgcaatccttgagacgggaggtgtcaagactccagggtaccggaggacctagtcagaacggcgaaggatatccttggcagagcctgccggagcagcattctgtgctgcatctggtccccataaatgcgacctccaaggacgactcggacgtcactgaagtaatgtggcagccggcactccgacgcggacgaggtttgcaggctcagggatatggggtccgaatccaggacgcgggagtgtacctgttatactcccaggtgctgtttcaggatgtcacgtttacaatgggtcaagtcgtgagtagggagggacaggggcgacaggagacgctgtttcgctgtatccggtctatgccaagtcaccctgatagagcctacaactcatgttactccgcgggagtcttccacctacaccaaggcgatattctgagtgtaattattcctagagcgcgagcaaagctgaacctgtcaccccatggtacgtttctaggtttcgttaagctgtag

SEQ ID NO: 75835 - DNA, 669 bp, Artificial Sequence
  derived and/or modified sequence
atgccggcatcttcccccttcctcctcgcaccgaaaggtccacctggaaatatggggggacccgtgcgtgagcctgcgctcagtgtcgccctgtggcttagttggggcgccgctctgggggcagttgcctgtgcaatggccttactgacccagcagactgagttgcagagcctgaggagagaagttagtcgacttcagggaaccggcggccctagccagaacggcgaaggttatccctggcagtccctgcccgagcagcactccgtactgcacttggtgcccatcaacgccacctccaaggacgactcagacgtaacagaggtgatgtggcagcccgccttacggagaggacggggtttgcaggcgcagggctacggtgtaagaatacaggacgcaggcgtctatctgttgtacagtcaagtcctcttccaggatgtcacgtttaccatgggtcaggtagtctctagggagggccagggcagacaagaaaccctctttcgctgcattcgctcgatgcctagccaccctgacagagcgtataactcctgctactcagctggcgtgttccacctgcatcaaggggatattctgtctgttatcatcccacgcgcccgggcgaaactcaacctcagccctcatggtacttttttagggtttgtgaaactttag

SEQ ID NO: 75836 - DNA, 669 bp, Artificial Sequence
  derived and/or modified sequence
atgcctgcgtcaagtccattcctcttagccccaaaagggccccctggcaatatgggcggtccagttagggaaccagctctgagcgtggccctatggctcagctggggagccgctctgggcgcagtagcatgtgctatggccctgctgacacaacagactgaacttcagtcactgcggcgagaagtgtcgcgccttcagggtacaggcggccctagccagaacggagaagggtatccgtggcagtctcttccagagcagcattcagtactccacttggtgccaattaacgcgacctctaaagacgactccgacgtgaccgaagtgatgtggcaaccagcactcagaagagggagaggacttcaagcccagggctacggcgtccgtatacaagatgcgggagtgtatttgctctacagccaggtactcttccaagacgttacatttacaatgggtcaggtcgtttcacgggaaggacagggacgacaggagacacttttccggtgcatacgatctatgccatctcacccagatcgagcctacaattcatgttacagcgcaggggttttccacctccaccagggagacatcctgagcgtaatcataccccgagctagagccaaactgaatctttccccacacggcacatttctgggcttcgttaagttgtag

SEQ ID NO: 75837 - DNA, 669 bp, Artificial Sequence
  derived and/or modified sequence
atgcccgccagcagccccttcctgctggcccccaagggcccccccggcaacatgggcggccccgtgagagagcccgccctgagcgtggccctgtggctgagctggggcgccgccctgggcgccgtggcctgcgccatggccctgctgacccagcagaccgagctgcagagcctgagaagagaggtgagcagactgcagggcaccggcggccccagccagaacggcgagggctacccctggcagagcctgcccgagcagcacagcgtgctgcacctggtgcccatcaacgccaccagcaaggacgacagcgacgtgaccgaggtgatgtggcagcccgccctgagaagaggcagaggcctgcaggcccagggctacggcgtgagaatccaggacgccggcgtgtacctgctgtacagccaggtgctgttccaggacgtgaccttcaccatgggccaggtggtgagcagagagggccagggcagacaggagaccctgttcagatgcatcagaagcatgcccagccaccccgacagagcctacaacagctgctacagcgccggcgtgttccacctgcaccagggcgacatcctgagcgtgatcatccccagagccagagccaagctgaacctgagcccccacggcaccttcctgggcttcgtgaagctgtag

SEQ ID NO: 75838 - DNA, 669 bp, Artificial Sequence
  derived and/or modified sequence
atgccagcctcatccccctttctcttggctccaaagggaccacccgggaatatgggcggccctgtcagagagcctgccctctccgttgccctgtggttgtcctggggagccgccttgggtgcagtcgcatgtgccatggctctgcttacgcaacagacggagctgcaaagccttcggcgggaggtctctaggctgcagggcaccggtggccccagtcagaatggcgaagggtacccatggcagagcctgcccgagcagcacagcgtgttacacctcgtgccaatcaatgccacttctaaagacgacagtgatgtgaccgaggtaatgtggcaaccagccttacgccgcgggagaggtttgcaggcacaagggtatggggtgcgaatacaggatgctggcgtgtacctgttgtactcccaagtcttatttcaggacgtcacattcaccatgggccaggtggttagcagggaaggacaaggcagacaggaaactttgtttaggtgtatacgatccatgccctcccaccccgaccgcgcatacaattcatgctacagcgccggagtctttcatttgcaccaaggcgacattctgtctgtgatcattccacgcgcccgcgccaagctcaacctgtcgcctcacgggacctttttaggattcgtgaaactctag

SEQ ID NO: 75839 - DNA, 669 bp, Artificial Sequence
  derived and/or modified sequence
atgcctgccagcagccccttcctgctggcccccaagggccccccaggcaacatgggcggccctgtgcgggagcccgccctgtctgtggccctgtggctgtcctggggcgccgccctgggcgctgtggcctgtgccatggccctgctgacccagcagacagagctgcagagcctgcggcgggaggtgtcccggctgcagggcaccggcggccccagccagaatggagagggctacccctggcagagcctgcctgagcagcacagcgtgctgcacctggtgcccatcaatgccaccagcaaggatgacagtgatgtgacagaggtgatgtggcagcctgccctgcggcggggccggggcctgcaggcccagggctatggagtgcgcatccaggatgctggggtgtacctgctgtacagccaggtgctcttccaggatgtgaccttcaccatgggccaggtggtgtcccgggagggccagggccggcaggagaccctcttccgctgcatccgctccatgcccagccacccagaccgggcctacaacagctgctacagcgctggggtcttccacctgcaccagggcgacatcctgagcgtcatcatcccccgggcccgggccaagctgaacctgagcccccacggcaccttcctgggctttgtgaagctgtag

SEQ ID NO: 75840 - DNA, 1184 bp, Artificial Sequence
  derived and/or modified sequence
agccctgtccttcctagagggactggaacctaattctcctgaggctgagggagggtggagggtctcaaggcaacgctggccccacgacggagtgccaggagcactaacagtacccttagcttgctttcctcctccctcctttttattttcaagttcctttttatttctccttgcgtaacaaccttcttcccttctgcaccactgcccgtacccttacccgccccgccacctccttgctaccccactcttgaaaccacagctgttggcagggtccccagctcatgccagcctcatctcctttcttgctagcccccaaagggcctccaggcaacatggggggcccagtcagagagccggcactctcagttgccctctggttgagttggggggcagctctgggggccgtggcttgtgccatggctctgctgacccaacaaacagagctgcagagcctcaggagagaggtgagccggctgcaggggacaggaggcccctcccagaatggggaagggtatccctggcagagtctcccggagcagcactctgtcctgcacctggttcccattaacgccacctccaaggatgactccgatgtgacagaggtgatgtggcaaccagctcttaggcgtgggagaggcctacaggcccaaggatatggtgtccgaatccaggatgctggagtttatctgctgtatagccaggtcctgtttcaagacgtgactttcaccatgggtcaggtggtgtctcgagaaggccaaggaaggcaggagactctattccgatgtataagaagtatgccctcccacccggaccgggcctacaacagctgctatagcgcaggtgtcttccatttacaccaaggggatattctgagtgtcataattccccgggcaagggcgaaacttaacctctctccacatggaaccttcctggggtttgtgaaactgtgattgtgttataaaaagtggctcccagcttggaagaccagggtgggtacatactggagacagccaagagctgagtatataaaggagagggaatgtgcaggaacagaggcgtcttcctgggtttggctccccgttcctcacttttcccttttcattcccaccccctagactttgattttacggatatcttgcttctgttccccatggagctccgaattcttgcgtgtgtgtagatga

SEQ ID NO: 75841 - DNA, 669 bp, Artificial Sequence
  derived and/or modified sequence
atgcccgccagcagccccttcctgctggcccccaagggcccccccggaaatatgggtgggcccgtgagggaacctgccctttcagtagctctttggctgagctggggtgccgctctgggtgccgtagcatgtgccatggcactgcttacccagcagaccgagttgcagagtctcagaagagaggtgagcagacttcagggcaccggcgggcctagtcaaaacggggagggctacccatggcagagcttgcccgagcagcactcagtcttgcacctggtacctattaatgctaccagcaaagacgacagtgacgtgacagaagtcatgtggcagccagcactgaggcgtggtcggggcttacaagctcagggctacggtgtgagaatccaggacgccggtgtttacctgctgtacagccaggtgctgtttcaggacgtgacattcacaatggggcaggttgtctccagagagggccaggggaggcaggagacattattccgatgtatcaggtcaatgccaagccaccccgatcgagcatataactcttgttacagcgccggcgttttccacttgcaccagggagacatcctgtccgtcatcatcccgcgtgcccgtgccaagctgaacctttcccctcatggaaccttcctgggcttcgtcaagctctag

SEQ ID NO: 75842 - RNA, 669 nt, Artificial Sequence
  derived and/or modified sequence
augccggcaucuucccccuuccuccucgcaccgaaagguccaccuggaaauauggggggacccgugcgugagccugcgcucagugucgcccuguggcuuaguuggggcgccgcucugggggcaguugccugugcaauggccuuacugacccagcagacugaguugcagagccugaggagagaaguuagucgacuucagggaaccggcggcccuagccagaacggcgaagguuaucccuggcagucccugcccgagcagcacuccguacugcacuuggugcccaucaacgccaccuccaaggacgacucagacguaacagaggugauguggcagcccgccuuacggagaggacgggguuugcaggcgcagggcuacgguguaagaauacaggacgcaggcgucuaucuguuguacagucaaguccucuuccaggaugucacguuuaccaugggucagguagucucuagggagggccagggcagacaagaaacccucuuucgcugcauucgcucgaugccuagccacccugacagagcguauaacuccugcuacucagcuggcguguuccaccugcaucaaggggauauucugucuguuaucaucccacgcgcccgggcgaaacucaaccucagcccucaugguacuuuuuuaggguuugugaaacuuuag

SEQ ID NO: 75843 - RNA, 669 nt, Artificial Sequence
  derived and/or modified sequence
augccugcgucaaguccauuccucuuagccccaaaagggcccccuggcaauaugggcgguccaguuagggaaccagcucugagcguggcccuauggcucagcuggggagccgcucugggcgcaguagcaugugcuauggcccugcugacacaacagacugaacuucagucacugcggcgagaagugucgcgccuucaggguacaggcggcccuagccagaacggagaaggguauccguggcagucucuuccagagcagcauucaguacuccacuuggugccaauuaacgcgaccucuaaagacgacuccgacgugaccgaagugauguggcaaccagcacucagaagagggagaggacuucaagcccagggcuacggcguccguauacaagaugcgggaguguauuugcucuacagccagguacucuuccaagacguuacauuuacaaugggucaggucguuucacgggaaggacagggacgacaggagacacuuuuccggugcauacgaucuaugccaucucacccagaucgagccuacaauucauguuacagcgcagggguuuuccaccuccaccagggagacauccugagcguaaucauaccccgagcuagagccaaacugaaucuuuccccacacggcacauuucugggcuucguuaaguuguag

SEQ ID NO: 75844 - protein, 205 aa, Artificial Sequence
  derived and/or modified sequence
MGGPVREPALSVALWLSWGAALGAVACAMALLTQQTELQSLRREVSRLQGTGGPSQNGEGYPWQSLPEQHSVLHLVPINATSKDDSDVTEVMWQPALRRGRGLQAQGYGVRIQDAGVYLLYSQVLFQDVTFTMGQVVSREGQGRQETLFRCIRSMPSHPDRAYNSCYSAGVFHLHQGDILSVIIPRARAKLNLSPHGTFLGFVKL

SEQ ID NO: 75845 - DNA, 618 bp, Artificial Sequence
  derived and/or modified sequence
atgggtggcccagtccgcgagccagccctgtccgtggctctctggctgagttggggtgccgctctcggagcagtggcatgtgcgatggctctgctgacgcagcagacggagctccagtcactacgaagggaagtcagtcggttacaggggacgggcggtcccagccaaaacggcgaaggctatccatggcagagcctccctgaacagcacagtgtgttgcacctagtaccaattaacgctacctctaaggacgattccgatgtgaccgaggttatgtggcaaccggctttacggaggggacgcggtctgcaggcccagggctacggcgtcaggatccaggacgccggtgtgtacttgctgtactcacaggtgctgtttcaggatgtcacattcaccatgggacaggtcgtgagccgggagggtcagggaagacaggagaccctgtttaggtgcatccgctctatgccgtcccatccagatagagcatacaactcatgctattcagctggagtgtttcacctccaccaaggcgacatactgagcgtgatcatccctcgtgccagggctaagctcaacctgtctccccacggtacttttttggggttcgtgaagttgtag

SEQ ID NO: 75846 - DNA, 618 bp, Artificial Sequence
  derived and/or modified sequence
atggggggcccagtgagagagcccgccctgagcgtcgctctctggttatcttggggggctgcactgggagctgtggcatgtgctatggctctgttgacccagcagacggaattgcagagtctaaggcgggaggtgagtcgactccagggcaccggcgggccaagtcagaacggagagggatacccatggcagtcactccccgagcagcactcagtccttcacttggttcccataaatgcaacaagcaaggatgattctgacgtcacagaagtcatgtggcagcccgcactccgacgagggcgaggtcttcaagcccagggctacggagtccgaatccaggacgcgggggtttatctgctctattctcaagtgttattccaggacgtgacctttacaatgggacaggtcgtatctcgggaaggccagggaagacaggagaccttattccgatgtattagaagcatgccctcccaccctgatcgggcctataacagctgctattcagctggtgttttccatctgcatcaaggcgacatcctgtccgtaataatacctagagcccgcgcaaagctcaatctgtccccgcacggcacttttttgggattcgtgaaactttag

SEQ ID NO: 75847 - DNA, 618 bp, Artificial Sequence
  derived and/or modified sequence
atgggagggcctgtgcgggagcctgctctatctgtagctttgtggctctcttggggcgctgcgttaggcgctgtggcttgtgcgatggcccttctgacccaacaaacagaactgcagtccttgcgaagagaagtgtcccgcttacagggtaccggaggaccaagtcagaacggggaaggctacccctggcagtccttgcccgaacagcactcagtgttacatcttgtgcccattaatgctacaagtaaagatgattccgatgtcactgaggtaatgtggcagcccgctctaaggaggggccgcgggttgcaggcgcagggctacggcgttagaattcaagacgctggagtttacctcctgtattcccaggttctcttccaggacgtcaccttcacaatggggcaagtcgtgtccagagaaggtcaagggcggcaagagacgttgttcagatgtattcggtcaatgccatcccacccagaccgagcctacaatagctgttactccgccggcgtgttccatctgcaccagggcgacattttgtcagttatcatcccacgagctcgtgccaaattgaacctctcacctcacgggacatttctggggtttgtaaagttgtag

SEQ ID NO: 75848 - DNA, 618 bp, Artificial Sequence
  derived and/or modified sequence
atgggcggccccgtgagagagcccgccctgagcgtggccctgtggctgagctggggcgccgccctgggcgccgtggcctgcgccatggccctgctgacccagcagaccgagctgcagagcctgagaagagaggtgagcagactgcagggcaccggcggccccagccagaacggcgagggctacccctggcagagcctgcccgagcagcacagcgtgctgcacctggtgcccatcaacgccaccagcaaggacgacagcgacgtgaccgaggtgatgtggcagcccgccctgagaagaggcagaggcctgcaggcccagggctacggcgtgagaatccaggacgccggcgtgtacctgctgtacagccaggtgctgttccaggacgtgaccttcaccatgggccaggtggtgagcagagagggccagggcagacaggagaccctgttcagatgcatcagaagcatgcccagccaccccgacagagcctacaacagctgctacagcgccggcgtgttccacctgcaccagggcgacatcctgagcgtgatcatccccagagccagagccaagctgaacctgagcccccacggcaccttcctgggcttcgtgaagctgtag

SEQ ID NO: 75849 - DNA, 618 bp, Artificial Sequence
  derived and/or modified sequence
atgggcggacccgttagagagcctgccctttccgtggccctttggctgtcatggggagccgcactcggcgccgtggcttgtgctatggctttgttgacgcagcagacagagcttcagtctctgcgtcgcgaggtgagtcggctgcaggggaccgggggaccctctcagaatggcgaagggtacccctggcaatctctgccggagcagcactccgttcttcatttggttccaataaacgctaccagtaaggacgattcagacgtaaccgaggtgatgtggcagcctgcattgaggagaggtcgaggcctccaggcccagggctatggagtcagaattcaagatgcaggggtctatctgctctattcacaggtactcttccaagacgtaacttttacaatgggccaggtagtgagcagagagggtcagggaagacaagagactctgttcaggtgtatccggagcatgcccagccaccctgacagagcgtataattcctgttactctgccggcgttttccacctgcaccagggcgacatcctttccgtgatcattccaagggcgagggctaaactgaatttgtcccctcatggtaccttcctgggatttgtgaaactctag

SEQ ID NO: 75850 - DNA, 618 bp, Artificial Sequence
  derived and/or modified sequence
atgggcggccctgtgcgggagcccgccctgtctgtggccctgtggctgtcctggggcgccgccctgggcgctgtggcctgtgccatggccctgctgacccagcagacagagctgcagagcctgcggcgggaggtgtcccggctgcagggcactggaggccccagccagaatggagagggctacccctggcagagcctgcctgagcagcacagcgtgctgcacctggtgcccatcaatgccaccagcaaggatgacagtgatgtgacagaggtgatgtggcagcctgccctgcggcggggccggggcctgcaggcccagggctacggcgtgcgcatccaggatgctggggtgtacctgctgtacagccaggtgctcttccaggatgtgaccttcaccatgggccaggtggtgtcccgggagggccagggccggcaggagaccctcttccgctgcatccgctccatgcccagccacccagaccgggcctacaacagctgctacagcgctggggtcttccacctgcaccagggcgacatcctgagcgtcatcatcccccgggcccgggccaagctgaacctgagcccccacggcaccttcctgggctttgtgaagctgtag

SEQ ID NO: 75851 - DNA, 618 bp, Artificial Sequence
  derived and/or modified sequence
atgggcggccccgtgcgggagcccgccctgagcgtggccctgtggctgtcctggggtgcggcattaggtgcggtggcctgcgccatggctcttttgacacaacaaacagagttgcagtctttgaggagagaggtaagtcggttacagggcactggaggaccttcacagaacggggaaggatatccatggcagtcccttcctgaacagcactctgtgctgcacttggtccccattaacgcgacctccaaagatgactccgacgtgaccgaagtgatgtggcagccagctcttaggagggggagaggcctgcaggcccagggatacggtgtgcgtatacaagatgctggggtatatttgctctatagtcaggtcttgttccaggatgtgacatttactatggggcaggtggtgtccagggaagggcaggggcgccaggagacactctttcgatgcattagatcaatgccaagccatccagaccgagcatacaacagctgttactccgccggagtctttcacctgcaccagggggatatcctgagcgtgatcattccgcgggcacgtgccaaacttaatctctccccacatggcacattcctgggatttgtaaagttatag

SEQ ID NO: 75852 - RNA, 618 nt, Artificial Sequence
  derived and/or modified sequence
auggggggcccagugagagagcccgcccugagcgucgcucucugguuaucuuggggggcugcacugggagcuguggcaugugcuauggcucuguugacccagcagacggaauugcagagucuaaggcgggaggugagucgacuccagggcaccggcgggccaagucagaacggagagggauacccauggcagucacuccccgagcagcacucaguccuucacuugguucccauaaaugcaacaagcaaggaugauucugacgucacagaagucauguggcagcccgcacuccgacgagggcgaggucuucaagcccagggcuacggaguccgaauccaggacgcggggguuuaucugcucuauucucaaguguuauuccaggacgugaccuuuacaaugggacaggucguaucucgggaaggccagggaagacaggagaccuuauuccgauguauuagaagcaugcccucccacccugaucgggccuauaacagcugcuauucagcugguguuuuccaucugcaucaaggcgacauccuguccguaauaauaccuagagcccgcgcaaagcucaaucuguccccgcacggcacuuuuuugggauucgugaaacuuuag

SEQ ID NO: 75853 - RNA, 618 nt, Artificial Sequence
  derived and/or modified sequence
augggagggccugugcgggagccugcucuaucuguagcuuuguggcucucuuggggcgcugcguuaggcgcuguggcuugugcgauggcccuucugacccaacaaacagaacugcaguccuugcgaagagaagugucccgcuuacaggguaccggaggaccaagucagaacggggaaggcuaccccuggcaguccuugcccgaacagcacucaguguuacaucuugugcccauuaaugcuacaaguaaagaugauuccgaugucacugagguaauguggcagcccgcucuaaggaggggccgcggguugcaggcgcagggcuacggcguuagaauucaagacgcuggaguuuaccuccuguauucccagguucucuuccaggacgucaccuucacaauggggcaagucguguccagagaaggucaagggcggcaagagacguuguucagauguauucggucaaugccaucccacccagaccgagccuacaauagcuguuacuccgccggcguguuccaucugcaccagggcgacauuuugucaguuaucaucccacgagcucgugccaaauugaaccucucaccucacgggacauuucugggguuuguaaaguuguag

SEQ ID NO: 75854 - protein, 604 aa, Artificial Sequence
  derived and/or modified sequence
MISVKRNTWRALSLVIGDCRKKGNFEYCQDRTEKHSTMPDSPVDVKTQSRLTPPTMPPPPTTQGAPRTSSFTPTTLTNGTSHSPTALNGAPSPPNGFSNGPSSSSSSSLANQQLPPACGARQLSKLKRFLTTLQQFGNDISPEIGERVRTLVLGLVNSTLTIEEFHSKLQEATNFPLRPFVIPFLKANLPLLQRELLHCARLAKQNPAQYLAQHEQLLLDASTTSPVDSSELLLDVNENGKRRTPDRTKENGFDREPLHSEHPSKRPCTISPGQRYSPNNGLSYQPNGLPHPTPPPPQHYRLDDMAIAHHYRDSYRHPSHRDLRDRNRPMGLHGTRQEEMIDHRLTDREWAEEWKHLDHLLNCIMDMVEKTRRSLTVLRRCQEADREELNYWIRRYSDAEDLKKGGGSSSSHSRQQSPVNPDPVALDAHREFLHRPASGYVPEEIWKKAEEAVNEVKRQAMTELQKAVSEAERKAHDMITTERAKMERTVAEAKRQAAEDALAVINQQEDSSESCWNCGRKASETCSGCNTARYCGSFCQHKDWEKHHHICGQTLQAQQQGDTPAVSSSVTPNSGAGSPMDTPPAATPRSTTPGTPSTIETTPR

SEQ ID NO: 75855 - protein, 120 aa, Artificial Sequence
  derived and/or modified sequence
MPDSPVDVKTQSRLTPPTMPPPPTTQGAPRTSSFTPTTLTNGTSHSPTALNGAPSPPNGFSNGPSSSSSSSLANQQLPPACGARQLSKLKRFLTTLQQFGNDISPEIGERVRTLVLGLVN

SEQ ID NO: 75856 - protein, 135 aa, Artificial Sequence
  derived and/or modified sequence
MISVKRNTWRALSLVIGDCRKKGNFEYCQDRTEKHSTMPDSPVDVKTQSRLTPPTMPPPPTTQGAPRTSSFTPTTLTNGTSHSPTALNGAPSPPNGFSNGPSSSSSSSLANQQLPPACGARQLSKLKRFLTTLQQ

SEQ ID NO: 75857 - protein, 58 aa, Artificial Sequence
  derived and/or modified sequence
MISVKRNTWRALSLVIGDCRKKGNFEYCQGARAQHPASGDAAPAPLMALLSAATHSRT

SEQ ID NO: 75858 - protein, 46 aa, Artificial Sequence
  derived and/or modified sequence
MPDSPVDVKTQSRLTPPTMPPPPTTQGAPRTSSFTPTTLTNGTSHS

SEQ ID NO: 75859 - protein, 54 aa, Artificial Sequence
  derived and/or modified sequence
MISVKRNTWRALSLVIGDCRKKGNFEYCQDRTEKHSTMPDSPVDVKTQSRLTPP

SEQ ID NO: 75860 - protein, 229 aa, Artificial Sequence
  derived and/or modified sequence
MISVKRNTWRALSLVIGDCRKKGNFEYCQDRTEKHSTMPDSPVDVKTQSRLTPPTMPPPPTTQGAPRTSSFTPTTLTNGTSHSPTALNGAPSPPNGFSNGPSSSSSSSLANQQLPPACGARQLSKLKRFLTTLQQFGNDISPEIGERVRTLVLGLVNSTLTIEEFHSKLQEATNFPLRPFVIPFLKANLPLLQRELLHCARLAKQNPAQYLAQHEQLLLDASTTSPVDS

SEQ ID NO: 75861 - protein, 169 aa, Artificial Sequence
  derived and/or modified sequence
MISVKRNTWRALSLVIGDCRKKGNFEYCQDRTEKHSTMPDSPVDVKTQSRLTPPTMPPPPTTQGAPRTSSFTPTTLTNGTSHSPTALNGAPSPPNGFSNGPSSSSSSSLANQQLPPACGARQLSKLKRFLTTLQQFGNDISPEIGERVRTLVLGLVNSTLTIEEFHSKL

SEQ ID NO: 75862 - protein, 48 aa, Artificial Sequence
  derived and/or modified sequence
MISVKRNTWRALSLVIGDCRKKGNFEYCQDRTEKHSTMPDSPVDVKTQ

SEQ ID NO: 75863 - protein, 91 aa, Artificial Sequence
  derived and/or modified sequence
MPDSPVDVKTQSRLTPPTMPPPPTTQGAPRTSSFTPTTLTNGTSHSPTALNGAPSPPNGFSNGPSSSSSSSLANQQLPPACGARQLSKLKR

SEQ ID NO: 75864 - protein, 120 aa, Artificial Sequence
  derived and/or modified sequence
MISVKRNTWRALSLVIGDCRKKGNFEYCQDRTEKHSTMPDSPVDVKTQSRLTPPTMPPPPTTQGAPRTSSFTPTTLTNGTSHSPTALNGAPSPPNGFSNGPSSSSSSSLANQQLPPACGA

SEQ ID NO: 75865 - protein, 85 aa, Artificial Sequence
  derived and/or modified sequence
MISVKRNTWRALSLVIGDCRKKGNFEYCQDRTEKHSTMPDSPVDVKTQSRLTPPTMPPPPTTQGAPRTSSFTPTTLTNGTSHSPT

SEQ ID NO: 75866 - protein, 171 aa, Artificial Sequence
  derived and/or modified sequence
MPDSPVDVKTQSRLTPPTMPPPPTTQGAPRTSSFTPTTLTNGTSHSPTALNGAPSPPNGFSNGPSSSSSSSLANQQLPPACGARQLSKLKRFLTTLQQFGNDISPEIGERVRTLVLGLVNSTLTIEEFHSKLQEATNFPLRPFVIPFLKANLPLLQRELLHCARLAKQNPA

SEQ ID NO: 75867 - protein, 89 aa, Artificial Sequence
  derived and/or modified sequence
MPDSPVDVKTQSRLTPPTMPPPPTTQGAPRTSSFTPTTLTNGTSHSPTALNGAPSPPNGFSNGPSSSSSSSLANQQLPPACGARQLSKL

SEQ ID NO: 75868 - protein, 94 aa, Artificial Sequence
  derived and/or modified sequence
MISVKRNTWRALSLVIGDCRKKGNFEYCQDRTEKHSTMPDSPVDVKTQSRLTPPTMPPPPTTQGAPRTSSFTPTTLTNGTSHSPTALNGAPSPP

SEQ ID NO: 75869 - protein, 156 aa, Artificial Sequence
  derived and/or modified sequence
MISVKRNTWRALSLVIGDCRKKGNFEYCQDRTEKHSTMPDSPVDVKTQSRLTPPTMPPPPTTQGAPRTSSFTPTTLTNGTSHSPTALNGAPSPPNGFSNGPSSSSSSSLANQQLPPACGARQLSKLKRFLTTLQQFGNDISPEIGERVRTLVLGLV

SEQ ID NO: 75870 - DNA, 1815 bp, Artificial Sequence
  derived and/or modified sequence
atgatttccgtgaaaaggaatacttggagagccctctccttagtgatcggagactgtcgcaaaaaggggaattttgagtactgccaagaccggactgaaaaacattctactatgccggattcacctgtcgatgtcaagactcagtccaggctgacgccgccaacaatgcctcccccacctacaacgcaaggtgctcccaggacaagctcattcacccccacaacactaacaaacggaacttcacattcacctactgcgctcaacggcgccccgtctcctcctaacgggttttcgaacggaccttcctcttctagctccagctccctggccaatcagcaactccctcctgcttgtggggcgcgtcaattgtccaagctaaaacgctttcttacgacactgcagcagtttggaaacgacatctcacccgagattggggaaagagtgagaactctggtgctgggcttagtcaactccaccttgactattgaagagtttcactcaaagctgcaggaagcaactaactttcccctacgaccctttgtcatcccattcctgaaagctaaccttcccctgctgcaaagggagctgttacactgtgccaggctggctaagcagaatccggcccagtacctcgcgcaacatgagcagctcctgttggacgccagcaccaccagccccgttgactcctctgagctcctgttggacgtgaatgagaatggaaaaagaagaacgcccgataggacaaaagagaacggattcgaccgggagcctctgcattcagagcacccgtctaaacggccatgtacaattagcccaggtcagaggtactctcccaataatggcctgtcgtaccaacctaatgggctccctcatcctacccctccacctccacagcactacagactggatgatatggccatagcccatcattatcgggacagctacagacatccctcacatagagatctgcgtgacagaaatcgccctatggggttgcatggaacgcgccaggaggagatgatcgaccatagactgacagatcgagaatgggctgaagagtggaagcatctggaccatttgttaaattgcatcatggacatggttgagaagactagaagatctctgacggtactcagaagatgccaggaagctgatagagaggaattgaactattggatacgccgatacagcgacgccgaggacttgaaaaagggaggaggatcttcctccagtcactcaaggcagcagagcccagtgaaccccgaccctgtcgctttagacgcccacagagaattcctgcatcgcccagcctctggctacgtccccgaagaaatttggaagaaggccgaggaagccgttaacgaagtgaagcgccaggccatgaccgagctgcagaaagctgtgtcagaagctgagcgaaaagctcacgacatgatcaccacagaaagagctaagatggagcgaactgtggccgaagccaagagacaggctgccgaggacgcattagccgtgatcaaccaacaggaggactccagcgagtcttgctggaattgtggacggaaagcttcagaaacatgctctggctgtaacaccgctcggtattgcggctctttctgtcagcacaaggactgggagaagcaccatcatatatgcggtcaaactctgcaggcacaacagcagggcgacacccccgccgtatcttctagcgttacaccgaactcaggtgccgggagtccaatggatacaccccccgcagctaccccacggagcaccacgccaggcacgcccagtacgatagaaactaccccaaggtag

SEQ ID NO: 75871 - DNA, 1704 bp, Artificial Sequence
  derived and/or modified sequence
atgcctgacagccccgttgacgtgaagacccagtctcggctcacccctccaaccatgccgccaccacctaccactcagggagccccacgaacatctagtttcacacccacgacactgaccaacggcacttcccactctccgacagcactgaatggtgccccatcacctccaaacgggttctctaacggaccttcttcatcttcctctagttccctggctaaccaacaactcccccccgcctgcggtgcgagacagctttcaaaacttaagcggttcttaactacactgcagcagtttggcaacgacatttcacccgagattggagagcgagtgaggactctggtgctaggactcgtgaattctacactgaccattgaggagttccacagcaaactgcaggaagccaccaatttccccctccggcccttcgtcatcccttttttaaaagccaacttacccctactgcagcgggaactcctccattgcgcccggctagctaaacagaatcctgcccaataccttgcacaacacgagcaattactgctggatgcctccactacaagccccgtagattcctctgaactcttgctcgatgtaaacgagaatggcaagcgccggacccccgacagaaccaaggaaaacggctttgacagggaaccactgcactctgaacaccccagtaaacgcccatgcaccatctctcccggccagcgctacagtcctaataacggactctcctatcagcccaacgggcttcctcaccccacccccccgccaccccagcactatcgtcttgatgatatggctatagctcatcattatcgagatagctataggcacccgtcccatcgggacctgagggataggaaccgtcctatgggacttcatggaacgcgacaggaagaaatgatcgaccaccggttgacagatcgggagtgggccgaggaatggaaacacctggaccatctcctgaattgcatcatggacatggtagaaaaaacgagacggtccttgactgttctgagacggtgtcaggaagcagatcgggaagagttgaactactggatccgacgctacagcgacgctgaggatctgaagaagggcggcggctcctcttcctcacactcacgccagcagtctcccgtaaatcctgacccagttgcccttgacgcccatcgcgaattcctgcaccgaccagcctccgggtatgtccccgaagagatttggaaaaaagccgaagaggccgtaaatgaagttaaacggcaagccatgacggaacttcagaaggcggtttccgaggctgagcgaaaggcccatgatatgattaccactgagcgcgcaaaaatggaacgaaccgttgccgaagccaagcgccaggctgcagaggatgctctagcagttatcaaccagcaggaagacagtagcgagtcatgttggaactgtggcagaaaggccagcgagacgtgctccggttgtaatacagcccggtactgcggctccttctgtcagcacaaggattgggagaaacaccaccacatctgcggacaaaccctccaggcacagcaacagggggacactcccgctgtgtcgtccagcgtgacacccaattctggcgccggctctccaatggatactcctccagctgccacaccgcgaagcaccactcctggcaccccatctactatagaaactaccccccgatag

SEQ ID NO: 75872 - DNA, 1704 bp, Artificial Sequence
  derived and/or modified sequence
atgccagactcacccgtggatgtgaaaacacagtcacggctgacccctcccacaatgccgcctccacctactactcagggtgccccacgaacgtctagctttactcctactacacttacgaacgggacatctcactcacccacggctctgaacggagcaccatcacctcccaacggcttctcgaatggccccagttcctcttcgtcttcttctctggccaatcaacagctgcctcccgcttgtggcgctcgccagctcagcaagctgaaacggttcctgacaaccctgcagcaattcggtaatgatatatcccctgaaatcggagaacgcgtgcgaacactggtgctggggctggtgaattccacactcacaatagaagagttccactctaagctgcaggaggctaccaatttcccattgcgtcctttcgtgattccgttccttaaggctaacctccctctcctgcagcgagaactgctccactgcgctagactggctaaacagaatcccgctcagtatctggcccagcatgaacagttgctgttagacgcatccacaacaagcccagtggatagttctgaactgctgcttgatgtgaacgaaaatggcaagagacgtactcccgataggacaaaagagaacggctttgacagggaaccgctgcattctgagcacccatctaaacgtccctgcactatttctcctggacaacggtattctcccaacaacggcctttcatatcagcctaacggcctgcctcacccgaccccaccacccccccaacactacaggctcgacgatatggccattgcacaccactatcgggactcttaccgccatccatcccatagagatctacgcgaccggaaccgtccaatgggtttgcacggcactcggcaggaggagatgattgatcaccgccttaccgatagagagtgggccgaggaatggaagcatctcgaccacctccttaactgcattatggatatggtggagaagacacgcaggagtctgacagtgctgcggcggtgtcaggaagcggacagggaagagctgaattactggatcagacggtattcagatgctgaggacctgaagaagggcgggggtagctcatctagtcactcacggcagcagagccctgtgaatccggacccagtggcactggacgcacacagagaatttttgcatagacccgcttccgggtacgtgccagaagagatttggaaaaaggcggaggaagccgtgaacgaggtaaagcgtcaggcaatgaccgaactccagaaggccgtgtcagaagcggagcgcaaagcccatgacatgattacgactgagagggcgaagatggagcgcaccgtggccgaagcaaagcgccaggctgccgaggacgctttagccgttatcaaccagcaagaggactcttctgaatcttgctggaactgtgggcgcaaggctagtgaaacatgctccggctgcaacacggcaaggtattgtgggagcttttgtcagcacaaggactgggagaaacatcatcacatttgtgggcagactctgcaggctcagcagcagggcgatacacccgccgtgtcttcgagcgtgacgccaaacagcggagccggtagccccatggacacaccccctgctgccacaccccgaagtaccacacctggcactccttcaaccatcgaaactacaccccggtag

SEQ ID NO: 75873 - DNA, 408 bp, Artificial Sequence
  derived and/or modified sequence
atgataagcgtgaaacggaatacttggcgagcgcttagcctggtgattggcgactgccggaagaagggaaacttcgagtactgtcaggataggacggaaaagcactcaaccatgcccgacagtcccgttgatgtgaaaacacagtcgaggctgactcccccaacaatgcctcctccccctacaactcaaggcgcccccagaacttctagttttactcctacaaccctcacaaacggcacctcccattcacccactgctctcaacggagcaccctctcctcctaacgggtttagcaacggcccttcatcaagttcctccagctccctagcaaatcaacagctgccccctgcctgcggggcgcggcaactctccaagctgaaacgcttccttacaactcttcagcaatag

SEQ ID NO: 75874 - DNA, 177 bp, Artificial Sequence
  derived and/or modified sequence
atgatctccgttaagaggaatacatggagagcgctgtcacttgtgattggcgattgtcgtaaaaaggggaacttcgaatactgccagggcgcccgggcccagcatcctgcaagcggtgacgccgccccggcccccctcatggccttactgagcgccgccacccacagccggacatag

SEQ ID NO: 75875 - DNA, 165 bp, Artificial Sequence
  derived and/or modified sequence
atgattagcgtgaagagaaatacatggagagcgctgagcttggtcatcggcgattgtcggaagaaagggaattttgagtattgtcaggacagaactgaaaaacattctaccatgcccgattccccagtggacgttaaaacccaaagtagactgaccccaccctag

SEQ ID NO: 75876 - DNA, 690 bp, Artificial Sequence
  derived and/or modified sequence
atgatcagtgtcaaacggaatacgtggcgcgccctctctctggtcatcggggactgcagaaagaagggtaactttgagtattgccaagatagaacagagaaacacagcacaatgccagactctcctgtggatgtgaagacacagagccgccttactccacccaccatgcccccacctccaacgacgcagggggcaccccgtacttcctcttttactccaacaactttgaccaatggcacctcacattccccgaccgcactaaacggcgcacccagccctcctaacgggtttagcaacggaccttctagctcaagttcatccagcttggccaatcagcaactgccacccgcatgcggcgctagacaactgtcgaaacttaagagattcctaactacattgcagcagttcgggaatgacattagccccgaaattggcgagcgcgtgaggactctcgtcctgggacttgtgaactccacgttgaccatcgaagaattccactcaaagctccaggaggccactaactttcctttgagaccgttcgtgattccttttctcaaggccaatctgcccctgctgcagcgggagctgttacattgtgctcggctcgccaaacagaatccagcccaatatcttgctcagcacgaacagcttctgttagatgcgagtaccactagtcctgtcgacagctag

SEQ ID NO: 75877 - DNA, 510 bp, Artificial Sequence
  derived and/or modified sequence
atgatctctgtgaagcgcaatacctggcgcgcccttagccttgtgataggtgactgtagaaaaaaaggaaattttgaatactgccaggataggacggagaaacactccacaatgcctgactcccctgtggacgtgaagacgcaatcccgcctaaccccacccaccatgccaccccctcctacaacacaaggtgcaccaaggacctcaagtttcacccctacaaccctgaccaatggcacctcccacagccccaccgcactgaacggcgcccctagcccacccaacggcttctcaaacggcccaagctccagctcatccagttccttggcaaatcagcaactgccgccagcttgcggagcccggcaactcagtaaactgaagagatttttaacaacgttgcagcagtttggaaatgatattagccctgagattggcgaacgagtacggacgcttgtgctcggtctcgtgaattcaaccctcacaattgaggaatttcacagcaagctatag

SEQ ID NO: 75878 - DNA, 147 bp, Artificial Sequence
  derived and/or modified sequence
atgatttccgtgaaacggaatacatggcgcgcgctctctttggtcattggcgattgccgcaaaaaaggaaactttgagtactgtcaggaccgcaccgagaagcactcaaccatgcctgactccccggttgatgtgaaaactcagtag

SEQ ID NO: 75879 - DNA, 363 bp, Artificial Sequence
  derived and/or modified sequence
atgatttctgttaaacgtaacacatggagggctctcagcttggtgatcggggactgcaggaagaagggaaattttgaatattgtcaggacagaaccgaaaagcacagcacaatgccagactcccccgtagacgtgaagacccagtctcgcttgactccaccaactatgcctccaccaccaactactcaaggggcgcctaggacgtccagcttcacacctaccaccctgaccaatggcacgagccactcccccaccgctttgaatggggcgccttcacctcccaacgggttcagcaacgggcctagctctagtagcagctcttctctcgctaatcagcaactacctccagcatgcggcgcctag

SEQ ID NO: 75880 - DNA, 1704 bp, Artificial Sequence
  derived and/or modified sequence
atgccagattcccccgtcgatgtcaagactcagtcacggttgacaccacctaccatgccgcccccacccaccacacagggcgcccctcgcacctccagctttacgccgactaccctgacaaacggcacatctcatagcccaacagccctgaacggcgcgcctagcccacctaatgggttttctaacggcccctcctctagctcaagtagtagtttggcaaaccagcagctcccaccagcctgcggggcacgccagttgagtaaactgaagcgctttctgacgacgctgcaacagttcggtaacgatatctcgcccgaaattggtgaaagagtacgaactctggtgctcggactggtgaacagcactttaactatagaagagtttcattccaaactccaggaagcaacgaattttccgcttagaccctttgtcatccccttccttaaggccaacctgccactcctgcagcgggagctgttgcactgcgccagactggcgaaacaaaacccagcacagtatctggcccaacacgagcagttgttgcttgatgcaagcactaccagccctgtggatagtagcgaactactcttggacgtcaacgagaacggaaagcgaaggacacccgaccgtaccaaagagaacgggtttgatcgtgaacccctgcattccgaacatccatcaaaacggccatgtacaatttcccctggtcaaaggtacagtccaaacaacggactctcctaccagccaaatggcctcccgcacccaaccccaccacctccccagcactacagactcgacgatatggcaatcgctcaccattaccgcgacagctaccgccacccatcccaccgcgatctcagggatcgcaacagacccatgggactgcatgggacccggcaggaggaaatgatcgaccatcggctgacagacagagaatgggccgaggagtggaaacacctggatcacctactgaattgtattatggatatggtggaaaaaacacgaaggtcactgaccgtactgcgccggtgccaggaggccgacagagaagagcttaattattggatccgacggtatagtgatgctgaggacctcaaaaagggagggggctctagcagctcccactcacgccaacagtcacccgtgaaccctgatcctgttgccctggacgctcaccgcgagtttcttcatagaccagcatctgggtacgtccctgaagagatttggaagaaagccgaggaagctgtgaacgaagttaagaggcaggccatgacagaacttcagaaggctgtcagcgaggccgagcggaaagcccatgatatgataacgacagagcgtgcaaagatggagcgcacggtagcggaagccaagagacaagccgccgaggatgccttggccgtaattaatcagcaggaggattcctctgagtcctgctggaattgcggacgcaaagcctcagaaacatgcagtggatgcaatacagccagatactgtggatcgttctgccagcataaagactgggaaaagcatcaccacatctgtggccagactttgcaggcccagcagcaaggggacaccccagctgtgtccagctcggtgacgccaaattctggcgccggctcaccaatggatacaccccctgctgctacccctcgcagcactacaccaggaactccaagcaccatagagaccacacccagatag

SEQ ID NO: 75881 - DNA, 258 bp, Artificial Sequence
  derived and/or modified sequence
atgatttcagtgaaacggaacacatggcgggccctctcactggtgatcggtgactgccggaaaaagggcaactttgagtactgccaggacaggacagaaaaacattcgactatgcccgattctcccgtggacgtcaaaacccaatccagactcactccaccaaccatgccgccccctcccacaacccagggagctccgcgcactagttcttttaccccaaccaccctgactaacggcacatcacattccccaacctag

SEQ ID NO: 75882 - DNA, 285 bp, Artificial Sequence
  derived and/or modified sequence
atgatatccgtcaaacggaacacttggagggctctatctttggtgatcggcgactgcaggaagaaagggaattttgagtattgtcaggacaggacagagaaacacagtacgatgcccgacagccccgtggacgtcaaaacccagagccggctcaccccacctacgatgcctccgccacccactacccagggcgccccaagaacatcctctttcactccaaccactttgaccaacggcacttcccattcaccaaccgccctcaatggcgctcccagccctccatag

SEQ ID NO: 75883 - DNA, 471 bp, Artificial Sequence
  derived and/or modified sequence
atgattagcgtgaagagaaatacttggcgcgcactttccctcgttattggcgactgtaggaaaaaagggaacttcgagtactgccaggataggactgaaaagcatagcactatgccggattctcctgtggatgtgaagacacagtcaagacttacgccaccaaccatgcctccacctcccactacccaaggtgccccacgtacaagttcatttacgcccaccactttaacgaacgggacctcccactcacccacagcactcaatggggctccttcgccccccaacggcttcagtaatggaccatcgtcatccagctcctcgagcctggcaaaccagcagttgcccccagcttgcggcgccaggcagctatctaagctgaaaagatttctgactactttgcagcaatttggaaacgatatatccccagaaattggggaacgtgtgaggactttagtccttgggctggtgtag

SEQ ID NO: 75884 - DNA, 363 bp, Artificial Sequence
  derived and/or modified sequence
atgatttctgtcaaacggaatacatggagagctttaagtctggtgatcggagattgtagaaaaaaaggaaactttgaatattgccaggacagaactgagaagcactctaccatgcctgacagcccggtcgatgtgaagacacagagccggttgacccctcccactatgcccccacctcccaccactcagggggccccgcggacctcatctttcacccccactaccctgacaaacggcacttcacattcacctaccgctctaaatggagccccttccccccctaacggatttagtaacggcccttcatcgtcatcgtcaagcagtctcgcaaaccagcaactgcctccagcttgcggagcatag

SEQ ID NO: 75885 - DNA, 1815 bp, Artificial Sequence
  derived and/or modified sequence
atgatctcggtaaaaagaaacacttggagggctctgagccttgtcatcggtgactgtaggaaaaaagggaacttcgaatactgccaggacaggacagagaagcactctaccatgcccgatagcccagtggatgtaaaaacccaatctaggctgacccctcccacaatgcctccaccaccaacaacccagggagcccccagaaccagttcattcacccctacgactctgactaatggaactagccactctcctacagctctgaatggcgcgccctctcctcccaacggattcagcaacggcccatcctcgagctcctccagcagcctcgccaaccagcagttgcctcctgcctgcggcgcaaggcagttgtcaaagctgaagaggtttctgactaccctgcagcagttcggaaacgatatctcccccgaaatcggagagcgcgtgaggacactggtactaggcttggtcaactctacgttgactatcgaggaatttcactcaaagcttcaagaagccaccaacttccccctccggccctttgtgatcccttttttgaaggccaatcttcccctactgcagcgcgaacttcttcactgcgcaaggctcgcaaagcagaatcccgcccagtatctggcacagcacgaacagctcctgttggacgcttcaactacgtctcccgtggatagctctgagttgctactggacgtgaacgagaatggaaaaagaaggacacctgataggacaaaagagaatggttttgatagggaacctctccactcagagcaccctagtaaaagaccctgcacaatttcccccgggcaaaggtactctcctaacaatgggttatcttaccagcccaacggactccctcacccgacaccgccaccaccccagcactaccggttagatgacatggccatcgcacaccactacagagatagctaccggcatccctcccatagagatctgagggatcgaaatcgacctatgggcctgcacggtaccagacaggaggaaatgatcgaccatcgactaacggatcgtgaatgggccgaggaatggaagcacctagatcatttactcaactgtatcatggatatggtggagaaaactcgccgcagcctgactgttttgagaaggtgtcaggaggcagaccgggaagagctcaactactggatacggagatactccgatgccgaagatctgaaaaaaggcgggggctcctcctccagtcatagtcgtcaacagtctcccgtgaaccccgatcccgtcgcactggacgcacaccgggaattcctgcacaggcctgccagtggatacgtacccgaagagatctggaaaaaggccgaagaagcagtgaacgaagtcaaaaggcaggccatgaccgagctgcaaaaagcggtttctgaagcagaaaggaaagcacacgacatgattaccacggaaagggccaaaatggaaaggaccgtcgctgaagccaaaaggcaagctgccgaggacgccctggctgtgattaaccaacaggaggatagctccgaatcatgctggaactgcgggcggaaagcatcagaaacatgttcggggtgtaacaccgctcgctactgtggttcgttttgccaacataaggattgggagaagcaccaccacatctgtggacagacgctgcaggcacagcaacagggtgatacacctgccgtgtcttcatctgtaactcctaactccggtgcgggaagcccaatggacacaccccccgccgctacccccaggtccaccacgcccggtacaccttccacaatcgaaacgactccgcggtag

SEQ ID NO: 75886 - DNA, 1815 bp, Artificial Sequence
  derived and/or modified sequence
atgatctctgtgaagaggaacacctggagggccctgagcctggtgattggagactgcaggaagaagggcaactttgagtactgccaggacagaacagagaagcacagcaccatgccagacagccctgtggatgtgaagacccagagccggctgaccccacccaccatgcctcctccacccaccacccagggcgcccccaggaccagcagcttcacccccaccaccctgaccaacggcaccagccacagccccacagccctgaatggagcccccagccccccaaatggcttcagcaatggccccagcagcagcagcagcagcagcctggccaaccagcagctgcccccagcctgtggggcccggcagctgagcaagctgaagcgcttcctgaccaccctgcagcagtttggaaatgacatcagccctgagatcggggagcgggtgaggaccctggtgctgggcctggtgaacagcaccctgaccatcgaggagttccacagcaagctgcaggaggccaccaacttccccctgcggcccttcgtcatccccttcctgaaggccaacctgcccctgctgcagcgggagctgctgcactgtgcccggctggccaagcagaacccagcccagtacctggcccagcacgagcagctgctgctggatgccagcaccaccagccctgtggacagcagcgagctgctgctggatgtgaatgaaaatggcaagaggaggaccccagacaggaccaaggaaaatggatttgaccgggagcccctgcacagcgagcaccccagcaagaggccctgcaccatcagccctggccagcgctacagccccaacaacggcctgagctaccagcccaacggcctgccccaccccaccccacctccaccccagcactaccgcctggatgacatggccatcgcccaccactacagagacagctaccgccaccccagccaccgggacctgcgggacaggaaccggcccatgggcctgcacggcacccggcaggaggagatgattgaccaccggctgacagaccgggagtgggccgaggagtggaagcacctggaccacctgctgaactgcatcatggacatggtggagaagacccggcgcagcctgactgtgctgcggcgctgccaggaggccgaccgggaggagctgaactactggatccgccgctacagtgatgctgaggacctgaagaagggcggcggcagcagcagcagccacagccggcagcagagccctgtgaacccagaccctgtggccctggatgcccaccgggagttcctgcacaggcctgccagcggctacgtgcctgaggagatctggaagaaggccgaggaggccgtgaatgaggtgaagaggcaggccatgacagagctgcagaaggctgtgtctgaggccgagaggaaggcccatgacatgatcaccacagagcgggccaagatggagaggacagtggccgaggccaagaggcaggccgcagaagatgccctggccgtcatcaaccagcaggaggacagcagcgagagctgctggaactgtggcaggaaggccagcgagacctgcagcggctgcaacacagcccgctactgcggcagcttctgccagcacaaggactgggagaagcaccaccacatctgtggccagaccctgcaggcccagcagcagggcgacaccccagctgtgagcagctctgtgacccccaacagcggggccggcagccccatggacaccccacctgctgccacccccaggagcaccaccccaggcacccccagcaccatcgagaccacccccaggtag

SEQ ID NO: 75887 - DNA, 1704 bp, Artificial Sequence
  derived and/or modified sequence
atgccagacagccctgtggatgtgaagacccagagccggctgaccccacccaccatgcctcctccacccaccacccagggcgcccccaggaccagcagcttcacccccaccaccctgaccaacggcaccagccacagccccacagccctgaatggagcccccagcccccccaacggcttcagcaatggccccagcagcagcagcagcagcagcctggccaaccagcagctgcccccagcctgtggggcccggcagctgagcaagctgaagcgcttcctgaccaccctgcagcagtttggaaatgacatcagccctgagattggagagcgggtgaggaccctggtgctgggcctggtgaacagcaccctgaccatcgaggagttccacagcaagctgcaggaggccaccaacttccccctgcggccctttgtgatccccttcctgaaggccaacctgcccctgctgcagcgggagctgctgcactgtgcccggctggccaagcagaacccagcccagtacctggcccagcacgagcagctgctgctggatgccagcaccaccagccctgtggacagcagcgagctgctgctggatgtgaatgaaaatggcaagaggaggaccccagacaggaccaaggaaaatggatttgaccgggagcccctgcacagcgagcaccccagcaagaggccctgcaccatcagccctggccagcgctacagccccaacaacggcctgagctaccagcccaacggcctgccccaccccaccccacctccaccccagcactaccgcctggatgacatggccatcgcccaccactacagagacagctaccgccaccccagccaccgggacctgcgggacaggaaccggcccatgggcctgcacggcacccggcaggaggagatgattgaccaccggctgacagaccgggagtgggccgaggagtggaagcacctggaccacctgctgaactgcatcatggacatggtggagaagaccaggaggagcctgactgtgctgcggcgctgccaggaggccgaccgggaggagctgaactactggatccgccgctacagtgatgctgaggacctgaagaagggcggcggcagcagcagcagccacagccggcagcagagccctgtgaacccagaccctgtggccctggatgcccaccgggagttcctgcacaggcctgccagcggctacgtgcctgaggagatctggaagaaggccgaggaggccgtgaatgaggtgaagaggcaggccatgacagagctgcagaaggctgtgtctgaggccgagaggaaggcccatgacatgatcaccacagagcgggccaagatggagaggacagtggccgaggccaagaggcaggccgcagaagatgccctggccgtcatcaaccagcaggaggacagcagcgagagctgctggaactgtggcaggaaggccagcgagacctgcagcggctgcaacacagcccgctactgcggcagcttctgccagcacaaggactgggagaagcaccaccacatctgtggccagaccctgcaggcccagcagcagggcgacaccccagctgtgagcagctctgtgacccccaacagcggggccggcagccccatggacaccccacctgctgccacccccaggagcaccaccccaggcacccccagcaccatcgagaccaccccaagatag

SEQ ID NO: 75888 - DNA, 408 bp, Artificial Sequence
  derived and/or modified sequence
atgatctctgtgaagaggaacacctggagggccctgagcctggtgattggagactgcaggaagaagggcaactttgagtactgccaggacagaacagagaagcacagcaccatgccagacagccctgtggatgtgaagacccagagccggctgaccccacccaccatgcctcctccacccaccacccagggcgcccccaggaccagcagcttcacccccaccaccctgaccaacggcaccagccacagccccacagccctgaatggagcccccagccccccaaatggcttcagcaatggccccagcagcagcagcagcagcagcctggccaaccagcagctgcccccagcctgtggggcccggcagctgagcaagctgaagcgcttcctgaccaccctgcagcagtag

SEQ ID NO: 75889 - DNA, 177 bp, Artificial Sequence
  derived and/or modified sequence
atgatctctgtgaagaggaacacctggagggccctgagcctggtgattggagactgcaggaagaagggcaactttgagtactgccagggcgcccgggcccagcacccagccagcggagatgctgccccagcccccctgatggccctgctgtctgctgccacccacagcaggacatag

SEQ ID NO: 75890 - DNA, 165 bp, Artificial Sequence
  derived and/or modified sequence
atgatctctgtgaagaggaacacctggagggccctgagcctggtgattggagactgcaggaagaagggcaactttgagtactgccaggacagaacagagaagcacagcaccatgccagacagccctgtggatgtgaagacccagagccggctgaccccaccctag

SEQ ID NO: 75891 - DNA, 690 bp, Artificial Sequence
  derived and/or modified sequence
atgatctctgtgaagaggaacacctggagggccctgagcctggtgattggagactgcaggaagaagggcaactttgagtactgccaggacagaacagagaagcacagcaccatgccagacagccctgtggatgtgaagacccagagccggctgaccccacccaccatgcctcctccacccaccacccagggcgcccccaggaccagcagcttcacccccaccaccctgaccaacggcaccagccacagccccacagccctgaatggagcccccagccccccaaatggcttcagcaatggccccagcagcagcagcagcagcagcctggccaaccagcagctgcccccagcctgtggggcccggcagctgagcaagctgaagcgcttcctgaccaccctgcagcagtttggaaatgacatcagccctgagatcggggagcgggtgaggaccctggtgctgggcctggtgaacagcaccctgaccatcgaggagttccacagcaagctgcaggaggccaccaacttccccctgcggcccttcgtcatccccttcctgaaggccaacctgcccctgctgcagcgggagctgctgcactgtgcccggctggccaagcagaacccagcccagtacctggcccagcacgagcagctgctgctggatgccagcaccaccagccctgtggacagctag

SEQ ID NO: 75892 - DNA, 510 bp, Artificial Sequence
  derived and/or modified sequence
atgatctctgtgaagaggaacacctggagggccctgagcctggtgattggagactgcaggaagaagggcaactttgagtactgccaggacagaacagagaagcacagcaccatgccagacagccctgtggatgtgaagacccagagccggctgaccccacccaccatgcctcctccacccaccacccagggcgcccccaggaccagcagcttcacccccaccaccctgaccaacggcaccagccacagccccacagccctgaatggagcccccagccccccaaatggcttcagcaatggccccagcagcagcagcagcagcagcctggccaaccagcagctgcccccagcctgtggggcccggcagctgagcaagctgaagcgcttcctgaccaccctgcagcagtttggaaatgacatcagccctgagatcggggagcgggtgaggaccctggtgctgggcctggtgaacagcaccctgaccatcgaggagttccacagcaagctgtag

SEQ ID NO: 75893 - DNA, 147 bp, Artificial Sequence
  derived and/or modified sequence
atgatctctgtgaagaggaacacctggagggccctgagcctggtgattggagactgcaggaagaagggcaactttgagtactgccaggacagaacagagaagcacagcaccatgccagacagccctgtggatgtgaagacccagtag

SEQ ID NO: 75894 - DNA, 363 bp, Artificial Sequence
  derived and/or modified sequence
atgatctctgtgaagaggaacacctggagggccctgagcctggtgattggagactgcaggaagaagggcaactttgagtactgccaggacagaacagagaagcacagcaccatgccagacagccctgtggatgtgaagacccagagccggctgaccccacccaccatgcctcctccacccaccacccagggcgcccccaggaccagcagcttcacccccaccaccctgaccaacggcaccagccacagccccacagccctgaatggagcccccagccccccaaatggcttcagcaatggccccagcagcagcagcagcagcagcctggccaaccagcagctgcccccagcctgtggggcctag

SEQ ID NO: 75895 - DNA, 258 bp, Artificial Sequence
  derived and/or modified sequence
atgatctctgtgaagaggaacacctggagggccctgagcctggtgattggagactgcaggaagaagggcaactttgagtactgccaggacagaacagagaagcacagcaccatgccagacagccctgtggatgtgaagacccagagccggctgaccccacccaccatgcctcctccacccaccacccagggcgcccccaggaccagcagcttcacccccaccaccctgaccaacggcaccagccacagccccacctag

SEQ ID NO: 75896 - DNA, 285 bp, Artificial Sequence
  derived and/or modified sequence
atgatctctgtgaagaggaacacctggagggccctgagcctggtgattggagactgcaggaagaagggcaactttgagtactgccaggacagaacagagaagcacagcaccatgccagacagccctgtggatgtgaagacccagagccggctgaccccacccaccatgcctcctccacccaccacccagggcgcccccaggaccagcagcttcacccccaccaccctgaccaacggcaccagccacagccccacagccctgaatggagcccccagccccccatag

SEQ ID NO: 75897 - DNA, 471 bp, Artificial Sequence
  derived and/or modified sequence
atgatctctgtgaagaggaacacctggagggccctgagcctggtgattggagactgcaggaagaagggcaactttgagtactgccaggacagaacagagaagcacagcaccatgccagacagccctgtggatgtgaagacccagagccggctgaccccacccaccatgcctcctccacccaccacccagggcgcccccaggaccagcagcttcacccccaccaccctgaccaacggcaccagccacagccccacagccctgaatggagcccccagccccccaaatggcttcagcaatggccccagcagcagcagcagcagcagcctggccaaccagcagctgcccccagcctgtggggcccggcagctgagcaagctgaagcgcttcctgaccaccctgcagcagtttggaaatgacatcagccctgagatcggggagcgggtgaggaccctggtgctgggcctggtgtag

SEQ ID NO: 75898 - DNA, 3217 bp, Artificial Sequence
  derived and/or modified sequence
aaagattgatctctgggctggtgaacataatctctgtcccagtcagaaaaggagagaggaaattagcagagcgattggtggagaatgatatctgtcaaaagaaacacttggagagcactgagtttagtaataggtgactgccggaaaaaagggaactttgaatattgtcaagatcgtactgagaagcactccacaatgccagactcacctgtggatgtgaagacgcaatctaggctgactcctccaacaatgccacctcccccaactactcaaggagctccaagaaccagttcatttacaccgacaacgttaactaatggcacgagccattctcctacagccttgaatggcgccccctcaccacccaatggcttcagcaatgggccttcctcttcttcctcctcctctctggctaatcaacagctgcccccagcctgtggtgccaggcaactcagcaagctgaaaaggttccttactaccctgcagcagtttggcaatgacatttcacccgagataggagaaagagttcgcaccctcgttctgggactagtgaactccactttgacaattgaagaatttcattccaaactgcaagaagctactaacttcccactgagaccttttgtcatcccatttttgaaggccaacttgcccctgctgcagcgtgagctcctccactgcgcaagactggccaaacagaaccctgcccagtacctcgcccagcatgaacagctgcttctggatgccagcaccacctcacctgttgactcctcagagctgcttctcgatgtgaacgaaaacgggaagaggcgaactccagacagaaccaaagaaaatggctttgacagagagcctttgcactcagaacatccaagcaagcgaccatgcactattagcccaggccagcggtacagtccaaataacggcttatcctaccagcccaatggcctgcctcaccctaccccacctccacctcagcattaccgtttggatgatatggccattgcccaccactacagggactcctatcgacaccccagccacagggacctcagggacagaaacagacctatggggttgcatggcacacgtcaagaagaaatgattgatcacagactaacagacagagaatgggcagaagagtggaaacatcttgaccatctgttaaactgcataatggacatggtagaaaaaacaaggcgatctctcaccgtactaaggcggtgtcaagaagcagaccgggaagaattgaattactggatccggcggtacagtgacgccgaggacttaaaaaaaggtggcggcagtagcagcagccactctaggcagcagagtcccgtcaacccagacccagttgcactagacgcgcatcgggaattccttcacaggcctgcgtctggatacgtgccagaggagatctggaagaaagctgaggaggccgtcaatgaggtgaagcgccaggcgatgacggagctgcagaaggccgtgtctgaggcggagcggaaagcccacgacatgatcacaacagagagggccaagatggagcgcacggtcgccgaggccaaacggcaggcggcggaggacgcactggcagttatcaatcagcaggaggattcaagcgagagttgctggaattgtggccgtaaagcgagtgaaacctgcagtggctgtaacacagcccgatactgtggctcattttgccagcacaaagactgggagaagcaccatcacatctgtggacagaccctgcaggcccagcagcagggagacacacctgcagtcagctcctctgtcacgcccaacagcggggctgggagcccgatggacacaccaccagcagccactccgaggtcaaccaccccgggaaccccttccaccatagagacaacccctcgctagacgtgaactcagaactgtcggaggaaagacaacacaaccaacgcgaaaccaattcctcatcctcagatgctcaaagttgttttttttgtttgtttgtttattagatgaattatcctatttcagtacttcagcaagagagaacctaactgtatcttgaggtggtagtaaaacacagagggccagtaacgggtcgtaatgacttattgtggataacaaagatatcttttctttagagaactgaaaagagagcagagaatataacatgaaatgatagatttgacctcctccctgttattttcaagtagctgggattttaaactagatgacctcattaaccgatgctttaccaaacagcaaaccaagagattgctaattgctgttgaaagcaaaaatgctaatattaaaagtcacaatgttctttatatacaataatggaaaaaaaaaaaagaggaaaaccctcaagggcatgagcattggatacagcagtagacattttaacaagaagatgaatggcgtccgtgggttgctaactgaactttgaagacccgctacaaaacgcgcagatgtgcagcagattggaaggagacacagatgttcggtttttttcctgtttctgaaaagaaataataatatccaggtcaacagaatgaaaaatgaaagatgatttgcaatgggatgtatgaatacagcagcaagaaaaaaaaatgccataatacaaaaggctccatatatatatatatatatatatatatacacacacacacacgcacatatacacacacacacacacacacacacacacacacacacacacacacacacacacacaagtaagagactcagcctgcagttaattagcattctggcagttttgacatcagccagctgccctaaataacccttcaacgtttcttcacttttgcaaggttccacagagtaagacattgggtctattccagctcattcattttatattgaaaaaaataattttaaaaatggtggcttcagctccagcccctttccaaaatttttcaaccccaccctgtttggatttttaattaaaaactagtagttctcttggtgttaaaacacttctgtcctgtgaggtttcccaatggtgtttttcttgtaaatgtgttggacaaatgtgaagatgcattgtagtttaaccatatgcccacatttagtctctttattcctagttggtgagaaacctgtatctttctatgctgcttttatatctgtatgtattagtgatatttctctagtagttaaaaaaaaaaaaaggaaaaaaagactctttttggttgtcctcaag

SEQ ID NO: 75899 - DNA, 782 bp, Artificial Sequence
  derived and/or modified sequence
ttctgtcttctctctctctctcccacttttcctccctctcccgctccgtctcacacgcaccctctgtttattttcctgcctccatctgggccctgctgatattgtaatcaccctgatgcacgttggcttctctcctctccctcctgcgctcacacactcactcacacacaatgtgccatcctgacaaggcttttacttctgataagctccaatgtgtgtttaatgaatacaaagccgcggtctgggtgccgcctcggccgcggccgctctcccgcgctcctttgccagaagaaaagattgatctctgggctggtgaacataatctctgtcccagtcagaaaaggagagaggaaattagcagagcgattggtggagaatgatatctgtcaaaagaaacacttggagagcactgagtttagtaataggtgactgccggaaaaaagggaactttgaatattgtcaagatcgtactgagaagcactccacaatgccagactcacctgtggatgtgaagacgcaatctaggctgactcctccaacaatgccacctcccccaactactcaaggagctccaagaaccagttcatttacaccgacaacgttaactaatggcacgagccattctcctacagccttgaatggcgccccctcaccacccaatggcttcagcaatgggccttcctcttcttcctcctcctctctggctaatcaacagctgcccccagcctgtggtgccaggcaactcagcaagctgaaaaggttccttactaccctgcagcagt

SEQ ID NO: 75900 - DNA, 556 bp, Artificial Sequence
  derived and/or modified sequence
aatgaatacaaagccgcggtctgggtgccgcctcggccgcggccgctctcccgcgctcctttgccagaagaaaagattgatctctgggctggtgaacataatctctgtcccagtcagaaaaggagagaggaaattagcagagcgattggtggagaatgatatctgtcaaaagaaacacttggagagcactgagtttagtaataggtgactgccggaaaaaagggaactttgaatattgtcaagaacaggaggcatgagcccggaacgcgcttgcttttaggagacagccactttctgtgtggtacgctggattcaaggatgcctgatcgtactgagaagcactccacaatgccagactcacctgtggatgtgaagacgcaatctaggctgactcctccaacaatgccacctcccccaactactcaaggagctccaagaaccagttcatttacaccgacaacgttaactaatggcacgagccattctcctacagccttgaatggcgccccctcaccacccaatggcttcagcaatgggccttcctcttcttcctcct

SEQ ID NO: 75901 - DNA, 976 bp, Artificial Sequence
  derived and/or modified sequence
agaagtcgataagaccaggagaagtgaagatgtaacatgttatctgtcgctcctcttagctggcggagagaatttacatttaaagattagcagagtgagaaagagaaatctgccttttgttgtgtggggtgaggaggaggcatctacccctggccttgacgctatctcccatcacctctgctatccagacaggactcaccgagaaaagattgatctctgggctggtgaacataatctctgtcccagtcagaaaaggagagaggaaattagcagagcgattggtggagaatgatatctgtcaaaagaaacacttggagagcactgagtttagtaataggtgactgccggaaaaaagggaactttgaatattgtcaagatcgtactgagaagcactccacaatgccagactcacctgtggatgtgaagacgcaatctaggctgactcctccaacaatgccacctcccccaactactcaaggagctccaagaaccagttcatttacaccgacaacgttaactaatggcacgagccattctcctacagccttgaatggcgccccctcaccacccaatggcttcagcaatgggccttcctcttcttcctcctcctctctggctaatcaacagctgcccccagcctgtggtgccaggcaactcagcaagctgaaaaggttccttactaccctgcagcagtttggcaatgacatttcacccgagataggagaaagagttcgcaccctcgttctgggactagtgaactccactttgacaattgaagaatttcattccaaactgcaagaagctactaacttcccactgagaccttttgtcatcccatttttgaaggccaacttgcccctgctgcagcgtgagctcctccactgcgcaagactggccaaacagaaccctgcccagtacctcgcccagcatgaacagctgcttctggatgccagcaccacctcacctgttgactcct

SEQ ID NO: 75902 - DNA, 544 bp, Artificial Sequence
  derived and/or modified sequence
actcactcacacacaatgtgccatcctgacaaggcttttacttctgataagctccaatgtgtgtttaatgaatacaaagccgcggtctgggtgccgcctcggccgcggccgctctcccgcgctcctttgccagaagaaaagattgatctctgggctggtgaacataatctctgtcccagtcagaaaaggagagaggaaattagcagagcgattggtggagaatgatatctgtcaaaagaaacacttggagagcactgagtttagtaataggtgactgccggaaaaaagggaactttgaatattgtcaaggcgcacgcgcccagcaccctgcctccggcgatgccgccccagcccctctgatggccctcctctctgctgccactcattccagaacaggaggcatgagcccggaacgcgcttgcttttaggagacagccactttctgtgtggtacgctggattcaaggatgcctgatcgtactgagaagcactccacaatgccagactcacctgtggatgtgaagacgcaatctaggctgactcct

SEQ ID NO: 75903 - DNA, 1044 bp, Artificial Sequence
  derived and/or modified sequence
ccctcctgcctgtccctttctgtcttctctctctctctcccacttttcctccctctcccgctccgtctcacacgcaccctctgtttattttcctgcctccatctgggccctgctgatattgtaatcaccctgatgcacgttggcttctctcctctccctcctgcgctcacacactcactcacacacaatgtgccatcctgacaaggcttttacttctgataagctccaatgtgtgtttaatgaatacaaagccgcggtctgggtgccgcctcggccgcggccgctctcccgcgctcctttgccagaagctggcggagagaatttacatttaaagattagcagagtgagaaagagaaatctgccttttgttgtgtggggtgaggaggaggcatctacccctggccttgacgctatctcccatcacctctgctatccagacaggactcaccgagaaaagattgatctctgggctggtgaacataatctctgtcccagtcagaaaaggagagaggaaattagcagagcgattggtggagaatgatatctgtcaaaagaaacacttggagagcactgagtttagtaataggtgactgccggaaaaaagggaactttgaatattgtcaagatcgtactgagaagcactccacaatgccagactcacctgtggatgtgaagacgcaatctaggctgactcctccaacaatgccacctcccccaactactcaaggagctccaagaaccagttcatttacaccgacaacgttaactaatggcacgagccattctcctacagccttgaatggcgccccctcaccacccaatggcttcagcaatgggccttcctcttcttcctcctcctctctggctaatcaacagctgcccccagcctgtggtgccaggcaactcagcaagctgaaaaggttccttactaccctgcagcagtttggcaatgacatttcacccgagataggagaaagagttcgcaccctcgttctgggactagtgaactccactttgacaattgaagaatttcattccaaactg

SEQ ID NO: 75904 - DNA, 573 bp, Artificial Sequence
  derived and/or modified sequence
actcacacacaatgtgccatcctgacaaggcttttacttctgataagctccaatgtgtgtttaatgaatacaaagccgcggtctgggtgccgcctcggccgcggccgctctcccgcgctcctttgccagaagattgatctctgggctggtgaacataatctctgtcccagtcagaaaaggagagaggaaattagcagagcgattggtggagaatgatatctgtcaaaagaaacacttggagagcactgagtttagtaataggtgactgccggaaaaaagggaactttgaatattgtcaagatcgtactgagaagcactccacaatgccagactcacctgtggatgtgaagacgcaatctaggctgactcctccaacaatgccacctcccccaactactcaaggagctccaagaaccagttcatttacaccgacaacgttaactaatggcacgagccattctcctacagccttgaatggcgccccctcaccacccaatggcttcagcaatgggccttcctcttcttcctcctcctctctggctaatcaacagctgcccccagcctgtggtgcca

SEQ ID NO: 75905 - DNA, 564 bp, Artificial Sequence
  derived and/or modified sequence
ttctctcctctccctcctgcgctcacacactcactcacacacaatgtgccatcctgacaaggcttttacttctgataagctccaatgtgtgtttaatgaatacaaagccgcggtctgggtgccgcctcggccgcggccgctctcccgcgctcctttgccagaagtatcaaatgataagaactgagcacactggatgaaataatacttgcactgggagcactaagaaaagattgatctctgggctggtgaacataatctctgtcccagtcagaaaaggagagaggaaattagcagagcgattggtggagaatgatatctgtcaaaagaaacacttggagagcactgagtttagtaataggtgactgccggaaaaaagggaactttgaatattgtcaagatcgtactgagaagcactccacaatgccagactcacctgtggatgtgaagacgcaatctaggctgactcctccaacaatgccacctcccccaactactcaaggagctccaagaaccagttcatttacaccgacaacgttaactaatggcacgagccattctcctaca

SEQ ID NO: 75906 - DNA, 596 bp, Artificial Sequence
  derived and/or modified sequence
ctccctctctccctttccaaatgattcagaagtcgataagaccaggagaagtgaagatgtaacatgttatctgtcgctcctcttagctggcggagagaatttacatttaaagattagcagagtgagaaagagaaatctgccttttgttgtgtggggtgaggaggaggcatctacccctggccttgacgctatctcccatcacctctgctatccagacaggactcaccgagaaaagattgatctctgggctggtgaacataatctctgtcccagtcagaaaaggagagaggaaattagcagagcgattggtggagaatgatatctgtcaaaagaaacacttggagagcactgagtttagtaataggtgactgccggaaaaaagggaactttgaatattgtcaagatcgtactgagaagcactccacaatgccagactcacctgtggatgtgaagacgcaatctaggctgactcctccaacaatgccacctcccccaactactcaaggagctccaagaaccagttcatttacaccgacaacgttaactaatggcacgagccattctcctacagccttgaatggcgccccctcaccacc

SEQ ID NO: 75907 - DNA, 690 bp, Artificial Sequence
  derived and/or modified sequence
agtctgaaaaattggcacctgcaggatttgcatgtgaaaaaaacggagtcagttgcattttgccggagtctattacttatcaaatgataagaactgagcacactggatgaaataatacttgcactgggagcactaagaaaagattgatctctgggctggtgaacataatctctgtcccagtcagaaaaggagagaggaaattagcagagcgattggtggagaatgatatctgtcaaaagaaacacttggagagcactgagtttagtaataggtgactgccggaaaaaagggaactttgaatattgtcaagatcgtactgagaagcactccacaatgccagactcacctgtggatgtgaagacgcaatctaggctgactcctccaacaatgccacctcccccaactactcaaggagctccaagaaccagttcatttacaccgacaacgttaactaatggcacgagccattctcctacagccttgaatggcgccccctcaccacccaatggcttcagcaatgggccttcctcttcttcctcctcctctctggctaatcaacagctgcccccagcctgtggtgccaggcaactcagcaagctgaaaaggttccttactaccctgcagcagtttggcaatgacatttcacccgagataggagaaagagttcgcaccctcgttctgggactagtg

SEQ ID NO: 75908 - DNA, 553 bp, Artificial Sequence
  derived and/or modified sequence
tatgcaggcaacatagcccttcatagcaaagcagtctgaaaaattggcacctgcaggatttgcatgtgaaaaaaacggagtcagttgcattttgccggagtctattactaaaagattgatctctgggctggtgaacataatctctgtcccagtcagaaaaggagagaggaaattagcagagcgattggtggagaatgatatctgtcaaaagaaacacttggagagcactgagtttagtaataggtgactgccggaaaaaagggaactttgaatattgtcaagatcgtactgagaagcactccacaatgccagactcacctgtggatgtgaagacgcaatctaggctgactcctccaacaatgccacctcccccaactactcaaggagctccaagaaccagttcatttacaccgacaacgttaactaatggcacgagccattctcctacagccttgaatggcgccccctcaccacccaatggcttcagcaatgggccttcctcttcttcctcctcctctctggctaatcaacagctgcccccagcctgtggtgc

SEQ ID NO: 75909 - DNA, 7537 bp, Artificial Sequence
  derived and/or modified sequence
atcacatttgtctgccacagcagcaacaacagaaaagcggagggagggagggaggcgggaggaggggagcagagctccgcaagtcttgggctctgcgtggaggttgcgtttggctggcgtccccgaccccgggctttttgcacggcagctctctctgcgcagcgccgggcggccgtagtcgctccgcggcgcgactccgcggtctcgtggcgagcgcgcgtgggcgagtggccgcggacactctggcctcgcgagggaagccgcgccgcgtcctcgccccgtcgccccgcgggccggccgagacgacgggaagttttatttgcagctcggagcctgtggcggatggtgggactctccggccctgtgcagtaaaagattgatctctgggctggtgaacataatctctgtcccagtcagaaaaggagagaggaaattagcagagcgattggtggagaatgatatctgtcaaaagaaacacttggagagcactgagtttagtaataggtgactgccggaaaaaagggaactttgaatattgtcaagatcgtactgagaagcactccacaatgccagactcacctgtggatgtgaagacgcaatctaggctgactcctccaacaatgccacctcccccaactactcaaggagctccaagaaccagttcatttacaccgacaacgttaactaatggcacgagccattctcctacagccttgaatggcgccccctcaccacccaatggcttcagcaatgggccttcctcttcttcctcctcctctctggctaatcaacagctgcccccagcctgtggtgccaggcaactcagcaagctgaaaaggttccttactaccctgcagcagtttggcaatgacatttcacccgagataggagaaagagttcgcaccctcgttctgggactagtgaactccactttgacaattgaagaatttcattccaaactgcaagaagctactaacttcccactgagaccttttgtcatcccatttttgaaggccaacttgcccctgctgcagcgtgagctcctccactgcgcaagactggccaaacagaaccctgcccagtacctcgcccagcatgaacagctgcttctggatgccagcaccacctcacctgttgactcctcagagctgcttctcgatgtgaacgaaaacgggaagaggcgaactccagacagaaccaaagaaaatggctttgacagagagcctttgcactcagaacatccaagcaagcgaccatgcactattagcccaggccagcggtacagtccaaataacggcttatcctaccagcccaatggcctgcctcaccctaccccacctccacctcagcattaccgtttggatgatatggccattgcccaccactacagggactcctatcgacaccccagccacagggacctcagggacagaaacagacctatggggttgcatggcacacgtcaagaagaaatgattgatcacagactaacagacagagaatgggcagaagagtggaaacatcttgaccatctgttaaactgcataatggacatggtagaaaaaacaaggcgatctctcaccgtactaaggcggtgtcaagaagcagaccgggaagaattgaattactggatccggcggtacagtgacgccgaggacttaaaaaaaggtggcggcagtagcagcagccactctaggcagcagagtcccgtcaacccagacccagttgcactagacgcgcatcgggaattccttcacaggcctgcgtctggatacgtgccagaggagatctggaagaaagctgaggaggccgtcaatgaggtgaagcgccaggcgatgacggagctgcagaaggccgtgtctgaggcggagcggaaagcccacgacatgatcacaacagagagggccaagatggagcgcacggtcgccgaggccaaacggcaggcggcggaggacgcactggcagttatcaatcagcaggaggattcaagcgagagttgctggaattgtggccgtaaagcgagtgaaacctgcagtggctgtaacacagcccgatactgtggctcattttgccagcacaaagactgggagaagcaccatcacatctgtggacagaccctgcaggcccagcagcagggagacacacctgcagtcagctcctctgtcacgcccaacagcggggctgggagcccgatggacacaccaccagcagccactccgaggtcaaccaccccgggaaccccttccaccatagagacaacccctcgctagacgtgaactcagaactgtcggaggaaagacaacacaaccaacgcgaaaccaattcctcatcctcagatgctcaaagttgttttttttgtttgtttgtttattagatgaattatcctatttcagtacttcagcaagagagaacctaactgtatcttgaggtggtagtaaaacacagagggccagtaacgggtcgtaatgacttattgtggataacaaagatatcttttctttagagaactgaaaagagagcagagaatataacatgaaatgatagatttgacctcctccctgttattttcaagtagctgggattttaaactagatgacctcattaaccgatgctttaccaaacagcaaaccaagagattgctaattgctgttgaaagcaaaaatgctaatattaaaagtcacaatgttctttatatacaataatggaaaaaaaaaaaagaggaaaaccctcaagggcatgagcattggatacagcagtagacattttaacaagaagatgaatggcgtccgtgggttgctaactgaactttgaagacccgctacaaaacgcgcagatgtgcagcagattggaaggagacacagatgttcggtttttttcctgtttctgaaaagaaataataatatccaggtcaacagaatgaaaaatgaaagatgatttgcaatgggatgtatgaatacagcagcaagaaaaaaaaatgccataatacaaaaggctccatatatatatatatatatatatatatacacacacacacacgcacatatacacacacacacacacacacacacacacacacacacacacacacacacacacacaagtaagagactcagcctgcagttaattagcattctggcagttttgacatcagccagctgccctaaataacccttcaacgtttcttcacttttgcaaggttccacagagtaagacattgggtctattccagctcattcattttatattgaaaaaaataattttaaaaatggtggcttcagctccagcccctttccaaaatttttcaaccccaccctgtttggatttttaattaaaaactagtagttctcttggtgttaaaacacttctgtcctgtgaggtttcccaatggtgtttttcttgtaaatgtgttggacaaatgtgaagatgcattgtagtttaaccatatgcccacatttagtctctttattcctagttggtgagaaacctgtatctttctatgctgcttttatatctgtatgtattagtgatatttctctagtagttaaaaaaaaaaaaaggaaaaaaagactctttttggttgtcctcaagaaaagaaaagaagaaaagctatctttcggagctgctatttcactctcttataggatttttttttttcctgaaaaccagcatgcttcacggaatgctaacatattggtgtttttgtaagagggatgtacataaatgtattttgcactgtcacaatgactccctaggcatgctttttgtttttttttttttttttttgagcaaattctttttaaatatgctagagccatttcatcaagtttagctgtagcatagagtagtcgtggaatttttcttttttttttttttaaatcattattagggacttttttaaaaaaataaaataacaagatatcctactttaaaaaaaaaggacagtgcatgcatattgctgtaaggtcgtttaagtatttctaattttacaaaagtaaaaatcattagagctccaaatgctgaggtgtagattgacagctttaacactgctgaatgccaggttatacagtattcttacaaaaagggaagtcagccaaagactgatctgatggaccaaaatcggaattttgaaaagcaccagtactactttccaaatgatcagcaggttaaacatgttcagcaaggtatagtatgaatccattaacccttcgttgtccagggtccagaccagaactacttgttagttttgaaaacagtagcccaggatgtggttgtgtgctttaggaaagtcagcagtgctgcaggctgtgtagacaaccaaagtttacaaggctgggaagacacttctccaaatacatatacaccaggcatttctttaaaatcaaaaacaatccattagctttggggcggggggtggggggagggttaaatgtaggccttggaaacagttttaagtggcttttaagtatctgcatagaggcaatcctaaggtttgctttaagtctcttaaatctaacatttttaaaagcatttcttccctgtattttcatatacaagttggttttaattttgtttgggtggtgttattttttttaaatgactttttagtttagaaagttctgatgagcaaataaatacatctatctacatgttggaagtccatctgccagcacacctgcttaaagtgaaatgaaagcacataaccaggctctgaatgggttatattttatcatggtgctcccagaatcctttgacctcactctgctttctagtctgcttgtgacactggacagtcctttcttacagagctattatatgttctaggctacgaagggttaaataatcccaaaaatgaggtatgtcatacccacacgtctttatctctagaagctgtgatgtatgtgaaacagcactgttattcttaacactagtgtgtaaaataaggattagtacagtacgtctcattactttttaattcagggcaccctgagtgaaaacaaatacaaaaaaaaatccctaactctgagctctatctctgattcctcttcctccttcccctcttcctcctcttcctctcctcctgttttgctacattctcctcagtggcaaaaagtttcactctacctctgacagcatgtatattgcaccagtagctaacaaaaactggtctagtcaaaccaaatgggcacaaaagaaccaggataccaaaagttaagctcatacagctgcaaaccatatcacttcttggtaacaatgcagacctcataaacctaaagaagagaaagaaaagaaaacttttgttactttccttttttgcttgtcacttatatacaggctatgtgagaatataatttgtaggtataacacattaagaaaaagttatcttcattggatagaattgaatggtggtcgctgataggaatagggcgtcctctagctcttatctctgtctcttactcttttctctttctctttttctctgtcatgagactgtgtgtgacagggccacctgtcttttttttttcttaaattttttttttttttatgtgtaggtgcatgtcttggggatttaaaaatttcaaggctggtttacttatgcaaagcatgcctacgtctggaatacttagggaaagaaagcgactccatgttgtccgaattcctcaagggacagaaaaaaaattggagactgttgaaatgcagatttgaagtaatttttttaaaatattattttgggttctgcgacattgtgaaaaattaaagttgttgtgcaatacttaattcagacatgtaccacaagttaatggtagactaacactggggggtggggtctaggcatcatgcttttgtcagcatactcttgagcttttaagtctactatgtctgaactgtggtttcttgtttatccttttttccttagttggactgtaatgtatggtctgtcaacctgtgaatctttaaagtatgattcaggtattgttgtattctttactgtgtaataaaaaagttgaaaaaaatctggatcctctgtctccctcgtccccggtgtgccatggttgcccaccagtgaccccagcctgaggagtccatcctccatggtgctgaatcaaatctgtagagtttattcagctacaaagcgtggctctgtaacaggagttggcttatccatgcgtgttgagtagggaatgatgtcagaactttgcaaaagtcgagctcattcataaggggatgtttctcaggcaggaggagtaggaagagtgggaggagaattactaccttccataggaaaggagagcttggcttgcctagattagctgctgcatagatagcagaggcccttttggctgtgttttgataaaattagaaatgagtacctaaatctggatcactctgctcagagaggttcgtgccaacctcatgaggctctgactcttgtcaggttgcttggctgccttgtgcatacccgaatggcagatcagctgacatgacatggaactgctctatctgccttgtcccctctcctctaattaaaagtcgctaccattgtcactcttggttatgtagttaatatccactgtggctatctccaacttgctgggacatccagttatctcctctgacacatattttttcattctctagttacaaagtttgttagagtttgaaaaacaaacccttctcccctaccctgtgaatgctgttagtttttatgtgtagttttcaaaacacagattatcttatatactgtgttgtagcagaaattcctgtttcctctgaatgttctgactttatagaccaaaataatcgttgcaaaaaatcaaggatggcacagcaggtgcatgagcccgtgtctggagaaaggttatgaaggtgaatgctggttacatgggagggtgacttggagccctctagtttccttcttgtgccagctgggttcctgtttcaaggccaggcttctctaacttgtcttcctgggaaatgtagcttttccaagaatttggtagtgcacaccaggaaaaactaggtatcagaacagatttttttttaaatagtggaaacaccctcactcccacactttggacagttagggttggatatttaatttcatagttactctttttttccacagaagaaaggccagcctgacccaagttgcctatttttaatgtgttactgcatcttattttctcttcaaagtgaaaaaggccagaaactagcagatagaaatggaacccgttgacttagttcccttataagaagttcttgcaaacacctctgtgacgttttcattcaagtggatatgttggacaaataggaaacagttttagtttacgcgaacagtatgagacttccaggtggtggacgccatttttttagaagtgttgatgatgtatttgataacattataaaagtatgtgtctcccgtgaaagaacattgagctatttccctggaatggatggggaagaaatgagcaaaggagtgctgttctgtatgggtgtctatacccttattccaaggtgaataaataaagttgtgtttgcc

SEQ ID NO: 75910 - DNA, 1815 bp, Artificial Sequence
  derived and/or modified sequence
atgatcagcgtgaagcggaacacctggcgggccctgagcctggtgatcggagattgtaggaagaagggtaatttcgaatactgccaggatcgcacggagaaacatagcacaatgcctgatagccccgtggatgtcaagacccaatcccggctgacccccccaactatgccccccccccctactacacagggcgcaccccggacctccagcttcacccccaccaccttaactaacgggacaagccactcccccacagctttaaatggggccccgagcccaccgaacggtttctccaacggaccatcatcctccagcagttcctccctggctaaccagcaactccccccagcctgcggcgctcgccaactatccaagttgaaacggttcctgacaacccttcagcagttcgggaatgacatttctcctgaaattggagagagagtgcgcactcttgtcttgggcctggtgaacagcacactgaccattgaggaattccactccaaactacaggaagctactaattttcctctgcgcccctttgtgattcccttcctgaaagccaatttgcctttgcttcagagagagcttctccactgtgcaaggctcgcaaagcagaatcctgcccaatatttggcccagcacgagcagctcctcttggatgcatccactacatctcccgtcgattcatctgaactgctgctggacgtcaatgaaaatggaaagcgccgcactccggatagaactaaagagaacggcttcgaccgtgagcccttacactctgagcatccttccaaaagaccttgcactatctcccccggccagcgctactcccccaacaatggacttagctaccaaccaaacgggctgccccacccgaccccaccccccccacagcattatcgtctggacgacatggccattgctcatcactaccgcgactcctacagacacccctctcatcgcgacctaagagatcgaaaccgtcccatgggacttcacgggacacgccaggaagagatgattgaccacaggctgactgatagagagtgggctgaagagtggaagcaccttgaccacctgctgaattgtatcatggacatggtagaaaaaaccagacgtagcctgaccgtgctgagacgctgtcaggaagctgatcgggaggaactgaactactggatcaggagatacagcgacgccgaggacctcaaaaagggagggggctcctcgagcagccactccagacagcagagcccggtgaacccagatcccgtggccctggacgcccaccgcgaattcctgcatcgcccggcctctgggtacgtccccgaggagatctggaaaaaggccgaagaagcggtgaatgaggtcaagcgtcaggcaatgacggaactgcagaaagcagtgtcggaggctgaacgaaaggctcatgacatgattaccacagagagggcaaaaatggaaaggaccgtcgctgaagccaaaagacaggcagccgaggatgcactcgctgtgatcaatcaacaggaagattctagcgagtcctgttggaactgcggcagaaaagcttctgagacgtgctctgggtgtaatacagcaagatactgcgggtcattctgtcaacataaggattgggagaagcaccatcacatatgcgggcaaacattgcaggctcaacagcaaggagacactcccgccgtatcctcctccgttactccaaattcaggtgcagggtctcctatggatacccccccagccgccacacctagatccacgacccccggtaccccgtcaacgatcgaaacaaccccccgctag

SEQ ID NO: 75911 - DNA, 1704 bp, Artificial Sequence
  derived and/or modified sequence
atgcccgacagccccgtggacgtgaagacccagagccggctgacccctcccacaatgcctccaccacctaccacccagggggctcctagaacatccagcttcacaccaaccaccctgacgaatggaacctctcatagtccgacggcactgaatggcgccccctctccacctaatggtttttccaatggtcctagctcatccagctcctcttccttggcgaatcagcagttgccgcctgcgtgtggggctcgccagctttctaaactgaagcggtttttgaccaccctgcagcaatttggaaatgatatatcgccagaaatcggggagcgggtgcgcacattagtcctaggtcttgtgaattccaccctgactatcgaggagttccattctaaattgcaagaggccacaaatttccctctgagacctttcgtgattccttttctgaaggctaacctgccacttcttcaacgggagctgctacactgcgcccgtctcgcaaagcaaaacccggctcagtatctggcccagcatgaacagctcctactcgatgcctccaccactagcccagtagattcatccgaactgctgctagatgtgaacgaaaacggcaagagacgcactcctgaccgaacgaaagaaaatggatttgaccgcgagccgctacacagcgaacacccatctaagcggccttgtaccatcagcccaggccagcgatattcacctaacaacggtctgagctaccagcctaacggtctcccacaccccactcctccacccccccaacactaccggctggacgatatggctatcgctcaccattaccgagattcctatagacacccttcccacagggatctgcgagacagaaaccgtccaatgggtctgcacgggaccagacaggaagaaatgatcgatcaccggctcactgacagagagtgggctgaggaatggaagcacttggaccatcttctcaattgcattatggacatggtagaaaagaccaggcggagtttgacagtccttcggcgatgtcaggaagctgaccgcgaagagctaaattattggatcagacggtatagcgacgctgaggacctcaagaagggcggcgggtcttcttcaagtcactcaagacagcagtcacccgtcaacccagatccagttgcccttgatgcacatcgagaatttttgcataggccagccagcggatatgtccctgaggaaatttggaagaaagccgaagaagctgttaacgaagtgaagagacaggccatgactgagttgcagaaagctgtgtctgaagctgagcgcaaagcccacgatatgatcaccaccgaaagggctaagatggagcggactgtggctgaagccaaaaggcaggctgcagaggacgctcttgccgtgattaaccagcaggaggactcgagcgaatcgtgttggaactgtggacgaaaagccagtgaaacttgttctggatgcaacaccgctcgctattgcgggagcttttgccagcataaggactgggagaagcaccaccacatttgtggccagacgctgcaggcacagcaacagggagatacacctgctgtgtcatcttccgtaactcccaactccggagccgggtctcccatggacactcccccagccgcaaccccacggtccacaaccccaggcactccgtctaccatcgaaactacgccacggtag

SEQ ID NO: 75912 - DNA, 1704 bp, Artificial Sequence
  derived and/or modified sequence
atgcccgacagccccgtggacgtgaagacccagagccggctgaccccgcccacaatgcccccgcctcctacgacccagggagcaccacgaacctctagttttactcccacaacactcaccaatggtaccagtcactcacctaccgcacttaacggtgcaccgtcgccacccaatggtttctccaatgggccttcatcctctagcagcagcagcttagcaaatcaacagctaccgccagcttgcggggctagacagctgtctaagcttaagagatttctaaccaccctgcagcaatttggcaatgatattagtccagagataggagagcgggtccggacactggtgctcgggcttgtgaactcgacactgacaatcgaggagtttcatagcaaattacaggaggccaccaatttcccgttacggccattcgtcataccatttctcaaggccaacctcccattgctgcagagggaactattacattgcgcccgactggccaaacagaatcccgcccagtacttagcacaacacgaacaactgctcctagatgctagcacgacaagtcctgtggattcttcagaactgctcctggatgttaatgagaatggaaagcgccggaccccagatcgaacgaaggagaatggcttcgatcgagagccccttcatagtgaacatccttccaagaggccttgtacaatctcacccgggcagcgttacagtccgaacaacgggttgagttaccagccaaacggcctcccacatccaacacctcctccaccacagcattatcgcctcgacgatatggcgatcgctcaccactacagggattcttatagacacccttctcaccgagatttacgagaccgtaatcgcccaatggggcttcatgggacccggcaggaggagatgattgaccacagactcactgatagggagtgggcggaagaatggaagcacttggaccatctcctgaactgtatcatggacatggtggaaaaaacccgaagatcgttgactgttctccgtaggtgccaggaggcagaccgcgaggagctgaactactggattcgacgatacagcgacgcggaagatttaaagaaaggaggcggatcatcatcaagccacagtagacagcagtccccagttaaccccgaccccgtcgcgctcgacgctcaccgcgagttcttgcatcgcccggcctctggatatgtgccggaagaaatatggaaaaaggctgaagaggcggttaacgaggtgaaacgccaggctatgacggaactgcaaaaagctgtgtccgaagccgaacgaaaagctcatgatatgatcactactgaacgagctaaaatggagcgcacggtagccgaggcaaagcggcaggcagcagaggatgcgttagccgtgatcaatcagcaggaggattcttcggaaagttgttggaactgtgggcgcaaagcctcagaaacttgtagcggatgtaatacagcaaggtactgtggctccttttgccagcataaggactgggagaagcaccatcacatatgcggacaaaccctgcaggcacagcagcagggggataccccggccgtgtcttccagtgtcacccctaatagcggggccggtagtcccatggacacgccccctgccgccacaccaaggtcaaccaccccaggcaccccctctactattgagacaacaccaaggtag

SEQ ID NO: 75913 - DNA, 408 bp, Artificial Sequence
  derived and/or modified sequence
atgatcagcgtgaagcggaacacctggcgggccctgagcctggtgatcggtgattgtcgtaaaaaaggcaactttgaatattgccaggacaggacagagaagcattctaccatgcctgatagccccgtggatgtgaaaacccaatctcggcttacgcctccgacaatgcccccacctcctacaactcagggtgcccccaggactagctcttttacccctacaactcttactaatggcacttcccactcgccgactgcccttaacggtgccccttcgccaccgaacggtttttcaaacggcccctcatcttcaagttcttcctctctggcaaatcagcaactgcctcctgcttgtggtgcccgccagctgtcaaagctcaagaggttccttacgacactgcagcagtag

SEQ ID NO: 75914 - DNA, 177 bp, Artificial Sequence
  derived and/or modified sequence
atgatcagcgtgaagcggaacacctggcgggccctgagcctggtgatcggtgattgcaggaagaagggcaatttcgagtactgccagggtgcgcgagcccaacaccccgcgtccggcgatgcagcaccagctcccttgatggcactgcttagcgctgctacacacagccggacttag

SEQ ID NO: 75915 - DNA, 165 bp, Artificial Sequence
  derived and/or modified sequence
atgatcagcgtgaagcggaacacctggcgggccctgagcctggtgattggcgactgccggaaaaaaggcaacttcgagtattgccaggatagaacggagaagcacagtacaatgcccgacagtccagtcgatgtgaaaacccagagccgcctaacacctccctag

SEQ ID NO: 75916 - DNA, 690 bp, Artificial Sequence
  derived and/or modified sequence
atgatcagcgtgaagcggaacacctggcgggccctgagcctggtgatcggcgattgtcgaaaaaagggtaattttgagtactgtcaagacaggaccgagaagcatagcacaatgccagatagcccagttgatgttaaaacccagtctcggctgaccccccccaccatgccacctccgcctaccacccagggggctccacgcacatctagcttcacccccacaactctgacgaacgggacctcacacagccccacagctcttaatggagccccatcccctcctaatggctttagtaacggaccatcaagcagtagcagtagttccctcgccaaccagcaactgcctcctgcttgcggggccagacagctgagcaaattaaagcggtttctgacgaccctgcagcagttcggcaatgatatttcaccggagatcggtgagcgcgtgagaactcttgttctgggattagtgaattcgactcttaccatcgaagagttccactctaaactgcaagaagctacaaacttccccctgcgcccgtttgtaattccttttctgaaagccaacttgccacttcttcagcgagaactgctgcattgcgcaagactggcgaagcagaacccagcccagtatctggcccaacacgagcaactactactggacgcatccaccacctcccccgttgatagttag

SEQ ID NO: 75917 - DNA, 510 bp, Artificial Sequence
  derived and/or modified sequence
atgatcagcgtgaagcggaacacctggcgggccctgagcctggtgatcggcgattgcagaaagaagggaaattttgagtactgtcaagatagaaccgagaagcactctaccatgccagatagcccagttgacgtgaaaacacagtctaggctcacgcccccaacaatgcccccaccaccgacgacccagggagccccacggactagctccttcaccccaactacccttaccaacggtactagccatagcccgacagcactgaacggcgctccatcacccccgaacggatttagcaacgggcctagcagttcatctagttcctcccttgccaaccagcagttgccgccggcgtgcggggccaggcagctgtccaagctgaaaagattccttaccacgctgcagcaattcggcaatgacatctccccggaaatcggtgaacgagtgcgcactctcgttcttggtctggtgaattccaccctgacgattgaggagtttcatagcaagctttag

SEQ ID NO: 75918 - DNA, 147 bp, Artificial Sequence
  derived and/or modified sequence
atgatcagcgtgaagcggaacacctggcgggccctgagcctggtgattggggattgcagaaaaaagggtaactttgaatattgccaggatcgcactgaaaagcattctaccatgcccgatagcccagtcgacgtgaagacccagtag

SEQ ID NO: 75919 - DNA, 363 bp, Artificial Sequence
  derived and/or modified sequence
atgatcagcgtgaagcggaacacctggcgggccctgagcctggtgattggcgattgtcggaagaagggaaatttcgagtattgtcaggatagaaccgaaaagcacagtaccatgccagatagtccggtagatgtcaagacccaatcccggctcacacccccaactatgccacctccaccgaccactcagggagcccctcgcacaagtagttttacgcctactacgctaactaatggtacatcacacagcccaactgcactgaatggggcgcctagtccaccaaatggattcagtaacggcccatcgtcatctagctcctccagtctggctaatcaacagctgccccctgcgtgtggggcctag

SEQ ID NO: 75920 - DNA, 1704 bp, Artificial Sequence
  derived and/or modified sequence
atgcccgacagccccgtggacgtgaagacccagagccggctgaccccacctaccatgccccccccgcctacaacacagggcgcacctcgcactagctcttttacaccaactactctgaccaacggcacatcccactctccaactgcactgaatggagctcctagtccccccaacggtttctctaatggtccttccagctcgtctagctcttcattggcgaatcagcagctgccaccggcttgcggagcccgacagttgtcaaagctgaagcgtttcctgacgactctgcagcagttcggcaatgatatctccccagaaataggcgagcgcgtccgtaccttggtgctggggttagtcaactcaacgttgactatcgaggaatttcactcaaagctgcaggaggccacaaattttccccttcgcccattcgtcataccattcttgaaggcgaacctgccgcttctgcaacgggagctgctgcactgtgcccgattggcgaaacaaaacccggcccaatacctcgcccagcatgaacagttactgttggatgcgtcaaccactagccccgtggattctagcgaactgcttctggacgtcaacgagaacggaaagagaaggacacccgacagaactaaagagaatggttttgatagagaaccccttcattctgagcacccttctaagaggccttgtactattagccccggtcaacggtatagtcctaacaatgggctgagttatcaacccaatgggctgccccacccaacacctccgcctccccagcattaccggctggatgatatggccatcgcacatcactatagggacagctacaggcacccctcgcatagagacctcagggatagaaaccgtcctatgggcctccacggtactaggcaggaggagatgatcgatcatcggctgacagacagggagtgggcggaggaatggaaacacctggaccacctattgaattgtatcatggatatggtggaaaagacgcgccgaagcctaacggtcctgcggagatgtcaagaggctgaccgggaggaactaaactactggatccggagatatagcgatgctgaagacctgaagaaagggggtggatcttcttcctcacactcccgccaacagagcccagtgaacccagatcctgtagcattagacgctcatcgggagttcctgcataggccggcatctggctatgtgcccgaggaaatatggaaaaaagctgaagaggctgtcaacgaagtgaaaaggcaggccatgaccgagctgcagaaggcagtgtctgaagctgagaggaaggcacatgacatgatcactaccgagcgtgccaaaatggagaggaccgtggctgaagccaagcgccaggctgccgaggatgccctggcagtgatcaaccaacaggaggacagctcggaaagctgttggaactgtgggcgaaaggcaagcgagacttgctccggctgcaatacagctaggtattgtggctccttttgccaacacaaagattgggagaaacatcatcatatttgtggccaaactctccaggcccagcagcagggtgacacccctgcagtgagttccagcgtgacccccaactccggcgccggctcaccaatggacacccctcccgccgccacaccaagatcaaccacaccgggaacaccctctaccatcgagacaaccccccgctag

SEQ ID NO: 75921 - DNA, 258 bp, Artificial Sequence
  derived and/or modified sequence
atgatcagcgtgaagcggaacacctggcgggccctgagcctggtgatcggcgattgccgtaaaaaggggaactttgaatattgtcaggatcgcacggagaaacactccacaatgccagacagtcccgtcgacgttaagactcaaagccggttgacaccccctacaatgccccccccacctaccacccagggcgctcctcgcacgagcagctttactccgacaacgttaactaacggcacatctcattctccaacatag

SEQ ID NO: 75922 - DNA, 285 bp, Artificial Sequence
  derived and/or modified sequence
atgatcagcgtgaagcggaacacctggcgggccctgagcctggtgattggagactgtcggaaaaaagggaacttcgaatactgccaggaccggactgaaaaacactcaacaatgccggacagccccgttgatgtcaagacacagagcagactaacaccacccacgatgcctccccctccaactacccagggagcacctcggacgagcagttttactccaaccactctgacgaatggcacttcacactcaccaacagctctgaacggtgcaccttcgccaccctag

SEQ ID NO: 75923 - DNA, 471 bp, Artificial Sequence
  derived and/or modified sequence
atgatcagcgtgaagcggaacacctggcgggccctgagcctggtgataggagactgcagaaaaaagggtaacttcgagtattgccaggaccgcaccgaaaagcacagcaccatgcccgacagccctgtcgatgtcaagacccagagtcggcttacccccccgaccatgcctcccccaccaaccacccagggagcacctaggacctcatctttcacccccaccacactcactaacggcacttcccatagcccgacggcgctcaatggagcccccagcccccccaacggctttagcaatggcccctccagcagctcttcctcttcgctggcaaaccagcagttacctcctgcctgcggagccagacagctgtccaagttgaagagatttctgacaactcttcagcagtttggcaatgatatcagccctgagattggtgaacgggtgcgcacattagtgttgggccttgtctag

SEQ ID NO: 75924 - DNA, 363 bp, Artificial Sequence
  derived and/or modified sequence
atgatcagcgtgaagcggaacacctggcgggccctgagcctggtgattggtgattgtcgcaaaaagggaaactttgagtattgccaagatcgaacagagaagcattccacaatgccggattctccagttgacgtgaagacacagagtagacttactccaccaactatgccgcctcccccaactactcaaggagcaccacgaacctcatcgttcacccctaccactcttaccaacggcacctcccattccccgacagctctgaacggtgccccctcgccacctaacgggttcagcaatggccctagtagcagttcgtcgtcctctctggctaaccagcagctgcccccggcttgtggagcctag

SEQ ID NO: 75925 - DNA, 1815 bp, Artificial Sequence
  derived and/or modified sequence
atgatcagcgtgaagcggaacacctggcgggccctgagcctggtgatcggtgactgcagaaaaaaaggcaacttcgaatattgtcaagacaggacggaaaaacactccacaatgccagactcccccgtagacgtaaagacccagtctcgcctgactccgccgacaatgccaccccctcctacgacacagggggcacccagaactagtagcttcacgcccacaactcttaccaacggcacctcacactcccctactgctttaaatggggcccctagcccgcccaacggcttcagcaatggcccttcatctagctccagctcctcactggccaaccaacaactgcctcccgcctgtggtgcccgccaactttctaaattaaagcgattcctgaccacactgcaacagttcggaaatgatatcagcccagaaattggcgagcgtgtgagaactctggttctgggcctggtgaacagcaccttgactattgaggagttccatagcaagctgcaggaggccactaacttcccactccgccccttcgtaatcccttttctgaaagcaaacctcccactgttgcagagggagctcctccactgtgcccggctcgccaaacagaaccccgcgcagtacctggcccagcatgagcagctactgttagatgccagtactacaagtcccgtggactcgtccgagcttctgcttgatgtgaacgagaacggcaaacgccggactccagacaggaccaaggagaacggatttgaccgcgagcctctccattccgagcacccttcgaaacgcccttgcaccatcagtcccgggcaaagatacagtccgaacaatggcctgtcataccagccaaatggcctgccccatccaactcccccaccaccccaacactaccgtctcgatgacatggcaatcgcccaccattaccgagattcctataggcatccttcacacagggatctgagagatagaaatagacccatggggttacacggcaccagacaagaggagatgatcgatcataggctcactgatcgggaatgggcggaagagtggaagcatctggaccatttactgaattgcattatggatatggtggagaagaccaggagaagtcttaccgtgctgcggcgctgccaggaagccgaccgggaagagttgaattattggatccgccgatactctgatgcagaggatttgaaaaagggaggaggctcgagctcttcccattctcggcagcagagccccgtcaacccggatccagtggcattagacgcccatagggagtttttgcacaggcccgcctcaggttatgttcctgaggaaatctggaaaaaagctgaggaggccgtaaacgaagtaaagaggcaggccatgacggagctgcaaaaggccgtgagtgaggcagagcgcaaagcccacgacatgattacaaccgaacgggctaagatggaaaggaccgtggcagaggccaaacgccaggctgcagaggacgccctggcggtcattaatcagcaggaggactccagcgaaagctgttggaactgcgggcgaaaagccagtgagacatgctcgggttgtaacacagccaggtattgcgggagtttttgccaacacaaggactgggaaaaacatcatcatatctgtggccagacacttcaggctcaacagcaaggggacacacccgctgtttcctccagtgtgaccccaaactcaggggcggggagtccaatggacaccccccctgcagccacgcccaggtccaccaccccaggcacaccttcgactatcgaaaccacccctaggtag

SEQ ID NO: 75926 - DNA, 1815 bp, Artificial Sequence
  derived and/or modified sequence
atgataagtgtgaagcggaatacctggcgggcactgtcactggttattggggactgccgaaaaaaaggaaattttgagtattgtcaagataggactgaaaaacatagtactatgccggattcccccgtagatgtgaaaacacagagccgccttacaccacccaccatgccccctcctcccaccacacagggggcacctagaacctcttcctttactccgacgaccctgacaaacggcacctcacattccccgacggccctgaacggtgccccatctcctccaaacggctttagtaacgggccatcctcttctagctcttcctccctggcaaaccaacagctgcccccagcttgcggcgcacgccagctgagcaaactgaaacggttcctgactaccctgcaacagtttggcaatgacattagcccagagattggagaaagagtgcggaccttggtgctgggactagtgaactccaccctcactattgaggaatttcattccaaactacaggaagccaccaatttcccccttcggcctttcgttatccccttccttaaggcgaatctgcctctgttgcagagagaacttctgcattgtgctcgtctggcaaagcaaaacccggctcagtacctggcccagcacgagcagctgctgcttgacgccagtaccacatctccggtggactcgagcgaactgctgttagacgtaaatgaaaatggaaagcggcgaacacctgacaggacgaaagagaatgggtttgaccgggagccgctccactcagaacatccatctaaacgcccatgcactatttcccctggtcagcgctattctcccaataatggcctttcttatcagcctaacggtctcccgcaccccactcctccccctccacaacattaccgcctggacgacatggctatcgcgcatcattacagggactcctacaggcacccttcccatcgggatctaagagaccgtaacaggccaatgggcctccatggaactaggcaggaggagatgattgatcatagattaactgatcgtgaatgggccgaagagtggaagcaccttgaccatttgctgaactgcattatggacatggtagaaaaaactagacggtccctgaccgttctgcggaggtgccaagaagccgacagagaggaacttaactattggatacggagatactcggacgctgaagacttgaaaaaagggggaggcagtagctctagccatagcaggcagcagtccccagtgaatccagaccccgtggcacttgacgcccaccgggaattcctgcacaggcctgcttctggctatgtcccggaagagatctggaagaaggcagaggaagcagtgaacgaggtaaaaagacaagcaatgacggagctccagaaggcggtttcagaagcagagcggaaggcacacgatatgattactacagaacgggctaagatggagcggaccgtggctgaagccaaacggcaagctgccgaggacgctctggccgtcatcaaccagcaagaggacagcagcgagtcctgctggaattgcgggcgaaaggcatctgaaacgtgttcaggctgtaatacggcccgatactgcggctcattttgccagcacaaagactgggaaaaacatcaccacatatgcggccagaccctgcaggcgcaacaacaaggcgacacacccgctgtaagctcatcagtcaccccaaattctggggcaggatccccgatggatacgccccctgcagccacacccaggtcaactactccgggtactccgagcacgatcgagacgacccccaggtag

SEQ ID NO: 75927 - DNA, 1704 bp, Artificial Sequence
  derived and/or modified sequence
atgcccgattcacccgtggacgtcaagactcagtctagattaaccccacctacaatgccaccgcctcctaccacgcagggggcaccaagaacatccagttttaccccaaccaccctgacgaacgggacctctcacagtccaacagctcttaatggagctccttcccctcccaatggattctccaatggaccttctagctctagcagcagctcccttgcaaaccagcagctcccgcctgcatgtggtgctcggcagctgtctaagctgaaacgctttcttactacccttcagcagttcggcaatgatatctctcctgagatcggcgagcgcgtgcggacactggtcctcggattggtcaattctaccctgactatagaagagtttcactccaagttacaagaagctactaactttcccctgaggccgttcgtgattccatttctgaaggccaacctgcctctgttacagagagagttgttgcattgtgcacggttggccaagcagaaccctgcccagtaccttgcccaacacgagcagttactcctcgacgcttctactacgtctccggtggatagcagtgaactcttgctggacgtgaacgagaatgggaagagaagaacacctgatcggaccaaagagaacggtttcgatagagagccgttacatagtgagcaccccagcaagcggccatgtacaatcagccctggccagcgctacagccctaataatgggttatcataccagcccaacggcctcccacatccaacgcccccaccacctcaacactaccggctagatgatatggctatcgctcaccactatcgggattcctaccgacatccatcacaccgagatctaagagacagaaatcggccaatgggactgcatgggaccaggcaggaggaaatgattgatcacagactcacagatcgtgaatgggcagaagaatggaaacacttagatcacctactgaattgtatcatggatatggtcgagaagacgcgcaggagcctaacagtgcttcgtcgatgtcaggaggccgaccgtgaggagctcaactattggattagaaggtattctgatgctgaggatctgaaaaaaggagggggatccagctcatcacactctcgtcagcagtcacctgtcaacccagatcctgtggctcttgatgcccacagggagttcttgcaccgacctgcctctggttatgtccccgaagaaatctggaagaaggccgaggaggcggttaacgaagttaaacggcaggccatgacagagctgcagaaagccgttagtgaggcggaacgtaaagcccatgacatgatcacgactgaacgcgctaaaatggagcgcacagtcgccgaggccaagcggcaggcagccgaggacgcgctggcggtcatcaaccaacaggaagacagttccgagtcgtgttggaattgcggcaggaaagcttcagagacctgttcgggttgtaataccgcccgttattgcgggagtttttgtcagcacaaggattgggaaaagcaccaccacatttgtggacagacacttcaggcccagcagcagggcgacacccctgcagtctctagcagcgtgaccccaaattccggagctggatccccaatggacactccaccggctgcgactccacgctcaacgactccaggcacaccctctactattgagaccacgcccaggtag

SEQ ID NO: 75928 - DNA, 1704 bp, Artificial Sequence
  derived and/or modified sequence
atgcctgactctcccgtcgatgtcaaaacccagtcacgacttactcccccaacaatgccccctccacctaccacacagggtgccccaagaaccagttcatttacccctactactctaaccaacggtacctcacattccccaactgcgctaaatggagccccaagccctcctaatggattttccaatggaccatcttcttcaagcagttctagcctggctaaccagcagctgccgcctgcctgcggggcaaggcagctatctaagctgaaacgctttctcactactctgcagcaattcggtaacgacatttctccggaaataggggagcgggtgcgcacattagttctcggcctggttaattctacattaacaattgaggaattccactcaaagcttcaagaggctacaaatttcccattgagacccttcgtgattcctttcctcaaggccaacctgccgctgctacagagagagcttctgcattgcgcgagactggcaaaacagaatcctgctcagtacctcgctcagcacgagcagctgctgttggacgcatcgacaacgtcccctgttgattcctctgaattactcctagatgtaaatgagaacggcaagcgccgtacgccagatagaaccaaggaaaacggcttcgatagagaaccattacactccgagcatcccagcaaacgcccatgcaccatctctcctgggcagaggtacagtccgaataacgggttgtcctatcaaccaaatggcttgccccatccaactcctccgccaccccagcactaccgactcgatgatatggcgatagcacaccattatagagatagctaccggcacccaagccacagagatctgcgagataggaatcgtcccatgggcttacatggaacacgccaggaggaaatgattgaccatcgccttacagatcgcgagtgggcagaggagtggaagcatctggaccacctgctgaactgcatcatggatatggtagagaagacacgcagaagcctcacagtactgcggaggtgccaggaggccgacagggaggaactgaactactggattaggaggtattctgacgcagaggaccttaagaaggggggaggaagctctagctcccattcacgccagcagtcacccgtcaatcccgatcccgtcgcactcgacgctcaccgcgagtttctgcaccgaccagcatctgggtacgtgccagaagagatttggaagaaggccgaagaagctgtaaacgaagtcaagcgccaggcaatgacagagctacagaaggcagtcagcgaggccgagaggaaggcccatgacatgattacaaccgaacgtgccaaaatggaaagaaccgtggccgaagcaaagcgccaagctgcggaggacgctctggcagtcataaatcagcaagaggattcttccgagtcctgttggaattgcggacgcaaagcctcagaaacctgttcaggctgcaacacagccagatactgcggctctttttgccaacataaagactgggagaaacatcaccatatctgcggccaaaccctgcaggcacagcagcagggagacacccctgccgtcagtagcagtgtcacccctaatagtggcgcaggtagcccaatggatacacctcctgctgcgacccctaggtctaccactccagggactccctccaccattgaaaccacaccgagatag

SEQ ID NO: 75929 - DNA, 408 bp, Artificial Sequence
  derived and/or modified sequence
atgatttccgtgaagcggaacacatggcgtgctctctcgcttgtgatcggagattgccggaagaaagggaactttgaatactgccaggatcggaccgaaaagcactctactatgcctgattcccctgtggacgtcaagacccagtcccgactcaccccacccacaatgccgcctccacctacaactcaaggagcacccagaaccagttcttttacaccaacaactttgaccaacggaacctctcactctccaaccgccctgaatggtgcgcctagcccacccaacgggttcagcaatggaccaagctcttcttcttcaagcagcctcgcaaatcaacagcttccacccgcatgtggtgcgaggcagttgtcaaagcttaaacgatttctgacaacactgcaacagtag

SEQ ID NO: 75930 - DNA, 177 bp, Artificial Sequence
  derived and/or modified sequence
atgatcagcgtgaagcggaacacatggcgcgctttgtcactggtcataggtgactgtagaaagaaggggaacttcgaatattgtcagggggcaagggcacagcaccccgcatctggggacgctgcgccagcccctctgatggctttactgtccgctgcaacacactcacgtacatag

SEQ ID NO: 75931 - DNA, 165 bp, Artificial Sequence
  derived and/or modified sequence
atgattagcgttaagcggaacacatggagagcactgtctttagttattggggactgccgcaagaaagggaattttgagtactgccaagacaggaccgaaaaacattctactatgccagactcccctgtggacgtcaagacgcagagccgcctgacgcccccatag

SEQ ID NO: 75932 - DNA, 690 bp, Artificial Sequence
  derived and/or modified sequence
atgattagcgtgaagcgaaatacttggagagcactgtccctggtgattggcgactgccggaagaaggggaacttcgagtactgtcaggacagaaccgaaaaacatagcaccatgccggattccccggtggacgtgaaaactcaaagtaggctgaccccacctacgatgccgccacctcccaccacccagggggcaccccgaacaagcagcttcacccccacaacgctcaccaacgggactagtcattctcccaccgccctgaacggggctcctagccctcctaatggattttcaaatggccctagctcgagtagctcctcttcattggccaatcagcagctgccccctgcatgtggggctagacaactttccaagcttaagcggttcctcacgaccctgcagcagtttggcaacgatatctcccctgagatcggggagcgcgtacgcacactggtcctggggctggttaacagtacgctaactatagaggagtttcattctaaactgcaagaagccacgaatttccctttgcgcccttttgtgataccttttctcaaggctaatttgcctctgctccagagagagctgctgcattgtgcccgacttgctaagcagaacccggcacagtatctggctcagcatgagcagttgttgctcgatgctagtaccacatccccggtggatagctag

SEQ ID NO: 75933 - DNA, 510 bp, Artificial Sequence
  derived and/or modified sequence
atgatctcagtcaagagaaacacgtggcgcgcactgagcctcgtcattggagactgccggaagaaaggaaacttcgaatactgccaagacagaactgaaaagcattcaaccatgccagattcccccgtggacgtgaaaacacaatcaagactaactcctccgacaatgcctcctccacctacaacacaaggtgccccacgcacatcaagctttacacccaccacacttaccaatggaaccagccactctccaaccgctctgaacggagctccctctccccctaacggatttagcaatggaccatcttccagttcttccagtagcctggcaaatcagcagctgcccccagcgtgtggggctcgccagctgagtaaactgaagcggtttctgacaactcttcaacagtttggaaatgacattagtcccgagatcggggaacgggtccgaactcttgtgctgggactggtgaacagcacgttaaccatagaggaatttcacagcaagctctag

SEQ ID NO: 75934 - DNA, 147 bp, Artificial Sequence
  derived and/or modified sequence
atgatcagtgtgaagcgcaacacttggcgtgctcttagcctcgtcatcggtgattgtcggaaaaaaggaaacttcgagtattgtcaggatcgcactgagaagcacagcactatgccagactctcccgttgatgtgaagacccagtag

SEQ ID NO: 75935 - DNA, 363 bp, Artificial Sequence
  derived and/or modified sequence
atgataagcgtgaagaggaacacgtggcgagcgctcagccttgtcataggagactgtaggaagaagggcaattttgaatactgccaggataggaccgagaaacactcaactatgcctgactcccctgtggatgttaaaacccaatctaggctgactccgccaaccatgcctccgcctcctactactcaaggagccccacgaacaagtagctttactcccaccaccctgaccaacggtactagtcactcacccaccgccctgaacggggctccttcccctccgaatggtttttctaatgggccatcgtcctctagcagctcctcgcttgcaaatcagcaactcccacccgcttgtggcgcttag

SEQ ID NO: 75936 - DNA, 1704 bp, Artificial Sequence
  derived and/or modified sequence
atgcctgacagtccggtggacgttaaaacccagtcccgattgacacctcccaccatgccccctccacctacaacccagggtgccccaagaacaagctctttcacgcctaccaccttgacaaacggaacctcccattctccaacagccttgaacggggctcctagtccacctaacgggttctctaacgggccatcgtcctcttcgtcctcaagcctagctaaccagcagctcccacccgcttgcggggcaagacagctgtccaagctaaagagattcctgacgacactacagcaattcggcaatgatatcagccccgaaatcggcgaacgcgtgaggactcttgtgttagggctggtcaacagcaccctgactatcgaagagtttcactccaagctgcaggaggcaaccaactttcctttgcgaccctttgtgatcccatttttgaaagccaacctccctttactccagagagaactgcttcactgcgctcgacttgcaaagcagaacccagcccagtacttagctcaacacgaacagttacttctcgacgccagcactacttcaccagtcgacagcagcgagctcctgctagatgtgaacgagaatggcaagcggaggacaccagataggacaaaagagaacggctttgaccgcgagcccctccattctgaacatcctagtaaacgcccatgtactatatcccccggacaaaggtacagccccaacaacgggctgtcctaccagcccaacgggctacctcatccaacccctccacctcctcagcattaccggctggacgatatggctattgcgcatcactatcgagactcttaccgacacccgtcccatagagatcttagagatcggaatcggcctatgggcctgcatggtacccgacaggaggagatgatcgaccaccgattaacagatagagaatgggctgaggagtggaagcatctagaccatcttcttaactgcattatggatatggtagaaaagaccagacggtctttaactgtgctgaggagatgccaggaggccgatcgggaggaactgaactactggatccgacgatatagtgacgcagaggacctcaagaagggaggcggatcctccagctcccactcacgccagcaaagccccgtgaatccagacccggtggccctcgatgctcaccgggagttcctccataggcctgccagtgggtatgttcccgaggagatatggaagaaggccgaagaggctgtgaacgaagttaaacggcaggccatgactgaattgcaaaaagcagtgtctgaggctgagagaaaagctcatgatatgataaccaccgagcgagccaaaatggagcgcaccgtcgccgaagctaaacgtcaggcagccgaagatgcactggctgtgatcaaccagcaggaggatagttcagaatcctgctggaattgcggtcgtaaggcgtcagagacatgctccggatgtaacacagcacggtactgcggttccttctgtcagcataaagactgggaaaagcaccaccacatctgcggacagacactgcaggcccaacagcaaggcgatactcccgcagtgtcatcgagcgtgacccccaattctggggcaggaagtccaatggatacccccccagcggcaacacccagatcaaccacaccaggtaccccaagtactattgagactacgccccgatag

SEQ ID NO: 75937 - DNA, 258 bp, Artificial Sequence
  derived and/or modified sequence
atgatttctgtgaaacggaatacatggagagccctttcactggtgatcggtgattgcagaaaaaaaggtaacttcgaatactgccaggacagaacggagaagcattcaacaatgcccgacagccccgtggatgtgaaaacccaatcccgcctaactccgccaacaatgccaccacccccaactacgcagggcgctccccgaacatctagctttacgcctaccactttgaccaatggtacgtctcatagccccacatag

SEQ ID NO: 75938 - DNA, 285 bp, Artificial Sequence
  derived and/or modified sequence
atgatcagtgtaaagcggaacacctggcgagctctttccctcgttatcggggactgtagaaagaagggcaatttcgaatattgccaggatagaaccgagaaacacagtacaatgccagattcccctgtcgatgtcaaaacccaaagcagactgacccctcctacaatgcctccccctcctaccacacagggcgcaccaaggacatccagtttcaccccaactaccctgactaacggtacgagccattctccgacagcactgaatggtgcgccatcccctccatag

SEQ ID NO: 75939 - DNA, 471 bp, Artificial Sequence
  derived and/or modified sequence
atgattagcgtcaaacgcaacacttggagggcactgtcccttgtcataggggactgtagaaagaagggaaacttcgaatattgccaagacagaacagagaagcacagcacaatgccagattctccggtggatgtcaaaacccagagccggctgaccccccctactatgccacccccacccactacccaaggagcacctaggacctcctctttcacccccactacattaactaacggaacgtctcattccccaacagccttaaacggagctccgtcacctcccaacggctttagtaatgggcctagcagttcttctagctcatccttagccaatcagcagttacccccagcatgtggcgctaggcaactgagcaagctgaaacgttttttgaccaccttgcagcagtttggaaatgacatttcacccgaaatcggagaacgcgtgaggaccttggtccttggccttgtatag

SEQ ID NO: 75940 - DNA, 363 bp, Artificial Sequence
  derived and/or modified sequence
atgatctcggtcaaacgtaatacatggagggcactttctctcgtgattggggactgccgcaagaaaggaaattttgaatattgccaggataggactgagaagcatagcaccatgccagactcccctgtggacgtcaaaacacagagtaggctcacgccacccaccatgcccccacctccaactactcagggtgcccctaggacatccagctttacccccactactcttacaaacggcacaagtcatagccctaccgccttgaacggagccccatctccacccaatggtttctcaaatggcccaagttcttcaagcagctcttccctggcgaaccagcagctacctcccgcatgcggagcttag

SEQ ID NO: 75941 - DNA, 1815 bp, Artificial Sequence
  derived and/or modified sequence
atgatcagcgtcaaacggaacacttggcgggctctttcactcgttattggagactgccgtaaaaaaggaaacttcgagtattgccaggaccggacggaaaagcactccaccatgcctgattcccccgtggacgtaaaaacccagtccagactgaccccgcctaccatgccaccgcctccaactacccagggagcgccacggactagctccttcacgccaacgaccctgacgaacggaacctcgcactcacccacagccctcaatggagctccttctccacccaacggattttcgaacggtccttcctccagctcctcttcgtcgctggcaaatcagcagctgcctccagcctgcggcgctcggcagctctctaaacttaaacgctttctcaccaccctgcagcagtttggtaatgatatcagccccgagatcggtgagcgggtgcgtaccttagtgctggggctggtcaactctaccctgaccatcgaggaatttcacagcaagcttcaagaagctacaaattttccgctgcgcccttttgtgatcccttttttgaaagccaatctccccctcctgcagcgtgaattgttacattgcgcaaggctggctaaacaaaatccggcacaatacctggcacagcatgaacagttattgttggatgcttctactactagcccagtggactcaagtgagcttctgttggatgtcaacgaaaacgggaagagacggacaccagacagaaccaaggagaatggcttcgatcgggagccacttcactcggaacacccctctaagaggccctgcactatttcaccaggtcagagatactctcctaataacggactcagttaccagcccaacggactcccacacccaacgcctcctcctccgcagcactaccgtttggatgatatggccatcgcacatcattacagagatagctataggcatccgagccaccgagacctgagagaccggaatagacccatgggattgcatggaactagacaggaggagatgatcgaccacaggttaaccgatagagagtgggcagaggagtggaagcacctcgatcacctgttgaactgtattatggacatggtggagaagacacgaagatcactaacagtgctgaggcgttgccaggaggctgatagggaggagctcaattactggatccgccgttacagcgatgctgaggacctgaagaaaggtggaggaagtagctcgtcacacagtcgacagcagtccccggttaatcccgatcctgtggcgctcgacgcccaccgggagtttctgcatagaccagctagtggttacgtcccagaggagatttggaagaaagcagaggaagccgtgaatgaggttaaacgccaggcaatgacagaactgcagaaagctgtgtctgaggctgagcgtaaagcccacgacatgataactacggagagggcgaagatggagcgcacagtggccgaagcaaagcgccaggcagcggaagacgccctggccgtcattaatcagcaagaagattccagcgagagttgctggaattgcggacgcaaagcgagcgaaacctgctccggctgtaatacagcccgatactgcggttccttttgccagcacaaggattgggagaaacaccatcacatttgcggccagacactgcaggctcagcaacaaggcgatacacccgctgtgtcctcgtctgttactcctaatagtggagcgggatctcctatggacaccccaccagccgcaactccgagatcaacaactcctggcaccccatccacaatagagactactcctcggtag

SEQ ID NO: 75942 - DNA, 1815 bp, Artificial Sequence
  derived and/or modified sequence
atgatcagcgtgaagagaaacacctggagagccctgagcctggtgatcggcgactgcagaaagaagggcaacttcgagtactgccaggacagaaccgagaagcacagcaccatgcccgacagccccgtggacgtgaagacccagagcagactgaccccccccaccatgccccccccccccaccacccagggcgcccccagaaccagcagcttcacccccaccaccctgaccaacggcaccagccacagccccaccgccctgaacggcgcccccagcccccccaacggcttcagcaacggccccagcagcagcagcagcagcagcctggccaaccagcagctgccccccgcctgcggcgccagacagctgagcaagctgaagagattcctgaccaccctgcagcagttcggcaacgacatcagccccgagatcggcgagagagtgagaaccctggtgctgggcctggtgaacagcaccctgaccatcgaggagttccacagcaagctgcaggaggccaccaacttccccctgagacccttcgtgatccccttcctgaaggccaacctgcccctgctgcagagagagctgctgcactgcgccagactggccaagcagaaccccgcccagtacctggcccagcacgagcagctgctgctggacgccagcaccaccagccccgtggacagcagcgagctgctgctggacgtgaacgagaacggcaagagaagaacccccgacagaaccaaggagaacggcttcgacagagagcccctgcacagcgagcaccccagcaagagaccctgcaccatcagccccggccagagatacagccccaacaacggcctgagctaccagcccaacggcctgccccaccccacccccccccccccccagcactacagactggacgacatggccatcgcccaccactacagagacagctacagacaccccagccacagagacctgagagacagaaacagacccatgggcctgcacggcaccagacaggaggagatgatcgaccacagactgaccgacagagagtgggccgaggagtggaagcacctggaccacctgctgaactgcatcatggacatggtggagaagaccagaagaagcctgaccgtgctgagaagatgccaggaggccgacagagaggagctgaactactggatcagaagatacagcgacgccgaggacctgaagaagggcggcggcagcagcagcagccacagcagacagcagagccccgtgaaccccgaccccgtggccctggacgcccacagagagttcctgcacagacccgccagcggctacgtgcccgaggagatctggaagaaggccgaggaggccgtgaacgaggtgaagagacaggccatgaccgagctgcagaaggccgtgagcgaggccgagagaaaggcccacgacatgatcaccaccgagagagccaagatggagagaaccgtggccgaggccaagagacaggccgccgaggacgccctggccgtgatcaaccagcaggaggacagcagcgagagctgctggaactgcggcagaaaggccagcgagacctgcagcggctgcaacaccgccagatactgcggcagcttctgccagcacaaggactgggagaagcaccaccacatctgcggccagaccctgcaggcccagcagcagggcgacacccccgccgtgagcagcagcgtgacccccaacagcggcgccggcagccccatggacaccccccccgccgccacccccagaagcaccacccccggcacccccagcaccatcgagaccacccccagatag

SEQ ID NO: 75943 - DNA, 1704 bp, Artificial Sequence
  derived and/or modified sequence
atgcccgacagccccgtggacgtgaagacccagagcagactgaccccccccaccatgccccccccccccaccacccagggcgcccccagaaccagcagcttcacccccaccaccctgaccaacggcaccagccacagccccaccgccctgaacggcgcccccagcccccccaacggcttcagcaacggccccagcagcagcagcagcagcagcctggccaaccagcagctgccccccgcctgcggcgccagacagctgagcaagctgaagagattcctgaccaccctgcagcagttcggcaacgacatcagccccgagatcggcgagagagtgagaaccctggtgctgggcctggtgaacagcaccctgaccatcgaggagttccacagcaagctgcaggaggccaccaacttccccctgagacccttcgtgatccccttcctgaaggccaacctgcccctgctgcagagagagctgctgcactgcgccagactggccaagcagaaccccgcccagtacctggcccagcacgagcagctgctgctggacgccagcaccaccagccccgtggacagcagcgagctgctgctggacgtgaacgagaacggcaagagaagaacccccgacagaaccaaggagaacggcttcgacagagagcccctgcacagcgagcaccccagcaagagaccctgcaccatcagccccggccagagatacagccccaacaacggcctgagctaccagcccaacggcctgccccaccccacccccccccccccccagcactacagactggacgacatggccatcgcccaccactacagagacagctacagacaccccagccacagagacctgagagacagaaacagacccatgggcctgcacggcaccagacaggaggagatgatcgaccacagactgaccgacagagagtgggccgaggagtggaagcacctggaccacctgctgaactgcatcatggacatggtggagaagaccagaagaagcctgaccgtgctgagaagatgccaggaggccgacagagaggagctgaactactggatcagaagatacagcgacgccgaggacctgaagaagggcggcggcagcagcagcagccacagcagacagcagagccccgtgaaccccgaccccgtggccctggacgcccacagagagttcctgcacagacccgccagcggctacgtgcccgaggagatctggaagaaggccgaggaggccgtgaacgaggtgaagagacaggccatgaccgagctgcagaaggccgtgagcgaggccgagagaaaggcccacgacatgatcaccaccgagagagccaagatggagagaaccgtggccgaggccaagagacaggccgccgaggacgccctggccgtgatcaaccagcaggaggacagcagcgagagctgctggaactgcggcagaaaggccagcgagacctgcagcggctgcaacaccgccagatactgcggcagcttctgccagcacaaggactgggagaagcaccaccacatctgcggccagaccctgcaggcccagcagcagggcgacacccccgccgtgagcagcagcgtgacccccaacagcggcgccggcagccccatggacaccccccccgccgccacccccagaagcaccacccccggcacccccagcaccatcgagaccacccccagatag

SEQ ID NO: 75944 - DNA, 408 bp, Artificial Sequence
  derived and/or modified sequence
atgatcagcgtgaagagaaacacctggagagccctgagcctggtgatcggcgactgcagaaagaagggcaacttcgagtactgccaggacagaaccgagaagcacagcaccatgcccgacagccccgtggacgtgaagacccagagcagactgaccccccccaccatgccccccccccccaccacccagggcgcccccagaaccagcagcttcacccccaccaccctgaccaacggcaccagccacagccccaccgccctgaacggcgcccccagcccccccaacggcttcagcaacggccccagcagcagcagcagcagcagcctggccaaccagcagctgccccccgcctgcggcgccagacagctgagcaagctgaagagattcctgaccaccctgcagcagtag

SEQ ID NO: 75945 - DNA, 177 bp, Artificial Sequence
  derived and/or modified sequence
atgatcagcgtgaagagaaacacctggagagccctgagcctggtgatcggcgactgcagaaagaagggcaacttcgagtactgccagggcgccagagcccagcaccccgccagcggcgacgccgcccccgcccccctgatggccctgctgagcgccgccacccacagcagaacctag

SEQ ID NO: 75946 - DNA, 165 bp, Artificial Sequence
  derived and/or modified sequence
atgatcagcgtgaagagaaacacctggagagccctgagcctggtgatcggcgactgcagaaagaagggcaacttcgagtactgccaggacagaaccgagaagcacagcaccatgcccgacagccccgtggacgtgaagacccagagcagactgacccccccctag

SEQ ID NO: 75947 - DNA, 690 bp, Artificial Sequence
  derived and/or modified sequence
atgatcagcgtgaagagaaacacctggagagccctgagcctggtgatcggcgactgcagaaagaagggcaacttcgagtactgccaggacagaaccgagaagcacagcaccatgcccgacagccccgtggacgtgaagacccagagcagactgaccccccccaccatgccccccccccccaccacccagggcgcccccagaaccagcagcttcacccccaccaccctgaccaacggcaccagccacagccccaccgccctgaacggcgcccccagcccccccaacggcttcagcaacggccccagcagcagcagcagcagcagcctggccaaccagcagctgccccccgcctgcggcgccagacagctgagcaagctgaagagattcctgaccaccctgcagcagttcggcaacgacatcagccccgagatcggcgagagagtgagaaccctggtgctgggcctggtgaacagcaccctgaccatcgaggagttccacagcaagctgcaggaggccaccaacttccccctgagacccttcgtgatccccttcctgaaggccaacctgcccctgctgcagagagagctgctgcactgcgccagactggccaagcagaaccccgcccagtacctggcccagcacgagcagctgctgctggacgccagcaccaccagccccgtggacagctag

SEQ ID NO: 75948 - DNA, 510 bp, Artificial Sequence
  derived and/or modified sequence
atgatcagcgtgaagagaaacacctggagagccctgagcctggtgatcggcgactgcagaaagaagggcaacttcgagtactgccaggacagaaccgagaagcacagcaccatgcccgacagccccgtggacgtgaagacccagagcagactgaccccccccaccatgccccccccccccaccacccagggcgcccccagaaccagcagcttcacccccaccaccctgaccaacggcaccagccacagccccaccgccctgaacggcgcccccagcccccccaacggcttcagcaacggccccagcagcagcagcagcagcagcctggccaaccagcagctgccccccgcctgcggcgccagacagctgagcaagctgaagagattcctgaccaccctgcagcagttcggcaacgacatcagccccgagatcggcgagagagtgagaaccctggtgctgggcctggtgaacagcaccctgaccatcgaggagttccacagcaagctgtag

SEQ ID NO: 75949 - DNA, 147 bp, Artificial Sequence
  derived and/or modified sequence
atgatcagcgtgaagagaaacacctggagagccctgagcctggtgatcggcgactgcagaaagaagggcaacttcgagtactgccaggacagaaccgagaagcacagcaccatgcccgacagccccgtggacgtgaagacccagtag

SEQ ID NO: 75950 - DNA, 363 bp, Artificial Sequence
  derived and/or modified sequence
atgatcagcgtgaagagaaacacctggagagccctgagcctggtgatcggcgactgcagaaagaagggcaacttcgagtactgccaggacagaaccgagaagcacagcaccatgcccgacagccccgtggacgtgaagacccagagcagactgaccccccccaccatgccccccccccccaccacccagggcgcccccagaaccagcagcttcacccccaccaccctgaccaacggcaccagccacagccccaccgccctgaacggcgcccccagcccccccaacggcttcagcaacggccccagcagcagcagcagcagcagcctggccaaccagcagctgccccccgcctgcggcgcctag

SEQ ID NO: 75951 - DNA, 258 bp, Artificial Sequence
  derived and/or modified sequence
atgatcagcgtgaagagaaacacctggagagccctgagcctggtgatcggcgactgcagaaagaagggcaacttcgagtactgccaggacagaaccgagaagcacagcaccatgcccgacagccccgtggacgtgaagacccagagcagactgaccccccccaccatgccccccccccccaccacccagggcgcccccagaaccagcagcttcacccccaccaccctgaccaacggcaccagccacagccccacctag

SEQ ID NO: 75952 - DNA, 285 bp, Artificial Sequence
  derived and/or modified sequence
atgatcagcgtgaagagaaacacctggagagccctgagcctggtgatcggcgactgcagaaagaagggcaacttcgagtactgccaggacagaaccgagaagcacagcaccatgcccgacagccccgtggacgtgaagacccagagcagactgaccccccccaccatgccccccccccccaccacccagggcgcccccagaaccagcagcttcacccccaccaccctgaccaacggcaccagccacagccccaccgccctgaacggcgcccccagccccccctag

SEQ ID NO: 75953 - DNA, 471 bp, Artificial Sequence
  derived and/or modified sequence
atgatcagcgtgaagagaaacacctggagagccctgagcctggtgatcggcgactgcagaaagaagggcaacttcgagtactgccaggacagaaccgagaagcacagcaccatgcccgacagccccgtggacgtgaagacccagagcagactgaccccccccaccatgccccccccccccaccacccagggcgcccccagaaccagcagcttcacccccaccaccctgaccaacggcaccagccacagccccaccgccctgaacggcgcccccagcccccccaacggcttcagcaacggccccagcagcagcagcagcagcagcctggccaaccagcagctgccccccgcctgcggcgccagacagctgagcaagctgaagagattcctgaccaccctgcagcagttcggcaacgacatcagccccgagatcggcgagagagtgagaaccctggtgctgggcctggtgtag

SEQ ID NO: 75954 - DNA, 591 bp, Artificial Sequence
  derived and/or modified sequence
gagggcgggcgagggagacgcagacgccgcctgtgacagtggcaattccctgcgccccacatcacatttgtctgccacagcagcaacaacagaaaagcggagggagggagggaggcgggaggaggggagcagagctccgcaagtcttgggctctgcgtggaggttgcgtttggctggcgtccccgaccccgggctttttgcacggcagctctctctgcgcagcgccgggcggccgtagtcgctccgcggcgcgactccgcggtctcgtggcgagcgcgcgtgggcgagtggccgcggacactctggcctcgcgagggaagccgcgccgcgtcctcgccccgtcgccccgcgggccggccgagacgacgggaagttttatttgcagctcggagcctgtggcggatggtgggactctccggccctgtgcagtatcgtactgagaagcactccacaatgccagactcacctgtggatgtgaagacgcaatctaggctgactcctccaacaatgccacctcccccaactactcaaggagctccaagaaccagttcatttacaccgacaacgttaactaatggcacgagccattct

SEQ ID NO: 75955 - protein, 615 aa, Artificial Sequence
  derived and/or modified sequence
MCHPDKAFTSDKLQCVFNEYKAAVWVPPRPRPLSRAPLPEDRTEKHSTMPDSPVDVKTQSRLTPPTMPPPPTTQGAPRTSSFTPTTLTNGTSHSPTALNGAPSPPNGFSNGPSSSSSSSLANQQLPPACGARQLSKLKRFLTTLQQFGNDISPEIGERVRTLVLGLVNSTLTIEEFHSKLQEATNFPLRPFVIPFLKANLPLLQRELLHCARLAKQNPAQYLAQHEQLLLDASTTSPVDSSELLLDVNENGKRRTPDRTKENGFDREPLHSEHPSKRPCTISPGQRYSPNNGLSYQPNGLPHPTPPPPQHYRLDDMAIAHHYRDSYRHPSHRDLRDRNRPMGLHGTRQEEMIDHRLTDREWAEEWKHLDHLLNCIMDMVEKTRRSLTVLRRCQEADREELNYWIRRYSDAEDLKKGGGSSSSHSRQQSPVNPDPVALDAHREFLHRPASGYVPEEIWKKAEEAVNEVKRQAMTELQKAVSEAERKAHDMITTERAKMERTVAEAKRQAAEDALAVINQQEDSSESCWNCGRKASETCSGCNTARYCGSFCQHKDWEKHHHICGQTLQAQQQGDTPAVSSSVTPNSGAGSPMDTPPAATPRSTTPGTPSTIETTPR

SEQ ID NO: 75956 - DNA, 1848 bp, Artificial Sequence
  derived and/or modified sequence
atgtgccatcccgataaagcttttacatccgacaagttacagtgtgtgtttaacgaatacaaagcagccgtgtgggttcccccgaggccgaggcccctgagccgggcaccactgcctgaggaccgcacagagaaacatagcactatgcccgatagtccagttgatgtgaaaacacagtcccggctaacaccgcccacaatgccaccccccccaacgacacagggcgcaccccggactagcagctttacccctactacacttacgaacggcacttcacatagtccaacagcactaaatggagcccccagtccaccgaatggattctccaacgggcccagctcatcaagtagttcaagtctggcgaaccagcagctccctccggcctgtggggcaagacaactttcgaagctgaagcggtttctcacaaccttacaacagttcggtaacgatataagtcccgagatcggtgagcgggtccggaccctggtgctgggcctggtaaactccaccttgaccattgaagaatttcatagtaagctgcaggaggccactaattttcccctcaggccttttgtcatacctttcctgaaagccaaccttcccttgttgcaaagggagctgcttcattgtgcacggctagccaagcagaatcctgcacagtatctggctcagcatgaacagttactactggacgcatccacaacatctccagtcgactcttcagaactcctgcttgacgtgaacgaaaatgggaagcggaggacaccagatcggacaaaggagaatggcttcgatagagaacccttgcatagtgaacaccccagcaagcggccctgcactatttctccagggcagcggtatagcccaaataacggcctgtcctaccagccgaacggtctgccgcacccaacaccacccccgcctcagcactacaggctggatgacatggcgatcgcccaccactatcgtgactcttatagacacccatcacatcgggacctccgtgaccggaacaggcctatgggcttacatgggactcgacaagaagagatgattgatcaccgtctgactgaccgggaatgggccgaggagtggaaacatctggaccacttgttgaattgtatcatggatatggtcgagaagacccgtcggtccctgacagtcctgagaagatgccaggaagctgaccgcgaggagctgaattactggattcgacgctactccgacgcagaggatctgaaaaagggtggagggagctccagctcacactcgcgtcagcagtcgcctgtgaaccctgacccggtggccttagacgcccatagggaatttctacaccggcccgcctctggttacgtgccggaggagatttggaaaaaggccgaggaggccgtgaatgaagtgaagcgccaggcaatgaccgaactgcagaaggcggtgtctgaagctgagagaaaggcacatgatatgatcacgaccgaacgggcaaagatggagcgcacagtcgcagaggcaaaacgacaagctgccgaggacgcccttgccgtaatcaaccagcaggaggactctagcgagagttgctggaactgcggacgcaaagcctcagagacttgctctggctgcaacaccgcaaggtactgcggatccttctgccagcacaaggattgggaaaagcatcaccacatatgcggccagaccttacaggcacaacagcaaggcgacacgccagccgtgagctctagtgtgacccccaacagcggggccggttctcctatggacactccccccgccgctactccccgctctacgacccccgggacccctagcaccattgagacgactccccgctag

SEQ ID NO: 75957 - DNA, 1848 bp, Artificial Sequence
  derived and/or modified sequence
atgtgccacccagacaaggccttcaccagtgacaagctgcagtgtgtgttcaatgagtacaaggctgctgtgtgggtgcccccccggccccggcccctgagccgggcccccctgcctgaggacagaacagagaagcacagcaccatgccagacagccctgtggatgtgaagacccagagccggctgaccccacccaccatgcctcctccacccaccacccagggcgcccccaggaccagcagcttcacccccaccaccctgaccaacggcaccagccacagccccacagccctgaatggagcccccagcccccccaacggcttcagcaatggccccagcagcagcagcagcagcagcctggccaaccagcagctgcccccagcctgtggggcccggcagctgagcaagctgaagcgcttcctgaccaccctgcagcagtttggaaatgacatcagccctgagattggagagcgggtgaggaccctggtgctgggcctggtgaacagcaccctgaccatcgaggagttccacagcaagctgcaggaggccaccaacttccccctgcggccctttgtgatccccttcctgaaggccaacctgcccctgctgcagcgggagctgctgcactgtgcccggctggccaagcagaacccagcccagtacctggcccagcacgagcagctgctgctggatgccagcaccaccagccctgtggacagcagcgagctgctgctggatgtgaatgaaaatggcaagaggaggaccccagacaggaccaaggaaaatggatttgaccgggagcccctgcacagcgagcaccccagcaagaggccctgcaccatcagccctggccagcgctacagccccaacaacggcctgagctaccagcccaacggcctgccccaccccaccccacctccaccccagcactaccgcctggatgacatggccatcgcccaccactacagagacagctaccgccaccccagccaccgggacctgcgggacaggaaccggcccatgggcctgcacggcacccggcaggaggagatgattgaccaccggctgacagaccgggagtgggccgaggagtggaagcacctggaccacctgctgaactgcatcatggacatggtggagaagaccaggaggagcctgactgtgctgcggcgctgccaggaggccgaccgggaggagctgaactactggatccgccgctacagtgatgctgaggacctgaagaagggcggcggcagcagcagcagccacagccggcagcagagccctgtgaacccagaccctgtggccctggatgcccaccgggagttcctgcacaggcctgccagcggctacgtgcctgaggagatctggaagaaggccgaggaggccgtgaatgaggtgaagaggcaggccatgacagagctgcagaaggctgtgtctgaggccgagaggaaggcccatgacatgatcaccacagagcgggccaagatggagaggacagtggccgaggccaagaggcaggccgcagaagatgccctggccgtcatcaaccagcaggaggacagcagcgagagctgctggaactgtggcaggaaggccagcgagacctgcagcggctgcaacacagcccgctactgcggcagcttctgccagcacaaggactgggagaagcaccaccacatctgtggccagaccctgcaggcccagcagcagggcgacaccccagctgtgagcagctctgtgacccccaacagcggggccggcagccccatggacaccccacctgctgccacccccaggagcaccaccccaggcacccccagcaccatcgagaccaccccaagatag

SEQ ID NO: 75958 - DNA, 2450 bp, Artificial Sequence
  derived and/or modified sequence
tataacactaccaaggtagcatctgcctaagccagaaataacaataggatataatataacctagttacaaatgaggtcctgccatctgtgctataccttcttaagtggggtttggatgataaaatcctgatttaaacgtcagtagataagtgtattttattgatagaagatgttgaatttcttctgttcacttgcttttaaaaaagataaaccccacttgaaaaactgaggtgcttaaggagtaaaataatatgttcctggtggcatcctccagatcgtactgagaagcactccacaatgccagactcacctgtggatgtgaagacgcaatctaggctgactcctccaacaatgccacctcccccaactactcaaggagctccaagaaccagttcatttacaccgacaacgttaactaatggcacgagccattctcctacagccttgaatggcgccccctcaccacccaatggcttcagcaatgggccttcctcttcttcctcctcctctctggctaatcaacagctgcccccagcctgtggtgccaggcaactcagcaagctgaaaaggttccttactaccctgcagcagtttggcaatgacatttcacccgagataggagaaagagttcgcaccctcgttctgggactagtgaactccactttgacaattgaagaatttcattccaaactgcaagaagctactaacttcccactgagaccttttgtcatcccatttttgaaggccaacttgcccctgctgcagcgtgagctcctccactgcgcaagactggccaaacagaaccctgcccagtacctcgcccagcatgaacagctgcttctggatgccagcaccacctcacctgttgactcctcagagctgcttctcgatgtgaacgaaaacgggaagaggcgaactccagacagaaccaaagaaaatggctttgacagagagcctttgcactcagaacatccaagcaagcgaccatgcactattagcccaggccagcggtacagtccaaataacggcttatcctaccagcccaatggcctgcctcaccctaccccacctccacctcagcattaccgtttggatgatatggccattgcccaccactacagggactcctatcgacaccccagccacagggacctcagggacagaaacagacctatggggttgcatggcacacgtcaagaagaaatgattgatcacagactaacagacagagaatgggcagaagagtggaaacatcttgaccatctgttaaactgcataatggacatggtagaaaaaacaaggcgatctctcaccgtactaaggcggtgtcaagaagcagaccgggaagaattgaattactggatccggcggtacagtgacgccgaggacttaaaaaaaggtggcggcagtagcagcagccactctaggcagcagagtcccgtcaacccagacccagttgcactagacgcgcatcgggaattccttcacaggcctgcgtctggatacgtgccagaggagatctggaagaaagctgaggaggccgtcaatgaggtgaagcgccaggcgatgacggagctgcagaaggccgtgtctgaggcggagcggaaagcccacgacatgatcacaacagagagggccaagatggagcgcacggtcgccgaggccaaacggcaggcggcggaggacgcactggcagttatcaatcagcaggaggattcaagcgagagttgctggaattgtggccgtaaagcgagtgaaacctgcagtggctgtaacacagcccgatactgtggctcattttgccagcacaaagactgggagaagcaccatcacatctgtggacagaccctgcaggcccagcagcagggagacacacctgcagtcagctcctctgtcacgcccaacagcggggctgggagcccgatggacacaccaccagcagccactccgaggtcaaccaccccgggaaccccttccaccatagagacaacccctcgctagacgtgaactcagaactgtcggaggaaagacaacacaaccaacgcgaaaccaattcctcatcctcagatgctcaaagttgttttttttgtttgtttgtttattagatgaattatcctatttcagtacttcagcaagagagaacctaactgtatcttgaggtggtagtaaaacacagagggccagtaacgggtcgtaatgacttattgtggataacaaagatatcttttctttagagaactgaaaagagagcagagaatataacatgaaatgatagatttgacctcctccctgttattttcaagtagctgggattttaaactagatgacctcattaaccgatgctttaccaaacagcaaaccaagagattgctaattgctgttgaaagcaaaaatgctaatattaaaagtcacaatgttctttatatacaataatggaaaaaaaaaaaaga

SEQ ID NO: 75959 - DNA, 1970 bp, Artificial Sequence
  derived and/or modified sequence
actcacacacaatgtgccatcctgacaaggcttttacttctgataagctccaatgtgtgtttaatgaatacaaagccgcggtctgggtgccgcctcggccgcggccgctctcccgcgctcctttgccagaagatcgtactgagaagcactccacaatgccagactcacctgtggatgtgaagacgcaatctaggctgactcctccaacaatgccacctcccccaactactcaaggagctccaagaaccagttcatttacaccgacaacgttaactaatggcacgagccattctcctacagccttgaatggcgccccctcaccacccaatggcttcagcaatgggccttcctcttcttcctcctcctctctggctaatcaacagctgcccccagcctgtggtgccaggcaactcagcaagctgaaaaggttccttactaccctgcagcagtttggcaatgacatttcacccgagataggagaaagagttcgcaccctcgttctgggactagtgaactccactttgacaattgaagaatttcattccaaactgcaagaagctactaacttcccactgagaccttttgtcatcccatttttgaaggccaacttgcccctgctgcagcgtgagctcctccactgcgcaagactggccaaacagaaccctgcccagtacctcgcccagcatgaacagctgcttctggatgccagcaccacctcacctgttgactcctcagagctgcttctcgatgtgaacgaaaacgggaagaggcgaactccagacagaaccaaagaaaatggctttgacagagagcctttgcactcagaacatccaagcaagcgaccatgcactattagcccaggccagcggtacagtccaaataacggcttatcctaccagcccaatggcctgcctcaccctaccccacctccacctcagcattaccgtttggatgatatggccattgcccaccactacagggactcctatcgacaccccagccacagggacctcagggacagaaacagacctatggggttgcatggcacacgtcaagaagaaatgattgatcacagactaacagacagagaatgggcagaagagtggaaacatcttgaccatctgttaaactgcataatggacatggtagaaaaaacaaggcgatctctcaccgtactaaggcggtgtcaagaagcagaccgggaagaattgaattactggatccggcggtacagtgacgccgaggacttaaaaaaaggtggcggcagtagcagcagccactctaggcagcagagtcccgtcaacccagacccagttgcactagacgcgcatcgggaattccttcacaggcctgcgtctggatacgtgccagaggagatctggaagaaagctgaggaggccgtcaatgaggtgaagcgccaggcgatgacggagctgcagaaggccgtgtctgaggcggagcggaaagcccacgacatgatcacaacagagagggccaagatggagcgcacggtcgccgaggccaaacggcaggcggcggaggacgcactggcagttatcaatcagcaggaggattcaagcgagagttgctggaattgtggccgtaaagcgagtgaaacctgcagtggctgtaacacagcccgatactgtggctcattttgccagcacaaagactgggagaagcaccatcacatctgtggacagaccctgcaggcccagcagcagggagacacacctgcagtcagctcctctgtcacgcccaacagcggggctgggagcccgatggacacaccaccagcagccactccgaggtcaaccaccccgggaaccccttccaccatagagacaacccctcgctagacgtgaactcagaactgtcggaggaaagacaacacaaccaacgcgaaaccaattcctcatcctcagatgctcaaagttgttttttttgtttgtttgtttattagatgaatt

SEQ ID NO: 75960 - DNA, 548 bp, Artificial Sequence
  derived and/or modified sequence
attttctgagttcccattatatagtgtcctatgtgtgttgctcttttccagtcagactcattagtagtctggtgtggagctagtagctcagagattgcttttatgaggcggttttggaatcttcatctgcccatgaaaatagaatagtccacttttaaaaaaagatcgtactgagaagcactccacaatgccagactcacctgtggatgtgaagacgcaatctaggctgactcctccaacaatgccacctcccccaactactcaaggagctccaagaaccagttcatttacaccgacaacgttaactaatggcacgagccattctcctacagccttgaatggcgccccctcaccacccaatggcttcagcaatgggccttcctcttcttcctcctcctctctggctaatcaacagctgcccccagcctgtggtgccaggcaactcagcaagctgaaaaggttccttactaccctgcagcagtttggcaatgacatttcacccgagataggagaaagagttcgcaccctcgttctgggactagtgaact

SEQ ID NO: 75961 - DNA, 2103 bp, Artificial Sequence
  derived and/or modified sequence
ttttcctccctctcccgctccgtctcacacgcaccctctgtttattttcctgcctccatctgggccctgctgatattgtaatcaccctgatgcacgttggcttctctcctctccctcctgcgctcacacactcactcacacacaatgtgccatcctgacaaggcttttacttctgataagctccaatgtgtgtttaatgaatacaaagccgcggtctgggtgccgcctcggccgcggccgctctcccgcgctcctttgccagaagatcgtactgagaagcactccacaatgccagactcacctgtggatgtgaagacgcaatctaggctgactcctccaacaatgccacctcccccaactactcaaggagctccaagaaccagttcatttacaccgacaacgttaactaatggcacgagccattctcctacagccttgaatggcgccccctcaccacccaatggcttcagcaatgggccttcctcttcttcctcctcctctctggctaatcaacagctgcccccagcctgtggtgccaggcaactcagcaagctgaaaaggttccttactaccctgcagcagtttggcaatgacatttcacccgagataggagaaagagttcgcaccctcgttctgggactagtgaactccactttgacaattgaagaatttcattccaaactgcaagaagctactaacttcccactgagaccttttgtcatcccatttttgaaggccaacttgcccctgctgcagcgtgagctcctccactgcgcaagactggccaaacagaaccctgcccagtacctcgcccagcatgaacagctgcttctggatgccagcaccacctcacctgttgactcctcagagctgcttctcgatgtgaacgaaaacgggaagaggcgaactccagacagaaccaaagaaaatggctttgacagagagcctttgcactcagaacatccaagcaagcgaccatgcactattagcccaggccagcggtacagtccaaataacggcttatcctaccagcccaatggcctgcctcaccctaccccacctccacctcagcattaccgtttggatgatatggccattgcccaccactacagggactcctatcgacaccccagccacagggacctcagggacagaaacagacctatggggttgcatggcacacgtcaagaagaaatgattgatcacagactaacagacagagaatgggcagaagagtggaaacatcttgaccatctgttaaactgcataatggacatggtagaaaaaacaaggcgatctctcaccgtactaaggcggtgtcaagaagcagaccgggaagaattgaattactggatccggcggtacagtgacgccgaggacttaaaaaaaggtggcggcagtagcagcagccactctaggcagcagagtcccgtcaacccagacccagttgcactagacgcgcatcgggaattccttcacaggcctgcgtctggatacgtgccagaggagatctggaagaaagctgaggaggccgtcaatgaggtgaagcgccaggcgatgacggagctgcagaaggccgtgtctgaggcggagcggaaagcccacgacatgatcacaacagagagggccaagatggagcgcacggtcgccgaggccaaacggcaggcggcggaggacgcactggcagttatcaatcagcaggaggattcaagcgagagttgctggaattgtggccgtaaagcgagtgaaacctgcagtggctgtaacacagcccgatactgtggctcattttgccagcacaaagactgggagaagcaccatcacatctgtggacagaccctgcaggcccagcagcagggagacacacctgcagtcagctcctctgtcacgcccaacagcggggctgggagcccgatggacacaccaccagcagccactccgaggtcaaccaccccgggaaccccttccaccatagagacaacccctcgctagacgtgaactcagaactgtcggaggaaagacaacacaaccaacgcgaaaccaattcctcatcctcagatgctcaaagttgttttttttgtttgtttgtttattagatgaatt

SEQ ID NO: 75962 - DNA, 1848 bp, Artificial Sequence
  derived and/or modified sequence
atgtgccaccccgacaaggccttcaccagcgacaagctgcagtgcgtgtttaatgagtataaagcagccgtgtgggtgcctcctaggccacggccactatctagggctccgctgcccgaagatcgaacagagaaacattccacaatgccagactcccccgttgatgtgaagactcagtcccgcctgaccccacccacaatgcctcctccacccactacccagggagccccaagaacctccagtttcacaccaaccactcttacaaatggaaccagtcatagcccgacagccctcaacggagccccctctccccctaatggattcagcaatggtccgtcctcatcatcctcaagttccctggctaaccagcagttacctccagcttgtggagctcggcaactgtccaaacttaaaaggttccttaccacactccaacagttcggcaatgacatctcaccagagattggggaaagggtgcgtacgctggtccttggactggtcaacagcacattgactatcgaggagttccactctaaattgcaggaggccacaaactttcctttgcggccctttgtaatcccctttctgaaagctaatctgcccctcctgcaacgcgaattactgcactgcgcccggttagccaaacaaaatccagcccagtacctggcgcagcacgaacaactgctgcttgacgcttcaacaacttcgccagtagattccagcgagctgctcctagacgtcaatgaaaacggaaagcgcagaaccccggaccgcacgaaggaaaacgggtttgacagggaacccctccactctgaacatccaagcaagcgtccatgtactatctcgcccggccagaggtactcccctaacaacggcttaagctaccagcccaatggtctgcctcatcctacacctcctcccccccagcattatcggctggacgatatggccattgcgcatcactaccgagacagttatcgacatccctctcacagggatctgagggataggaatagacctatggggctgcacgggacaagacaagaggagatgattgatcacaggcttactgatagggaatgggctgaggaatggaagcatttggatcatcttctcaactgcatcatggacatggtcgagaagactaggagatccttgaccgttcttcgacggtgccaggaggctgatagagaggagctgaattattggatccgccggtattcggatgccgaggacctgaagaagggcggagggtcatcatcttctcacagccggcaacagagtcccgtgaaccctgacccagtggccctggacgcccacagggaattcctgcataggcccgcatctggctatgttccggaggaaatctggaagaaagcagaagaggcggtgaatgaagtcaagcgccaagctatgacagagctccagaaggctgtgagtgaagcagaacgcaaggctcatgacatgataactaccgagcgggcgaagatggaaagaaccgtagccgaggccaaacggcaggcggcagaagacgccctggccgtcattaaccagcaagaggacagttctgagagttgttggaactgcggccggaaagcttcagaaacatgttctggctgtaacacagcccgctactgcggaagcttttgtcagcacaaagattgggaaaagcaccaccacatctgtggtcaaactctccaggcacagcagcagggggacacacctgctgtttctagctctgtgaccccgaacagtggcgccgggagccccatggatacgcctcccgcggctacaccccgctctaccacccctgggacaccctccaccatcgagaccacacctcgatag

SEQ ID NO: 75963 - DNA, 1848 bp, Artificial Sequence
  derived and/or modified sequence
atgtgtcatcccgacaaggcctttacatccgataagctgcaatgtgtgttcaacgagtataaggccgctgtgtgggtgccaccccgaccaaggccattgtcccgggctccactccctgaggatagaaccgaaaagcactcaacgatgcccgatagtcctgtcgacgtgaagactcagagccgactgacacccccaactatgccacctcctccgaccacacagggcgctcctcgcacgtcctctttcacccccaccaccctgacgaatggaacatcccattcccccactgccctaaatggagccccttcccctccaaacggattttccaacggacccagcagtagctcatcctcatcgctagccaaccagcagcttcctcccgcttgcggggcacgtcaactgtcaaaattgaaaagatttctcactactctgcaacagttcggtaacgatataagtcctgagatcggggaaagggtgagaacactagtactgggcttggtcaattcgacactgaccattgaagagttccattccaaactgcaggaggctacaaacttccccttgagacctttcgtgattcccttcctgaaggccaatttgccgctgctccaacgggagttgctgcattgtgctagacttgcaaagcagaatccggcacaatacctcgcccagcacgaacaactgctgttggatgccagtacaacttctccggtggattccagcgaactgttgctggacgtcaacgaaaatggaaaaagaaggacccccgatcgcacaaaggaaaatggcttcgatcgggagcctctgcactccgaacaccctagcaagagaccctgcaccatatctccgggtcagcgctattcaccgaacaacgggttgtcctaccaacccaacggactgcctcaccccacgccgccacctccccagcactataggctggacgacatggctatagctcatcattatagggattcttaccggcaccccagtcatcgggacctcagagacagaaaccggccaatgggactgcatggcaccagacaggaggaaatgatagatcatcgactaacagacagagagtgggctgaggagtggaaacacctagatcacctgctgaactgtattatggatatggtcgagaagactcgcagatcactgactgtgcttcgcagatgtcaggaggctgaccgcgaggagcttaactactggatcagacgatactctgatgcagaggacctcaagaaaggcggtgggagttcctcctcacattctcgacagcagagccctgtgaacccggacccagttgcactcgatgcgcacagagagtttctgcacagacccgcttccggatatgtccccgaggagatctggaaaaaagcggaggaggctgtgaatgaagttaagcggcaggccatgactgaacttcagaaggctgtgtctgaggcagagagaaaagcgcacgatatgattaccaccgaacgcgctaagatggagcgcacagttgccgaggcaaagcgacaggctgctgaagatgcattggccgtcattaatcagcaagaggattctagtgaatcctgttggaactgcggtagaaaagcttcagagacatgcagtggctgcaacactgctcgctattgtggaagtttctgccagcacaaggactgggaaaagcatcatcacatctgtggacagacgttgcaagcccagcagcagggagacactcctgccgtgtcctcctcagttacccctaacagtggggcagggtcaccaatggatacccctccagctgccacccctcgcagcacaaccccaggaacaccatctacaatagagaccactccgagatag

SEQ ID NO: 75964 - DNA, 1848 bp, Artificial Sequence
  derived and/or modified sequence
atgtgccaccccgacaaggccttcaccagcgacaagctgcagtgcgtgttcaacgagtacaaggccgccgtgtgggtgccccccagacccagacccctgagcagagcccccctgcccgaggacagaaccgagaagcacagcaccatgcccgacagccccgtggacgtgaagacccagagcagactgaccccccccaccatgccccccccccccaccacccagggcgcccccagaaccagcagcttcacccccaccaccctgaccaacggcaccagccacagccccaccgccctgaacggcgcccccagcccccccaacggcttcagcaacggccccagcagcagcagcagcagcagcctggccaaccagcagctgccccccgcctgcggcgccagacagctgagcaagctgaagagattcctgaccaccctgcagcagttcggcaacgacatcagccccgagatcggcgagagagtgagaaccctggtgctgggcctggtgaacagcaccctgaccatcgaggagttccacagcaagctgcaggaggccaccaacttccccctgagacccttcgtgatccccttcctgaaggccaacctgcccctgctgcagagagagctgctgcactgcgccagactggccaagcagaaccccgcccagtacctggcccagcacgagcagctgctgctggacgccagcaccaccagccccgtggacagcagcgagctgctgctggacgtgaacgagaacggcaagagaagaacccccgacagaaccaaggagaacggcttcgacagagagcccctgcacagcgagcaccccagcaagagaccctgcaccatcagccccggccagagatacagccccaacaacggcctgagctaccagcccaacggcctgccccaccccacccccccccccccccagcactacagactggacgacatggccatcgcccaccactacagagacagctacagacaccccagccacagagacctgagagacagaaacagacccatgggcctgcacggcaccagacaggaggagatgatcgaccacagactgaccgacagagagtgggccgaggagtggaagcacctggaccacctgctgaactgcatcatggacatggtggagaagaccagaagaagcctgaccgtgctgagaagatgccaggaggccgacagagaggagctgaactactggatcagaagatacagcgacgccgaggacctgaagaagggcggcggcagcagcagcagccacagcagacagcagagccccgtgaaccccgaccccgtggccctggacgcccacagagagttcctgcacagacccgccagcggctacgtgcccgaggagatctggaagaaggccgaggaggccgtgaacgaggtgaagagacaggccatgaccgagctgcagaaggccgtgagcgaggccgagagaaaggcccacgacatgatcaccaccgagagagccaagatggagagaaccgtggccgaggccaagagacaggccgccgaggacgccctggccgtgatcaaccagcaggaggacagcagcgagagctgctggaactgcggcagaaaggccagcgagacctgcagcggctgcaacaccgccagatactgcggcagcttctgccagcacaaggactgggagaagcaccaccacatctgcggccagaccctgcaggcccagcagcagggcgacacccccgccgtgagcagcagcgtgacccccaacagcggcgccggcagccccatggacaccccccccgccgccacccccagaagcaccacccccggcacccccagcaccatcgagaccacccccagatag

SEQ ID NO: 75965 - protein, 961 aa, Artificial Sequence
  derived and/or modified sequence
MRWPQPGAAARLPPESPGPPESPGPPEREAAAARRWTGAEPQDCAPGSGRPEKPPQLSEDDIWLKSEGDNYSATLLEPAASSLSPDHKNMEIEVSVAECKSVPGITSTPHPMDHPSAFYSPPHNGLLTDHHESLDNDVAREIRYLDEVLEANCCDSAVDGTYNGTSSPEPGAVVLVGGLSPPVHEATQPEPTERTASRQAPPHIELSNSSPDPMAEAERTNGHSPSQPRDALGDSLQVPVSPSSTTSSRCSSRDGEFTLTTLKKEAKFELRAFHEDKKPSKLFEDDEHEKEQYCIRKVRPSEEMLELEKERRELIRSQAVKKNPGIAAKWWNPPQEKTIEEQLDEEHLESHKKYKERKERRAQQEQLLLQKQLQQQQQQPPSQLCTAPASSHERASMIDKAKEDIVTEQIDFSAARKQFQLMENSRQAVAKGQSTPRLFSIKPFYRPLGSVNSDKPLTNPRPPSVGGPPEDSGASAAKGQKSPGALETPSAAGSQGNTASQGKEGPYSEPSKRGPLSKLWAEDGEFTSARAVLTVVKDDDHGILDQFSRSVNVSLTQEELDSGLDELSVRSQDTTVLETLSNDFSMDNISDSGASNETTNALQENSLADFSLPQTPQTDNPSEGRGEGVSKSFSDHGFYSPSSTLGDSPLVDDPLEYQAGLLVQNAIQQAIAEQVDKAVSKTSRDGAEQQGPEATVEEAEAAAFGSEKPQSMFEPPQVSSPVQEKRDVLPKILPAEDRALRERGPPQPLPAVQPSGPINMEETRPEGSYFSKYSEAAELRSTASLLATQESDVMVGPFKLRSRKQRTLSMIEEEIRAAQEREEELKRQRQVLQSTQSPRTKNAPSLPSRTCYKTAPGKIEKVKPPPSPTTEGPSLQPDLAPEEAAGTQRPKNLMQTLMEDYETHKSKRRERMDDSSYTSKLLSCKVTSEVLEATRVNRRKSALALRWEAGIYANQEEEDNE

SEQ ID NO: 75966 - DNA, 2886 bp, Artificial Sequence
  derived and/or modified sequence
atgcgatggccccagcctggagcagctgccagacttccacctgagagtcctgggccccccgagtctccggggcctccggaaagagaggctgctgccgccaggcgatggactggagcagaaccccaggactgcgctccgggaagtggaagaccagaaaaacccccgcagctttccgaggatgacatttggctcaagagcgaaggcgacaactatagcgcaacattactggagcctgctgcaagttctctgtcaccagatcataagaacatggagattgaggtatctgttgccgagtgcaaaagcgtgcccggcatcacctctacgccccaccccatggaccaccctagcgctttttacagcccaccccataatggcttactgacggaccaccacgagagcttggacaacgatgtcgctcgcgaaatccgctacttagacgaagtgctggaagcaaattgttgcgactctgctgttgatggcacttacaacggtacatctagccctgagccaggtgcggtggtgctcgtcgggggtttaagtccgccggttcatgaggccacccagcctgaacctacagagaggactgcctctagacaggccccacctcacatagagctcagcaatagttccccggacccaatggccgaggctgagagaaccaacggccacagtcccagtcaaccgagggatgctctgggagactcactgcaggtccccgtttccccgagctctacaacaagctctcggtgttctagtagagatggggagttcacattaaccaccctgaagaaggaagcaaaatttgagcttagggcatttcacgaggacaaaaagccctcgaaactttttgaagacgatgagcacgagaaggaacaatactgtatacgcaaagtcagaccttctgaggaaatgctggagcttgaaaaagagagacgggagttgatccggtcacaagccgtcaaaaaaaatcctgggatcgcagccaagtggtggaaccccccacaggagaagaccatcgaagagcagctggacgaagagcatctcgaatctcacaagaagtacaaagaacgcaaagaacgccgagctcagcaggagcagttgctgttgcagaagcagcttcagcagcagcagcagcagcccccttcccagctgtgtaccgcccctgcgtcctcacacgaaagggcctctatgatcgacaaagccaaggaagatatcgtgacagaacagattgatttttccgctgccagaaaacagttccagctgatggagaacagccggcaggcagttgcgaaggggcagtcaacccctaggcttttctccattaaaccattttatcgccctcttgggtcagtgaatagtgataaaccgctgactaatcctcgaccgcctagtgtgggcggcccaccagaggattcaggagcatccgccgcgaaagggcagaaatcccctggtgccctggagactccaagtgctgccgggagccaagggaacactgcatcccagggaaaggaaggaccctattctgagccgtctaagcgcgggcctctcagcaaactctgggctgaagacggtgaattcaccagcgcccgcgcagtcttgaccgtcgttaaggacgatgaccatggcatcctggatcagttctctcggtctgtgaatgtgtctttaacgcaggaggagctggacagtggcctggatgaactttcggtacggagtcaagatacaaccgtgctcgagacactctccaatgacttttctatggataatatcagcgactccggggcatccaatgagacaacgaatgctctccaggagaactctctggcagacttctcacttcctcagactccccaaaccgacaaccctagcgagggcagaggggagggagtgtcaaagtccttctcggatcatggtttttactcaccatcgtcgacgctcggcgacagtccgctggtggacgaccccttggaatatcaggcagggctcttagtgcagaatgccatccagcaggccatcgccgaacaggtggataaggctgtatctaaaacctctagggacggcgctgagcagcagggtcctgaggccactgtcgaggaagctgaggccgctgcttttggcagcgaaaaaccacagtctatgttcgaacccccccaagttagtagcccagtgcaagaaaagcgtgatgtgttgccaaagattctgcctgcagaagacagggccttaagagaacggggaccaccccagcctcttccagctgtgcagcctagtgggcctataaacatggaagagacacgaccagagggaagctacttctctaagtactcggaagcagctgagctgaggtctacggcttccttgctcgccactcaggaaagcgatgttatggtgggaccctttaaactgaggtcacgaaaacaacgtactctctcaatgatagaagaggagatccgcgcggctcaggaaagagaggaggagctaaagagacagcgccaggtcctgcaaagtacccagtccccaagaacaaagaacgcaccgagcttgccatctcgtacctgctacaaaaccgcccccgggaagattgagaaggttaagccaccccccagccctacaaccgaggggccctccctgcagccagacctcgcgccggaagaggccgccggaacacagaggcccaaaaacttaatgcagacattaatggaggactatgagacacacaagtctaaacggcgggagaggatggatgacagcagctacaccagcaaactgcttagttgtaaggtaacaagcgaggtcctggaagctactagagtgaatcggcgtaagtcagccctcgccctgcgatgggaggccggcatttacgctaatcaggaagaagaggacaacgagtag

SEQ ID NO: 75967 - DNA, 2886 bp, Artificial Sequence
  derived and/or modified sequence
atgcgctggccccagcccggggctgctgcccggctgcccccagagagccctggccccccagagagccctggccccccagagcgggaggccgccgccgcccggcgctggacaggagctgagccccaggactgtgcccctggcagcggccggcctgagaagccaccccagctgtctgaagatgacatctggctgaagtctgagggggacaactacagcgccaccctgctggagcctgctgccagcagcctgagcccagaccacaagaacatggagattgaggtgtctgtggccgagtgcaagtctgtgcccggcatcaccagcaccccccaccccatggaccaccccagcgccttctacagccccccccacaacggcctgctgacagaccaccacgagagcctggacaatgatgtggcccgggagatccgctacctggatgaggtgctggaggccaactgctgtgacagcgctgtggatggcacctacaacggcaccagcagccctgagcccggggctgtggtgctggtgggcggcctgagcccccctgtgcatgaggccacccagcctgagcccacagagaggacagccagccggcaggccccaccccacatcgagctgagcaacagcagcccagaccccatggccgaggccgagaggaccaacggccacagccccagccagcccagagatgccctgggggacagcctgcaggtgcctgtgagccccagcagcaccaccagcagccgctgcagcagcagagatggagagttcaccctgaccaccctgaagaaggaggccaagtttgagctgcgggccttccacgaggacaagaagcccagcaagctgtttgaagatgatgagcacgagaaggagcagtactgcatcaggaaggtgcggcccagcgaggagatgctggagctggagaaggagcggcgggagctgatccgcagccaggccgtgaagaagaaccctggcattgctgccaagtggtggaaccccccccaggagaagaccatcgaggagcagctggatgaggagcacctggagagccacaagaagtacaaggagaggaaggagcggcgggcccagcaggagcagctgctgctgcagaagcagctgcagcagcagcagcagcagccccccagccagctgtgcacagccccagccagcagccatgagcgggcctccatgattgacaaggccaaggaggacatcgtgacagagcagattgacttctctgctgccaggaagcagttccagctgatggagaacagccggcaggccgtggccaagggccagagcacccccaggctcttcagcatcaagcccttctaccggcccctgggctctgtgaacagcgacaagcccctgaccaacccccggccccccagcgtgggcggccccccagaggacagcggggccagcgctgccaagggccagaagagccctggggccctggagacccccagcgctgctggcagccagggcaacacagccagccagggcaaggagggcccctacagcgagcccagcaagaggggccccctgagcaagctgtgggccgaggatggagagttcaccagcgcccgggctgtgctgactgtggtgaaggatgatgaccacggcatcctggaccagttcagccgctctgtgaatgtgtccctgacccaggaggagctggacagcggcctggatgagctgtctgtgcgcagccaggacaccaccgtgctggagaccctgagcaatgacttctccatggacaacatcagtgacagcggggccagcaatgagaccaccaatgccctgcaggagaacagcctggccgacttcagcctgccccagaccccccagacagacaaccccagcgagggccgcggggagggcgtgtccaagagcttcagtgaccacggcttctacagccccagcagcaccctgggggacagccccctggtggatgaccccctggagtaccaggccggcctgctggtgcagaatgccatccagcaggccatcgccgagcaggtggacaaggctgtgtccaagaccagcagagatggagctgagcagcagggccctgaggccaccgtggaggaggccgaggccgccgccttcggcagcgagaagccccagagcatgtttgagcccccccaggtgagcagccctgtgcaggagaagagagatgtgctgcccaagatcctgcctgctgaggaccgggccctgcgggagcggggccccccccagcccctgcctgctgtgcagcccagcggccccatcaacatggaggagaccaggcctgagggcagctacttcagcaagtacagcgaggccgctgagctgcggagcacagccagcctgctggccacccaggagagtgatgtgatggtgggccccttcaagctgcggagcaggaagcagaggaccctgtccatgattgaggaggagatccgggccgcccaggagcgggaggaggagctgaagaggcagaggcaggtgctgcagagcacccagagccccaggaccaagaatgcccccagcctgcccagcaggacctgctacaagacagcccctgggaagattgagaaggtgaagcccccacccagccccaccacagagggccccagcctgcagcctgacctggcccctgaggaggccgccggcacccagaggcccaagaacctgatgcagaccctgatggaggactatgagacccacaagagcaagaggcgggagaggatggatgacagcagctacaccagcaagctgctgagctgcaaggtgaccagcgaggtgctggaggccaccagggtgaacagaaggaagagcgccctggccctgcgctgggaggccggcatctatgccaaccaggaggaggaggacaatgaatag

SEQ ID NO: 75968 - DNA, 2886 bp, Artificial Sequence
  derived and/or modified sequence
atgcggtggccccagcccggcgccgccgcccggctgccccccgagagtcctggacccccagaatcccccggaccccccgaacgagaggcagccgcggcacggaggtggactggcgccgaaccgcaggactgcgcccctgggagtgggcggcccgaaaagcctccgcagctgtccgaagacgacatctggttgaagagcgagggtgataattattccgctacactgcttgagcctgctgcatcaagcctctctccggatcacaagaacatggaaatagaggttagcgttgccgagtgcaagagcgtgccaggtatcacttcaacaccccacccgatggaccacccgtccgccttctactcgccgccccacaatggactcctgaccgaccaccatgaaagcctcgacaatgatgtggcccgtgaaattcggtatctggacgaggtcttggaagccaattgctgtgacagtgctgttgacgggacttataacgggacatcttctcccgagccgggagctgttgtgctagtgggaggtctgtcccctcccgtgcacgaggcaacccagcctgaacccaccgagaggactgcatccaggcaggcccccccgcacatcgaattatcaaactctagccctgacccaatggccgaagccgagaggactaacggccattcaccatctcagccccgggatgcattgggggattctctccaggttcccgtgagcccttcaagcaccacctctagccggtgctcatctcgggatggcgaattcaccctgactactctaaaaaaagaagcaaagtttgagctgagggctttccacgaggataaaaaaccgtctaaactgttcgaggatgatgagcacgagaaggagcagtactgtattagaaaggtgagaccctctgaagagatgttggaactggagaaggagaggcgagaactcatccgctcacaggcagtgaaaaagaatccaggaatcgcagctaagtggtggaaccccccacaggagaagactatcgaggaacagctggatgaagagcatctcgagagtcacaaaaaatacaaggaacggaaggaacggcgggcccagcaagaacagttgctgctccaaaagcagctacagcagcaacagcagcagccaccctctcaactctgcaccgctcccgcatcttcacatgaacgcgcgtctatgattgacaaggctaaagaagacatcgtgaccgaacagatagatttctcagccgctcgaaagcagttccagctgatggagaattcccgccaagctgtcgccaagggtcaaagcacccccagactcttcagcatcaaacccttttataggcctctgggatctgtgaattcagacaaaccattgactaacccccggcctccatccgtgggtggacccccagaggattccggcgcctctgccgccaaaggacaaaagagtccaggcgcccttgaaaccccctccgccgcggggagccagggcaacactgcctcccaaggtaaggagggcccttacagtgaaccatccaagaggggtcctctctctaagctgtgggcagaagatggagagttcacctcggctcgagccgtgctgaccgtcgtgaaggacgatgaccatggcatcctggaccagttttcccggagcgttaacgttagtcttacacaggaggagctggacagcggcttagacgaactgagtgtgaggagtcaggacactaccgttctcgagacgctgtctaatgacttctccatggataatatcagcgactccggcgcatctaacgagacaacgaacgccttgcaggagaacagtctggcagatttttccttgcctcagaccccacagacagataatccaagtgaggggcgtggagaaggagtatcaaagagcttcagcgatcacggcttttatagtccatccagtactctgggcgattcacctttggtcgatgatcccttggaataccaggctggtctcctggtgcaaaatgccatccagcaggcgatcgccgaacaggtcgacaaggccgtctccaagacttctagagacggagcggaacaacaggggccagaagccacagtggaggaggcagaagctgctgcctttggcagcgaaaagccccagagcatgttcgaacctccacaggtgagctcccccgttcaggaaaaaagagatgtgctgccaaaaatcctgccagcagaagatagggctttgagggagcgtggcccgccccagccactccccgcagtgcagccttcgggacccattaacatggaggagactaggcccgagggctcatatttctcaaaatactctgaggccgcggaactgaggagtactgcttcgctgctggctacacaagaaagtgacgtgatggtggggccttttaagctcagatcaagaaagcagcggactttaagtatgatagaggaagagattagagccgctcaggagcgtgaggaagaactgaagcgccaacggcaggtccttcagtcaacacaaagtcctcggaccaaaaatgcccccagtctgcccagcaggacctgttataaaactgccccgggaaaaattgagaaggtgaagccccccccgagtcctactacggaaggcccttctctacagccggacctggccccagaggaggccgccggcactcagaggcctaagaatttgatgcagaccctcatggaggactacgaaacacacaagtcgaagcgacgcgaacggatggacgattcctcatatactagtaagttgctctcttgtaaggtgacgagtgaagttctagaagctacccgcgtgaaccgcagaaaatccgcattggctctacgatgggaagctggaatttacgctaaccaggaggaagaagataatgagtag

SEQ ID NO: 75969 - DNA, 2886 bp, Artificial Sequence
  derived and/or modified sequence
atgagatggccccaacccggagcggcagccaggcttcctcccgagagccccggacccccagaatctccaggccctccagaaagggaggccgctgctgccaggcggtggacgggggctgagccacaggactgcgccccaggtagcggccgaccggaaaagcccccacagctcagtgaagatgacatttggctgaagagcgagggcgataactacagtgctaccttactcgagcccgcagcctctagcctgtcaccagaccacaaaaatatggagatcgaggtatccgtggctgagtgcaaaagtgtgcccggaatcacatcaactccccaccccatggaccacccatccgccttttacagtccgcctcacaatggtctgctgactgaccaccatgaaagcttggacaatgatgtagcacgagagatccggtatctggatgaagtactggaggccaattgttgcgacagcgccgttgacggtacttataacggaacaagctctcccgagcccggtgcagtggtgcttgttgggggactaagcccccctgtgcacgaggccacccagcccgaacccactgaaaggacggcttcacgacaagcacctccccatatcgagctgagcaacagcagccctgatccaatggccgaggcagagcggaccaacgggcacagtccctcccaaccccgagacgccctgggagactccctgcaagtgccagtgtccccatcaagcacaacctctagcagatgtagctcacgagacggcgagtttacactaacaaccctgaaaaaagaggcaaagtttgagctccgggctttccacgaggacaagaagccctccaagcttttcgaagatgacgagcacgaaaaggaacaatactgtattaggaaagtaagaccgtctgaggaaatgctcgaactcgagaaagaaaggcgtgagctcattagaagccaggcggtcaagaagaatcctgggatcgccgctaaatggtggaaccctcctcaggaaaaaacaatcgaagagcagctggatgaagaacacctggagtcccataagaagtataaggaacggaaagagcgcagggcgcaacaggagcaacttcttctacagaaacaactccagcagcagcagcagcagccaccctcccagctgtgtactgctcctgccagctcacacgagcgcgctagcatgatagacaaggccaaggaggacattgtcacggagcagatcgatttcagcgccgcaagaaagcagtttcagctgatggaaaattctcgacaggccgtcgctaagggccagagtaccccacgcctgttcagtatcaagccattttaccgtcctttagggagcgtgaattctgacaagccactcactaacccacggcctccaagcgtgggcggaccaccagaagactcgggcgcatctgccgctaagggccagaaatcacccggagctctggaaactccctcagcagccggttcccaaggcaatacggcgagccagggtaaagaaggcccttacagcgaaccgagtaagcggggacccctttcaaaactgtgggccgaggatggcgaattcacttctgctcgcgctgtgctgaccgtcgtaaaggatgatgaccacggaatccttgaccagttctcgagaagcgtcaacgtcagtctcacacaggaagaattggactccggactggatgagcttagcgtgcgtagtcaagatactactgtgctggaaacgctcagtaatgattttagtatggacaatatcagtgacagtggggctagcaacgaaaccacgaatgccctacaggaaaattctctcgcagatttttcactgcctcagaccccccaaaccgataaccctagcgaaggccgtggagagggcgtgagtaagagcttttcggatcatggcttttattctcctagttctaccctgggcgattctccactcgtggatgaccctctggagtatcaggcgggtcttctggttcagaacgccatccagcaggccattgctgagcaagttgataaagccgtatccaagacatcccgggatggcgctgagcagcaaggaccggaagccaccgtggaggaagcggaggcagctgccttcgggagtgagaagccccagtcaatgttcgaaccacctcaagtgagctcccctgtgcaggagaagcgcgacgtccttcctaagatcctcccagccgaggatcgcgctctgagagagcgcggaccgcctcagcccctcccagccgtgcagcctagcgggccaatcaacatggaggaaactagacccgagggctcctacttctcaaagtactctgaggccgctgaactgaggagcactgcttcactgctggccactcaggaatctgatgtgatggtgggacccttcaagctgcggtcacgcaaacagaggacccttagtatgattgaagaggagatccgtgccgctcaggaacgggaggaggaactgaaacggcagaggcaagttctccaaagtactcagtcccctcggaccaaaaatgctccttccctgccatccagaacttgttataaaacagcaccgggaaagatcgaaaaagtcaaacccccaccttctccaacgaccgaaggcccatctctgcagcctgacctggcgcctgaggaagccgctggtacgcagaggcctaaaaacctgatgcagacactgatggaagactacgagactcataaaagcaaacggagggaacgtatggacgactcatcatacaccagcaaactgctaagttgcaaggttactagtgaggttctggaagccacaagggttaatcggcgaaagagcgctctggcgttgcgatgggaggccggtatttatgctaaccaggaggaggaggacaacgagtag

SEQ ID NO: 75970 - DNA, 4400 bp, Artificial Sequence
  derived and/or modified sequence
tactggaggggaagcgaggaggcggggaaggggcgggccccaggagcaggcgggcggggctccccgccctccagcgcgcccggaggctaccactccctgcagatgcgctggccccagcccggggctgccgctcgccttcccccggagtctcctggacccccggagtctcctggacccccggagcgggaggcagcggccgcgcggcgctggactggagcagaaccccaggactgcgcccccgggagcgggcgcccagagaagcctccccagctttctgaggatgatatctggctaaaaagcgagggagacaactatagtgccaccctcctggagcctgctgccagctctctttccccagatcacaaaaacatggaaattgaggtgtctgttgcagaatgtaaaagtgttcctggaatcacctctaccccacatcccatggaccatccctccgctttctattcacccccgcataatggcctccttactgatcaccacgaatccctggataatgatgttgccagagagatccgctatctagatgaggtgctagaggccaactgctgtgattctgctgtggatggaacgtacaatggaacatcctccccagagcctggtgcagtggttctggtgggcggcctaagcccccctgtccacgaggcgacccagccagaacccactgaaagaacagctagccggcaggcacctcctcacatcgagctcagtaatagcagccctgaccccatggcagaggcagaaagaacaaatggccattcccccagccagcctagagatgcgctgggggacagcctgcaggtgcctgtcagccccagctccacaaccagctcacggtgttcttcccgagatggagagttcactctcaccacactgaaaaaggaggccaagtttgagctgcgtgccttccatgaggacaagaagccctccaagctctttgaggatgacgagcatgagaaagaacaatactgcattagaaaagtgaggccttcagaggagatgctggagctggaaaaggagaggagagagctcatccgcagccaggccgtcaagaagaatcctggcattgcagcaaaatggtggaatcccccgcaggaaaaaaccatcgaggagcagctggacgaggaacatctggagtcgcacaaaaagtacaaggagcgcaaagagagaagggcacagcaggaacagttgctgctgcagaagcagttacagcagcagcagcagcagcccccatcgcagctctgcacagcccctgcctcttctcatgaacgcgcaagcatgattgacaaagcaaaggaggacattgtcacagagcagatagatttctctgctgctcgcaaacaatttcagctgatggagaattccaggcaagcggtggccaagggccagagtacacccaggctgttctccatcaagcctttctacaggcctctggggtcagtcaactcagacaagccactgactaatccgagaccaccttctgtcgggggacctccagaagacagtggtgcctcagccgccaagggacagaaatcccccggtgccctggagaccccatcggcagcaggaagccagggcaacacagcctctcaggggaaggaagggccctacagcgagccttctaaacgtgggcccttatctaaactgtgggctgaggatggagaatttacgagcgcccgggctgtcctcactgtggtcaaggatgatgaccatgggattttggatcagttctcaagatctgtcaatgtctccttgacccaagaggagcttgactctggtctggacgaattgtcggtgaggtctcaggataccacagtcctggagaccctatccaatgatttcagcatggacaacatcagtgacagcggggcatccaatgagacaaccaatgccctccaggaaaattcactggctgatttttctctgccccagacaccacaaactgacaacccctcagagggccgaggagaaggcgtctccaagtcatttagtgatcatggtttctattccccttcctccacgctgggggactctccgttggttgatgaccccttggagtatcaggctggcctcctggtgcagaatgccattcaacaagccatagccgagcaggtggataaagctgtgtccaaaaccagcagggatggagcagagcaacagggacctgaagcgactgtagaggaagctgaagctgcggctttcggctcagaaaagcctcagagcatgtttgagccacctcaggtgtcttctcctgttcaagagaaaagggatgtattaccaaagattctgcctgctgaagacagggcgctcagggaaagggggcccccccagccactgccagctgtgcagcccagtggcccgattaacatggaggagaccaggcccgaaggaagctatttcagcaagtactcggaggcagctgagctgagaagcacagcctccctcctggccactcaagaatctgacgtgatggttgggcctttcaagctgaggtccaggaaacagcggactttgtccatgattgaggaagagatccgagcagctcaggaaagggaagaggagctgaagaggcagagacaagtcttgcagagtacgcagagccccaggacaaagaatgccccatcactgccctccagaacatgctacaaaactgctccagggaaaatagagaaagtcaaacctcctccatcccccaccactgaaggccccagcttgcagcctgacttagcccctgaagaggctgccggaacccagcggcccaagaatctgatgcagaccctcatggaagactatgagacacacaaatctaaaaggcgcgagagaatggatgatagtagttacacttctaagttactgtcttgcaaggtgacttccgaggtcctcgaggccacacgggttaatcgaagaaagagcgcactggctttgcgctgggaagcagggatctatgccaaccaggaggaagaagacaacgaataaacttccttcaacccaggaagcgtctttggtgcttgggagaccaagaaaccaagaaattaacaactgaaagcattttaatggactatttattaaagtgcaaacaaactcagcaatccttatgtagaccagaagctgcaatatacaatgatgaaaatgaaacgaaaaggaagtccccccatcagactctggacacccaggaatcaaaagagaaaggacttttttggtgactcaatcccagtgtctggtttggggccaatctacaatggatccaaaaggacaaaacatgttacaagcaaatcaacatagttgctgcaggcggaactgagaccagcctctctgggcgatgaaggacaatggtggtagggccacttagagagcagtagggcccaggctggtgcagcctacatggcacaggatatttccctgcaccagtttcccacctgtcacttgcagcatcagagggtgttgcattaactccattttctccagcagccataaaatgaatggcgtttctctccatatttgcccagaagaggcagttatgattccacttctcctacatttaattatttttaattgagaacaactcatgatcacaattcataaaatccatattttaagacaatagttcttcatgtcacaaacacaatctattctacatgaggaggctgagaaaggggaagagaaaaacaaaccaaatggatgatgttagctttaggatcgtgtctgcttataatattcactgatctgcagtttatgagaacacattttcacagttatgtttcttcataggaaaactatatttagtgggcaacaactatttttatgatgggatgggggagtatatacacgtatagaatctgtacgcgttgaacaacttggttcaagatggtgggggcatttttagagcggcaataattgaaaaaaaaggcgaactctgccttggagaggtagatgataagaaataaaaaggtgtttataactattttgtattataaagtgggccttagagataggaagaagaatgatggattccttttggatcaatcagaaaggaaacacgaaagaaaagtcaggaaggtagagagagaaaaagggagggaaggagaaagaatgggaataaaataaggaggtaagagatactatttttgctgagcaaccagtgtgtttcaggatgatacaaagaaaaatatagaatagaaataagtgcaggcttggaatcagctacaaatcctaaagatggggtgtgtgtggatgtgtgtgtgtgtgtgtgtacaccattgtgtgtttgtaaaatgtgtatgttcatgagtaagggtgtgtgtgtgtgtgtattaaaattccagagtgaccgtggcacttgggtgtacaggtaattcctccagagctgtttgctggcttcaggagtggag

SEQ ID NO: 75971 - DNA, 2886 bp, Artificial Sequence
  derived and/or modified sequence
atgagatggccccagcccggcgccgccgccagactgccccccgagagccccggcccccccgagagccccggcccccccgagagagaggccgccgccgccagaagatggaccggcgccgagccccaggactgcgcccccggcagcggcagacccgagaagcccccccagctgagcgaggacgacatctggctgaagagcgagggcgacaactacagcgccaccctgctggagcccgccgccagcagcctgagccccgaccacaagaacatggagatcgaggtgagcgtggccgagtgcaagagcgtgcccggcatcaccagcaccccccaccccatggaccaccccagcgccttctacagccccccccacaacggcctgctgaccgaccaccacgagagcctggacaacgacgtggccagagagatcagatacctggacgaggtgctggaggccaactgctgcgacagcgccgtggacggcacctacaacggcaccagcagccccgagcccggcgccgtggtgctggtgggcggcctgagcccccccgtgcacgaggccacccagcccgagcccaccgagagaaccgccagcagacaggcccccccccacatcgagctgagcaacagcagccccgaccccatggccgaggccgagagaaccaacggccacagccccagccagcccagagacgccctgggcgacagcctgcaggtgcccgtgagccccagcagcaccaccagcagcagatgcagcagcagagacggcgagttcaccctgaccaccctgaagaaggaggccaagttcgagctgagagccttccacgaggacaagaagcccagcaagctgttcgaggacgacgagcacgagaaggagcagtactgcatcagaaaggtgagacccagcgaggagatgctggagctggagaaggagagaagagagctgatcagaagccaggccgtgaagaagaaccccggcatcgccgccaagtggtggaaccccccccaggagaagaccatcgaggagcagctggacgaggagcacctggagagccacaagaagtacaaggagagaaaggagagaagagcccagcaggagcagctgctgctgcagaagcagctgcagcagcagcagcagcagccccccagccagctgtgcaccgcccccgccagcagccacgagagagccagcatgatcgacaaggccaaggaggacatcgtgaccgagcagatcgacttcagcgccgccagaaagcagttccagctgatggagaacagcagacaggccgtggccaagggccagagcacccccagactgttcagcatcaagcccttctacagacccctgggcagcgtgaacagcgacaagcccctgaccaaccccagaccccccagcgtgggcggcccccccgaggacagcggcgccagcgccgccaagggccagaagagccccggcgccctggagacccccagcgccgccggcagccagggcaacaccgccagccagggcaaggagggcccctacagcgagcccagcaagagaggccccctgagcaagctgtgggccgaggacggcgagttcaccagcgccagagccgtgctgaccgtggtgaaggacgacgaccacggcatcctggaccagttcagcagaagcgtgaacgtgagcctgacccaggaggagctggacagcggcctggacgagctgagcgtgagaagccaggacaccaccgtgctggagaccctgagcaacgacttcagcatggacaacatcagcgacagcggcgccagcaacgagaccaccaacgccctgcaggagaacagcctggccgacttcagcctgccccagaccccccagaccgacaaccccagcgagggcagaggcgagggcgtgagcaagagcttcagcgaccacggcttctacagccccagcagcaccctgggcgacagccccctggtggacgaccccctggagtaccaggccggcctgctggtgcagaacgccatccagcaggccatcgccgagcaggtggacaaggccgtgagcaagaccagcagagacggcgccgagcagcagggccccgaggccaccgtggaggaggccgaggccgccgccttcggcagcgagaagccccagagcatgttcgagcccccccaggtgagcagccccgtgcaggagaagagagacgtgctgcccaagatcctgcccgccgaggacagagccctgagagagagaggccccccccagcccctgcccgccgtgcagcccagcggccccatcaacatggaggagaccagacccgagggcagctacttcagcaagtacagcgaggccgccgagctgagaagcaccgccagcctgctggccacccaggagagcgacgtgatggtgggccccttcaagctgagaagcagaaagcagagaaccctgagcatgatcgaggaggagatcagagccgcccaggagagagaggaggagctgaagagacagagacaggtgctgcagagcacccagagccccagaaccaagaacgcccccagcctgcccagcagaacctgctacaagaccgcccccggcaagatcgagaaggtgaagcccccccccagccccaccaccgagggccccagcctgcagcccgacctggcccccgaggaggccgccggcacccagagacccaagaacctgatgcagaccctgatggaggactacgagacccacaagagcaagagaagagagagaatggacgacagcagctacaccagcaagctgctgagctgcaaggtgaccagcgaggtgctggaggccaccagagtgaacagaagaaagagcgccctggccctgagatgggaggccggcatctacgccaaccaggaggaggaggacaacgagtag

SEQ ID NO: 75972 - protein, 1525 aa, Artificial Sequence
  derived and/or modified sequence
MSGTQSTITDRFPLKKPIRHGSILNRESPTDKKQKVERIASHDFDPTGLVQRCVIIQKDDNGFGLTVSGDNPVFVQSVKEDGAAMRAGVQTGDRIIKVNGTLVTHSNHLEVVKLIKSGSYVALTVQGRPPGSPQIPLADSEVEPSVIGHMSPIMTSPHSPGASGNMERITSPVLMGEENNVVHNQKVEILRKMLQKEQERLQLLQEDYNRTPAQRLLKEIQEAKKHIPQLQEQLSKATGSAQDGAVVTPSRPLGDTLTVSEAETDPGDVLGRTDCSSGDASRPSSDNADSPKSGPKERIYLEENPEKSETIQDTDTQSLVGSPSTRIAPHIIGAEDDDFGTEHEQINGQCSCFQSIELLKSRPAHLAVFLHHVVSQFDPATLLCYLYSDLYKHTNSKETRRIFLEFHQFFLDRSAHLKVSVPDEMSADLEKRRPELIPEDLHRHYIQTMQERVHPEVQRHLEDFRQKRSMGLTLAESELTKLDAERDKDRLTLEKERTCAEQIVAKIEEVLMTAQAVEEDKSSTMQYVILMYMKHLGVKVKEPRNLEHKRGRIGFLPKIKQSMKKDKEGEEKGKRRGFPSILGPPRRPSRHDNSAIGRAMELQKARHPKHLSTPSSVSPEPQDSAKLRQSGLANEGTDAGYLPANSMSSVASGASFSQEGGKENDTGSKQVGETSAPGDTLDGTPRTLNTVFDFPPPPLDQVQEEECEVERVTEHGTPKPFRKFDSVAFGESQSEDEQFENDLETDPPNWQQLVSREVLLGLKPCEIKRQEVINELFYTERAHVRTLKVLDQVFYQRVSREGILSPSELRKIFSNLEDILQLHIGLNEQMKAVRKRNETSVIDQIGEDLLTWFSGPGEEKLKHAAATFCSNQPFALEMIKSRQKKDSRFQTFVQDAESNPLCRRLQLKDIIPTQMQRLTKYPLLLDNIAKYTEWPTEREKVKKAADHCRQILNYVNQAVKEAENKQRLEDYQRRLDTSSLKLSEYPNVEELRNLDLTKRKMIHEGPLVWKVNRDKTIDLYTLLLEDILVLLQKQDDRLVLRCHSKILASTADSKHTFSPVIKLSTVLVRQVATDNKALFVISMSDNGAQIYELVAQTVSEKTVWQDLICRMAASVKEQSTKPIPLPQSTPGEGDNDEEDPSKLKEEQHGISVTGLQSPDRDLGLESTLISSKPQSHSLSTSGKSEVRDLFVAERQFAKEQHTDGTLKEVGEDYQIAIPDSHLPVSEERWALDALRNLGLLKQLLVQQLGLTEKSVQEDWQHFPRYRTASQGPQTDSVIQNSENIKAYHSGEGHMPFRTGTGDIATCYSPRTSTESFAPRDSVGLAPQDSQASNILVMDHMIMTPEMPTMEPEGGLDDSGEHFFDAREAHSDENPSEGDGAVNKEEKDVNLRISGNYLILDGYDPVQESSTDEEVASSLTLQPMTGIPAVESTHQQQHSPQNTHSDGAISPFTPEFLVQQRWGAMEYSCFEIQSPSSCADSQSQIMEYIHKIEADLEHLKKVEESYTILCQRLAGSALTDKHSDKS

SEQ ID NO: 75973 - DNA, 4578 bp, Artificial Sequence
  derived and/or modified sequence
atgtctgggacgcaatctactatcaccgatcggttcccactcaaaaaacccatcagacatggctccattcttaatcgcgagagtcccaccgataagaaacaaaaagtggagcggattgcctctcatgacttcgacccaacagggttagtgcagcggtgtgttataattcagaaggacgataatggatttggcctgacggtctctggcgataaccctgtgttcgtgcagtccgtgaaggaggacggcgctgctatgagggctggcgtgcaaactggggatcgaataatcaaggtaaacgggactttggttacacactctaatcaccttgaagttgtgaaactcatcaagagcggttcctatgtggcactgacagtgcagggtcggccccctgggagtccccagatccccttagccgactccgaggtagagccttctgttatcggtcacatgagccctatcatgacctccccacacagcccaggtgctagcggtaacatggaacgcatcaccagccctgtgctgatgggcgaagaaaataacgtcgttcacaatcaaaaggtcgagatcctcaggaagatgctgcaaaaagagcaggagcggctccagctgttgcaggaagactacaaccgcactcccgcccagagactactcaaagagatacaagaagccaagaaacatataccccagttgcaggagcagctcagcaaggccactggcagtgcccaagacggggcagtggtcacaccgtctaggccgctcggggataccttaacagtgtcagaagcagagaccgaccctggtgatgtgctgggacggacagactgttcgagtggggacgcctcaagaccatcctctgacaacgcagactcgcccaaatcaggcccaaaggagaggatttatttggaggagaatcctgaaaagagcgagacaatacaggacactgatacccagtcactggtaggttccccttccactcggattgctccacatatcattggggccgaggatgacgacttcgggactgagcacgagcagatcaatgggcagtgtagttgctttcagagtattgaactcctcaagagtagaccagcacacttggcagtttttcttcaccatgtagtgtcccagttcgaccctgctactctgctttgttacctttatagcgacctgtacaagcacaccaattctaaggagaccagaagaatttttttggagttccatcaattttttctcgacaggtctgctcacctgaaagtgtctgttcccgatgagatgtccgccgacttggagaaaagaaggcccgaactcataccggaggacctccaccggcactacattcaaactatgcaggagcgagttcaccctgaggtgcagagacatctggaggactttcggcagaaaagatctatgggcttgaccctggccgagtctgagttaaccaagcttgacgccgaacgtgacaaagacaggcttaccctggagaaggaacgtacctgtgccgagcaaatagtagctaagatcgaagaggtactgatgactgcgcaggccgttgaagaagataaatcttccaccatgcagtatgtgatcctgatgtatatgaagcacttaggagttaaagtgaaggagcctaggaacctggagcacaagaggggtcgtatcggtttcctgcccaagatcaagcagtccatgaaaaaagataaggagggcgaggagaagggcaagcgacggggttttccctctatactggggcctccacgccggcccagtagacacgataactctgctattggccgggccatggagttacaaaaggccagacaccctaagcacctgtcaactccatcaagcgtctctccggaaccccaggactctgctaaactgcgacagagcggtctcgctaacgaggggaccgatgccggttacctgccagccaacagcatgtcctccgtagccagtggcgctagttttagccaagagggcggaaaggagaatgacacagggtccaagcaagtaggagaaacgtccgcgcctggagacactcttgacgggacaccgagaactttaaataccgtttttgactttcctcctccgcctctggaccaagtgcaggaggaagaatgtgaggtagagagggtgaccgaacacgggacccccaaaccattccgaaaattcgactccgtggcctttggcgaaagtcagtcagaggacgaacagtttgagaacgaccttgaaaccgatcctccaaactggcagcagcttgtgtcccgtgaagttttgctgggcctgaagccttgtgagattaagcgacaggaggtgattaatgagttattctatactgagagagctcatgtaagaactctgaaagttctagaccaggtgttttatcagagggtgtccagggagggcatcttgagtccctcagagctgaggaagattttctcgaatctggaagatatcctccagctgcatattgggcttaatgaacagatgaaagccgtgcggaaacgcaatgagacgtctgtcatcgatcagatcggcgaagatctattaacttggtttagtggtcccggcgaagaaaagctgaaacatgccgccgctacattttgctctaatcagccattcgcccttgaaatgattaagtccaggcagaaaaaggattcaaggtttcagacctttgttcaggatgctgagagcaatcctctgtgcaggagactgcaactgaaggatatcatacctacacaaatgcagcgccttacaaagtaccctctcctgctggataatattgccaagtacaccgagtggcccacagaacgggaaaaggtgaaaaaggccgcagatcactgccgccagatcctgaattacgtcaatcaggccgtcaaagaggcagagaataaacaacgtctcgaggactatcagagacgccttgacacgtcttcccttaaactctctgaatacccgaatgtcgaggaattgcgtaatctggacctaactaagagaaagatgattcatgaaggcccccttgtgtggaaggtgaacagggacaagaccatcgacctgtacacgctgcttctcgaggatattctggtcctcctacagaaacaggacgacagactggtcctgagatgccatagtaaaattcttgcctctacagcagacagcaagcacacattctctccggtgatcaagctgagcaccgttctagtgcgccaggtggccactgataataaagccctcttcgttatctcaatgagtgacaatggggctcagatatacgagcttgtggcccagacagtttccgagaagacggtttggcaggacctgatctgtcggatggctgcctcggtgaaagagcagtctaccaaaccaattccattgccccagtccacacccggcgaaggtgacaacgacgaagaggacccaagcaagttgaaggaagaacagcatggcatttcagttacaggcctgcagtcccctgaccgggacctcggacttgagtccacactcatctcttcaaagccacaatcccactcccttagcacctccggtaagagtgaagttagagacttgtttgtagctgaacgccagttcgcaaaagaacagcacaccgacgggactctcaaagaagtcggcgaggactatcagattgccatccctgactcacaccttcccgtcagcgaagagagatgggcgctggacgctcttcggaacctcggattgctcaaacaactgctggtacagcagctgggccttaccgaaaagtccgtccaggaagattggcagcatttcccacgctatcgaaccgcctcccaagggcctcagaccgactctgtgatacaaaatagtgaaaacataaaggcttaccactcgggcgaaggtcacatgccattccggacggggacgggcgacattgcaacctgctactccccccggacaagcacagaatctttcgcccctcgggattctgtgggactggccccacaggacagtcaggcttcaaatatcttagtgatggaccatatgatcatgacaccagagatgcccactatggaaccagaagggggactggatgatagcggcgaacatttttttgatgctcgcgaggcccactcagatgagaatccgagcgagggggacggggctgtgaataaagaagaaaaggatgtgaatctgcgcatttccggtaattacctgatccttgacggttacgacccagtgcaagaatctagcactgatgaagaagtcgccagctccttgaccctgcaaccaatgacaggcatcccagccgtggaaagtacacatcagcagcagcattctcctcaaaatacacattcagatggagctatttcccccttcacacctgagttcctcgtccagcagagatggggggcgatggagtactcctgttttgagatccagagtccgtcatcttgtgcagactctcagtctcagatcatggagtatatacacaaaatcgaggccgatctggagcatcttaaaaaagtggaagaaagctatactattctgtgtcaacggctggctggatctgcactcaccgacaaacacagcgataagtcttag

SEQ ID NO: 75974 - DNA, 4578 bp, Artificial Sequence
  derived and/or modified sequence
atgagcggcacccagagcaccatcacagaccgcttccccctgaagaagcccatccgccacggcagcatcctgaaccgggagagccccacagacaagaagcagaaggtggagagaattgccagccatgactttgaccccaccggcctggtgcagagatgtgtgatcatccagaaggatgacaatggatttggcctgactgtgtctggggacaaccctgtgtttgtgcagagcgtgaaggaggatggagctgccatgagagctggggtgcagacaggagaccgcatcatcaaggtgaatggcaccctggtgacccacagcaaccacctggaggtggtgaagctgatcaagagcggcagctatgtggccctgactgtgcagggccggcccccaggcagcccccagatccccctggccgacagcgaggtggagcccagcgtgattggccacatgagccccatcatgaccagcccccacagccctggggccagcggcaacatggagcgcatcaccagccctgtgctgatgggagaggagaacaacgtggtgcacaaccagaaggtggagatcctgaggaagatgctgcagaaggagcaggagcggctgcagctgctgcaggaggactacaacagaacaccagcccagaggctgctgaaggagatccaggaggccaagaagcacatcccccagctgcaggagcagctgagcaaggccaccggcagcgcccaggatggagctgtggtgacccccagccggcccctgggggacaccctgactgtgtctgaggccgagacagatcctggagatgtgctgggccgcacagactgcagcagtggagatgccagccggcccagcagtgacaatgctgacagccccaagagcggccccaaggagcgcatctacctggaggagaaccctgagaagtctgagaccatccaggacacagacacccagagcctggtgggcagccccagcaccagaattgccccccacatcatcggggctgaagatgatgactttggaacagaacatgagcagatcaatggccagtgcagctgcttccagagcattgagctgctgaagagcaggcctgcccacctggccgtgttcctgcaccacgtggtgtcccagtttgatcctgccaccctgctgtgctacctgtacagcgacctgtacaagcacaccaacagcaaggagacccggcgcatcttcctggagttccaccagttcttcctggacagaagtgcccacctgaaggtgtctgtgcctgatgagatgtctgctgacctggagaagaggaggcctgagctgatccctgaggacctgcaccgccactacatccagaccatgcaggagcgggtgcaccctgaggtgcagaggcacctggaggacttccggcagaagaggtccatgggcctgaccctggccgagagcgagctgaccaagctggatgctgagcgggacaaggaccggctgaccctggagaaggagaggacctgtgccgagcagatcgtggccaagattgaggaggtgctgatgacagcccaggccgtggaggaggacaagagcagcaccatgcagtatgtgatcctgatgtacatgaagcacctgggcgtgaaggtgaaggagcccaggaacctggagcacaagagaggaagaattggcttcctgcccaagatcaagcagagcatgaagaaggacaaggagggggaggagaagggcaagagaagaggcttccccagcatcctgggccccccccggcggcccagcagacatgacaacagcgccatcggccgggccatggagctgcagaaggcccggcaccccaagcacctgagcacccccagctctgtgtccccagagccccaggacagcgccaagctgcggcagagcggcctggccaatgaaggaacagatgctggctacctgcctgccaacagcatgagctctgtggccagcggggccagcttcagccaggagggcggcaaggaaaatgacaccggcagcaagcaggtgggggagaccagcgcccctggggacaccctggatggcacccccaggaccctgaacacagtgtttgacttccccccaccacccctggaccaggtgcaggaggaggagtgtgaggtggagcgggtgacagaacatggcacccccaagcccttcaggaagtttgacagcgtggcctttggagagagccagagtgaagatgagcagtttgaaaatgacctggagacagatcctcccaactggcagcagctggtgtcccgggaggtgctgctgggcctgaagccctgtgagatcaagaggcaggaggtgatcaatgagctgttctacacagagcgggcccacgtgaggaccctgaaggtgctggaccaggtgttctaccagagggtgtcccgggagggcatcctgagccccagcgagctgaggaagatcttcagcaacctggaggacatcctgcagctgcacatcggcctgaatgagcagatgaaggctgtgaggaagagaaatgagaccagcgtcatcgaccagattggagaggacctgctgacctggttcagcggccctggagaggagaagctgaagcacgccgccgccaccttctgcagcaaccagccctttgccctggagatgatcaagagccggcagaagaaggacagccgcttccagacctttgtgcaggatgctgagagcaaccccctgtgccggcggctgcagctgaaggacatcatccccacccagatgcagaggctgaccaagtaccccctgctgctggacaacatcgccaagtacacagagtggcccacagagcgggagaaggtgaagaaggctgctgaccactgccggcagatcctgaactacgtgaaccaggccgtgaaggaggccgagaacaagcagaggctggaggactaccagaggcggctggacaccagcagcctgaagctgtctgagtacccaaatgtggaggagctgaggaacctggacctgaccaagaggaagatgattcatgagggccccctggtgtggaaggtgaacagagacaagaccatcgacctgtacaccctgctgctggaggacatcctggtgctgctgcagaagcaggatgaccggctggtgctgcgctgccacagcaagatcctggccagcacagctgacagcaagcacaccttcagccctgtgatcaagctgagcacagtgctggtgcggcaggtggccacagacaacaaggccctgtttgtgatctccatgtctgacaacggggcccagatctatgagctggtggcccagacagtgtctgagaagacagtgtggcaggacctgatctgcaggatggccgcctctgtgaaggagcagagcaccaagcccatccccctgccccagagcaccccaggagagggggacaatgatgaggaggaccccagcaagctgaaggaggagcagcacggcatctctgtgacaggcctgcagagcccagaccgggacctgggcctggagagcaccctcatcagcagcaagccccagagccacagcctgagcaccagcggcaagtctgaggtgcgggacctgtttgtggccgagcggcagtttgccaaggagcagcacacagatggcaccctgaaggaggtgggggaggactaccagatcgccatcccagacagccacctgcctgtgtctgaggagcgctgggccctggatgccctgaggaacctgggcctgctgaagcagctgctggtgcagcagctgggcctgacagagaagtctgtgcaggaggactggcagcacttcccccgctacagaacagccagccagggcccccagacagacagcgtcatccagaacagcgagaacatcaaggcctaccacagcggggagggccacatgcccttcagaacaggcaccggggacatcgccacctgctacagccccaggaccagcacagagagctttgccccccgggacagcgtgggcctggccccccaggacagccaggccagcaacatcctggtgatggaccacatgatcatgaccccagagatgcccaccatggagcctgagggcggcctggatgacagcggggagcacttctttgatgcccgggaggcccacagtgatgagaaccccagtgaaggagatggagctgtgaacaaggaggagaaggatgtgaacctgcgcatcagcggcaactacctgatcctggatggctatgaccctgtgcaggagagcagcacagatgaggaggtggccagcagcctgaccctgcagcccatgacaggcatcccagctgtggagagcacccaccagcagcagcacagcccccagaacacccacagtgatggagccatcagccccttcaccccagagttcctggtgcagcagcgctggggcgccatggagtacagctgctttgagatccagagccccagcagctgtgccgacagccagagccagatcatggagtacatccacaagattgaagctgacctggagcacctgaagaaggtggaggagagctacaccatcctgtgccagaggctggccggcagcgccctgacagacaagcacagcgacaagagctag

SEQ ID NO: 75975 - DNA, 4578 bp, Artificial Sequence
  derived and/or modified sequence
atgagcggcacccagagcaccatcaccgaccggttccccctgaagaaaccgatccgtcatggcagcatcctcaatagagagtcccccactgataagaagcaaaaagtagagcgaatcgctagccacgactttgaccccaccgggctcgtgcagcggtgcgtgatcatccaaaaggatgacaacgggttcggactgacagtctccggagataatcccgtcttcgttcagagcgtgaaggaggacggcgccgctatgcgtgcaggcgtacagactggcgatagaattattaaggttaacggcactctcgttacccatagcaaccacctggaagtggtgaagctcatcaaaagcggtagttacgtggcactgaccgttcaggggcgccccccaggctcaccgcagattccacttgctgatagcgaggtcgagccgtctgttattgggcatatgagcccaattatgacaagtccccattctcccggtgccagcggtaacatggaacggatcacaagtcccgtgctgatgggtgaagagaacaatgtcgtgcataaccagaaggtagagatccttaggaaaatgctgcagaaagagcaggagagacttcaacttcttcaggaagactataataggacaccagcccaacgcttgctgaaggagatccaagaagctaagaagcatatcccccagctgcaggagcagctgtccaaagctactggatcagcccaagatggagccgtcgtgacaccatctcgccccttgggcgatactttgaccgtatcagaagcggaaactgaccctggcgatgtgctgggtaggaccgattgtagctctggggacgctagtagacccagctccgacaatgctgactcccctaagagcggtcccaaggaaaggatttatctggaggaaaacccagagaagtctgaaacaatccaggataccgatacccagagcctggtgggaagcccaagcacgaggatcgctccacacattattggagctgaggatgatgacttcggtacagagcatgagcagatcaatggtcagtgtagttgtttccagagcatcgagcttttaaaaagtaggcctgcgcacctcgctgtgtttcttcatcacgtcgtgagccaattcgatcccgccacattgttatgctatctatacagtgatttgtataaacatacaaactcaaaggagaccaggagaatttttttggaatttcaccagttttttctggaccgcagcgcccacctcaaagtgagcgtgcccgatgagatgtcagccgacctcgagaaacgtcgccccgagttaatcccagaggacctgcaccgacactatattcagacgatgcaggaacgggttcacccggaagtgcagcggcacctggaggacttccgccagaagagaagcatgggactgacgctggcagagagtgagctcacaaaactagacgctgagcgtgacaaagacagactgaccctggagaaagaaaggacctgtgcagaacagattgtggccaagattgaggaggtgcttatgaccgctcaggccgtcgaagaggataaaagctcaactatgcaatacgtgatactgatgtatatgaagcacctaggagtaaaagtgaaagaacctagaaaccttgaacataagcggggtcgtatcgggtttctgcccaaaatcaagcagtccatgaagaaggataaagagggagaggaaaagggcaagcgcaggggcttccctagtattctgggtccgccaaggcgtccttcccgccatgacaactcagcaatcgggagggccatggagctgcagaaggctaggcaccctaaacaccttagtacgccttctagcgtaagtccagaaccgcaggacagtgcaaaactcaggcagtccggcctagctaacgaaggcaccgacgctggctacttgccagctaactcaatgagttcagtggccagcggcgcttctttcagccaagaaggaggcaaggaaaatgatactggtagtaagcaggtaggagagaccagcgcacctggagacacattggacgggacaccaaggactcttaacaccgtgttcgacttcccaccacctccactggatcaagtccaagaagaggaatgcgaggtcgagcgggtaaccgagcacggaaccccgaaaccgtttcgtaagttcgattccgtggcgtttggggagtcacagtctgaagatgaacaattcgaaaacgacctggagacagatcctcccaactggcagcagcttgtgtctcgggaagtccttctgggcctgaaaccatgcgaaatcaaaaggcaggaggtaattaacgagttgttctacaccgagcgcgcccatgtgaggacccttaaggtcttagaccaggtgttttatcagagagtctcccgcgagggaattctgtccccctccgaattacgcaaaatcttctccaacctcgaggacatcctgcagctgcacattggcctgaatgagcaaatgaaagctgtacgaaaaaggaacgaaaccagtgtcatagatcagataggtgaggacttgctgacctggttctccggcccaggcgaagaaaagctgaagcatgccgctgccactttctgcagtaatcagccctttgcgctcgagatgattaagagtaggcagaagaaagatagccggttccaaacatttgtacaggacgcagaatcaaacccactgtgtcgacgattgcagctgaaggatataatcccaactcagatgcaaagacttaccaaataccctctgctcctggataacattgcaaagtacactgaatggcccacggaaagagagaaagtcaaaaaagcagccgaccattgccggcagattctaaactacgtgaaccaggccgtgaaggaagcagagaacaaacagaggctggaggattaccagcggaggttagacacatcctcacttaaactgtctgaataccctaacgtcgaagagctgcgcaacttggacctgaccaaaaggaaaatgattcacgagggcccgctagtgtggaaggttaatagggataagacaatcgacctctacactctgctgctggaggatatacttgtcctcctacagaaacaggacgacaggttagtgctccgctgtcactcaaagatcctggctagcaccgcagactccaagcacactttttcccctgttatcaagctgagtactgtgctagtgaggcaggttgctacagacaacaaggccctcttcgtgatcagtatgagcgataatggtgctcagatttatgaactcgttgcccagaccgtgtcagaaaagactgtgtggcaagacctcatatgtagaatggccgcctccgtcaaagagcaatctacaaagcctatccctctcccgcagtccacacctggggaaggagataacgatgaagaagacccgtcgaaactcaaagaagaacagcatggcatcagcgttactggcttgcagtcaccggatagagatctcggtctggaatcaactctgatatccagcaagccccagagtcattctctaagcacatccggtaaatcagaagtgcgagacctttttgtcgccgagaggcagttcgccaaggagcaacatactgatggcaccttgaaagaggtaggcgaagactaccagatcgctattccggacagtcatttgccagtcagcgaagagcgctgggctctcgacgcccttcgcaacctgggccttctgaaacaactgctggtgcagcagctcgggctgaccgaaaaatcagtgcaagaggactggcagcacttcccgagatacagaacggcctctcagggacctcagactgattccgtgattcagaattccgagaatattaaggcctaccatagtggggagggacacatgccattccgcacaggtaccggcgacatcgctacttgctactcaccccgcactagtaccgagtctttcgctcccagggactccgtaggccttgccccacaggacagccaggcttccaacattcttgttatggaccacatgatcatgacgcctgagatgcctacaatggagccggaggggggccttgacgacagtggtgaacatttctttgatgcgcgggaagcccactccgacgagaacccctctgaaggggatggggcagttaataaggaggaaaaggacgtcaacttgaggatatcaggcaactatttaatcctggacggctacgacccagtgcaggagtcttccacggacgaagaagtagcttcgtcactaacactgcagcctatgaccgggatacccgcagtggaatctacacaccagcagcagcacagtcctcagaatacacacagcgatggcgcaatctccccatttacaccggaatttttagttcagcaacgctggggcgcgatggaatactcatgctttgagatccagagccccagtagttgcgccgattcacaatcccaaataatggaatatatccacaaaatcgaggccgatctggagcatctaaagaaagtggaggagagctatactatcctgtgtcagcgcctggccggctcagcacttaccgataagcattccgacaagtcctag

SEQ ID NO: 75976 - DNA, 4577 bp, Artificial Sequence
  derived and/or modified sequence
atgtcagggactcagtctaccattacggatcgatttcccctgaagaaacccatcagacacggctctattcttaaccgagagtcacccactgacaaaaagcaaaaggttgaaagaattgcaagccatgacttcgatcccacaggtctggtacagagatgtgtgatcatccagaaagacgacaacggcttcggactcacggtgtccggagacaaccctgtctttgtgcagtccgtgaaagaagacggggcagctatgagggcgggtgttcagacaggcgatcgcatcataaaggtgaacggtactctggtcacacactctaaccacttggaagtggtgaaactaataaagtcagggagctacgtggcactgaccgttcagggcagaccacctggcagcccacaaattcccctcgccgattctgaggtggagccaagtgtcataggccacatgtcgcctatcatgacaagcccacattcacctggagcatcagggaatatggagcggataacctctccagtgttgatgggagaggagaataacgttgtgcacaatcagaaggtggaaatcctccgcaagatgctgcagaaggaacaggaaagattacagctgctacaggaggactacaacagaacccccgcacagaggctcctcaaagaaatccaggaagcaaagaaacacattccgcagctgcaggagcagctctcaaaagccaccggcagcgctcaggatggtgccgtggtaacacctagtcgcccactaggcgatacccttacagtatccgaggccgaaaccgatcctggcgacgtactggggaggacagactgtagctctggggatgcctccagacctagctccgacaatgcggatagccccaagtccggtccgaaggagcgcatttacctggaggaaaaccctgaaaaaagtgagactatccaggacacagatacacaatcattggtcggctctccttccactaggattgctccccacataattggggctgaagacgatgatttcggaactgagcacgaacagatcaatggtcagtgtagctgctttcagagcattgagttgctcaagagcagacctgcgcacctggccgtctttctccatcatgtggtctcccaatttgaccctgcaacactcctttgctatctatatagtgacctatataagcatacaaactctaaggagactaggcgcatcttcttggaatttcaccagttttttttagataggagtgcacatcttaaggttagcgtaccggacgagatgagtgccgatttggagaaacggcgacccgaactcatccctgaagatctacaccggcactatatccaaacgatgcaggaacgtgtgcaccctgaagtgcagcgacacctagaagacttccggcaaaaacggagcatgggtctaacgctggctgaaagcgaactgacaaagctcgacgcggaaagagataaagacagactgaccttagagaaggagcggacatgcgccgaacagattgtggcgaagatcgaagaggtccttatgaccgcccaggcggtggaagaggataagagctctacaatgcagtatgtaatacttatgtacatgaaacatctcggagtcaaagttaaggagcctaggaatctggaacataagaggggaagaatcggctttttgcccaagattaagcaatccatgaagaaagataaggaaggtgaagagaagggtaaacggagaggttttccctccatcctcgggcctccgagacggccttctaggcatgataacagcgctattggcagagccatggagctacagaaagcaagacatcccaaacacctgtcaacacctagtagcgtgtctccagaacctcaggatagcgctaagttacgtcagtccgggcttgccaacgaggggactgacgccggatatctgccggctaattccatgtcgagcgtggcatcaggcgctagcttttcacaagagggaggcaaggagaacgacaccggcagcaaacaggtcggcgaaacctccgcgcctggtgatacactcgatggcactcccagaaccctgaacaccgtcttcgacttccctcccccaccgctcgatcaggtccaagaggaggagtgtgaagtggagcgggtaactgaacacggcactccaaagccattccggaaatttgatagtgttgctttcggagaaagccagtcagaggatgaacagtttgagaacgacttggaaacagatccacccaattggcagcagctggtgagccgggaagtgttactgggcttaaagccttgtgagattaaacggcaggaagtcataaacgaactcttctacaccgaacgagcgcacgtccgcaccctgaaggttctggaccaggtcttctaccagagagtgagtagagagggcatcttgtccccatccgagctgcggaagattttctcaaacttggaagatattttacaactccacatagggcttaacgagcaaatgaaggcggtgagaaagagaaatgaaaccagtgtgattgaccagattggcgaagacctcttgacctggttttctggccctggagaggaaaagttgaaacacgccgctgcgaccttctgcagtaatcaaccatttgccttggagatgatcaagtcccggcagaagaaggactcccggttccaaaccttcgtgcaagacgctgaatctaaccccttgtgccgacgcttgcagctcaaagatatcatccctacccaaatgcagcgcttaaccaagtatcctctccttctggacaatatcgccaagtatacagaatggccgacagagcgcgagaaagttaaaaaggcagctgaccactgccgccagattcttaattacgtaaatcaggccgtgaaggaagccgagaacaaacagcgcctcgaagattaccagagacgcttggatacaagctcactgaaactgtcagagtaccctaatgttgaggagttacgaaacctggatttgactaaacggaaaatgattcatgaaggtcccttggtctggaaggtgaatcgtgacaaaaccatcgacctctacactctgcttctggaggatatcttggtcctcctgcagaaacaagacgaccggctcgttctccggtgccattctaagatcttagcaagcacagccgattccaagcacacattctcccctgtaatcaaactctctacagtgctcgtcagacaggtggccacagacaacaaagcgctgttcgtcatcagcatgagcgacaacggagctcagatctacgaactcgtggcacagaccgtctccgagaaaactgtgtggcaggacctcatctgtcgcatggcggctagcgtcaaggaacagtccacaaaacctatacccctgccgcagagcaccccaggtgaaggggataacgacgaggaggatccttcgaaactgaaagaggagcagcatggaatatctgtcactggcctccagtcacctgatagagacctgggcctggaaagtactctcatctcttccaagccgcaatcacactccctgtcaactagcgggaaaagtgaggtaagggatctgttcgtggctgagcggcagttcgccaaagagcagcatactgatggtactttgaaggaggtgggggaagattaccagatcgctattccagacagtcacttgcctgtgagcgaagaaaggtgggcgctggatgccctgcggaatctcggactccttaagcagttactggttcaacagctggggctgactgagaagagcgtgcaagaggattggcaacacttccctagataccgcacagctagtcagggcccacagacagactccgtcattcagaactccgagaatatcaaggcctatcattccggggagggccacatgccctttagaaccgggaccggagatattgccacctgctattcgccaagaacctccacagaaagttttgcgccacgagattctgtggggttggctccgcaggatagtcaggcaagcaacatcctggtcatggatcacatgatcatgacaccagaaatgcccacaatggagcctgagggaggacttgatgattctggtgagcatttcttcgacgctcgggaggcacatagtgatgagaacccaagcgagggcgatggagcagttaataaggaggagaaggatgtcaacttgcggatttctgggaactatctgatcctggacggctacgatcccgttcaggagtctagcaccgacgaggaggtagcatcttcacttacactacagccaatgaccggtatccctgccgtggagtctacacatcagcagcagcatagcccgcaaaacacacattcagatggagccatcagcccctttactcccgagtttctggtgcagcagcgctggggtgccatggagtactcatgctttgaaattcagtcgccatcaagctgcgcagattctcagagccagattatggagtatatccataaaatcgaggccgacctcgaacacctcaagaaggtggaggaaagctatacaatcctgtgtcagagacttgctggcagcgcacttactgacaagcactccgacaagtccta

SEQ ID NO: 75977 - DNA, 9444 bp, Artificial Sequence
  derived and/or modified sequence
ggccccaatgagtggcacacagtctactatcaccgacaggtttcccctcaaaaaacctataaggcatggaagtattttgaaccgagagtcaccaacagataagaagcagaaagttgagcgcattgcatcacatgattttgaccccacaggtcttgttcagcgttgcgtaatcatccagaaagatgacaatggatttgggctgacggtcagtggagacaatccagtcttcgtacagtctgtcaaagaagatggagcagccatgcgggctggagtacagacaggtgatcgaatcatcaaggtgaatggaactctggtgactcattcaaatcatctggaggtggtgaagctaatcaaatctggttcctatgtagctctcactgttcagggacgcccacctgggtcgccccagattccacttgccgactctgaagtagagccgtcagtcattggacatatgtctcccatcatgacatctcctcattcacctggagcatctgggaatatggagagaatcactagtcctgtgctcatgggggaggaaaacaatgtggttcataaccagaaagtagaaattctgagaaaaatgttacagaaagaacaggaacggctacagttattgcaggaagattacaaccgaacacctgcccaaagattgctaaaagagatccaagaggccaagaaacacattcctcagctgcaagagcagttatccaaagccacaggctctgctcaggatggagctgtagttacaccctccagacctttaggggacaccctaacagtcagtgaggcagaaacagatcctggagatgtactgggcaggactgactgtagcagtggagatgcttctcggcccagtagtgacaatgcagatagtcccaagagtggcccaaaagagagaatttatctagaggaaaacccagagaaaagtgaaacaattcaggacactgacactcaatcacttgtcggaagtccctcaacccgtatagcacctcatattattggagcagaagatgatgattttggtactgaacatgaacagatcaatggacagtgcagctgtttccagagcattgaattactaaaatctcgcccggctcatttggctgttttcttacaccatgtagtttcacaatttgaccctgcgactttgctctgttatctctattcagacctgtataaacataccaattccaaagaaactcgtcgcatcttccttgagtttcatcagttctttctagatcgatcagcacacctgaaagtttctgttcctgatgaaatgtctgcagatctagaaaagagaagacctgagctcattcctgaggatctgcatcgccactatatccaaactatgcaagaaagagtccatccagaagttcaaaggcacttagaagattttcggcagaaacgtagtatgggactgaccttggctgaaagcgagctgactaaacttgatgcagagcgagacaaggaccgattgactttggagaaggagcggacatgtgcagaacagattgttgccaaaattgaagaagtattgatgactgctcaggctgtagaggaagataagagctccaccatgcagtatgttattctcatgtatatgaagcatttgggagtaaaagtgaaagagcctcgaaatttggagcacaaacggggtcggattggatttcttcccaaaatcaagcaaagtatgaagaaagataaagaaggggaagaaaaagggaagcgaagaggattccccagcatcctgggacccccacggagaccaagccgtcatgacaacagtgcaattggcagagccatggaactacagaaggcgcgccaccctaagcacttatccacaccctcatctgtgagtcctgaacctcaggactctgccaagttgcgccagagtgggttagcaaatgaaggaacagacgctggatacctgcctgccaattccatgtcttctgtagcttcaggggcctctttttcccaggaaggagggaaagagaatgatacaggatcaaagcaagttggagaaacatcagcacctggagacaccttagatggcacacctcgtactctcaatactgtctttgatttcccaccacctccattagaccaagtgcaggaggaggaatgtgaagtagaaagggtgactgaacatgggacaccaaagccctttcgaaagtttgacagtgtagcttttggagaaagtcaaagtgaggatgaacaatttgaaaatgacttagagacagatccacccaactggcagcagcttgttagtcgagaagtgttactgggactaaaaccttgtgaaatcaaaagacaggaagtgattaatgaattgttctacactgaaagagctcatgttcgaacactgaaggttcttgatcaagtgttctatcagcgagtatccagagaaggaattctgtcaccctcagagctacggaaaattttttcaaacttggaagatattcttcaacttcatattggattgaatgaacaaatgaaggctgttcgaaagagaaatgagacctctgttatcgatcagattggggaagatttgctgacatggttcagcggaccaggagaggagaaattgaaacatgctgctgctaccttttgcagtaaccaacctttcgccctggaaatgatcaaatctcgtcagaaaaaggattctcgatttcagacttttgtgcaagatgctgaaagtaatccactgtgtcgtcgtcttcaactgaaggatattattcccactcaaatgcaaaggcttactaagtacccacttctgttggataatattgccaaatacacagaatggccaacagaaagggagaaggtgaagaaagctgcagatcactgtcgtcagatcttaaattatgtaaatcaggctgtcaaggaggcagaaaacaagcagcgcctagaagattatcagcgtcgccttgatacctccagcctgaagttgtcagagtacccaaatgttgaagagctcaggaatttggatttaacaaaaaggaagatgattcatgaagggccattggtttggaaggtgaatagagataaaactattgatttatacacgttgctgctggaagacattcttgtattgttacaaaagcaggatgatagactggttttaaggtgtcatagtaagattctggcatctacagctgatagcaaacacacgtttagccctgtcattaagttgagtacagtgttggttcgacaagtggcaacagataacaaagctttattcgtcatttccatgtcagacaatggcgctcagatttatgaactggtggcacagacagtttctgaaaagactgtctggcaggacctaatctgtcggatggctgcatcagtgaaggagcaatccacaaagccaattccattaccacagtcaacacctggcgaaggagataatgatgaagaagatccttcaaaattaaaagaggagcagcatggcatttcagtcactggtttgcagagtccagacagagatttgggattagaatctaccttaatatcgtcaaaacctcagtctcattcactgagtacctctgggaaatcagaggtacgtgatctgtttgtggctgagagacagtttgcaaaggaacaacatacagatgggacactaaaggaagttggagaagattatcaaatcgcaatcccagattcacacctgcctgtctcagaagaacggtgggcattggatgcactaagaaatttgggtttgttgaagcagttgctggtgcaacagctaggtttgactgagaagagcgttcaggaagactggcaacatttcccaagatacagaacagcctctcaggggccgcagacagacagtgtcatccagaactctgaaaatattaaggcctatcattctggtgaaggacatatgccctttagaactggaactggtgacattgcaacttgttacagtccacggacttcaactgaatcttttgctccacgggattcagtgggactggcaccccaggatagccaggcaagtaacattttagtaatggaccacatgattatgaccccagagatgcctaccatggagccagaagggggtcttgatgacagtggagagcacttttttgatgcccgtgaagcacatagtgatgagaatccatcagaaggtgatggagcagttaacaaggaagagaaggatgttaatttacgcatctcaggaaactatttgatccttgatggctatgacccagtgcaggagagttccacagatgaggaggttgcttcctcacttaccctgcagcccatgacaggcatccctgctgtggaatccacccaccagcagcaacattctcctcagaatactcactccgatggggcaatttcaccattcacccccgaatttctggtccagcagcgctggggagctatggagtattcctgttttgagatccagagtccctcctcttgtgcagattcacagagccagatcatggagtacattcataagatagaggctgaccttgaacacttaaagaaggtggaggaaagttacaccattctttgccaaaggctggctggatcagccctcacagacaagcactcagataaaagttagagccgcatgtcctggaggtgactgcaggttgttggatttggagtatcggccgtgtctcaccacatcctggctccagtgtggatgcagagagagtgtgacagaggatctgcctgtgaaccacctgggattagtcaagtcccaaggtgcccagagtgggactagttcttcacagtgtggcagctgcactaatctgtttgtgagggaatatccattccctcactctactctcctcactatcggaaattcattttgattcagaataaaaaccaaatgtatagagctttgggtgtaggatatgaaattgtacttagatttaagaaaaagagaaaatcagatgtatttatttgacttcattccgtatttgaaagcacattttaatttttatttgccttgttttgttttaattgagtagtgagagttttagacctttgtctttagtacacccaaggatcaactgctcctgaagcaaagaggtcaggatggagtatgcagaagttgggtagagaggttaagaagaggaggaagtgagacggggaagggaggagcaccttgcttcactatacagtattccaagctctctgctgtccagtaggctgcttctctgagggtcacctcaaaggtatgctatgccgtgtggctcttatgtgcccaggtggtgtggtcagagagtggatgggcttcctcccgccctgaggcaagcacctcttctctgtagctgggatcaaccacaattaataggaatcctcaacatactaaatagcaggcacttgaaaatgggtgtgttttcttccattgtcgtcttttctattgagggttgggatttgggtgggagaggaaagcaaattttattttcttgactataaatttgttattcttggtatcatttcatttttataattatacattagacattggcacttgtgtaaaactgtccctgcagattgagcaggaagtaaaaacaaatggaaatgcttcggatagtggcaggggtgggggttgctaaggaaagggtgggatgggagtgggtaaagagtttgggaaggttatctaactgaatcactactgagttgaatcatggctatcattagccacaggtactgctgattataaggccagtaaaattttagtacctggaggtttgactctaatttttgcactgatggtgccaaagggccctgagtcaaaaggatagccaagggtggagtggaaaaagatatggtgaaggcagaactgctcacaccagctccagaagcacgtcctctgacttcactgccgcagctctttccacacggggccgtgattgaccctaaaaattgcagaccagcacatacactggacactgcaggcaaggtgttggtaactgcctgctctaggatgaatagtagcgttagcagcaccctacagagggtaagtttcagaattgtaatttgagaactccttcaattatattgactttctttggttttccttgtgcattaggtatatattttttgaagtatttttgccaactaaaatgaagtctgtaaattctgttaataaacaaggagttcatccgttgctcacatctttcattggtgccctctgaactctgtgggttgctaggatgtaattttaatgcttccctgcagtccaaagatgattttttcaccacaaatggtaagggatgcccacctacttttataaacaccactgcaacttaacaagtttatttatctatgtccagatttctgtttctgtcctaaattgatctgtgtttttaggtggatcaacttggatctttagacctcatctataaattgaaattatatttttagtcataagccaagtacaatctaactcagaatgggattaaaaattttagaagcagaagctaatatataaatgaagtttgggatttggaactttctgtatctcttaggaggaacaagtaaaaaccaaatggttacattgtgctgctagaaataatgtcattctcaattaaaagggttacacctgtagccacttgacactaacaccatcgagggcaattaatcaggagaaaagtaaatataaaaactttgctcttaacgtcacacactacagggtaattatgtaattctctagcactcaattaagaagcttgtaggttagcaaaatttcagtttctctagttcagccagtgtcttgtccttagtaattatttgctttccctgcagttcaatttctccttggaactctaacaggactaactggaaaaatactttgaccatagctctagtacttccaaataaattcatatctagattttcaaacaaagccccaagatgaagtctaattctgaaaatatctcacaatttttgaatgttctttttatcttaccgacctaacttctcttttccctcccaacttggcctcccacacgttccatttcattttggccattatagtcacatccgtttgactttggttgtgacatcttcctttcaggatgatggaattagatgcagtctgtctttgagtgagactggtcaccatcagaggagttttttctaagtgacgtgactagaagttgaaatctacttccctgctaaagggcacaggggtggtgtacaaagaaagctaccttcccagagcaagcaggctgcattttagctatggaagtgacctgctgtgacactgtgctctcttctgtgggcttaatggttcctttgctatgaagtggcaaattacatgtagagtgtctccttccttttcagagaacagttaatcaaggcaaatcagcaagcccccaaagtgctgtaatttaacatcatgattaccaccttcgaagctatatattttgcatactttaaaatcacctaacttggactgcttgaattacattggcttttagaaccgaaattgtaactatgtattgtatttcatgggaggtatattttatgagctttttggctttcttttttcccacagcaactgccaatgaaggatgaatcccctttttaaaaagttgttgttgttgttgtttatttgattttgagttaggagggataatagagaagtccatttaaaaattatttttagaagctaaagaaagtaattatgcttcctgtgaattgtcttttactggcatctttgttttcctctttgatgttagtaaatttggtgtaatacgtggggcttccatatttcaaagtggaagctttcttctctgaagtcgatatatggttttgaattactagagctttggtcagtatttccttccctatatgtcacagagggcaccactgagaactgcgtgcataggacctcaaaatacaaaattagcagggcctcacagtcagcttcctcatggctagtttttcccccttatattacaatttttgttttataagtcatttttttcctgatatttccaccacttttcagagtcatctacaaaatttttctttcctcaagaaaagagttccttttgccttattccttatgccttccccactggtattgagggttttgataataaattggtaggaaaaaaaagtacctcctagaaggaagccttccccaccatttccaggtgccaactgctaagcagatatattccaaaaatggtaactgtcatgtgcacactgttggttatttttaataagcctcttcctactagaacattttattttccttgttcaccatacaatcatgtactctttaacagaaattgcttttaaaaaatatctggaactatctttaaaaaaactttattaataatcatgtatttttactgatcacattttgaaatgcctaaaagactttattgttctaattatccagatgtacctttgtaaaatagctcttttatgaattagctgataaggctgtatgtttctggaacaaaatattggtcatctaaaaactttctgttttctggggtctgggaaaatagaaaataagatttcaaatattaaataagcttaaaggaaccaagcatgtgactttttatttgtattctggttgatttgtcttgtccaagttatattagaaaagttgaggagtcgaggagcctgtaattaattttcctgtcagtgactgtcagacatcttcctgcttattagagcatccctagcaacaaggctaaaccttcatgacagtgctggcaggtgggcttgccctagcatgtggggcaggtttgttgtttttttaatagctttattgagatattcacatatcatataattcatccatttaaagtgtataatcagatgggttttggtatattattgatttttaattgtggtgaaatatatatataacaaaatttgctattgtaactatttttaagtataaagttcagtgaggtaggccagcttttatgacgcacctgaagataactttggttttaatcctaccctaaatgaagcatatgcctctatttttcctgtccccagtgctgggcttcttcacataccaacatttctgtgcttttaccaacagcattttagctcagaaggctcgcttactttgggcatttgctgtattttggttttgaaatacttgtaatttgacttattcttgggataatattttagttttcagtcattcaagggcacatttggctgacggagctaataagcgtaataaaatgcttagtagtttataccatcttttagttaaacattttaaagattaagactattcaaatgtactttgcggaaattaacctgtttgtatgcctggctttgtttacaaacatatatctatatctatatatatagatacagatacagatacatatctggtggaacaaagaaatacctgtaccattcccacttgctctttgatagccacctcctaggaatggagacaataaaactctgtatttgcatgtg

SEQ ID NO: 75978 - DNA, 4578 bp, Artificial Sequence
  derived and/or modified sequence
atgagcggcacccagagcaccatcaccgacagattccccctgaagaagcccatcagacacggcagcatcctgaacagagagagccccaccgacaagaagcagaaggtggagagaatcgccagccacgacttcgaccccaccggcctggtgcagagatgcgtgatcatccagaaggacgacaacggcttcggcctgaccgtgagcggcgacaaccccgtgttcgtgcagagcgtgaaggaggacggcgccgccatgagagccggcgtgcagaccggcgacagaatcatcaaggtgaacggcaccctggtgacccacagcaaccacctggaggtggtgaagctgatcaagagcggcagctacgtggccctgaccgtgcagggcagaccccccggcagcccccagatccccctggccgacagcgaggtggagcccagcgtgatcggccacatgagccccatcatgaccagcccccacagccccggcgccagcggcaacatggagagaatcaccagccccgtgctgatgggcgaggagaacaacgtggtgcacaaccagaaggtggagatcctgagaaagatgctgcagaaggagcaggagagactgcagctgctgcaggaggactacaacagaacccccgcccagagactgctgaaggagatccaggaggccaagaagcacatcccccagctgcaggagcagctgagcaaggccaccggcagcgcccaggacggcgccgtggtgacccccagcagacccctgggcgacaccctgaccgtgagcgaggccgagaccgaccccggcgacgtgctgggcagaaccgactgcagcagcggcgacgccagcagacccagcagcgacaacgccgacagccccaagagcggccccaaggagagaatctacctggaggagaaccccgagaagagcgagaccatccaggacaccgacacccagagcctggtgggcagccccagcaccagaatcgccccccacatcatcggcgccgaggacgacgacttcggcaccgagcacgagcagatcaacggccagtgcagctgcttccagagcatcgagctgctgaagagcagacccgcccacctggccgtgttcctgcaccacgtggtgagccagttcgaccccgccaccctgctgtgctacctgtacagcgacctgtacaagcacaccaacagcaaggagaccagaagaatcttcctggagttccaccagttcttcctggacagaagcgcccacctgaaggtgagcgtgcccgacgagatgagcgccgacctggagaagagaagacccgagctgatccccgaggacctgcacagacactacatccagaccatgcaggagagagtgcaccccgaggtgcagagacacctggaggacttcagacagaagagaagcatgggcctgaccctggccgagagcgagctgaccaagctggacgccgagagagacaaggacagactgaccctggagaaggagagaacctgcgccgagcagatcgtggccaagatcgaggaggtgctgatgaccgcccaggccgtggaggaggacaagagcagcaccatgcagtacgtgatcctgatgtacatgaagcacctgggcgtgaaggtgaaggagcccagaaacctggagcacaagagaggcagaatcggcttcctgcccaagatcaagcagagcatgaagaaggacaaggagggcgaggagaagggcaagagaagaggcttccccagcatcctgggcccccccagaagacccagcagacacgacaacagcgccatcggcagagccatggagctgcagaaggccagacaccccaagcacctgagcacccccagcagcgtgagccccgagccccaggacagcgccaagctgagacagagcggcctggccaacgagggcaccgacgccggctacctgcccgccaacagcatgagcagcgtggccagcggcgccagcttcagccaggagggcggcaaggagaacgacaccggcagcaagcaggtgggcgagaccagcgcccccggcgacaccctggacggcacccccagaaccctgaacaccgtgttcgacttcccccccccccccctggaccaggtgcaggaggaggagtgcgaggtggagagagtgaccgagcacggcacccccaagcccttcagaaagttcgacagcgtggccttcggcgagagccagagcgaggacgagcagttcgagaacgacctggagaccgacccccccaactggcagcagctggtgagcagagaggtgctgctgggcctgaagccctgcgagatcaagagacaggaggtgatcaacgagctgttctacaccgagagagcccacgtgagaaccctgaaggtgctggaccaggtgttctaccagagagtgagcagagagggcatcctgagccccagcgagctgagaaagatcttcagcaacctggaggacatcctgcagctgcacatcggcctgaacgagcagatgaaggccgtgagaaagagaaacgagaccagcgtgatcgaccagatcggcgaggacctgctgacctggttcagcggccccggcgaggagaagctgaagcacgccgccgccaccttctgcagcaaccagcccttcgccctggagatgatcaagagcagacagaagaaggacagcagattccagaccttcgtgcaggacgccgagagcaaccccctgtgcagaagactgcagctgaaggacatcatccccacccagatgcagagactgaccaagtaccccctgctgctggacaacatcgccaagtacaccgagtggcccaccgagagagagaaggtgaagaaggccgccgaccactgcagacagatcctgaactacgtgaaccaggccgtgaaggaggccgagaacaagcagagactggaggactaccagagaagactggacaccagcagcctgaagctgagcgagtaccccaacgtggaggagctgagaaacctggacctgaccaagagaaagatgatccacgagggccccctggtgtggaaggtgaacagagacaagaccatcgacctgtacaccctgctgctggaggacatcctggtgctgctgcagaagcaggacgacagactggtgctgagatgccacagcaagatcctggccagcaccgccgacagcaagcacaccttcagccccgtgatcaagctgagcaccgtgctggtgagacaggtggccaccgacaacaaggccctgttcgtgatcagcatgagcgacaacggcgcccagatctacgagctggtggcccagaccgtgagcgagaagaccgtgtggcaggacctgatctgcagaatggccgccagcgtgaaggagcagagcaccaagcccatccccctgccccagagcacccccggcgagggcgacaacgacgaggaggaccccagcaagctgaaggaggagcagcacggcatcagcgtgaccggcctgcagagccccgacagagacctgggcctggagagcaccctgatcagcagcaagccccagagccacagcctgagcaccagcggcaagagcgaggtgagagacctgttcgtggccgagagacagttcgccaaggagcagcacaccgacggcaccctgaaggaggtgggcgaggactaccagatcgccatccccgacagccacctgcccgtgagcgaggagagatgggccctggacgccctgagaaacctgggcctgctgaagcagctgctggtgcagcagctgggcctgaccgagaagagcgtgcaggaggactggcagcacttccccagatacagaaccgccagccagggcccccagaccgacagcgtgatccagaacagcgagaacatcaaggcctaccacagcggcgagggccacatgcccttcagaaccggcaccggcgacatcgccacctgctacagccccagaaccagcaccgagagcttcgcccccagagacagcgtgggcctggccccccaggacagccaggccagcaacatcctggtgatggaccacatgatcatgacccccgagatgcccaccatggagcccgagggcggcctggacgacagcggcgagcacttcttcgacgccagagaggcccacagcgacgagaaccccagcgagggcgacggcgccgtgaacaaggaggagaaggacgtgaacctgagaatcagcggcaactacctgatcctggacggctacgaccccgtgcaggagagcagcaccgacgaggaggtggccagcagcctgaccctgcagcccatgaccggcatccccgccgtggagagcacccaccagcagcagcacagcccccagaacacccacagcgacggcgccatcagccccttcacccccgagttcctggtgcagcagagatggggcgccatggagtacagctgcttcgagatccagagccccagcagctgcgccgacagccagagccagatcatggagtacatccacaagatcgaggccgacctggagcacctgaagaaggtggaggagagctacaccatcctgtgccagagactggccggcagcgccctgaccgacaagcacagcgacaagagctag

SEQ ID NO: 75979 - DNA, 141 bp, Artificial Sequence
  derived and/or modified sequence
atgccagactctcccgtggacgtcaagacgcaaagcagacttaccccgccgaccatgccaccacccccaactacccagggcgcccctcgaacgagctcttttactcccaccacactgactaacggtaccagccattcctag

SEQ ID NO: 75980 - DNA, 141 bp, Artificial Sequence
  derived and/or modified sequence
atgccagacagccctgtggatgtgaagacccagagccggctgaccccacccaccatgcctcctccacccaccacccagggcgcccccaggaccagcagcttcacccccaccaccctgaccaacggcaccagccacagctag

SEQ ID NO: 75981 - DNA, 2370 bp, Artificial Sequence
  derived and/or modified sequence
caggagaagtgaagatgtaacatgttatctgtcgctcctcttagctggcggagagaatttacatttaaagattagcagagtgagaaagagaaatctgccttttgttgtgtggggtgaggaggaggcatctacccctggccttgacgctatctcccatcacctctgctatccagacaggactcaccgagatcgtactgagaagcactccacaatgccagactcacctgtggatgtgaagacgcaatctaggctgactcctccaacaatgccacctcccccaactactcaaggagctccaagaaccagttcatttacaccgacaacgttaactaatggcacgagccattctcctacagccttgaatggcgccccctcaccacccaatggcttcagcaatgggccttcctcttcttcctcctcctctctggctaatcaacagctgcccccagcctgtggtgccaggcaactcagcaagctgaaaaggttccttactaccctgcagcagtttggcaatgacatttcacccgagataggagaaagagttcgcaccctcgttctgggactagtgaactccactttgacaattgaagaatttcattccaaactgcaagaagctactaacttcccactgagaccttttgtcatcccatttttgaaggccaacttgcccctgctgcagcgtgagctcctccactgcgcaagactggccaaacagaaccctgcccagtacctcgcccagcatgaacagctgcttctggatgccagcaccacctcacctgttgactcctcagagctgcttctcgatgtgaacgaaaacgggaagaggcgaactccagacagaaccaaagaaaatggctttgacagagagcctttgcactcagaacatccaagcaagcgaccatgcactattagcccaggccagcggtacagtccaaataacggcttatcctaccagcccaatggcctgcctcaccctaccccacctccacctcagcattaccgtttggatgatatggccattgcccaccactacagggactcctatcgacaccccagccacagggacctcagggacagaaacagacctatggggttgcatggcacacgtcaagaagaaatgattgatcacagactaacagacagagaatgggcagaagagtggaaacatcttgaccatctgttaaactgcataatggacatggtagaaaaaacaaggcgatctctcaccgtactaaggcggtgtcaagaagcagaccgggaagaattgaattactggatccggcggtacagtgacgccgaggacttaaaaaaaggtggcggcagtagcagcagccactctaggcagcagagtcccgtcaacccagacccagttgcactagacgcgcatcgggaattccttcacaggcctgcgtctggatacgtgccagaggagatctggaagaaagctgaggaggccgtcaatgaggtgaagcgccaggcgatgacggagctgcagaaggccgtgtctgaggcggagcggaaagcccacgacatgatcacaacagagagggccaagatggagcgcacggtcgccgaggccaaacggcaggcggcggaggacgcactggcagttatcaatcagcaggaggattcaagcgagagttgctggaattgtggccgtaaagcgagtgaaacctgcagtggctgtaacacagcccgatactgtggctcattttgccagcacaaagactgggagaagcaccatcacatctgtggacagaccctgcaggcccagcagcagggagacacacctgcagtcagctcctctgtcacgcccaacagcggggctgggagcccgatggacacaccaccagcagccactccgaggtcaaccaccccgggaaccccttccaccatagagacaacccctcgctagacgtgaactcagaactgtcggaggaaagacaacacaaccaacgcgaaaccaattcctcatcctcagatgctcaaagttgttttttttgtttgtttgtttattagatgaattatcctatttcagtacttcagcaagagagaacctaactgtatcttgaggtggtagtaaaacacagagggccagtaacgggtcgtaatgacttattgtggataacaaagatatcttttctttagagaactgaaaagagagcagagaatataacatgaaatgatagatttgacctcctccctgttattttcaagtagctgggattttaaactagatgacctcattaaccgatgctttaccaaacagcaaaccaagagattgctaattgctgttgaaagcaaaaatgctaatattaaaagtcacaatgttctttatatacaataatggaaaaaaaaaaaagaggaaaa

SEQ ID NO: 75982 - DNA, 553 bp, Artificial Sequence
  derived and/or modified sequence
ctctctccctctctccctttccaaatgattcagaagtcgataagaccaggagaagtgaagatgtaacatgttatctgtcgctcctcttagctggcggagagaatttacatttaaagattagcagagtgagaaagagaaatctgccttttgttgtgtggggtgaggaggaggcatctacccctggccttgacgctatctcccatcacctctgctatccagacaggactcaccgagtatcaaatgataagaactgagcacactggatgaaataatacttgcactgggagcactaagaaaagattgatctctgggctggtgaacataatctctgtcccagtcagaaaaggagagaggaaattagcagagcgattggtggagaatgatatctgtcaaaagaaacacttggagagcactgagtttagtaataggtgactgccggaaaaaagggaactttgaatattgtcaaggcgcacgcgcccagcaccctgcctccggcgatgccgccccagcccctctgatggccctcctctctgctgccactcattccagaaca

SEQ ID NO: 75983 - DNA, 548 bp, Artificial Sequence
  derived and/or modified sequence
acttctgataagctccaatgtgtgtttaatgaatacaaagccgcggtctgggtgccgcctcggccgcggccgctctcccgcgctcctttgccagaagctggcggagagaatttacatttaaagattagcagagtgagaaagagaaatctgccttttgttgtgtggggtgaggaggaggcatctacccctggccttgacgctatctcccatcacctctgctatccagacaggactcaccgagtatcaaatgataagaactgagcacactggatgaaataatacttgcactgggagcactaagaaaagattgatctctgggctggtgaacataatctctgtcccagtcagaaaaggagagaggaaattagcagagcgattggtggagaatgatatctgtcaaaagaaacacttggagagcactgagtttagtaataggtgactgccggaaaaaagggaactttgaatattgtcaagatcgtactgagaagcactccacaatgccagactcacctgtggatgtgaagacgcaatctaggctgactcctcca

SEQ ID NO: 75984 - DNA, 491 bp, Artificial Sequence
  derived and/or modified sequence
aagtcgataagaccaggagaagtgaagatgtaacatgttatctgtcgctcctcttagctggcggagagaatttacatttaaagattagcagagtgagaaagagaaatctgccttttgttgtgtggggtgaggaggaggcatctacccctggccttgacgctatctcccatcacctctgctatccagacaggactcaccgagtatcaaatgataagaactgagcacactggatgaaataatacttgcactgggagcactaagaaaagattgatctctgggctggtgaacataatctctgtcccagtcagaaaaggagagaggaaattagcagagcgattggtggagaatgatatctgtcaaaagaaacacttggagagcactgagtttagtaataggtgactgccggaaaaaagggaactttgaatattgtcaagatcgtactgagaagcactccacaatgccagactcacctgtggatgtgaagacgcaat

SEQ ID NO: 75985 - DNA, 574 bp, Artificial Sequence
  derived and/or modified sequence
gattcagaagtcgataagaccaggagaagtgaagatgtaacatgttatctgtcgctcctcttagctggcggagagaatttacatttaaagattagcagagtgagaaagagaaatctgccttttgttgtgtggggtgaggaggaggcatctacccctggccttgacgctatctcccatcacctctgctatccagacaggactcaccgagataaaccccacttgaaaaactgaggtgcttaaggagtaaaataatatgttcctggtggcatcctccagatcgtactgagaagcactccacaatgccagactcacctgtggatgtgaagacgcaatctaggctgactcctccaacaatgccacctcccccaactactcaaggagctccaagaaccagttcatttacaccgacaacgttaactaatggcacgagccattctcctacagccttgaatggcgccccctcaccacccaatggcttcagcaatgggccttcctcttcttcctcctcctctctggctaatcaacagctgcccccagcctgtggtgccaggcaactcagcaagctgaaaaggtt

SEQ ID NO: 75986 - DNA, 730 bp, Artificial Sequence
  derived and/or modified sequence
tgattcagaagtcgataagaccaggagaagtgaagatgtaacatgttatctgtcgctcctcttagctggcggagagaatttacatttaaagattagcagagtgagaaagagaaatctgccttttgttgtgtggggtgaggaggaggcatctacccctggccttgacgctatctcccatcacctctgctatccagacaggactcaccgaggcgcacgcgcccagcaccctgcctccggcgatgccgccccagcccctctgatggccctcctctctgctgccactcattccagaacaggaggcatgagcccggaacgcgcttgcttttaggagacagccactttctgtgtggtacgctggattcaaggatgcctgataaaccccacttgaaaaactgaggtgcttaaggagtaaaataatatgttcctggtggcatcctccagatcgtactgagaagcactccacaatgccagactcacctgtggatgtgaagacgcaatctaggctgactcctccaacaatgccacctcccccaactactcaaggagctccaagaaccagttcatttacaccgacaacgttaactaatggcacgagccattctcctacagccttgaatggcgccccctcaccacccaatggcttcagcaatgggccttcctcttcttcctcctcctctctggctaatcaacagctgcccccagcctgtggtgccaggcaactcagcaagct

SEQ ID NO: 75987 - DNA, 141 bp, Artificial Sequence
  derived and/or modified sequence
atgcccgacagccccgtggacgtgaagacccagagccggctgacccctcctaccatgccaccacccccaactacccaaggagccccacgtaccagttccttcactcccacgacccttactaatgggaccagccattcctag

SEQ ID NO: 75988 - DNA, 141 bp, Artificial Sequence
  derived and/or modified sequence
atgccggattcacctgtcgatgttaagacacagtctcggctgactccaccgactatgccacccccacctaccacccaaggtgcccctcggacatcctcctttacccccactactctgactaacggcacaagccacagctag

SEQ ID NO: 75989 - DNA, 141 bp, Artificial Sequence
  derived and/or modified sequence
atgcccgacagccccgtggacgtgaagacccagagcagactgaccccccccaccatgccccccccccccaccacccagggcgcccccagaaccagcagcttcacccccaccaccctgaccaacggcaccagccacagctag

SEQ ID NO: 75990 - protein, 279 aa, Artificial Sequence
  derived and/or modified sequence
MGELSPLQRPLATEGTMKAQGVLLKLALLALPLLLLLSTPPCAPQVSGIRGDALERFCLQQPLDCDDIYAQGYQSDGVYLIYPSGPSVPVPVFCDMTTEGGKWTVFQKRFNGSVSFFRGWNDYKLGFGRADGEYWLGLQNMHLLTLKQKYELRVDLEDFENNTAYAKYADFSISPNAVSAEEDGYTLFVAGFEDGGAGDSLSYHSGQKFSTFDRDQDLFVQNCAALSSGAFWFRSCHFANLNGFYLGGSHLSYANGINWAQWKGFYYSLKRTEMKIRRA

SEQ ID NO: 75991 - DNA, 840 bp, Artificial Sequence
  derived and/or modified sequence
atgggagagctctcccctctccagaggcctctggccactgaaggaaccatgaaagctcagggagtgctactcaagctggcactacttgccttacccttactcctgctcctttcaacacctccgtgtgccccccaagttagcggcatccgcggggacgcccttgaacggttttgcttacagcagcccctggactgcgatgatatttacgctcaggggtaccagtcagacggggtgtacttgatttatccctcagggccctccgtgcctgtgcccgtattctgtgacatgaccactgaaggtgggaagtggaccgtgtttcaaaaacgttttaatggctctgtgagcttctttaggggatggaatgactataaactaggttttgggagagccgatggcgagtattggctgggactgcagaatatgcatttactgaccttaaaacagaaatatgagctcagagtggacctggaggatttcgagaataataccgcctacgccaaatacgcagacttctctatatctcccaacgccgtgagtgctgaggaagacggttatacgctattcgtggcaggatttgaggatggcggtgccggcgatagcctttcataccactccgggcagaaattttctacattcgatagggaccaggacctgttcgtgcagaactgtgcagcacttagctctggggcattttggttccgttcctgtcattttgcaaatctaaacggattctacctggggggctctcacctgtcctatgcaaacggaataaattgggcccaatggaaagggttttactactccctaaagagaactgaaatgaaaatcaggagggcgtag

SEQ ID NO: 75992 - DNA, 840 bp, Artificial Sequence
  derived and/or modified sequence
atgggagagctgagccccctgcagaggcccctggccacagagggcaccatgaaggcccagggcgtgctgctgaagctggccctgctggccctgcccctgctgctgctgctgagcaccccaccctgtgccccccaggtgtctggcatcagaggagatgccctggagcgcttctgcctgcagcagcccctggactgtgatgacatctatgcccagggctaccagagtgatggagtgtacctgatctaccccagcggccccagcgtgcctgtgcctgtgttctgtgacatgaccacagagggcggcaagtggacagtgttccagaagcgcttcaatggatctgtgtccttcttccggggctggaatgactacaagctgggcttcggccgggcagatggagagtactggctgggcctgcagaacatgcacctgctgaccctgaagcagaagtatgagctgcgggtggacctggaggactttgagaacaacacagcctatgccaagtatgctgacttcagcatcagccccaatgctgtgtctgctgaggaggatggctacaccctgtttgtggccggctttgaagatggaggagctggggacagcctgagctaccacagcggccagaagttcagcacctttgaccgggaccaggacctgtttgtgcagaactgtgccgccctgagcagcggggccttctggttccgcagctgccactttgccaacctgaatggcttctacctgggcggcagccacctgtcctatgccaacggcatcaactgggcccagtggaagggcttctactacagcctgaagaggacagagatgaagatcagaagagcctag

SEQ ID NO: 75993 - DNA, 1903 bp, Artificial Sequence
  derived and/or modified sequence
gacagcatgaaggtacggggcccagggtcgggggactcatagcatgggggaactgagcccactccagaggcccctggccacagagggcactatgaaggcacaaggagttctcttgaaactcgcactcctggccctgccgctgctgctgcttctctccacgcccccgtgtgccccccaggtctccgggatccgaggagatgctctggagaggttttgccttcagcaacccctggactgtgacgacatctatgcccagggctaccagtcagacggcgtgtacctcatctacccctcgggccccagtgtgcctgtgcccgtcttctgtgacatgaccaccgagggcgggaagtggacggttttccagaagagattcaatggctcagtaagtttcttccgcggctggaatgactacaagctgggcttcggccgtgctgatggagagtactggctggggctgcagaacatgcacctcctgacactgaagcagaagtatgagctgcgagtggacttggaggactttgagaacaacacggcctatgccaagtacgctgacttctccatctccccgaacgcggtcagcgcagaggaggatggctacaccctctttgtggcaggctttgaggatggcggggcaggtgactccctgtcctaccacagtggccagaagttctctaccttcgaccgggaccaggacctctttgtgcagaactgcgcagctctctcctcaggagccttctggttccgcagctgccactttgccaacctcaatggcttctacctaggtggctcccacctctcttatgccaatggcatcaactgggcccagtggaagggcttctactactccctcaaacgcactgagatgaaaatccgccgggcctgaagggctggccccctcaggcacctttcctcccctggacacccatggtctccatgagtgctccctctgctgcccctgatgcatgcttctgctgattcccgagcaccaactccttacaagggggccttgtggctctcagccatgccacatccctgtcacacacccagggcatccattcctaagccagacccggctcccctacacctgaagttacactgccagcagttccccaggcctcttccgagaggcacatggttctagcctggacctggctgggctccatgagaatgagttgcctccaacctgtcccaacagctgacagccaggagccactctcccagctgcaggcctttgtggtccatcttgtcctgcttcctcactgtggacccctgtctgggccaccctagtgtgctaagctgagcagtgcagtgtgaacagggcccatggtgtattctaggccacagcccagcactcctctgggctgctctcaaaccatgtcccatcttcagcatccctcccaccaacttactcccctgtggtgagtaccgtggaaccccagcccacctcactatcatactcagcttcccctgatggcccatcccagcccctgaagctctatgccaagaacacagctaccgcacaccaccctgaaacagccacagccaaggtaggcatgcatatgaggtcttccccataccctctgggtgttgagaggtttagccacatgagggagcagaggacaatctctgcagggctgggagtgggtagggactgaaggtctcaataaaccttcagaacctgaatgaactggcttcatacacacaaacatatttgtttatcccccaaatgtaggcacctggctcctccttgctcccctgctgatggtgtcctaccccgaactccaaaaattacacctggagtcaggtgcagaagggaaccttgtatttcacaggcctcattttgatggcaaaaagacagtgtaataataacataataataataaaaatataatactgaaaagga

SEQ ID NO: 75994 - DNA, 840 bp, Artificial Sequence
  derived and/or modified sequence
atgggcgagctgagccccctgcagcggcccctggccaccgagggcactatgaaagcccagggtgttttgctaaaattggcgctgttagctctgcctctgctccttttgttgtccacccccccttgcgcaccccaggtgagcggaatccgcggagacgcgctggaacgcttttgtctccagcagcctctggactgcgacgatatctacgcacagggctaccagtctgatggagtctacctgatctacccaagcggcccctccgtcccagtaccagtcttctgcgatatgaccacggagggggggaagtggaccgtgttccagaaacgctttaacggctccgtctctttctttcgcggctggaatgactataagttgggatttggaagagcagacggtgagtattggttggggctgcagaacatgcacttactgacattaaagcagaaatatgagctccgtgtggatctcgaggatttcgagaacaacaccgcctatgcgaagtacgcagactttagtatcagccctaatgccgtgtcagccgaagaggacggctacacactcttcgtggcgggtttcgaggacggcggggctggagatagcttgagttaccacagcggacagaagttctccacatttgatcgcgatcaggatctgtttgtgcagaactgcgctgccctgagctctggcgctttttggtttcgcagctgtcacttcgccaatcttaatggattctatctggggggcagtcacctctcatacgccaacggtattaattgggcccagtggaaaggattctattactcactcaagcgcactgagatgaagatacggcgtgcctag

SEQ ID NO: 75995 - DNA, 840 bp, Artificial Sequence
  derived and/or modified sequence
atgggggaactgtcaccactccagcgtcctttggctacggagggtactatgaaagctcagggtgtgttgctgaaactggcgctgctggcgctgcctctcctcctgttgctgtctactccgccatgtgcaccccaagtgagcggtatccgcggagacgccctcgaaagattttgcctacagcagccattggattgtgacgatatctacgcacagggctaccagagtgacggcgtgtatctcatttacccaagcggcccatctgtgcctgtccccgtcttttgcgacatgaccacggagggaggtaaatggaccgttttccagaagcggtttaacggctccgtgtcgtttttcagggggtggaatgactataagttgggcttcggcagagcagatggtgaatactggctcggcctgcagaacatgcatcttctcaccctgaagcagaagtatgagctgagggtggatctcgaagacttcgagaataataccgcttacgccaaatacgccgacttttcaatcagtccaaatgcggttagcgcggaggaggacggatataccctcttcgttgcgggattcgaggatggcggtgcgggagactccctgtcctatcatagtggtcagaaattctctacctttgacagggatcaggatctgtttgtccagaactgcgctgccctgtccagtggggctttctggtttcgatcctgtcacttcgccaacctgaatggcttctatctcggcggttcccacctatcttatgccaacgggatcaactgggctcagtggaaaggtttctattattctttaaagcgcaccgaaatgaagattcgtcgggcttag

SEQ ID NO: 75996 - DNA, 840 bp, Artificial Sequence
  derived and/or modified sequence
atgggcgagctgagccccctgcagagacccctggccaccgagggcaccatgaaggcccagggcgtgctgctgaagctggccctgctggccctgcccctgctgctgctgctgagcacccccccctgcgccccccaggtgagcggcatcagaggcgacgccctggagagattctgcctgcagcagcccctggactgcgacgacatctacgcccagggctaccagagcgacggcgtgtacctgatctaccccagcggccccagcgtgcccgtgcccgtgttctgcgacatgaccaccgagggcggcaagtggaccgtgttccagaagagattcaacggcagcgtgagcttcttcagaggctggaacgactacaagctgggcttcggcagagccgacggcgagtactggctgggcctgcagaacatgcacctgctgaccctgaagcagaagtacgagctgagagtggacctggaggacttcgagaacaacaccgcctacgccaagtacgccgacttcagcatcagccccaacgccgtgagcgccgaggaggacggctacaccctgttcgtggccggcttcgaggacggcggcgccggcgacagcctgagctaccacagcggccagaagttcagcaccttcgacagagaccaggacctgttcgtgcagaactgcgccgccctgagcagcggcgccttctggttcagaagctgccacttcgccaacctgaacggcttctacctgggcggcagccacctgagctacgccaacggcatcaactgggcccagtggaagggcttctactacagcctgaagagaaccgagatgaagatcagaagagcctag

SEQ ID NO: 75997 - protein, 373 aa, Artificial Sequence
  derived and/or modified sequence
MGSQVSVESGALHVVIVGGGFGGIAAASQLQALNVPFMLVDMKDSFHHNVAALRASVETGFAKKTFISYSVTFKDNFRQGLVVGIDLKNQMVLLQGGEALPFSHLILATGSTGPFPGKFNEVSSQQAAIQAYEDMVRQVQRSRFIVVVGGGSAGVEMAAEIKTEYPEKEVTLIHSQVALADKELLPSVRQEVKEILLRKGVQLLLSERVSNLEELPLNEYREYIKVQTDKGTEVATNLVILCTGIKINSSAYRKAFESRLASSGALRVNEHLQVEGHSNVYAIGDCADVRTPKMAYLAGLHANIAVANIVNSVKQRPLQAYKPGALTFLLSMGRNDGVGQISGFYVGRLMVRLTKSRDLFVSTSWKTMRQSPP

SEQ ID NO: 75998 - protein, 336 aa, Artificial Sequence
  derived and/or modified sequence
MGSQVSVESGALHVVIVGGGFGGIAAASQLQALNVPFMLVDMKDSFHHNVAALRASVETGFAKKTFISYSVTFKDNFRQGLVVGIDLKNQMVLLQGGEVQRSRFIVVVGGGSAGVEMAAEIKTEYPEKEVTLIHSQVALADKELLPSVRQEVKEILLRKGVQLLLTLLGERVSNLEELPLNEYREYIKVQTDKGTEVATNLVILCTGIKINSSAYRKAFESRLASSGALRVNEHLQVEGHSNVYAIGDCADVRTPKMAYLAGLHANIAVANIVNSVKQRPLQAYKPGALTFLLSMGRNDGVGQISGFYVGRLMVRLTKSRDLFVSTSWKTMRQSPP

SEQ ID NO: 75999 - DNA, 1122 bp, Artificial Sequence
  derived and/or modified sequence
atgggcagccaggtgagcgtggagagcggcgccctgcacgtggtgatcgtgggcggcggcttcggcggcatcgccgccgccagccagctgcaggccctgaacgtgcccttcatgctggtggacatgaaggacagcttccaccacaacgtggccgccctgagagccagcgtggagaccggcttcgccaagaagaccttcatcagctacagcgtgaccttcaaggacaacttcagacagggcctggtggtgggcatcgacctgaagaaccagatggtgctgctgcagggcggcgaggccctgcccttcagccacctgatcctggccaccggcagcaccggccccttccccggcaagttcaacgaggtgagcagccagcaggccgccatccaggcctacgaggacatggtgagacaggtgcagagaagcagattcatcgtggtggtgggcggcggcagcgccggcgtggagatggccgccgagatcaagaccgagtaccccgagaaggaggtgaccctgatccacagccaggtggccctggccgacaaggagctgctgcccagcgtgagacaggaggtgaaggagatcctgctgagaaagggcgtgcagctgctgctgagcgagagagtgagcaacctggaggagctgcccctgaacgagtacagagagtacatcaaggtgcagaccgacaagggcaccgaggtggccaccaacctggtgatcctgtgcaccggcatcaagatcaacagcagcgcctacagaaaggccttcgagagcagactggccagcagcggcgccctgagagtgaacgagcacctgcaggtggagggccacagcaacgtgtacgccatcggcgactgcgccgacgtgagaacccccaagatggcctacctggccggcctgcacgccaacatcgccgtggccaacatcgtgaacagcgtgaagcagagacccctgcaggcctacaagcccggcgccctgaccttcctgctgagcatgggcagaaacgacggcgtgggccagatcagcggcttctacgtgggcagactgatggtgagactgaccaagagcagagacctgttcgtgagcaccagctggaagaccatgagacagagccccccctag

SEQ ID NO: 76000 - DNA, 1011 bp, Artificial Sequence
  derived and/or modified sequence
atgggcagccaggtgagcgtggagagcggcgccctgcacgtggtgatcgtgggcggcggcttcggcggcatcgccgccgccagccagctgcaggccctgaacgtgcccttcatgctggtggacatgaaggacagcttccaccacaacgtggccgccctgagagccagcgtggagaccggcttcgccaagaagaccttcatcagctacagcgtgaccttcaaggacaacttcagacagggcctggtggtgggcatcgacctgaagaaccagatggtgctgctgcagggcggcgaggtgcagagaagcagattcatcgtggtggtgggcggcggcagcgccggcgtggagatggccgccgagatcaagaccgagtaccccgagaaggaggtgaccctgatccacagccaggtggccctggccgacaaggagctgctgcccagcgtgagacaggaggtgaaggagatcctgctgagaaagggcgtgcagctgctgctgaccctgctgggcgagagagtgagcaacctggaggagctgcccctgaacgagtacagagagtacatcaaggtgcagaccgacaagggcaccgaggtggccaccaacctggtgatcctgtgcaccggcatcaagatcaacagcagcgcctacagaaaggccttcgagagcagactggccagcagcggcgccctgagagtgaacgagcacctgcaggtggagggccacagcaacgtgtacgccatcggcgactgcgccgacgtgagaacccccaagatggcctacctggccggcctgcacgccaacatcgccgtggccaacatcgtgaacagcgtgaagcagagacccctgcaggcctacaagcccggcgccctgaccttcctgctgagcatgggcagaaacgacggcgtgggccagatcagcggcttctacgtgggcagactgatggtgagactgaccaagagcagagacctgttcgtgagcaccagctggaagaccatgagacagagccccccctag

SEQ ID NO: 76001 - DNA, 1122 bp, Artificial Sequence
  derived and/or modified sequence
atgggctcccaggtcagcgtcgagtctggtgccctccacgtggttatcgtaggcggaggctttggcgggatcgctgctgcatcccagcttcaggctcttaacgtgccctttatgcttgttgatatgaaggattcctttcaccataatgtagctgcgctccgggcatccgtggagacaggcttcgccaagaaaacattcatctcttattccgttacgttcaaggacaactttagacagggcctagtggtcggaatcgatctaaaaaaccagatggtgctgcttcaggggggggaggcactgcccttctcacacctgatcctcgcaacaggatctacagggccgttccccggaaagttcaacgaagtatcctcacagcaggctgccattcaggcctacgaagatatggtccggcaggtccagcgctccagattcatcgtcgtcgtgggggggggatctgccggtgtcgaaatggctgccgagataaaaaccgagtacccagagaaagaagttaccctgattcacagccaagtcgctcttgccgacaaggaactacttccgtcggtgcgccaagaagtcaaagagatcttactccgcaagggcgttcagctacttctctccgaaagagtgtctaacctggaggaactaccacttaatgaataccgcgaatacatcaaggttcagactgacaagggaaccgaggtggcaacaaatctggtgattctgtgtaccggcatcaagattaatagctctgcttatcggaaagcttttgaaagtagacttgccagttctggcgctctccgagttaatgagcacttacaagtggaggggcacagcaacgtgtatgccattggagattgcgccgacgtgcgaacgcctaaaatggcctatcttgcgggactgcatgccaacattgcggtggcaaatattgtgaactcggtgaagcaaagaccgctgcaggcctacaagcccggagccctaactttcctcctgtccatgggccggaatgatggtgtcggacagatcagcggtttttacgtcggccgtctgatggtgaggttgactaagtctcgagatctgttcgtgtcaacttcctggaagacaatgcgccagtctcccccatag

SEQ ID NO: 76002 - DNA, 1122 bp, Artificial Sequence
  derived and/or modified sequence
atgggctcccaagtttctgtggaatctggggcgctccatgtagtgatcgttggcgggggctttggcggcatcgcagcagccagtcagctgcaggccctcaatgtgccattcatgctcgtcgacatgaaggattccttccaccataacgtggctgccctgagagccagtgtcgagaccggcttcgcgaagaagacatttatctcttactcagttacatttaaggataacttcaggcaaggactggtcgtggggattgatcttaaaaaccagatggtactattacagggcggggaagctctgcccttttctcacttaatactggcgaccggttctacagggccctttccaggcaagttcaatgaagtgtctagccagcaggccgctatccaggcatacgaggacatggtgcggcaagtgcagcgcagtaggtttatcgtggtagtcgggggcggctccgcaggggtggagatggctgctgaaattaaaaccgaataccccgaaaaggaagtgacattgatccacagccaggtggctttggcagacaaggaactgctcccaagtgttcgacaggaggtgaaggaaatcttgctccggaaaggcgtgcagctcctcttgagcgaacgagtgtcaaatctggaggaacttccactgaatgagtatcgggaatatatcaaagttcagaccgataagggtaccgaggtggctacaaatctggtaattttgtgcaccggaatcaaaatcaactctagcgcgtatcgaaaagcgttcgaatcccggctggcatcctctggcgcccttagagtaaatgaacacctgcaagtggaagggcacagcaatgtctacgccattggtgattgcgccgacgtgaggactccgaaaatggcttatctggctggtttgcacgctaatattgcagttgctaacattgtgaatagtgtcaaacagaggcccctccaggcatacaaacccggtgcgctgaccttcctgctgtctatgggaagaaatgacggcgtgggtcagatcagtggattctacgtgggaagattaatggttaggttaacaaagagtagggacctgtttgtcagcacatcgtggaagactatgagacagtcacctccctag

SEQ ID NO: 76003 - DNA, 1011 bp, Artificial Sequence
  derived and/or modified sequence
atgggatcccaggtatctgtggagtccggagcccttcatgtggtgattgtgggaggcggttttggtgggatcgcagcagccagccagttgcaggcactgaacgtgccctttatgctggtggatatgaaggactcattccaccacaatgtggccgcactcagggcctctgtcgagactggattcgccaaaaaaacgtttatttcatattcggtcaccttcaaagacaacttcagacagggccttgtagtgggaatcgatctcaagaatcagatggtccttctacaggggggtgaggtccagaggtccaggtttatcgtagttgtggggggcggtagtgctggcgtcgaaatggccgccgaaatcaaaactgaatatcccgagaaagaggtcaccctgatccacagccaggtggccctggctgacaaagaactgttacccagcgttcggcaggaagtgaaagaaatactcctccggaaaggtgttcagctactattaaccttgctcggggagcgggtttcaaaccttgaggagctgccgcttaatgagtatagggaatacataaaggtgcagacagataaggggacagaggttgccaccaatttagtgatactatgtaccggaattaaaatcaacagtagtgcatacagaaaagcatttgaaagtcgactggcctcttccggcgccctccgggtgaacgagcaccttcaagtcgagggacatagtaacgtgtatgccataggtgattgcgccgacgtgaggactcccaagatggcttatctggccggactgcacgcaaacatcgctgtggcaaatattgtcaacagcgtcaagcagcggcctttgcaggcatacaagcctggcgcgctgacgtttctgctgtccatgggacggaatgatggggttgggcaaattagcggcttctatgtcggccggctcatggttaggctcacaaagtcaagagatttgtttgtctccacatcctggaagacaatgaggcagtctccaccatag

SEQ ID NO: 76004 - DNA, 1122 bp, Artificial Sequence
  derived and/or modified sequence
atgggcagccaggtgtctgtggagagcggggccctgcacgtggtgattgtgggcggcggctttggaggcattgctgctgccagccagctgcaggccctgaatgtgcccttcatgctggtggacatgaaggacagcttccaccacaacgtggccgccctgcgggcctctgtggagactggatttgccaagaagaccttcatctcctacagcgtgaccttcaaggacaacttccggcagggcctggtggtgggcatcgacctgaagaaccagatggtgctgctgcagggcggggaggccctgcccttcagccacctgatcctggccaccggcagcacaggccccttccctgggaagttcaatgaggtgagcagccagcaggccgccatccaggcctatgaggacatggtgcggcaggtgcagaggagccgcttcatcgtggtggtgggcggcggcagcgctggggtggagatggctgctgagatcaagacagagtacccagagaaggaggtgaccctcatccacagccaggtggccctggccgacaaggagctgctgcccagcgtgcggcaggaggtgaaggagatcctgctgaggaaaggagtgcagctgctgctgtctgagcgggtgagcaacctggaggagctgcccctgaatgagtaccgggagtacatcaaggtgcagacagacaagggcacagaggtggccaccaacctggtgatcctgtgcaccggcatcaagatcaacagcagcgcctacaggaaggcctttgagagccggctggccagcagcggggccctgcgggtgaatgagcacctgcaggtggagggccacagcaatgtgtatgccatcggggactgtgctgatgtgaggacccccaagatggcctacctggccggcctgcacgccaacattgctgtggccaacatcgtgaacagcgtgaagcagaggcccctgcaggcctacaagccaggggccctgaccttcctgctgtccatgggcagaaatgatggagtgggccagatcagcggcttctacgtgggccgcctgatggtgcggctgaccaagagccgggacctgtttgtgtccacctcctggaagaccatgaggcagagccccccatag

SEQ ID NO: 76005 - DNA, 1011 bp, Artificial Sequence
  derived and/or modified sequence
atgggcagccaggtgtctgtggagagcggggccctgcacgtggtgattgtgggcggcggctttggaggcattgctgctgccagccagctgcaggccctgaatgtgcccttcatgctggtggacatgaaggacagcttccaccacaacgtggccgccctgcgggcctctgtggagactggatttgccaagaagaccttcatctcctacagcgtgaccttcaaggacaacttccggcagggcctggtggtgggcatcgacctgaagaaccagatggtgctgctgcagggcggggaggtgcagaggagccgcttcatcgtggtggtgggcggcggcagcgctggggtggagatggctgctgagatcaagacagagtacccagagaaggaggtgaccctcatccacagccaggtggccctggccgacaaggagctgctgcccagcgtgcggcaggaggtgaaggagatcctgctgaggaaaggagtgcagctgctgctgaccctgctgggggagcgggtgagcaacctggaggagctgcccctgaatgagtaccgggagtacatcaaggtgcagacagacaagggcacagaggtggccaccaacctggtgatcctgtgcaccggcatcaagatcaacagcagcgcctacaggaaggcctttgagagccggctggccagcagcggggccctgcgggtgaatgagcacctgcaggtggagggccacagcaatgtgtatgccatcggggactgtgctgatgtgaggacccccaagatggcctacctggccggcctgcacgccaacattgctgtggccaacatcgtgaacagcgtgaagcagaggcccctgcaggcctacaagccaggggccctgaccttcctgctgtccatgggcagaaatgatggagtgggccagatcagcggcttctacgtgggccgcctgatggtgcggctgaccaagagccgggacctgtttgtgtccacctcctggaagaccatgaggcagagccccccatag

SEQ ID NO: 76006 - DNA, 1122 bp, Artificial Sequence
  derived and/or modified sequence
atgggcagccaggtgagcgtggagagcggcgccctgcacgtggtgattgtaggaggcggttttggtgggattgcggccgcttctcagttgcaggctttgaatgtgcctttcatgctcgttgatatgaaagacagctttcaccacaacgtggccgcccttagggcatctgttgagacagggttcgccaaaaaaacatttattagttacagtgtgacatttaaagataactttagacaggggctggtggtggggatagacctgaagaaccaaatggtgttgctgcagggaggcgaggctctcccattcagtcatctgattctggcaactggctccacaggcccatttccaggtaaatttaatgaagtgtccagtcaacaggctgcaattcaggcatacgaggacatggtcaggcaggttcagagaagtagattcatcgtggtggtggggggggggtccgcgggagtggagatggctgctgagattaagactgaataccctgagaaagaggtgaccttgattcatagccaagtcgcgctcgccgacaaagaactcctccctagcgtgaggcaagaggtcaaggagatacttctgcggaaaggcgtgcagctgctcctttcagagcgggtctcaaacctagaagagctgcctcttaatgaatatagagaatatattaaagtccagaccgataaaggcacagaggtggccaccaacctcgtcattttatgcaccggaattaagatcaactctagtgcctatcgcaaggcattcgaaagcaggctggcaagttcaggtgctctccgggtcaacgaacacctccaggttgagggacattccaatgtgtacgcaatcggcgactgcgctgacgtgcggaccccaaagatggcctatttggcaggcctccacgctaacattgcggttgccaatatcgtgaattccgtcaaacaacgcccactacaggcatacaagcccggagccctgaccttcctcctgtctatgggtcgaaacgacggagtgggtcagataagtggtttttatgtgggccgacttatggtgcggttaaccaagtctcgcgacttgttcgtgtctacctcctggaagacaatgcgacagtcacccccttag

SEQ ID NO: 76007 - DNA, 1122 bp, Artificial Sequence
  derived and/or modified sequence
atgggcagccaggtgagcgtggagagcggcgccctgcacgtggtgatcgtgggtggcgggttcggaggaattgcggctgcaagccagttgcaagccctgaacgtcccatttatgctggtggatatgaaagactcttttcaccataacgtggccgccctcagggcttccgtggagactggatttgcgaagaaaactttcatatcttactcggtgacctttaaagacaactttagacagggactggttgtgggcatcgacttaaaaaaccagatggtgctgcttcaagggggagaggcccttccattcagccacctgatacttgctactggttcaaccggcccctttcccgggaaatttaatgaggttagcagtcagcaggctgctattcaggcatatgaagacatggtgcgccaagtgcagcggtctagattcatcgtggtggtggggggtggctccgctggagtggagatggccgcagagataaagacagaatacccggagaaagaggtgaccctgatacacagccaggtagccttggctgacaaagaacttctacctagcgtccgccaggaggtaaaggaaatactcttgagaaaaggcgtgcaactcttactcagtgagagggtgtcaaacctggaagagcttcctttaaatgagtaccgcgagtatatcaaagttcagactgacaaaggaactgaagtggccacaaatttagtcattttgtgcaccggcataaaaataaactcatctgcctaccgaaaagcctttgagtcccggctcgctagctccggcgccttaagagtaaacgagcacttgcaggtagagggtcacagcaacgtttatgcaataggagactgcgctgatgtgaggaccccaaagatggcatatctggccggtctccacgccaatatcgccgtggctaacatcgtaaatagcgtcaagcaaaggcctctacaggcctataagcctggcgctctgacattccttctgagcatggggagaaatgatggagtcgggcagatcagcggcttctatgttggtcgcctgatggtgcgactgacgaagtccagagacctgttcgtgtctactagttggaaaaccatgagacagagccccccttag

SEQ ID NO: 76008 - DNA, 1011 bp, Artificial Sequence
  derived and/or modified sequence
atgggcagccaggtgagcgtggagagcggcgccctgcacgtggtgatcgttggtggggggtttggcgggattgctgctgcttctcagctacaggctctgaacgtgccatttatgttggtcgatatgaaggatagctttcatcacaatgttgccgcactccgagcctccgtggaaacaggcttcgccaagaagacctttatatcgtattccgttacatttaaggacaactttagacaggggttagtggtgggcattgacttgaaaaaccagatggttctgctccagggtggggaggtgcaaaggagccggtttattgtggtagtgggaggcggaagcgctggcgtggaaatggctgctgagattaaaaccgaatatccggaaaaggaagtgacactgatccacagtcaggtcgccttagccgacaaggagttgctgccatctgtgcggcaagaagtcaaagagatcctgttgcggaagggcgtccagctgttactcaccctcctgggcgaacgcgtgagtaatctagaggaacttcctctgaacgagtatcgagaatacatcaaagtccagacagataagggcacagaagtcgcgactaacctcgtgatcctgtgcacgggcatcaagatcaattctagtgcatatcgaaaggccttcgagtcacgcctagcctcttctggcgctctgcgagtgaatgaacatctgcaggtcgaagggcacagcaacgtgtatgctattggggattgtgctgacgtgaggactcccaagatggcttatctggctggccttcacgctaacattgccgtggctaatattgtgaactcagtcaaacaaagaccattgcaggcgtacaaacctggggccctgacattcctgctgtccatgggtaggaatgacggagtcgggcaaatatccggcttctacgtcggtagattaatggtgagactaaccaaatcccgggacctgttcgtgtccaccagctggaaaaccatgaggcagtcccccccatag

SEQ ID NO: 76009 - DNA, 3240 bp, Artificial Sequence
  derived and/or modified sequence
ggccgttcggagaccagccccagcgtgccaggaccgtttccggggcctggccggggcgttgccgcggggtcggggaccagcacgagtgctgagtcacgccccgcccgggagcgcctcgggtcagtaactcgggaagacgaccaagcgggagcgggagcgggagcgggagccggagcgagagcgcgcgggcgcggccgacagtgcctgatttgagatggggtcccaggtctcggtggaatcgggagctctgcacgtggtgattgtgggtgggggctttggcgggatcgcagcagccagccagctgcaggccctgaacgtccccttcatgctggtggacatgaaggactccttccaccacaatgtggctgctctccgagcctccgtggagacagggttcgccaaaaagacattcatttcttactcggtgactttcaaggacaacttccggcaggggctagtagtggggatagacctgaagaaccagatggtgctgctgcagggtggcgaggccctgcccttctctcatcttatcctggccacgggcagcactgggcccttcccgggcaagtttaatgaggtttccagccagcaggccgctatccaggcctatgaggacatggtgaggcaggtccagcgctcacggttcatcgtggtggtgggaggaggctcggctggagtggagatggcagcagagattaaaacagaatatcctgagaaagaggtcactctcattcactcccaagtggccctggctgacaaggagctcctgccctccgtccggcaggaagtgaaggagatcctcctccggaagggcgtgcagctgctgctgagtgagcgggtgagcaatctggaggagctgcctctcaatgagtatcgagagtacatcaaagtgcagacggacaaaggcacagaggtggccaccaacctggtgattctctgcaccggcatcaagatcaacagctccgcctaccgcaaagcgtttgagagcagactagccagcagtggtgctctgagagtgaacgagcacctccaggtggagggccacagcaacgtctacgccattggtgactgtgccgacgtgaggacgcccaagatggcctatcttgccggcctccacgccaacatcgccgtggccaacatcgtcaactctgtgaagcagcggcctctccaggcctacaagccgggtgcactgacgttcctcctgtccatggggagaaatgacggtgtgggccaaatcagtggcttctatgtgggccggctcatggttcggctgaccaagagccgggacctgttcgtctctacgagctggaaaaccatgaggcagtctccaccttgatggagaggccaggcgggagaactaccgcagcaggtgggcgtacggactgcttggcgcatggcacccgcctggcaagtgctagaactaatgctattcttctggaataagatgccaatgatgtggtggctagaaatgcaacttgtataaaacaaaaatgggagagagagaggtattaaacaaataccccccttagaggatactttctgggtttggaaggtgtgcttgctgtggtactgggtgagcggctcatgtgtgctggctgcatggtgctggggaggccacagccagcccttcctctgcacctgcctcctctgggatgtgcatgtgtgtgtacgtgcttgtggtcatgacgcgtgccatttagagctctcagagcagggcagattgctgggctctggtggccagtgtctgtctgtgagggcaggaaggagagctgcacattgagaacaaaggagggacctgaggtggagagaggcccagcaccccaaatctctgccatcacacggtcggggagcccatacattctgcaacaaccagggacttcacaggagccttgttttcaatttgctaacaggtgcataatccctgtgctccttaagcctcatggccttcctacatttccactttatttgtttgtttgtttatttatttttgagacagtctcgccctgtcacccaggctggagtgcagtggcacgatctcagctcactgcaacctacgccttctgggttcacgtgattctcttgccttagcctcccaagtagctgggactacaggcacgtgccaccatgcctggctaatttttgtattttttaaatagagacggggtttcactgtgttggccaggctggtctcgaacacctgacctcaggtgatccattcgtcttggcctctcgaagtgctgggattccaggcgtgagccactgcggccagcacatttccacttttagatcctactccataccacaggtttcatttaagaagaaagagctagataaatgtgctcttctggttaccccaccctgacagagtgcatttttacacggctagcaggggttgagactgcagcctggcctgccagccattggaggtgtttaaggaagggcagataatgtgactctttgcggggtgccatctgcttacccattagcgagcagagggggtttctgcgggtgacccccagcatatttctaggttacttatgggcagatttgtaagtgacaaaactccagctgatgctgggaatggggagagggcccttgagggactttgtggttttgtgcttctggtttcctggccaaccccagggtcacttgtctggaggcccagctgggcactaatgtctgccaccgactatgttacagtgtataaatgattcctctatttgggagagatcttccaatccagaggagcccctcttggactgcctgggttaaatctgcatagcagaagtggttgatgagttcatctgaagaaattcaggccccacctccccaccctgcccctccctgctcccttttgatggtggcctctgggtactcgggcagagtccttgggacaccagcctctctggggttctcaggccatcccgttggggctgtcgcccaggcctaagtgagtcgtgtgcctctattggaggatggctgttcccctggtggttgcatccaagtatctgtctttctttatggaccacgaagggaagcccaccttcctggaggcaggaccttcggcctaagaaacacaggccctggtgctatctgacctggggtccagcgaggtgggaatcccagtgtgtgagcgacaggccttcttctattgacttacaatattctagaaggacctacgtgtggggacacagttttccaaactgaggaaaatgttgcaataaaagaatatgttgtaag

SEQ ID NO: 76010 - DNA, 2570 bp, Artificial Sequence
  derived and/or modified sequence
agcagtgcctgatttgagatggggtcccaggtctcggtggaatcgggagctctgcacgtggtgattgtgggtgggggctttggcgggatcgcagcagccagccagctgcaggccctgaacgtccccttcatgctggtggacatgaaggactccttccaccacaatgtggctgctctccgagcctccgtggagacagggttcgccaaaaagacattcatttcttactcggtgactttcaaggacaacttccggcaggggctagtagtggggatagacctgaagaaccagatggtgctgctgcagggtggcgaggccctgcccttctctcatcttatcctggccacgggcagcactgggcccttcccgggcaagtttaatgaggtttccagccagcaggccgctatccaggcctatgaggacatggtgaggcaggtccagcgctcacggttcatcgtggtggtgggaggaggctcggctggagtggagatggcagcagagattaaaacagaatatcctgagaaagaggtcactctcattcactcccaagtggccctggctgacaaggagctcctgccctccgtccggcaggaagtgaaggagatcctcctccggaagggcgtgcagctgctgctgagtgagcgggtgagcaatctggaggagctgcctctcaatgagtatcgagagtacatcaaagtgcagacggacaaaggcacagaggtggccaccaacctggtgattctctgcaccggcatcaagatcaacagctccgcctaccgcaaagcgtttgagagcagactagccagcagtggtgctctgagagtgaacgagcacctccaggtggagggccacagcaacgtctacgccattggtgactgtgccgacgtgaggacgcccaagatggcctatcttgccggcctccacgccaacatcgccgtggccaacatcgtcaactctgtgaagcagcggcctctccaggcctacaagccgggtgcactgacgttcctcctgtccatggggagaaatgacggtgtgggccaaatcagtggcttctatgtgggccggctcatggttcggctgaccaagagccgggacctgttcgtctctacgagctggaaaaccatgaggcagtctccaccttgatggagaggccaggcgggagaactaccgcagcaggccaagtggaacccctgggagatgacaggacaccacctctgaccccacaggaaccctgtcggtgtgcaccagcgcatccagctctcatgtctctgagatgacatgggtgttttgtccagactgggatgacggcagctttggggcagcagaggaggcatttttcagatgttttcatcttcgaatgaacttggtgatctggatgtctgcagcaagtctcagcaatctctttatgaatcatcattattattatggttcagttcatggtctttcccagggcctgggtgctgatgcttccccactccacactcgagcctcaagtatatgtggacagccacagtacactgtgcagctggtttaggacaagtgtctattccagtggtcactgtccactgggggagggcgtgcagaggggttttctttgttaatgttcttgggtttccatgatgcaactgagaaatggtgattgtgcattatacccagtacccctgagactcctttctggcccccagattcctggacactgttgatctattgggtccagaagcctggagaaggccgggtaactgaagctggtagccagttcatgttgagaagcagaggactaggtctacactggcgccctctgcattcaggtcaagggccaaatgggaatgtgcagaaggcaaggggaatccaccctcctcactgaagccttttaagaaaaaagcatcctggagagaggtagtttctctctacagaagcattcccaagaaggaaaggagcaatgctagaatgagaataccacagctttgcaactcctaacgaatggcggaatctagagaagaggcatcaatggccaccagcatcacaccaatacagacaaccaggcacgacgcgcctcctcgggcacgagcactcgccactgaccaaggagtcttggcaaagttttcgaacctacacctcatgaaacctctagatccaaccaccaagttataaaaaagcaaagaaacatgttttatgatgccaggaggatataatcaacaaaatccggactgcatgaaaccctataggacaaatggcccagcttcctcaacaaatgaattgcaaagaaataagaaagagatgaaggaggaacctatggtataagagactcatcaaccaactgcagtgcgtggactgatttggatccgaaatcaaataaacaaattttctttctttcctttcttcctttctctctccccctccccctccttccctccctccttccttctctaccttcccttccttcctttctctctctctctccctctgcctctctctttctctctttttctttccctccctccctccctctctctctctctttttctttctttcctttcttaatttcttgacatggtctcactctgtgcactctg

SEQ ID NO: 76011 - DNA, 3007 bp, Artificial Sequence
  derived and/or modified sequence
agtaactcgggaagacgaccaagcgggagcgggagcgggagcgggagccggagcgagagcgcgcgggcgcggccgacagtgcctgatttgagatggggtcccaggtctcggtggaatcgggagctctgcacgtggtgattgtgggtgggggctttggcgggatcgcagcagccagccagctgcaggccctgaacgtccccttcatgctggtggacatgaaggactccttccaccacaatgtggctgctctccgagcctccgtggagacagggttcgccaaaaagacattcatttcttactcggtgactttcaaggacaacttccggcaggggctagtagtggggatagacctgaagaaccagatggtgctgctgcagggtggcgaggtccagcgctcacggttcatcgtggtggtgggaggaggctcggctggagtggagatggcagcagagattaaaacagaatatcctgagaaagaggtcactctcattcactcccaagtggccctggctgacaaggagctcctgccctccgtccggcaggaagtgaaggagatcctcctccggaagggcgtgcagctgctgctgacccttctaggtgagcgggtgagcaatctggaggagctgcctctcaatgagtatcgagagtacatcaaagtgcagacggacaaaggcacagaggtggccaccaacctggtgattctctgcaccggcatcaagatcaacagctccgcctaccgcaaagcgtttgagagcagactagccagcagtggtgctctgagagtgaacgagcacctccaggtggagggccacagcaacgtctacgccattggtgactgtgccgacgtgaggacgcccaagatggcctatcttgccggcctccacgccaacatcgccgtggccaacatcgtcaactctgtgaagcagcggcctctccaggcctacaagccgggtgcactgacgttcctcctgtccatggggagaaatgacggtgtgggccaaatcagtggcttctatgtgggccggctcatggttcggctgaccaagagccgggacctgttcgtctctacgagctggaaaaccatgaggcagtctccaccttgatggagaggccaggcgggagaactaccgcagcaggtgggcgtacggactgcttggcgcatggcacccgcctggcaagtgctagaactaatgctattcttctggaataagatgccaatgatgtggtggctagaaatgcaacttgtataaaacaaaaatgggagagagagaggtattaaacaaataccccccttagaggatactttctgggtttggaaggtgtgcttgctgtggtactgggtgagcggctcatgtgtgctggctgcatggtgctggggaggccacagccagcccttcctctgcacctgcctcctctgggatgtgcatgtgtgtgtacgtgcttgtggtcatgacgcgtgccatttagagctctcagagcagggcagattgctgggctctggtggccagtgtctgtctgtgagggcaggaaggagagctgcacattgagaacaaaggagggacctgaggtggagagaggcccagcaccccaaatctctgccatcacacggtcggggagcccatacattctgcaacaaccagggacttcacaggagccttgttttcaatttgctaacaggtgcataatccctgtgctccttaagcctcatggccttcctacatttccactttatttgtttgtttgtttatttatttttgagacagtctcgccctgtcacccaggctggagtgcagtggcacgatctcagctcactgcaacctacgccttctgggttcacgtgattctcttgccttagcctcccaagtagctgggactacaggcacgtgccaccatgcctggctaatttttgtattttttaaatagagacggggtttcactgtgttggccaggctggtctcgaacacctgacctcaggtgatccattcgtcttggcctctcgaagtgctgggattccaggcgtgagccactgcggccagcacatttccacttttagatcctactccataccacaggtttcatttaagaagaaagagctagataaatgtgctcttctggttaccccaccctgacagagtgcatttttacacggctagcaggggttgagactgcagcctggcctgccagccattggaggtgtttaaggaagggcagataatgtgactctttgcggggtgccatctgcttacccattagcgagcagagggggtttctgcgggtgacccccagcatatttctaggttacttatgggcagatttgtaagtgacaaaactccagctgatgctgggaatggggagagggcccttgagggactttgtggttttgtgcttctggtttcctggccaaccccagggtcacttgtctggaggcccagctgggcactaatgtctgccaccgactatgttacagtgtataaatgattcctctatttgggagagatcttccaatccagaggagcccctcttggactgcctgggttaaatctgcatagcagaagtggttgatgagttcatctgaagaaattcaggccccacctccccaccctgcccctccctgctcccttttgatggtggcctctgggtactcgggcagagtccttgggacaccagcctctctggggttctcaggccatcccgttggggctgtcgcccaggcctaagtgagtcgtgtgcctctattggaggatggctgttcccctggtggttgcatccaagtatctgtctttctttatggaccacgaagggaagcccaccttcctggaggcaggaccttcggcctaagaaacacaggccctggtgctatctgacctggggtccagcgaggtgggaatcccagtgtgtgagcgacaggccttcttctattgacttacaatattctagaaggacctacgtgtggggacacagttttccaaactgaggaaaatgttgcaataaaagaatatgttgtaag

SEQ ID NO: 76012 - DNA, 1122 bp, Artificial Sequence
  derived and/or modified sequence
atgggctctcaggtcagcgtagaatctggcgctctccacgtagtcatagtgggtggcggtttcgggggtatcgcggcagcttcgcagctccaggcactaaacgtccctttcatgttggtcgacatgaaagacagcttccatcacaacgtggccgctctcagagcttcagttgagacagggtttgcaaaaaagacgtttatttcttacagcgtaactttcaaggacaacttccgacaggggctcgtggttggaatcgatctcaagaaccagatggtactgctccagggcggagaggccctgccgttcagtcacctgatcctggctacaggctcaactggcccattcccagggaagttcaacgaggtgagctctcagcaggcagcaatccaggcctacgaagacatggtgaggcaggtccagaggagtaggttcatagtcgtggtgggcggaggctccgccggagtggagatggccgctgagattaagaccgaatacccagaaaaggaggtcacattgatccattctcaggtggctttggctgacaaagagcttctgccatctgttcggcaggaagtcaaagagatcttgctgcggaagggcgtgcagttgctgctgagcgagagagtctctaatctcgaggagctgccgctaaatgagtatcgcgagtacattaaggtacagacagacaaagggactgaggtggctaccaatcttgttatcctttgtacagggataaaaatcaattcttcagcctatagaaaggcattcgagagcagactcgcttcttccggcgcactgagggtaaatgagcatctgcaggtggagggtcacagtaacgtatatgcgattggggactgcgccgacgtgcgcacacctaagatggcctatctggccggactgcatgctaacattgccgtcgctaacatcgtcaacagtgttaagcagcgcccactgcaggcttataagccaggggcacttacattcctactctctatggggaggaacgatggtgtaggtcagatctccggcttttacgtcggccgactgatggtaaggctgaccaaatcaagagatctctttgtcagtacatcatggaagacaatgcgacagagtcctccttag

SEQ ID NO: 76013 - DNA, 1122 bp, Artificial Sequence
  derived and/or modified sequence
atggggagccaagtctcggttgagtctggcgcattgcatgtggttattgtgggagggggtttcggtggtattgccgcagctagtcaactccaggcactcaacgtcccttttatgctcgtagatatgaaggatagcttccaccacaacgtggcagctttacgggctagtgtggagactggtttcgccaagaagacctttatctcttattcagtaacctttaaggacaatttccgacaggggttggtggttggaattgatctcaagaaccaaatggtgttgctgcaaggcggagaagcactgcccttttctcatctgatactggcaactggctctactggtccgtttcccggtaagttcaatgaggtatcatctcagcaagctgcaatacaggcatatgaagatatggttcgccaggtccagcgatcgaggtttatcgtcgtggtgggaggaggaagcgccggagtggagatggccgcagaaataaaaacagaataccctgaaaaggaagtcaccctgattcattctcaggttgctttggctgataaggagctgttaccttctgttcggcaggaggtgaaagaaatcctgctcaggaaaggcgtccagctgctgctttcagagcgggtgtccaatctggaggaattgccactcaacgagtatcgagaatatatcaaagtgcagacagacaagggcacagaggtggccactaatctcgtcattctttgtaccggaattaagatcaatagctccgcttataggaaagccttcgaatctcgactagcaagcagcggcgctctccgcgtcaacgaacacctacaggtcgagggccacagtaacgtgtacgccattggagactgcgcagatgtgcgaacccccaagatggcttacctcgctgggcttcacgctaacatagccgttgccaacatcgttaattctgtgaaacagcggccacttcaagcctataagcccggagcgctcacattcctcttgagcatgggacggaacgacggagtgggacagatatccggattctacgtgggtcgcctgatggtaaggctgactaaaagtcgagacttgttcgtgtccacctcctggaagaccatgcggcagtctcctccctag

SEQ ID NO: 76014 - DNA, 1011 bp, Artificial Sequence
  derived and/or modified sequence
atgggatcccaggtgtcggtcgagtccggggcactgcacgtggtcatcgtcggcggaggatttggaggcattgctgccgcttcccagcttcaggcccttaacgttccctttatgctcgtggatatgaaggattccttccaccacaacgtggccgctctgagggcttcagtagaaacaggattcgcaaaaaagacattcatttcttacagcgtgactttcaaagataactttagacagggcctagttgtggggatcgacctaaagaaccagatggtgctgctgcagggcggagaagtgcagcgctcacgattcattgtcgtggtggggggaggcagcgcaggagtggagatggctgctgagattaagacggaatacccagagaaggaagtgactttgatccattcacaagtggcattggctgacaaagagcttctgccatcagtcaggcaagaggttaaagagattctgctcagaaagggcgttcagctgctcttgacattgctgggggagcgcgtgagcaacttggaagagctcccactcaatgaataccgagagtacatcaaagtgcagactgacaaggggaccgaagtggcgacaaacctggtcatattgtgtactggaatcaagattaattcctctgcctatagaaaggcctttgaatcccgactcgcaagctccggcgctttgcgggttaatgagcacttgcaagtcgaaggccacagcaacgtgtatgcgatcggtgattgcgctgacgtcaggacccccaagatggcttatttagcagggttacatgccaacattgctgtcgctaatattgtcaacagtgtgaaacagcggccactacaggcttataagccgggagcattgacctttctgctgtcaatgggacggaacgacggagttggacagattagcggtttctacgtaggacgcctcatggtccgcctgaccaagtctcgggacctcttcgtgtctacttcgtggaaaacgatgcggcagtcccctccatag

SEQ ID NO: 76015 - protein, 470 aa, Artificial Sequence
  derived and/or modified sequence
MPGFYSVMTDEEIKRFLEDTTDDGELSKFVKDFSGNASCHPPEAKTWASRPQVPEPRPQAPDLYDDDLEFRPPSRPQSSDNQQYFCAPAPLSPSARPRSPWGKLDPYDSSEDDKEYVGFATLPNQVHRKSVKKGFDFTLMVAGESGLGKSTLVNSLFLTDLYRDRKLLGAEERIMQTVEITKHAVDIEEKGVRLRLTIVDTPGFGDAVNNTECWKPVAEYIDQQFEQYFRDESGLNRKNIQDNRVHCCLYFISPFGHGLRPLDVEFMKALHQRVNIVPILAKADTLTPPEVDHKKRKIREEIEHFGIKIYQFPDCDSDEDEDFKLQDQALKESIPFAVIGSNTVVEARGRRVRGRLYPWGIVEVENPGHCDFVKLRTMLVRTHMQDLKDVTRETHYENYRAQCIQSMTRLVVKERNRNKLTRESGTDFPIPAVPPGTDPETEKLIREKDEELRRMQEMLHKIQKQMKENY

SEQ ID NO: 76016 - DNA, 1413 bp, Artificial Sequence
  derived and/or modified sequence
atgcccggcttctacagcgtgatgaccgacgaggagatcaagagattcctggaggacaccaccgacgacggcgagctgagcaagttcgtgaaggacttcagcggcaacgccagctgccacccccccgaggccaagacctgggccagcagaccccaggtgcccgagcccagaccccaggcccccgacctgtacgacgacgacctggagttcagaccccccagcagaccccagagcagcgacaaccagcagtacttctgcgcccccgcccccctgagccccagcgccagacccagaagcccctggggcaagctggacccctacgacagcagcgaggacgacaaggagtacgtgggcttcgccaccctgcccaaccaggtgcacagaaagagcgtgaagaagggcttcgacttcaccctgatggtggccggcgagagcggcctgggcaagagcaccctggtgaacagcctgttcctgaccgacctgtacagagacagaaagctgctgggcgccgaggagagaatcatgcagaccgtggagatcaccaagcacgccgtggacatcgaggagaagggcgtgagactgagactgaccatcgtggacacccccggcttcggcgacgccgtgaacaacaccgagtgctggaagcccgtggccgagtacatcgaccagcagttcgagcagtacttcagagacgagagcggcctgaacagaaagaacatccaggacaacagagtgcactgctgcctgtacttcatcagccccttcggccacggcctgagacccctggacgtggagttcatgaaggccctgcaccagagagtgaacatcgtgcccatcctggccaaggccgacaccctgaccccccccgaggtggaccacaagaagagaaagatcagagaggagatcgagcacttcggcatcaagatctaccagttccccgactgcgacagcgacgaggacgaggacttcaagctgcaggaccaggccctgaaggagagcatccccttcgccgtgatcggcagcaacaccgtggtggaggccagaggcagaagagtgagaggcagactgtacccctggggcatcgtggaggtggagaaccccggccactgcgacttcgtgaagctgagaaccatgctggtgagaacccacatgcaggacctgaaggacgtgaccagagagacccactacgagaactacagagcccagtgcatccagagcatgaccagactggtggtgaaggagagaaacagaaacaagctgaccagagagagcggcaccgacttccccatccccgccgtgccccccggcaccgaccccgagaccgagaagctgatcagagagaaggacgaggagctgagaagaatgcaggagatgctgcacaagatccagaagcagatgaaggagaactactag

SEQ ID NO: 76017 - DNA, 1413 bp, Artificial Sequence
  derived and/or modified sequence
atgcccggcttttacagcgtgatgaccgacgaggaaatcaagcgcttcctggaagacacaacagatgacggagagttgagtaagttcgtcaaggacttctctgggaacgcgagttgtcacccgccagaggctaaaacctgggcctcaaggccacaggtgccagaacccaggccccaggccccagacctttacgacgacgacctagagttccgcccaccctctagaccacagagttccgacaatcagcagtatttttgcgcccctgccccactatcaccaagtgctcgtccacgcagcccatggggcaaactcgacccgtatgatagtagcgaggacgacaaggaatacgtagggttcgctacacttcccaaccaggtgcataggaagtcggtgaagaagggtttcgatttcaccctcatggtggcaggcgagtctggtcttgggaagtctacgcttgtgaattccctgtttctcacagacctatatcgcgaccgcaagctcctcggcgctgaggaaagaatcatgcagaccgtggagattacaaaacacgctgtcgatattgaggagaaaggagtgcggctccgacttacaattgttgatacgccaggatttggggatgcggtcaacaacactgaatgctggaagccggttgcagaatatatcgaccagcagtttgagcagtatttcagagatgaaagcggtttgaatagaaaaaacatccaagataatcgcgtccactgttgcctgtacttcattagcccctttgggcacggcctgcgccccctggatgtcgaattcatgaaggcactgcaccaacgcgtgaatattgtgccgatcctggcgaaggcggacaccctgactccccccgaggtggatcataagaaacggaagataagagaggagatcgagcatttcgggatcaaaatataccagtttcctgattgcgatagtgatgaagacgaagacttcaagctgcaagaccaggccctgaaagaatcgataccattcgccgtgataggctcaaataccgttgttgaagcacgggggcgacgggtacgcggcaggctttacccatggggaatcgtggaagtggagaaccctggacattgcgattttgtgaagttacgtaccatgctcgtgcgcacccatatgcaggacttgaaggacgtgacgcgtgaaacacactacgagaattaccgagcccagtgtatacagtccatgacaaggctggtcgtgaaggaacgaaatcggaataaactgactagagaatcaggcactgacttcccgattcccgccgtgccccccggcaccgacccggagacagaaaagctgattagagagaaagacgaagaactgcgaaggatgcaggagatgctacataaaattcagaagcagatgaaggagaactactag

SEQ ID NO: 76018 - DNA, 1413 bp, Artificial Sequence
  derived and/or modified sequence
atgcctggcttctacagcgtgatgacagatgaggagatcaagcgcttcctggaggacaccacagatgatggagagctgagcaagtttgtgaaggacttctctggaaatgccagctgccaccccccagaggccaagacctgggccagccggccccaggtgcctgagccccggccccaggccccagacctgtatgatgatgacctggagttccggccccccagccggccccagagcagtgacaaccagcagtacttctgtgccccagcccccctgagccccagcgcccggcccaggagcccctggggcaagctggacccctatgacagcagtgaagatgacaaggagtatgtgggctttgccaccctgcccaaccaggtgcacaggaagtctgtgaagaagggctttgacttcaccctgatggtggccggggagagcggcctgggcaagagcaccctggtgaacagcctcttcctgacagacctgtacagagacaggaagctgctgggcgctgaggagcgcatcatgcagacagtggagatcaccaagcatgctgtggacatcgaggagaagggcgtgcggctgcggctgaccatcgtggacaccccaggctttggagatgctgtgaacaacacagagtgctggaagcctgtggccgagtacatcgaccagcagtttgagcagtacttcagagatgaaagtggcctgaacaggaagaacatccaggacaacagagtgcactgctgcctgtacttcatcagcccctttggacatggcctgcggcccctggatgtggagttcatgaaggccctgcaccagagggtgaacatcgtgcccatcctggccaaggctgacaccctgaccccacctgaggtggaccacaagaagaggaagatccgggaggagattgagcacttcggcatcaagatctaccagttcccagactgtgacagtgatgaagatgaggacttcaagctgcaggaccaggccctgaaggagagcatcccctttgctgtgattggcagcaacacagtggtggaggcccggggccggcgggtgcggggccgcctgtacccctggggcatcgtggaggtggagaaccctggccactgtgactttgtgaagctgcggaccatgctggtgaggacccacatgcaggacctgaaggatgtgacccgggagacccactatgagaactaccgggcccagtgcatccagagcatgacccggctggtggtgaaggagaggaacagaaacaagctgacccgggagagcggcacagacttccccatcccagctgtgcccccaggcacagatcctgagacagagaagctgatccgggagaaggatgaggagctgcggaggatgcaggagatgctgcacaagatccagaagcagatgaaggagaactactag

SEQ ID NO: 76019 - DNA, 1413 bp, Artificial Sequence
  derived and/or modified sequence
atgcccggcttctacagcgtgatgaccgacgaggagatcaagcggttcttagaagataccaccgacgatggggagctgtcaaaattcgtgaaagacttttcggggaacgcgagttgccaccccccggaggcaaaaacctgggcttcacgaccccaggtgcccgaacctagaccccaggcccccgatttgtatgatgatgatttagagtttagaccgccatcccgcccccaatcttctgataatcagcagtacttttgcgccccagcacctttatctccaagcgctcgcccccggtccccttggggaaaactcgatccttacgactcgagcgaagacgacaaagagtacgttggattcgcaaccctgccaaaccaggtacacagaaagtcagtcaagaagggattcgacttcacactcatggtagccggcgaaagtgggttaggaaagtccaccctagtgaacagtttattcctcaccgacctctaccgggaccgtaaactgctcggggccgaagaacgaatcatgcagacagttgagattacaaagcacgccgttgacattgaggagaagggagtgcggctgcgtcttaccattgtcgatacgcccggattcggagacgctgtgaacaatacagaatgttggaagccggtggcagaatatatcgatcagcaatttgaacagtacttcagggatgagtccggacttaaccgcaagaacatacaagacaatagggtgcattgttgtctgtactttattagcccttttgggcatggtctgagacccctcgatgtcgagttcatgaaagcgctccaccagcgcgtgaacattgtccccatcctcgctaaggccgataccttgacccctcccgaagtggatcacaaaaaacggaagattcgcgaggagatcgagcactttggcattaaaatataccagtttcccgactgcgactcagacgaagatgaagacttcaaactccaggaccaggctctcaaagagagcatccccttcgcagttatcgggagcaatacagttgtagaagccagagggagaagagtccgaggccgcttgtacccctggggaattgtggaggttgaaaaccctggacactgcgattttgtgaaactgaggaccatgcttgttcggacccatatgcaggatctgaaggatgtcacccgggagacacattacgagaactatcgcgcacagtgcattcagagcatgacacgcctcgtcgtaaaggaacgcaatcggaataagttgacccgcgaaagtggcaccgacttccctatccccgcggtgcccccggggacagaccccgaaaccgagaagctgatcagagaaaaggacgaggaacttcgacggatgcaggaaatgttacacaaaatccagaagcagatgaaagagaattattag

SEQ ID NO: 76020 - DNA, 1413 bp, Artificial Sequence
  derived and/or modified sequence
atgcctggattctatagtgtcatgactgatgaggagattaagcgctttctggaggataccactgatgacggagagctgagtaaatttgtgaaggattttagcggtaatgcttcgtgccatcccccagaggccaagacatgggcctctaggccacaagtcccggagcctagaccacaggccccagatctctacgatgatgatctggagttccggcctccgtcccgaccacagtcctcagacaatcagcaatatttctgtgctccggcaccactctcccctagtgccagacctcgcagcccttggggcaagttggatccttatgactccagcgaagatgacaaagaatatgttggatttgccaccctgcccaatcaggtgcatagaaaatccgtcaagaaggggtttgatttcactttaatggtagctggcgagagcgggctgggtaaatcaacacttgtgaattcattattcctgacggacctgtatcgggacaggaaattactgggggctgaggaacggattatgcagacggtcgaaattacgaagcacgcggttgatatagaggaaaaaggggtccggctgagactgactatcgttgacacacctggctttggagacgctgttaataatacagaatgttggaagcccgtggcagagtatatcgatcagcagtttgagcagtatttccgcgatgagagcggcctgaatagaaaaaacatccaagacaatcgtgttcactgctgcctgtactttatcagtcccttcggccacggcctccggccactagacgttgaattcatgaaagctttacaccaaagagtgaacatcgttccgatccttgcaaaggcagacaccctgacaccgccagaagtggaccacaagaaaagaaaaattagagaagagattgagcacttcggcataaagatttaccagtttccagattgtgactccgacgaagacgaggatttcaagctccaagatcaggcactcaaagagagcatcccttttgccgtcatcggctccaataccgtggtggaggctcgtggcagaagagtccgcggacgtctgtacccttgggggattgtcgaagtcgaaaaccctggtcattgtgactttgtgaaattgcgtaccatgctggttcggacccatatgcaggacttaaaagacgtgactagggagacccactacgaaaattatagagcacagtgcatccaaagtatgacccggttagtggtgaaggaaaggaatagaaataagctcaccagagagtccgggaccgatttcccaattccagccgttcccccaggtactgaccccgagaccgaaaagttgattagagagaaagacgaggagcttcgacgcatgcaagaaatgctccataaaatccagaaacagatgaaggagaactactag

SEQ ID NO: 76021 - DNA, 1584 bp, Artificial Sequence
  derived and/or modified sequence
atgcctggcttctactctgttatgacagatgaggagatcaagcgtttcctggaggacaccacggatgatggagaactgagcaagttcgtgaaggatttctcaggaaatgcgagctgccacccaccagaggctaagacctgggcatccaggccccaagtcccggagccaaggccccaggccccggacctctatgatgatgacctggagttcagacccccctcgcggccccagtcctctgacaaccagcagtacttctgtgccccagcccctctcagcccatctgccaggccccgcagcccatggggcaagcttgatccctatgattcctctgaggatgacaaggagtatgtgggctttgcaaccctccccaaccaagtccaccgaaagtccgtgaagaaaggctttgactttaccctcatggtggcaggagagtctggcctgggcaaatccacacttgtcaatagcctcttcctcactgatctgtaccgggaccggaaacttcttggtgctgaagagaggatcatgcaaactgtggagatcactaagcatgcagtggacatagaagagaagggtgtgaggctgcggctcaccattgtggacacaccaggttttggggatgcagtcaacaacacagagtgctggaagcctgtggcagaatacattgatcagcagtttgagcagtatttccgagacgagagtggcctgaaccgaaagaacatccaagacaacagggtgcactgctgcctgtacttcatctcacccttcggccatgggctccggccattggatgttgaattcatgaaggccctgcatcagcgggtcaacatcgtgcctatcctggctaaggcagacacactgacacctcccgaagtggaccacaagaaacgcaaaatccgggaggagattgagcattttggaatcaagatctatcaattcccagactgtgactctgatgaggatgaggacttcaaattgcaggaccaagccctaaaggaaagcatcccatttgcagtaattggcagcaacactgtagtagaggccagagggcggcgagttcggggtcgactctacccctggggcatcgtggaagtggaaaacccagggcactgcgactttgtgaagctgaggacaatgctggtacgtacccacatgcaggacctgaaggatgtgacacgggagacacattatgagaactaccgggcacagtgcatccagagcatgacccgcctggtggtgaaggaacggaatcgcaacaaactgactcgggaaagtggtaccgacttccccatccctgctgtcccaccagggacagatccagaaactgagaagcttatccgagagaaagatgaggagctgcggcggatgcaggagatgctacacaaaatacaaaaacagatgaaggagaactattaactggctttcagccctggatatttaaatctcctcctcttcttcctgtccatgccggcccctcccagcaccagctctgctcaggccccttcagctactgccacttcgccttacatccctgctgactgcccagagactcagaggaaataaagtttaataaatctgtaggtggct

SEQ ID NO: 76022 - DNA, 1410 bp, Artificial Sequence
  derived and/or modified sequence
atgcccggcttctacagcgtgatgaccgacgaggagatcaagcgcttcctggaggacaccaccgacgacggcgagctgagcaagttcgtgaaggacttcagcggcaacgccagctgccacccccccgaggccaagacctgggccagccgcccccaggtgcccgagccccgcccccaggcccccgacctgtacgacgacgacctggagttccgcccccccagccgcccccagagcagcgacaaccagcagtacttctgcgcccccgcccccctgagccccagcgcccgcccccgcagcccctggggcaagctggacccctacgacagcagcgaggacgacaaggagtacgtgggcttcgccaccctgcccaaccaggtgcaccgcaagagcgtgaagaagggcttcgacttcaccctgatggtggccggcgagagcggcctgggcaagagcaccctggtgaacagcctgttcctgaccgacctgtaccgcgaccgcaagctgctgggcgccgaggagcgcatcatgcagaccgtggagatcaccaagcacgccgtggacatcgaggagaagggcgtgcgcctgcgcctgaccatcgtggacacccccggcttcggcgacgccgtgaacaacaccgagtgctggaagcccgtggccgagtacatcgaccagcagttcgagcagtacttccgcgacgagagcggcctgaaccgcaagaacatccaggacaaccgcgtgcactgctgcctgtacttcatcagccccttcggccacggcctgcgccccctggacgtggagttcatgaaggccctgcaccagcgcgtgaacatcgtgcccatcctggccaaggccgacaccctgaccccccccgaggtggaccacaagaagcgcaagatccgcgaggagatcgagcacttcggcatcaagatctaccagttccccgactgcgacagcgacgaggacgaggacttcaagctgcaggaccaggccctgaaggagagcatccccttcgccgtgatcggcagcaacaccgtggtggaggcccgcggccgccgcgtgcgcggccgcctgtacccctggggcatcgtggaggtggagaaccccggccactgcgacttcgtgaagctgcgcaccatgctggtgcgcacccacatgcaggacctgaaggacgtgacccgcgagacccactacgagaactaccgcgcccagtgcatccagagcatgacccgcctggtggtgaaggagcgcaaccgcaacaagctgacccgcgagagcggcaccgacttccccatccccgccgtgccccccggcaccgaccccgagaccgagaagctgatccgcgagaaggacgaggagctgcgccgcatgcaggagatgctgcacaagatccagaagcagatgaaggagaactac

SEQ ID NO: 76023 - protein, 469 aa, Artificial Sequence
  derived and/or modified sequence
MAAEAGVVGAGASPDGDWRDQACGLLLHVHLSSRLGRAAPVRTGRHLRTVFEDTVEERVINEEYKIWKKNTPFLYDLVMTHALQWPSLTVQWLPEVTKPEGKDYALHWLVLGTHTSDEQNHLVVARVHIPNDDAQFDASHCDSDKGEFGGFGSVTGKIECEIKINHEGEVNRARYMPQNPHIIATKTPSSDVLVFDYTKHPAKPDPSGECNPDLRLRGHQKEGYGLSWNSNLSGHLLSASDDHTVCLWDINAGPKEGKIVDAKAIFTGHSAVVEDVAWHLLHESLFGSVADDQKLMIWDTRSNTTSKPSHLVDAHTAEVNCLSFNPYSEFILATGSADKTVALWDLRNLKLKLHTFESHKDEIFQVHWSPHNETILASSGTDRRLNVWDLSKIGEEQSAEDAEDGPPELLFIHGGHTAKISDFSWNPNEPWVICSVSEDNIMQIWQMAENIYNDEESDVTTSELEGQGS

SEQ ID NO: 76024 - DNA, 1410 bp, Artificial Sequence
  derived and/or modified sequence
atggcagccgaagctggcgtagtgggggcgggggcatccccggatggggactggcgtgaccaggcttgtggcctgttgttacatgtgcacctgagcagtagactcgggagagcggctcctgtgcggaccggccggcaccttcgcactgttttcgaagacaccgtcgaagaacgggtcattaacgaggagtacaagatttggaagaagaatactcccttcctatatgacctagtgatgacccatgcactccagtggccaagtctcaccgttcaatggctgccagaggtaaccaagcctgagggcaaggattacgccttgcactggctggtgttgggtacccacacatcagatgagcagaaccacctcgtcgtggcgcgggtccatatccctaatgacgacgcacagttcgatgcaagccactgtgatagcgacaaaggcgaatttggtggcttcggaagcgttaccggtaagatagagtgcgagattaaaatcaaccacgagggcgaagtgaacagagcaagatatatgccccagaacccccatataatcgccaccaagacaccaagtagcgacgtcctggttttcgactatacaaagcacccagccaagccggacccgagtggagaatgtaaccccgacctgcgactccgtggacaccagaaagaaggttacggcctctcatggaacagcaacctcagtgggcatctccttagtgcatcagatgaccatactgtgtgtctgtgggatatcaatgctgggcctaaggaaggaaagatcgtggacgccaaagccatcttcacaggccactctgctgtggtcgaggacgtagcttggcatctgctgcacgaatcccttttcggtagcgtcgccgatgaccagaaacttatgatttgggatacccgatctaatacgacgtcaaaaccaagtcatctggtcgatgctcacactgctgaagttaactgcctctcgttcaacccctattccgagtttatcctggccacgggatcagctgacaagaccgtggccctttgggacttgaggaaccttaagctgaaactgcacactttcgagtcacataaggatgagatctttcaagttcattggtcccctcacaacgaaacaattctggcatcgtcaggcactgaccgtagactgaatgtttgggatctgtccaaaataggagaagaacagtcagctgaggatgccgaggacgggccccctgaacttcttttcatacacggggggcatacagctaagatctctgatttctcctggaatcctaatgagccgtgggtcatctgtagcgtctccgaagataacattatgcagatatggcagatggcagagaatatttacaatgatgaagaatccgatgtcactacctccgagctggagggacaggggagctag

SEQ ID NO: 76025 - DNA, 1410 bp, Artificial Sequence
  derived and/or modified sequence
atggctgctgaggccggcgtggtgggcgctggggccagcccagatggagactggagggaccaggcctgtggcctgctgctgcacgtgcacctgagcagccggctgggccgggccgcccctgtgaggacaggccgccacctgaggacagtgtttgaggacacagtggaggagagggtcatcaatgaggagtacaagatctggaagaagaacacccccttcctgtatgacctggtgatgacccacgccctgcagtggcccagcctgactgtgcagtggctgcctgaggtgaccaagccagagggcaaggactatgccctgcactggctggtgctgggcacccacaccagtgatgagcagaaccacctggtggtggcccgggtgcacatccccaatgatgatgcccagtttgatgccagccactgtgacagcgacaagggggagtttggaggctttggatctgtgacaggcaagattgaatgtgagatcaagatcaaccacgagggggaggtgaacagagcccgctacatgccccagaacccccacatcatcgccaccaagacccccagcagtgatgtgctggtgtttgactacaccaagcacccagccaagccagaccccagcggggagtgcaacccagacctgcggctgcggggccaccagaaggagggctacggcctgtcctggaacagcaacctgagcggccacctgctgagcgccagtgatgaccacacagtgtgcctgtgggacatcaatgccggccccaaggagggcaagatcgtggatgccaaggccatcttcaccggccacagcgctgtggtggaggatgtggcctggcacctgctgcacgagagcctgtttggatctgtggctgatgaccagaagctgatgatctgggacaccaggagcaacaccaccagcaagcccagccacctggtggatgcccacacagctgaggtgaactgcctgtccttcaacccctacagcgagttcatcctggccaccggcagcgctgacaagacagtggccctgtgggacctgaggaacctgaagctgaagctgcacacctttgagagccacaaggatgagatcttccaggtgcactggagcccccacaatgagaccatcctggccagcagcggcacagaccggcggctgaatgtgtgggacctgagcaagattggagaggagcagagcgcagaagatgctgaagatggccccccagagctgctcttcatccatggaggccacacagccaagatcagtgacttctcctggaaccccaatgagccctgggtgatctgcagcgtgtctgaggacaacatcatgcagatctggcagatggccgagaacatctacaatgatgaggagagtgatgtgaccaccagcgagctggagggccagggcagctag

SEQ ID NO: 76026 - DNA, 1410 bp, Artificial Sequence
  derived and/or modified sequence
atggccgccgaggccggcgtggtgggcgccggcgccagccccgacggagactggcgggatcaagcctgtggactgctgttgcatgttcacctgagttcccgattgggccgcgcagcgcccgtccggactggccggcacttgcgaactgtcttcgaggacacagtggaggagcgggtcatcaatgaagaatataagatttggaagaaaaataccccattcttatatgaccttgtgatgacccatgcactgcagtggccctccttgaccgtacaatggctgcctgaggttactaagccggagggaaaggactacgctcttcactggcttgtccttggcacacacacaagtgatgagcagaatcacctggtcgtggcacgcgtgcacatcccaaatgacgatgcacaatttgatgcctcccactgcgacagcgataagggggaatttggcgggttcggatccgtaaccgggaaaatcgaatgtgagatcaaaatcaatcatgagggggaagtgaatcgcgcaaggtacatgcctcaaaacccccatatcatcgctactaaaactccatccagcgatgttctggtctttgactacaccaaacacccagccaagcctgacccttcaggggagtgcaatcccgacctgcgactgagaggccaccagaaggagggttacgggctatcttggaattccaacctttccggacatcttctaagtgcttcggacgaccacaccgtttgtctgtgggacattaacgctggaccaaaggaaggcaaaatcgtggacgccaaagccatcttcacgggccattctgccgttgttgaggatgtggcttggcacttgctgcatgagtccctcttcggatcagtggctgatgatcagaaattgatgatatgggacactcggagtaacaccacttcaaaaccatcacatctggtagacgctcacaccgcggaggtaaattgcctatcctttaatccttacagtgaatttatcttagcgaccggcagtgcggataagacggtggccctctgggacctgcgaaacttgaaacttaagctgcacactttcgagtcccacaaggacgaaattttccaggtacactggagtccgcacaatgaaaccattctagccagttccggcaccgataggcggttgaatgtttgggacctgtcaaagattggggaagaacaatctgctgaggatgctgaagacgggcctcccgagctcctgttcattcacggaggacacacggccaaaatttccgatttttcttggaaccccaatgagccttgggtgatttgcagtgtcagcgaggataacattatgcaaatctggcagatggccgaaaatatctacaacgacgaggagtctgatgtcactacaagcgaacttgagggccagggtagctag

SEQ ID NO: 76027 - DNA, 1410 bp, Artificial Sequence
  derived and/or modified sequence
atggccgcagaggccggagtcgttggcgcaggcgcatcccccgacggagactggcgcgaccaggcgtgcgggctgttgctgcacgtgcacctctcaagccggctcgggcgagcagccccagtgcggacggggaggcaccttagaacagtgttcgaggatacagtagaagagcgcgttattaacgaagagtacaagatttggaagaagaataccccctttctctacgacctggtgatgacgcatgcccttcagtggcccagtctcactgtgcagtggcttcccgaagtgaccaaacccgaaggaaaggactatgcactgcactggctagtactgggcacacatacatcagacgaacaaaatcatttggtagttgctagggtgcacattccaaacgacgatgcacagttcgatgcttcacactgcgactctgataagggtgagtttggtgggttcggctccgtgaccgggaaaatagagtgtgagatcaagatcaatcatgagggcgaggtgaaccgggcacgctacatgccccagaaccctcacatcattgcaactaaaacgcccagtagcgacgtgctggtcttcgactatacgaaacatcctgcgaagccggatcctagcggggagtgtaaccccgacttacgcctgaggggccatcaaaaggaggggtacggcctgagctggaacagtaatctttcagggcacctactaagtgcctcagatgaccatactgtttgtctctgggatataaacgctggacctaaggagggcaagatcgtggatgccaaggcaatattcactggacattccgccgttgttgaggatgttgcctggcacctgttgcatgagtcacttttcggtagcgtcgccgacgaccagaaactaatgatctgggacaccaggagcaacaccaccagcaaaccttcacatctcgttgacgcccacaccgccgaggtaaactgtcttagttttaatccatatagcgaatttatcctggcaaccggctcagctgacaagaccgtcgctctgtgggacctgaggaatctgaagcttaagctgcacacattcgagagccacaaggatgagatcttccaggtccattggtctccacacaacgaaaccatcctggcttcaagtggaacagaccggaggctgaatgtgtgggatctgtccaaaatcggggaagaacagagcgccgaggatgcagaggacggcccacccgagctcttgtttatccatggaggtcacacagcgaagattagcgatttcagctggaaccctaatgagccttgggtgatatgctccgttagtgaagataatataatgcagatctggcaaatggcagaaaatatatacaatgacgaagagagcgacgttacaacatcagagctggaaggccagggtagttag

SEQ ID NO: 76028 - DNA, 2036 bp, Artificial Sequence
  derived and/or modified sequence
gcgggacgggaccgccgcgccgagggctccgagcacttccggagccgggcgcggggccgagggctgggcccccctcttcccttccctcctccagcggctgcgctccctccggcgccctcggccccggggcggaggcggcccccgccgctgggaagcgagcgccgcggctctttctacgcgcgcgcgcgcgttgaccgcctcggggtcgcggcccttgtccgggggttgctggggtcctcaggcctatggctgccgaggcgggcgtcgtgggagctggggcctcccctgatggggattggagagaccaggcctgtgggcttctgctacacgtgcatttgtcttcccgactgggtcgcgcagcccctgtacgtacaggtcgtcatcttagaacagtgtttgaagatactgtggaggagcgtgtcatcaatgaagaatataaaatctggaagaagaatacaccgtttctatatgacctggttatgacccatgctcttcagtggcccagtcttaccgttcagtggcttcctgaagtgactaaacctgaaggaaaagattatgcccttcattggctagtgctggggactcatacgtctgatgagcagaatcatctggtggttgctcgagtacatattcccaatgatgatgcacagtttgatgcttcccattgtgacagtgacaagggtgaatttggtggctttggttctgtaacaggaaaaattgaatgtgaaattaaaatcaatcacgaaggagaagtaaaccgtgctcgttacatgccgcagaatcctcacatcattgctacaaaaacaccatcttctgatgtgttggtttttgactatacaaaacaccctgctaaaccagacccaagtggagaatgtaatcctgatctcagattaagaggtcaccagaaggaaggctatggtctctcctggaattcaaatttgagtggacatctcctaagtgcatctgatgaccatactgtttgtctgtgggatataaacgcaggaccaaaagaaggcaaaattgtggatgctaaagccatctttactggccactcagctgttgtagaggatgtggcctggcacctgctgcacgagtcattgtttggatctgttgctgatgatcagaaacttatgatatgggacaccaggtccaataccacctccaagccgagtcacttggtggatgcgcacactgccgaagtcaactgcctctcattcaatccctacagcgaatttattctagccaccggctctgcggataagaccgtagctttatgggatctgcgtaacttaaaattaaaactccataccttcgaatctcataaagatgaaattttccaggtccactggtctccacataatgaaactattctggcttcaagtggtactgaccgccgcctgaatgtgtgggatttaagtaaaattggggaagaacaatcagcagaagatgcagaagatgggcctccagaactcctgtttattcatggaggacacactgctaagatttcagattttagctggaaccccaatgagccttgggtcatttgctcagtgtctgaggataacatcatgcagatatggcaaatggctgaaaatatttacaatgatgaagagtcagatgtcacgacatccgaactggagggacaaggatcttaaacccaaagtacgagaaatgtttctgttgaatgtaatgctacatgaatgcttgatttatcaagcgccaaaaaggcattgtatagtaggaaatgtaagtggggtggcttatggcttctttatcctctgattctagcactttcaagtgagctgttgcgtactgtatcatattgtagctattagggaagagaagaatgttgcttaagaaagaacatcaccattgattttaaatacaagtagcagggtattgcctttgattcaactgttttaagtcctcattttctcaaactaagtgcttgctgttcccaaatatgcaagaataacttttacactttttccttccaacacttcttgattggctttgcagaaataaagttttaaaat

SEQ ID NO: 76029 - DNA, 1410 bp, Artificial Sequence
  derived and/or modified sequence
atggccgccgaggccggcgtggtgggcgccggcgccagccccgacggcgactggagagaccaggcctgcggcctgctgctgcacgtgcacctgagcagcagactgggcagagccgcccccgtgagaaccggcagacacctgagaaccgtgttcgaggacaccgtggaggagagagtgatcaacgaggagtacaagatctggaagaagaacacccccttcctgtacgacctggtgatgacccacgccctgcagtggcccagcctgaccgtgcagtggctgcccgaggtgaccaagcccgagggcaaggactacgccctgcactggctggtgctgggcacccacaccagcgacgagcagaaccacctggtggtggccagagtgcacatccccaacgacgacgcccagttcgacgccagccactgcgacagcgacaagggcgagttcggcggcttcggcagcgtgaccggcaagatcgagtgcgagatcaagatcaaccacgagggcgaggtgaacagagccagatacatgccccagaacccccacatcatcgccaccaagacccccagcagcgacgtgctggtgttcgactacaccaagcaccccgccaagcccgaccccagcggcgagtgcaaccccgacctgagactgagaggccaccagaaggagggctacggcctgagctggaacagcaacctgagcggccacctgctgagcgccagcgacgaccacaccgtgtgcctgtgggacatcaacgccggccccaaggagggcaagatcgtggacgccaaggccatcttcaccggccacagcgccgtggtggaggacgtggcctggcacctgctgcacgagagcctgttcggcagcgtggccgacgaccagaagctgatgatctgggacaccagaagcaacaccaccagcaagcccagccacctggtggacgcccacaccgccgaggtgaactgcctgagcttcaacccctacagcgagttcatcctggccaccggcagcgccgacaagaccgtggccctgtgggacctgagaaacctgaagctgaagctgcacaccttcgagagccacaaggacgagatcttccaggtgcactggagcccccacaacgagaccatcctggccagcagcggcaccgacagaagactgaacgtgtgggacctgagcaagatcggcgaggagcagagcgccgaggacgccgaggacggcccccccgagctgctgttcatccacggcggccacaccgccaagatcagcgacttcagctggaaccccaacgagccctgggtgatctgcagcgtgagcgaggacaacatcatgcagatctggcagatggccgagaacatctacaacgacgaggagagcgacgtgaccaccagcgagctggagggccagggcagctag

SEQ ID NO: 76030 - protein, 411 aa, Artificial Sequence
  derived and/or modified sequence
MVCLELSQREAWGSGSPEKMPAQPEGLYRLKFMSSPSLSDLGKREPAAAADERGTQQRRACANATWNSIHNGVIAVFQRKGLPDQELFSLNEGVRQLLKTELGSFFTEYLQNQLLTKGMVILRDKIRFYEGQKLLDSLAETWDFFFSDVLPMLQAIFYPVQGKEPSVRQLALLHFRNAITLSVKLEDALARAHARVPPAIVQMLLVLQGVHESRGVTEDYLRLETLVQKVVSPYLGTYGLHSSEGPFTHSCILEKRLLRRSRSGDVLAKNPVVRSKSYNTPLLNPVQEHEAEGAAAGGTSIRRHSVSEMTSCPEPQGFSDPPGQGPTGTFRSSPAPHSGPCPSRLYPTTQPPEQGLDPTRSSLPRSSPENLVDQILESVDSDSEGIFIDFGRGRGSGMSDLEGSGGRQSVV

SEQ ID NO: 76031 - DNA, 1236 bp, Artificial Sequence
  derived and/or modified sequence
atggtgtgcctggagctgagccagagagaggcctggggcagcggcagccccgagaagatgcccgcccagcccgagggcctgtacagactgaagttcatgagcagccccagcctgagcgacctgggcaagagagagcccgccgccgccgccgacgagagaggcacccagcagagaagagcctgcgccaacgccacctggaacagcatccacaacggcgtgatcgccgtgttccagagaaagggcctgcccgaccaggagctgttcagcctgaacgagggcgtgagacagctgctgaagaccgagctgggcagcttcttcaccgagtacctgcagaaccagctgctgaccaagggcatggtgatcctgagagacaagatcagattctacgagggccagaagctgctggacagcctggccgagacctgggacttcttcttcagcgacgtgctgcccatgctgcaggccatcttctaccccgtgcagggcaaggagcccagcgtgagacagctggccctgctgcacttcagaaacgccatcaccctgagcgtgaagctggaggacgccctggccagagcccacgccagagtgccccccgccatcgtgcagatgctgctggtgctgcagggcgtgcacgagagcagaggcgtgaccgaggactacctgagactggagaccctggtgcagaaggtggtgagcccctacctgggcacctacggcctgcacagcagcgagggccccttcacccacagctgcatcctggagaagagactgctgagaagaagcagaagcggcgacgtgctggccaagaaccccgtggtgagaagcaagagctacaacacccccctgctgaaccccgtgcaggagcacgaggccgagggcgccgccgccggcggcaccagcatcagaagacacagcgtgagcgagatgaccagctgccccgagccccagggcttcagcgacccccccggccagggccccaccggcaccttcagaagcagccccgccccccacagcggcccctgccccagcagactgtaccccaccacccagccccccgagcagggcctggaccccaccagaagcagcctgcccagaagcagccccgagaacctggtggaccagatcctggagagcgtggacagcgacagcgagggcatcttcatcgacttcggcagaggcagaggcagcggcatgagcgacctggagggcagcggcggcagacagagcgtggtgtag

SEQ ID NO: 76032 - DNA, 1236 bp, Artificial Sequence
  derived and/or modified sequence
atggtttgtctcgagctctctcagcgggaggcgtgggggtccggcagccctgaaaagatgccagcccagccggaagggctctatcgccttaaattcatgagtagcccaagtttaagcgacctcggaaagcgagagcctgccgcagccgcggacgaaaggggaacacagcagaggagagcatgtgctaatgcgacgtggaacagcatccacaacggcgtgatcgctgtctttcagcgtaaagggctccccgatcaggagctgtttagtctcaacgagggggtaagacaacttctgaagacagagctgggctctttttttactgagtacctgcagaatcagctgctaaccaagggcatggtgatcctgcgagataagatccgtttttacgaaggccagaaactgctcgactcacttgctgaaacttgggatttctttttctccgacgtcttaccaatgctgcaggcaatcttttatccagtccagggaaaagaaccctcagtgaggcaactagccctcctgcattttagaaatgctatcacgcttagcgtgaagctggaggatgctctggcgcgcgcccacgcccgggtgccccccgcgatcgtgcagatgctgctagttctgcaaggtgttcatgagagcagaggtgtgaccgaggactatctacgcttggagacactggtgcaaaaagtggtctctccatatttagggacttacgggctgcattcttccgaagggccctttacacattcttgcatcctggagaaacgcctgctgaggaggtccagaagcggagatgtgctggcgaagaatccagtagtgcggtcgaagagctacaatacaccactgttgaatcccgtacaggagcacgaggccgagggcgcagctgccggtggaacctctatacgaaggcactctgtctctgagatgacgtcttgtcctgagccccaaggtttctctgaccccccaggtcaggggccaaccggcacattccggagtagtcctgctcctcactcaggcccttgcccaagccggctgtaccccaccacccagccacccgaacagggcctggaccccacacgtagttcactccctaggtccagtcccgaaaacctggtcgaccagattctcgagagtgtagactcggactctgagggaatttttatcgatttcggacggggccgtggaagcggcatgtcagatttggaaggatctggggggaggcagtccgtggtctag

SEQ ID NO: 76033 - DNA, 1236 bp, Artificial Sequence
  derived and/or modified sequence
atggtgtgcctggagctgagccagcgggaggcctggggcagcggcagccctgagaagatgcctgcccagcctgagggcctgtaccgcctgaagttcatgagcagccccagcctgagtgacctgggcaagcgggagcctgctgctgctgctgatgagcggggcacccagcagaggcgggcctgtgccaatgccacctggaacagcatccacaatggagtgattgctgtgttccagaggaagggcctgcctgaccaggagctgttcagcctgaatgaaggagtgcggcagctgctgaagacagagctgggcagcttcttcacagagtacctgcagaaccagctgctgaccaagggcatggtgatcctgcgggacaagatccgcttctatgagggccagaagctgctggacagcctggccgagacctgggacttcttcttcagtgatgtgctgcccatgctgcaggccatcttctaccctgtgcagggcaaggagcccagcgtgcggcagctggccctgctgcacttcagaaatgccatcaccctgtctgtgaagctggaggatgccctggcccgggcccacgcccgggtgcccccagccatcgtgcagatgctgctggtgctgcagggcgtgcatgagagcagaggagtgacagaggactacctgcggctggagaccctggtgcagaaggtggtgagcccctacctgggcacctacggcctgcacagcagcgagggccccttcacccacagctgcatcctggagaagaggctgctgcggcgcagccgctctggagatgtgctggccaagaaccctgtggtgcgcagcaagagctacaacacccccctgctgaaccctgtgcaggagcatgaagctgagggcgctgctgctgggggcaccagcatccgccgccacagcgtgtctgagatgaccagctgcccagagccccagggcttcagtgaccccccaggccagggccccaccggcaccttccgcagcagccctgccccccacagcggcccctgccccagccggctgtaccccaccacccagcccccagagcagggcctggaccccaccaggagcagcctgcccaggagcagccctgagaacctggtggaccagatcctggagagcgtggacagcgacagcgagggcatcttcatcgactttggccggggccggggcagcggcatgtctgacctggagggcagcggcggccggcagagcgtggtgtag

SEQ ID NO: 76034 - DNA, 1236 bp, Artificial Sequence
  derived and/or modified sequence
atggtgtgcctggagctgagccagcgggaggcctggggcagcggctctccagaaaaaatgcccgcacagcccgagggcttgtatcgactgaaattcatgagctcaccctccctcagcgatctgggaaaaagggagcccgccgccgctgccgatgagcgcggcacccagcaacgaagggcatgcgcgaatgccacttggaattctattcacaacggggtgattgctgtgttccagagaaaaggtctgcccgaccaggagctattcagcctaaatgagggggtaagacagctgcttaaaacagagttgggctccttcttcacggagtacctgcagaaccagctgctcaccaaaggcatggtgattctccgggataaaatacggttttacgaaggacagaagctgctggacagcctagccgaaacgtgggacttctttttctctgacgtgctgcctatgcttcaagccatcttctacccagtgcagggtaaagaaccatccgtgcggcagttggccttgcttcattttcgcaacgctatcacactcagtgtgaagctggaggacgcacttgcccgcgctcatgctcgtgtgccacctgctatagttcagatgttgctcgtcctgcagggagtacatgaaagcaggggagttacagaagattaccttcggttggagacccttgtgcagaaggtcgtgtcaccttacctcggtacctatggactgcatagcagcgagggccccttcacacactcttgtatccttgagaaaaggctgttgagacgctccaggtctggtgacgttttagcgaagaatcccgtggtgagatccaagtcttacaacactcctctgctgaatcctgtgcaagaacatgaggctgaaggggctgccgcaggtgggactagcatccgaaggcactcggtaagcgagatgacatcatgtccagagccacagggattttctgaccctccaggccaggggcccacgggcactttcaggtcatcccccgctcctcactccgggccttgcccatcgcggctctacccaacgacccaaccccccgaacaaggcctcgatcctacacgctcctctctgccccggtcatcgccggagaacctcgtagaccagatccttgaatccgtggactcagacagcgaagggatcttcatcgactttggaagggggaggggttccggaatgagcgacttggaaggctctggtggccgccagagcgtggtgtag

SEQ ID NO: 76035 - DNA, 1236 bp, Artificial Sequence
  derived and/or modified sequence
atggtttgcctggaactgtcccagcgcgaggcatgggggtcaggctcccccgaaaaaatgccagctcagcctgaggggctctaccgcctgaagttcatgagcagcccttcccttagcgacttgggaaaaagggaaccagcagctgcagccgatgagagagggactcagcagaggagggcctgtgcaaatgcaacctggaattcaatccacaatggggtgatagccgtattccagagaaaaggtctgcccgaccaggagctgtttagcctgaacgagggcgtcagacagctcctgaagactgaactaggcagctttttcacagaataccttcaaaaccagttgctgacaaagggcatggtcattcttagggacaagattagattttacgaggggcaaaagctactggactctctggcagagacttgggacttttttttcagcgacgtactgcctatgctccaggctatcttctaccctgttcagggaaaggagccatctgtgcggcagctcgccctcctgcacttccggaacgcaattactctgagtgtcaaacttgaggacgccctggcacgagctcacgcacgggttccgccagccattgtgcagatgctcctggttcttcagggcgtgcacgaatctcgcggagtgactgaagattatctccgtctagaaacccttgtgcagaaagtggtgagtccctatctgggcacctacggtctacatagcagtgaaggaccattcacacattcctgtatcctggaaaagcgactcctccgacggagtaggtcaggagacgtcctggccaagaatccagtagttaggtccaagagttataatacgcctttactcaatcccgtgcaggagcacgaagcagagggtgctgccgctgggggtaccagcatcaggaggcacagcgtgagcgaaatgactagctgtccagagccccaaggattcagcgaccctccaggccagggaccgacgggtaccttccggtcaagcccagcaccccattcagggccatgtcccagcaggctatatcctactacacaacctccagaacaaggactggatcccacacgaagttcccttccgcgatcaagtccagagaatcttgtggatcaaatcctcgagagcgtggactccgactctgaagggatctttatcgatttcggtcgcggacgcggttcagggatgagcgacttggagggaagtgggggaaggcaatcagttgtctag

SEQ ID NO: 76036 - DNA, 2279 bp, Artificial Sequence
  derived and/or modified sequence
agtgtgcttagtgctgagcagggtttcagagctcacccccaggagggtgcagacctcagccaaggtcgcagagcagaggagacccgtgggctgggattccacctgtgcccaccctggcagcatcccacctcctgagtcctctcggcacccagcaagagtcccttcagtgacttcgagcgtgcattgagagcccagtaacactggggggcaactgccacaaagacacagcctcagccaggcgcagtgactcatgcctgtaatcccagcaccttgggaggccaaggcttgtggatcacctgaggtcaggagtttgagaccagccggaccaacatggagaaaccccatctctactaaaaatacaaaaaaattagctaggcattgtggcgcatgcctgtaatcccggctactcgggaggctgagggaggagaagcacttgaacccaggaggcgcggttgcagtgagccgagatcgccccattgcactccagcctgggcaacaagagcgaaactccatctcaaaataataataataacaataatagtaagactcagcctccccgctctgggacactcagtctgatggggcaggctggtcagaagacatagagccatggtgtgtttggaactttcacagagggaagcctggggctcgggaagcccggaaaagatgccggcgcagcctgagggcttgtacaggttgaagttcatgagttcgcccagcctcagtgacctgggcaagagagagccggccgccgccgcggacgagcggggcacgcagcagcgccgggcctgcgccaacgccacctggaacagcatccacaacggggtgatcgccgtcttccagcgcaaggggctgcccgaccaggagctcttcagcctcaacgagggcgtccggcagctgttgaagacagagctggggtccttcttcacggagtacctgcagaaccagctgctgacaaaaggcatggtgatccttcgggacaagattcgcttctatgagggacagaagctgctggactcactggcagagacctgggacttcttcttcagtgacgtgctgcccatgctgcaggccatcttctacccggtgcagggcaaggagccatcggtgcgccagctggccctgctgcacttccggaatgccatcaccctcagtgtgaagctagaggatgcgctggcccgggcccatgcccgtgtgccccctgccatcgtgcagatgctgctggtgctgcagggggtacatgagtccaggggcgtgactgaggactacctgcgcctggagacgctggtccagaaggtggtgtcgccatacctgggcacctacggcctccactccagcgaggggcccttcacccattcctgcatcctggaaaagcgcctcctccgccgctcccgctcgggggacgtgctggccaagaaccctgtggtgcgctccaagagctacaacacgcctctgctgaaccccgtgcaggagcacgaggcggagggcgcggcggccggcggtaccagcatccgcaggcactctgtgtcggagatgacgtcctgccccgagcctcagggcttctccgacccgcccggccagggccccaccgggaccttcaggtcctccccggcgccccactcagggccctgccccagcagactgtaccccacgacccagccccctgagcagggcttggatcccacccgcagctccctgccccgctccagcccggagaacctggtggaccagatcctggagtccgtggactcggattctgaagggattttcattgactttggccggggccggggctctggcatgtccgacttggagggctctgggggccggcagagtgtcgtgtgaggcctcacagctggccttgagtttttactgacacgtccctgtgtgcgggggtgtccatgtggcgtgtgtgtgagtgagacttttttactgcgtcccgtcccgccagccctatcggcctcgtcactggccttggtcactttgtatttctgtcttggttggaaataccatcagccttccttgctcggcccaggtctgtttcaggcatctgagtcggcgtttacccaggggccgggccagagacgggggtcggccgctcgctcccacgctcctcctgccccagccctctggtgtccacacctgcccacagagaatgtaaacccagtgggctctgcccacgccgggccccaaagtgaccagactccagcacacctgtctcctcctgcctggggtggccatggggatggaagggggtggaataaaacctgtcaacctgg

SEQ ID NO: 76037 - protein, 1873 aa, Artificial Sequence
  derived and/or modified sequence
MRTGWATPRRPAGLLMLLFWFFDLAEPSGRAANDPFTIVHGNTGKCIKPVYGWIVADDCDETEDKLWKWVSQHRLFHLHSQKCLGLDITKSVNELRMFSCDSSAMLWWKCEHHSLYGAARYRLALKDGHGTAISNASDVWKKGGSEESLCDQPYHEIYTRDGNSYGRPCEFPFLIDGTWHHDCILDEDHSGPWCATTLNYEYDRKWGICLKPENGCEDNWEKNEQFGSCYQFNTQTALSWKEAYVSCQNQGADLLSINSAAELTYLKEKEGIAKIFWIGLNQLYSARGWEWSDHKPLNFLNWDPDRPSAPTIGGSSCARMDAESGLWQSFSCEAQLPYVCRKPLNNTVELTDVWTYSDTRCDAGWLPNNGFCYLLVNESNSWDKAHAKCKAFSSDLISIHSLADVEVVVTKLHNEDIKEEVWIGLKNINIPTLFQWSDGTEVTLTYWDENEPNVPYNKTPNCVSYLGELGQWKVQSCEEKLKYVCKRKGEKLNDASSDKMCPPDEGWKRHGETCYKIYEDEVPFGTNCNLTITSRFEQEYLNDLMKKYDKSLRKYFWTGLRDVDSCGEYNWATVGGRRRAVTFSNWNFLEPASPGGCVAMSTGKSVGKWEVKDCRSFKALSICKKMSGPLGPEEASPKPDDPCPEGWQSFPASLSCYKVFHAERIVRKRNWEEAERFCQALGAHLSSFSHVDEIKEFLHFLTDQFSGQHWLWIGLNKRSPDLQGSWQWSDRTPVSTIIMPNEFQQDYDIRDCAAVKVFHRPWRRGWHFYDDREFIYLRPFACDTKLEWVCQIPKGRTPKTPDWYNPDRAGIHGPPLIIEGSEYWFVADLHLNYEEAVLYCASNHSFLATITSFVGLKAIKNKIANISGDGQKWWIRISEWPIDDHFTYSRYPWHRFPVTFGEECLYMSAKTWLIDLGKPTDCSTKLPFICEKYNVSSLEKYSPDSAAKVQCSEQWIPFQNKCFLKIKPVSLTFSQASDTCHSYGGTLPSVLSQIEQDFITSLLPDMEATLWIGLRWTAYEKINKWTDNRELTYSNFHPLLVSGRLRIPENFFEEESRYHCALILNLQKSPFTGTWNFTSCSERHFVSLCQKYSEVKSRQTLQNASETVKYLNNLYKIIPKTLTWHSAKRECLKSNMQLVSITDPYQQAFLSVQALLHNSSLWIGLFSQDDELNFGWSDGKRLHFSRWAETNGQLEDCVVLDTDGFWKTVDCNDNQPGAICYYSGNETEKEVKPVDSVKCPSPVLNTPWIPFQNCCYNFIITKNRHMATTQDEVHTKCQKLNPKSHILSIRDEKENNFVLEQLLYFNYMASWVMLGITYRNKSLMWFDKTPLSYTHWRAGRPTIKNEKFLAGLSTDGFWDIQTFKVIEEAVYFHQHSILACKIEMVDYKEEYNTTLPQFMPYEDGIYSVIQKKVTWYEALNMCSQSGGHLASVHNQNGQLFLEDIVKRDGFPLWVGLSSHDGSESSFEWSDGSTFDYIPWKGQTSPGNCVLLDPKGTWKHEKCNSVKDGAICYKPTKSKKLSRLTYSSRCPAAKENGSRWIQYKGHCYKSDQALHSFSEAKKLCSKHDHSATIVSIKDEDENKFVSRLMRENNNITMRVWLGLSQHSVDQSWSWLDGSEVTFVKWENKSKSGVGRCSMLIASNETWKKVECEHGFGRVVCKVPLDCPSSTWIQFQDSCYIFLQEAIKVESIEDVRNQCTDHGADMISIHNEEENAFILDTLKKQWKGPDDILLGMFYDTDDASFKWFDNSNMTFDKWTDQDDDEDLVDTCAFLHIKTGEWKKGNCEVSSVEGTLCKTAIPYKRKYLSDNHILISALVIASTVILTVLGAIIWFLYKKHSDSRFTTVFSTAPQSPYNEDCVLVVGEENEYPVQFD

SEQ ID NO: 76038 - DNA, 5622 bp, Artificial Sequence
  derived and/or modified sequence
atgagaaccggctgggccacccccagaagacccgccggcctgctgatgctgctgttctggttcttcgacctggccgagcccagcggcagagccgccaacgaccccttcaccatcgtgcacggcaacaccggcaagtgcatcaagcccgtgtacggctggatcgtggccgacgactgcgacgagaccgaggacaagctgtggaagtgggtgagccagcacagactgttccacctgcacagccagaagtgcctgggcctggacatcaccaagagcgtgaacgagctgagaatgttcagctgcgacagcagcgccatgctgtggtggaagtgcgagcaccacagcctgtacggcgccgccagatacagactggccctgaaggacggccacggcaccgccatcagcaacgccagcgacgtgtggaagaagggcggcagcgaggagagcctgtgcgaccagccctaccacgagatctacaccagagacggcaacagctacggcagaccctgcgagttccccttcctgatcgacggcacctggcaccacgactgcatcctggacgaggaccacagcggcccctggtgcgccaccaccctgaactacgagtacgacagaaagtggggcatctgcctgaagcccgagaacggctgcgaggacaactgggagaagaacgagcagttcggcagctgctaccagttcaacacccagaccgccctgagctggaaggaggcctacgtgagctgccagaaccagggcgccgacctgctgagcatcaacagcgccgccgagctgacctacctgaaggagaaggagggcatcgccaagatcttctggatcggcctgaaccagctgtacagcgccagaggctgggagtggagcgaccacaagcccctgaacttcctgaactgggaccccgacagacccagcgcccccaccatcggcggcagcagctgcgccagaatggacgccgagagcggcctgtggcagagcttcagctgcgaggcccagctgccctacgtgtgcagaaagcccctgaacaacaccgtggagctgaccgacgtgtggacctacagcgacaccagatgcgacgccggctggctgcccaacaacggcttctgctacctgctggtgaacgagagcaacagctgggacaaggcccacgccaagtgcaaggccttcagcagcgacctgatcagcatccacagcctggccgacgtggaggtggtggtgaccaagctgcacaacgaggacatcaaggaggaggtgtggatcggcctgaagaacatcaacatccccaccctgttccagtggagcgacggcaccgaggtgaccctgacctactgggacgagaacgagcccaacgtgccctacaacaagacccccaactgcgtgagctacctgggcgagctgggccagtggaaggtgcagagctgcgaggagaagctgaagtacgtgtgcaagagaaagggcgagaagctgaacgacgccagcagcgacaagatgtgcccccccgacgagggctggaagagacacggcgagacctgctacaagatctacgaggacgaggtgcccttcggcaccaactgcaacctgaccatcaccagcagattcgagcaggagtacctgaacgacctgatgaagaagtacgacaagagcctgagaaagtacttctggaccggcctgagagacgtggacagctgcggcgagtacaactgggccaccgtgggcggcagaagaagagccgtgaccttcagcaactggaacttcctggagcccgccagccccggcggctgcgtggccatgagcaccggcaagagcgtgggcaagtgggaggtgaaggactgcagaagcttcaaggccctgagcatctgcaagaagatgagcggccccctgggccccgaggaggccagccccaagcccgacgacccctgccccgagggctggcagagcttccccgccagcctgagctgctacaaggtgttccacgccgagagaatcgtgagaaagagaaactgggaggaggccgagagattctgccaggccctgggcgcccacctgagcagcttcagccacgtggacgagatcaaggagttcctgcacttcctgaccgaccagttcagcggccagcactggctgtggatcggcctgaacaagagaagccccgacctgcagggcagctggcagtggagcgacagaacccccgtgagcaccatcatcatgcccaacgagttccagcaggactacgacatcagagactgcgccgccgtgaaggtgttccacagaccctggagaagaggctggcacttctacgacgacagagagttcatctacctgagacccttcgcctgcgacaccaagctggagtgggtgtgccagatccccaagggcagaacccccaagacccccgactggtacaaccccgacagagccggcatccacggcccccccctgatcatcgagggcagcgagtactggttcgtggccgacctgcacctgaactacgaggaggccgtgctgtactgcgccagcaaccacagcttcctggccaccatcaccagcttcgtgggcctgaaggccatcaagaacaagatcgccaacatcagcggcgacggccagaagtggtggatcagaatcagcgagtggcccatcgacgaccacttcacctacagcagatacccctggcacagattccccgtgaccttcggcgaggagtgcctgtacatgagcgccaagacctggctgatcgacctgggcaagcccaccgactgcagcaccaagctgcccttcatctgcgagaagtacaacgtgagcagcctggagaagtacagccccgacagcgccgccaaggtgcagtgcagcgagcagtggatccccttccagaacaagtgcttcctgaagatcaagcccgtgagcctgaccttcagccaggccagcgacacctgccacagctacggcggcaccctgcccagcgtgctgagccagatcgagcaggacttcatcaccagcctgctgcccgacatggaggccaccctgtggatcggcctgagatggaccgcctacgagaagatcaacaagtggaccgacaacagagagctgacctacagcaacttccaccccctgctggtgagcggcagactgagaatccccgagaacttcttcgaggaggagagcagataccactgcgccctgatcctgaacctgcagaagagccccttcaccggcacctggaacttcaccagctgcagcgagagacacttcgtgagcctgtgccagaagtacagcgaggtgaagagcagacagaccctgcagaacgccagcgagaccgtgaagtacctgaacaacctgtacaagatcatccccaagaccctgacctggcacagcgccaagagagagtgcctgaagagcaacatgcagctggtgagcatcaccgacccctaccagcaggccttcctgagcgtgcaggccctgctgcacaacagcagcctgtggatcggcctgttcagccaggacgacgagctgaacttcggctggagcgacggcaagagactgcacttcagcagatgggccgagaccaacggccagctggaggactgcgtggtgctggacaccgacggcttctggaagaccgtggactgcaacgacaaccagcccggcgccatctgctactacagcggcaacgagaccgagaaggaggtgaagcccgtggacagcgtgaagtgccccagccccgtgctgaacaccccctggatccccttccagaactgctgctacaacttcatcatcaccaagaacagacacatggccaccacccaggacgaggtgcacaccaagtgccagaagctgaaccccaagagccacatcctgagcatcagagacgagaaggagaacaacttcgtgctggagcagctgctgtacttcaactacatggccagctgggtgatgctgggcatcacctacagaaacaagagcctgatgtggttcgacaagacccccctgagctacacccactggagagccggcagacccaccatcaagaacgagaagttcctggccggcctgagcaccgacggcttctgggacatccagaccttcaaggtgatcgaggaggccgtgtacttccaccagcacagcatcctggcctgcaagatcgagatggtggactacaaggaggagtacaacaccaccctgccccagttcatgccctacgaggacggcatctacagcgtgatccagaagaaggtgacctggtacgaggccctgaacatgtgcagccagagcggcggccacctggccagcgtgcacaaccagaacggccagctgttcctggaggacatcgtgaagagagacggcttccccctgtgggtgggcctgagcagccacgacggcagcgagagcagcttcgagtggagcgacggcagcaccttcgactacatcccctggaagggccagaccagccccggcaactgcgtgctgctggaccccaagggcacctggaagcacgagaagtgcaacagcgtgaaggacggcgccatctgctacaagcccaccaagagcaagaagctgagcagactgacctacagcagcagatgccccgccgccaaggagaacggcagcagatggatccagtacaagggccactgctacaagagcgaccaggccctgcacagcttcagcgaggccaagaagctgtgcagcaagcacgaccacagcgccaccatcgtgagcatcaaggacgaggacgagaacaagttcgtgagcagactgatgagagagaacaacaacatcaccatgagagtgtggctgggcctgagccagcacagcgtggaccagagctggagctggctggacggcagcgaggtgaccttcgtgaagtgggagaacaagagcaagagcggcgtgggcagatgcagcatgctgatcgccagcaacgagacctggaagaaggtggagtgcgagcacggcttcggcagagtggtgtgcaaggtgcccctggactgccccagcagcacctggatccagttccaggacagctgctacatcttcctgcaggaggccatcaaggtggagagcatcgaggacgtgagaaaccagtgcaccgaccacggcgccgacatgatcagcatccacaacgaggaggagaacgccttcatcctggacaccctgaagaagcagtggaagggccccgacgacatcctgctgggcatgttctacgacaccgacgacgccagcttcaagtggttcgacaacagcaacatgaccttcgacaagtggaccgaccaggacgacgacgaggacctggtggacacctgcgccttcctgcacatcaagaccggcgagtggaagaagggcaactgcgaggtgagcagcgtggagggcaccctgtgcaagaccgccatcccctacaagagaaagtacctgagcgacaaccacatcctgatcagcgccctggtgatcgccagcaccgtgatcctgaccgtgctgggcgccatcatctggttcctgtacaagaagcacagcgacagcagattcaccaccgtgttcagcaccgccccccagagcccctacaacgaggactgcgtgctggtggtgggcgaggagaacgagtaccccgtgcagttcgactag

SEQ ID NO: 76039 - DNA, 5622 bp, Artificial Sequence
  derived and/or modified sequence
atgagaactggctgggcgactcctaggcggcccgccggtttgctgatgctccttttttggttttttgacctcgcagaacccagcgggagagccgccaacgatccattcactatcgtccatggtaacactggtaaatgcattaagcctgtgtacggatggattgtggcggacgattgcgatgaaactgaagataagctttggaagtgggtaagtcaacatcggctctttcacttgcattcccagaagtgtttgggtctggatattaccaagagtgtgaatgagttgcgcatgttctcatgcgactcctcagccatgctctggtggaagtgcgagcatcactctctttatggggcagcgcgttacaggttggccttaaaggatggccatggaactgccatctccaacgcttccgacgtttggaagaaaggcgggagcgaggagtcgttgtgtgatcagccttatcacgaaatatatacacgcgatggtaatagttacggaaggccatgtgagtttccgtttctcatcgacggtacctggcatcatgattgcatcctagacgaggatcattcaggcccctggtgcgctaccacactgaactatgaatacgataggaagtggggtatctgtctgaaacccgaaaacggctgcgaggacaactgggaaaagaacgagcagttcggtagctgctatcagtttaacactcagaccgccctctcctggaaggaagcatacgtgagttgtcagaaccagggggccgatcttctgtctataaattctgcagcagagctgacctatttaaaggaaaaagaagggattgcgaaaattttttggattgggttgaatcagctttatagcgcccgggggtgggaatggtccgaccacaaaccattgaactttctcaactgggatcccgatcgcccgtccgctcccacgattggcgggagcagctgtgcccgcatggacgccgagtctggactgtggcaatcgttctcatgcgaagcccagttgccttacgtctgtcgcaaacctttgaacaacactgtggagctgactgatgtgtggacatattccgatacacgttgcgatgcaggatggctgcctaacaatgggttctgctatctactggtgaatgagtctaacagctgggacaaggcacacgccaagtgcaaggcattttcaagcgacctcatcagtattcatagccttgccgatgtcgaggtggtcgtcaccaaactgcacaacgaagatatcaaggaagaggtgtggatcggccttaaaaatattaatatccctacactctttcaatggtctgacggcaccgaggtaacattgacctattgggatgagaatgagcctaacgtaccttacaataaaactcccaactgcgtctcgtacttgggcgaactggggcagtggaaagtgcaatcctgcgaggagaagctcaagtatgtgtgtaagagaaaaggggaaaaattgaacgatgcatcgtccgataagatgtgcccaccagacgaaggctggaagagacacggagagacctgctataagatctatgaagatgaagtgccattcggaactaactgcaaccttaccatcaccagccgcttcgagcaagaataccttaacgatctgatgaagaagtacgacaagagtcttcgaaaatacttctggactggcctgcgcgatgtggattcatgcggggagtataattgggccactgtaggaggacggcgacgtgccgttacattctccaattggaatttcctcgaacccgcaagccctggtggatgcgtggccatgagcacaggtaagagcgtggggaagtgggaagttaaggattgccgctctttcaaggctctctccatatgtaaaaagatgtccggacctctgggccccgaggaagcttcccctaagcccgacgatccatgccctgagggctggcaatcatttcccgcatcactgagctgctataaggtgtttcatgccgaacgcatcgtgagaaagcgaaactgggaggaagcagagagattctgtcaggctttgggggcacatctgtcttcttttagtcacgtggatgagattaaggaatttctgcatttcttaaccgaccaattttcaggtcagcattggctatggattggattaaataagcgcagtcctgacctgcagggctcgtggcagtggtcagataggactccggtgagtacgatcatcatgcctaatgagttccagcaggactatgatatccgggactgcgccgcagttaaagtatttcacaggccttggagaagggggtggcacttctatgacgatagagagtttatctatctccggccctttgcatgtgataccaagctggaatgggtgtgccagattcctaagggccgaacacctaagaccccagattggtataatcctgacagagcgggcatacatggacccccattaatcatagaagggagtgaatattggtttgtggcagacttacatttgaattatgaagaggccgtcttgtattgtgcatccaaccacagctttcttgccaccattacatccttcgtaggactgaaagctatcaaaaacaaaatcgccaacataagcggcgatggccagaaatggtggatccggattagtgagtggcccattgatgatcactttacgtacagccgttacccatggcatcgctttcctgtgacctttggtgaggaatgcctttatatgtccgccaaaacatggctcattgatttaggcaaacctactgactgtagcacaaagcttccatttatctgcgagaagtataacgtcagcagtctcgagaagtattctccagatagcgctgcaaaggtgcaatgcagtgaacaatggattccatttcagaacaagtgttttctgaaaattaaacctgtgtcactcaccttttcccaggcctccgacacctgtcactcctatgggggaacgctcccatctgtgctttcccagatagaacaggattttatcacaagcctgctgcccgacatggaagccacactttggatcggactgcggtggactgcgtacgagaagatcaataagtggaccgacaatagggaactcacttacagtaattttcaccccctcctcgtctcagggcgcttgcgaatccctgagaatttcttcgaggaagagagcaggtatcattgcgccctcatcctaaacttacagaagagcccttttactggcacgtggaatttcacctcttgcagtgagcgccactttgttagcctgtgtcagaagtacagcgaagtgaaatcacggcagacactgcaaaatgctagtgagacagttaagtacctgaacaacctttataaaatcattcccaagactctgacctggcactctgctaagcgtgagtgcttgaaatccaatatgcagttagtgagcatcactgatccctaccagcaagcctttttgtcggtgcaagcactcctgcataactcctcactctggatcggtttatttagccaggacgatgaactgaattttggctggtccgacggtaagcgactgcattttagcaggtgggccgaaactaatggacaactggaagactgtgtggttttggacacagacggcttttggaagacggtggactgtaacgataatcaacccggagctatctgctactatagtggcaacgagactgaaaaggaggttaaacctgtggactcagtgaagtgcccatcacccgtccttaatacaccttggattccattccagaactgttgttacaatttcattattacaaagaataggcacatggcgacgacccaggacgaggttcatacaaagtgccagaaactcaaccccaaaagccacattctctctatccgggatgaaaaagagaacaatttcgtcttggagcagctgctctatttcaattacatggcatcctgggtgatgctgggcatcacctacaggaataagagcctgatgtggttcgacaaaactcctctctcttacacacactggagagcagggaggcctaccataaaaaacgagaaattcctggccgggctgtccacagatgggttctgggatatccaaaccttcaaggtgatcgaggaagctgtttattttcaccagcactcaatcctcgcctgcaagatagagatggtcgactataaagaggaatacaacacgactctcccacagttcatgccatacgaagacggaatctatagcgtgatccaaaagaaagtgacttggtacgaagcattaaatatgtgctctcagagcggcggacacctggcgtctgtgcataaccagaatgggcagctttttctggaggacattgtgaagagggacggcttccctctgtgggtaggcctgtcctctcacgatggttcggagtcctccttcgagtggtctgacggttccacctttgattacatcccatggaagggccagacatctcctgggaattgtgtacttcttgaccccaaaggtacgtggaaacacgaaaagtgtaatagtgttaaggatggcgccatatgctacaagcctacgaagagtaaaaagctcagccggttgacttactctagccgatgtcctgcggctaaagagaatggaagtcggtggatccagtataaaggacattgctataaatcagatcaggcccttcattcattctcagaggccaaaaaactctgctcaaagcacgaccatagcgctaccatagtgtctattaaggatgaggacgaaaacaagtttgtgagccggctcatgcgtgaaaacaacaacattactatgagagtgtggctcgggctgtcccagcatagcgttgatcaaagttggtcctggttggatgggtcggaagttaccttcgttaagtgggagaacaagtccaaaagtggtgtggggagatgtagcatgctgatcgccagcaacgaaacttggaagaaggtggaatgtgagcatggctttggccgcgtggtgtgtaaagtacctcttgactgcccctcgtctacgtggattcaattccaagatagttgctatattttcctgcaagaagctatcaaggtggaatcaatcgaggatgtgagaaatcaatgtactgaccatggcgcggatatgatatccatccacaacgaagaggagaatgcctttatactggacactctgaaaaaacagtggaagggccctgatgatatcctgctagggatgttttacgacaccgacgatgcttcgttcaagtggttcgacaattcaaatatgacatttgataagtggaccgaccaggacgatgacgaggaccttgtcgacacctgtgctttcctgcacattaagacaggggagtggaagaagggaaactgtgaggtgtccagcgtggagggcactctgtgtaagacagccattccatataagaggaagtatctaagcgacaaccacattttgatttcagcactggtaattgccagcaccgttattctcactgtactaggggccatcatttggttcttatacaaaaagcacagcgattctcgatttaccacagtgttttctactgctcctcaaagcccttataacgaggattgtgtgctggtggttggggaggagaacgaatatcccgtgcaatttgattag

SEQ ID NO: 76040 - DNA, 5622 bp, Artificial Sequence
  derived and/or modified sequence
atgaggacaggctgggcgacccctcgccgcccggcggggctcctcatgctgctcttctggttcttcgatctcgcggagccctctggccgcgcagctaatgaccccttcaccatcgtccatggaaatacgggcaagtgcatcaagccagtgtatggctggatagtagcagacgactgtgatgaaactgaggacaagttatggaagtgggtgtcccagcatcggctctttcatttgcactcccaaaagtgccttggcctcgatattaccaaatcggtaaatgagctgagaatgttcagctgtgactccagtgccatgctgtggtggaaatgtgagcaccactctctgtacggagctgcccggtaccggctggctctgaaggatggacatggcacagcaatctcaaatgcatctgatgtctggaagaaaggaggctcagaggaaagcctttgtgaccagccttatcatgagatctataccagagatgggaactcttatgggagaccttgtgaatttccattcttaattgatgggacctggcatcatgattgcattcttgatgaagatcatagtgggccatggtgtgccaccaccttaaattatgaatatgaccgaaagtggggcatctgcttaaagcctgaaaacggttgtgaagataattgggaaaagaacgagcagtttggaagttgctaccaatttaatactcagacggctctttcttggaaagaagcttatgtttcatgtcagaatcaaggagctgatttactgagcatcaacagtgctgctgaattaacttaccttaaagaaaaagaaggcattgctaagattttctggattggtttaaatcagctatactctgctagaggctgggaatggtcagaccacaaaccattaaactttctcaactgggatccagacaggcccagtgcacctactataggtggctccagctgtgcaagaatggatgctgagtctggtctgtggcagagcttttcctgtgaagctcaactgccctatgtctgcaggaaaccattaaataatacagtggagttaacagatgtctggacatactcagatacccgctgtgatgcaggctggctgccaaataatggattttgctatctgctggtaaatgaaagtaattcctgggataaggcacatgcgaaatgcaaagccttcagtagtgacctaatcagcattcattctctagcagatgtggaggtggttgtcacaaaactccataatgaggatatcaaagaagaagtgtggataggccttaagaacataaacataccaactttatttcagtggtcagatggtactgaagttactctaacatattgggatgagaatgagccaaatgttccctacaataagacgcccaactgtgtttcctacttaggagagctaggtcagtggaaagtccaatcatgtgaggagaaactaaaatatgtatgcaagagaaagggagaaaaactgaatgacgcaagttctgataagatgtgtcctccagatgagggctggaagagacatggagaaacctgttacaagatttatgaggatgaggtcccttttggaacaaactgcaatctgactatcactagcagatttgagcaagaatacctaaatgatttgatgaaaaagtatgataaatctctaagaaaatacttctggactggcctgagagatgtagattcttgtggagagtataactgggcaactgttggtggaagaaggcgggctgtaaccttttccaactggaattttcttgagccagcttccccgggcggctgcgtggctatgtctactggaaagtctgttggaaagtgggaggtgaaggactgcagaagcttcaaagcactttcaatttgcaagaaaatgagtggaccccttgggcctgaagaagcatcccctaagcctgatgacccctgtcctgaaggctggcagagtttccccgcaagtctttcttgttataaggtattccatgcagaaagaattgtaagaaagaggaactgggaagaagctgaacgattctgccaagcccttggagcacacctttctagcttcagccatgtggatgaaataaaggaatttcttcactttttaacggaccagttcagtggccagcattggctgtggattggtttgaataaaaggagcccagatttacaaggatcctggcaatggagtgatcgtacaccagtgtctactattatcatgccaaatgagtttcagcaggattatgacatcagagactgtgctgctgtcaaggtatttcataggccatggcgaagaggctggcatttctatgatgatagagaatttatttatttgaggccttttgcttgtgatacaaaacttgaatgggtgtgccaaattccaaaaggccgtactccaaaaacaccagactggtacaatccagaccgtgctggaattcatggacctccacttataattgaaggaagtgaatattggtttgttgctgatcttcacctaaactatgaagaagccgtcctgtactgtgccagcaatcacagctttcttgcaactataacatcttttgtgggactaaaagccatcaaaaacaaaatagcaaatatatctggtgatggacagaagtggtggataagaattagcgagtggccaatagatgatcattttacatactcacgatatccatggcaccgctttcctgtgacatttggagaggaatgcttgtacatgtctgccaagacttggcttatcgacttaggtaaaccaacagactgtagtaccaagttgcccttcatctgtgaaaaatataatgtttcttcgttagagaaatacagcccagattctgcagctaaagtgcaatgttctgagcaatggattccttttcagaataagtgttttctaaagatcaaacccgtgtctctcacattttctcaagcaagcgatacctgtcactcctatggtggcacccttccttcagtgttgagccagattgaacaagactttattacatccttgcttccggatatggaagctactttatggattggtttgcgctggactgcctatgaaaagataaacaaatggacagataacagagagctgacgtacagtaactttcacccattattggttagtgggaggctgagaataccagaaaatttttttgaggaagagtctcgctaccactgtgccctaatactcaacctccaaaaatcaccgtttactgggacgtggaattttacatcctgcagtgaacgccactttgtgtctctctgtcagaaatattcagaagttaaaagcagacagacgttgcagaatgcttcagaaactgtaaagtatctaaataatctgtacaaaataatcccaaagactctgacttggcacagtgctaaaagggagtgtctgaaaagtaacatgcagctggtgagcatcacggacccttaccagcaggcattcctcagtgtgcaggcgctccttcacaactcttccttatggatcggactcttcagtcaagatgatgaactcaactttggttggtcagatgggaaacgtcttcattttagtcgctgggctgaaactaatgggcaactcgaagactgtgtagtattagacactgatggattctggaaaacagttgattgcaatgacaatcaaccaggtgctatttgctactattcaggaaatgagactgaaaaagaggtcaaaccagttgacagtgttaaatgtccatctcctgttctaaatactccgtggataccatttcagaactgttgctacaatttcataataacaaagaataggcatatggcaacaacacaggatgaagttcatactaaatgccagaaactgaatccaaaatcacatattctgagtattcgagatgaaaaggagaataactttgttcttgagcaactgctgtacttcaattatatggcttcatgggtcatgttaggaataacttatagaaataagtctcttatgtggtttgataagaccccactgtcatatacacattggagagcaggaagaccaactataaaaaatgagaagtttttggctggtttaagtactgacggcttctgggatattcaaacctttaaagttattgaagaagcagtttattttcaccagcacagcattcttgcttgtaaaattgaaatggttgactacaaagaagaatataatactacactgccacagtttatgccatatgaagatggtatttacagtgttattcaaaaaaaggtaacatggtatgaagcattaaacatgtgttctcaaagtggaggtcacttggcaagcgttcacaaccaaaatggccagctctttctggaagatattgtaaaacgtgatggatttccactatgggttgggctctcaagtcatgatggaagtgaatcaagttttgaatggtctgatggtagtacatttgactatatcccatggaaaggccaaacatctcctggaaattgtgttctcttggatccaaaaggaacttggaaacatgaaaaatgcaactctgttaaggatggtgctatttgttataaacctacaaaatctaaaaagctgtcccgtcttacatattcatcaagatgtccagcagcaaaagagaatgggtcacggtggatccagtacaagggtcactgttacaagtctgatcaggcattgcacagtttttcagaggccaaaaaattgtgttcaaaacatgatcactctgcaactatcgtttccataaaagatgaagatgagaataaatttgtgagcagactgatgagggaaaataataacattaccatgagagtttggcttggattatctcaacattctgttgaccagtcttggagttggttagatggatcagaagtgacatttgtcaaatgggaaaataaaagtaagagtggtgttggaagatgtagcatgttgatagcttcaaatgaaacttggaaaaaagttgaatgtgaacatggttttggaagagttgtctgcaaagtgcctctggactgtccttcatctacttggattcagttccaagacagttgttacatttttctccaagaagccatcaaagtagaaagcatagaggatgtcagaaatcagtgtactgaccatggagcggacatgataagcatacataatgaagaagaaaatgcttttatactggatactttgaaaaagcaatggaaaggcccagatgatatcctactaggcatgttttatgacacagatgatgcgagtttcaagtggtttgataattcaaatatgacatttgataagtggacagaccaagatgatgatgaggatttagttgacacctgtgcttttctgcacatcaagacaggtgaatggaaaaaaggaaattgtgaagtttcttctgtggaaggaacactatgcaaaacagctatcccatacaaaaggaaatatttatcagataaccacattttaatatcagcattggtgattgctagcacggtaattttgacagttttgggagcaatcatttggttcctgtacaaaaaacattctgattctcgtttcaccacagttttttcaaccgcaccccaatcaccttataatgaagactgtgttttggtagttggagaagaaaatgaatatcctgttcaatttgactaa

SEQ ID NO: 76041 - DNA, 5622 bp, Artificial Sequence
  derived and/or modified sequence
atgaggacaggctgggccaccccaagaagacctgctggcctgctgatgctgctcttctggttctttgacctggccgagcccagcggccgggccgccaatgaccccttcaccatcgtgcacggcaacacaggcaagtgcatcaagcctgtgtatggctggatcgtggctgatgactgtgatgaaacagaggacaagctgtggaagtgggtgtcccagcacaggctcttccacctgcacagccagaagtgcctgggcctggacatcaccaagtctgtgaatgagctgaggatgttcagctgtgacagcagcgccatgctgtggtggaagtgtgagcaccacagcctgtatggagctgcccgctaccgcctggccctgaaggatggccatggaacagccatcagcaatgccagtgatgtgtggaagaagggcggcagcgaggagagcctgtgtgaccagccctaccacgagatctacaccagagatggcaacagctatggccggccctgtgagttccccttcctgattgatggcacctggcaccacgactgcatcctggatgaggaccacagcggcccctggtgtgccaccaccctgaactatgaatatgacaggaagtggggcatctgcctgaagccagaaaatggctgtgaggacaactgggagaagaatgagcagtttggcagctgctaccagttcaacacccagacagccctgtcctggaaggaggcctacgtgtcctgccagaaccagggcgctgacctgctgagcatcaacagcgctgctgagctgacctacctgaaggagaaggagggcatcgccaagatcttctggattggcctgaaccagctgtacagcgcccggggctgggagtggagcgaccacaagcccctgaacttcctgaactgggaccctgaccggcccagcgcccccaccatcggcggcagcagctgtgccaggatggatgctgagagcggcctgtggcagagcttcagctgtgaggcccagctgccctacgtgtgcaggaagcccctgaacaacacagtggagctgacagatgtgtggacctacagcgacacccgctgtgatgctggctggctgcccaacaacggcttctgctacctgctggtgaatgaaagcaacagctgggacaaggcccacgccaagtgcaaggccttcagcagtgacctgatcagcatccacagcctggctgatgtggaggtggtggtgaccaagctgcacaatgaagacatcaaggaggaggtgtggattggcctgaagaacatcaacatccccaccctcttccagtggagcgatggaacagaggtgaccctgacctactgggatgaaaatgagcccaacgtgccctacaacaagacccccaactgtgtgtcctacctgggggagctgggccagtggaaggtgcagagctgtgaggagaagctgaagtatgtgtgcaagaggaagggggagaagctgaatgatgccagcagtgacaagatgtgccccccagatgagggctggaagagacatggagagacctgctacaagatctatgaagatgaggtgcccttcggcaccaactgcaacctgaccatcaccagcagatttgagcaggagtacctgaatgacctgatgaagaagtatgacaagagcctgaggaagtacttctggacaggcctgagagatgtggacagctgtggggagtacaactgggccaccgtgggcggcagaagaagagctgtgaccttcagcaactggaacttcctggagcccgccagccctgggggctgtgtggccatgagcacaggcaagtctgtgggcaagtgggaggtgaaggactgccgctccttcaaggccctgagcatctgcaagaagatgagcggccccctgggccctgaggaggccagccccaagccagatgacccctgcccagagggctggcagagcttccctgccagcctgagctgctacaaggtgttccacgccgagagaattgtgaggaagaggaactgggaggaggccgagcgcttctgccaggccctgggcgcccacctgagcagcttcagccacgtggatgagatcaaggagttcctgcacttcctgacagaccagttcagcggccagcactggctgtggattggcctgaacaagaggagcccagacctgcagggctcctggcagtggagcgacaggacccctgtgtccaccatcatcatgcccaatgagttccagcaggactatgacatccgggactgtgccgctgtgaaggtgttccaccggccctggaggcggggctggcacttctatgatgaccgggagttcatctacctgcggccctttgcctgtgacaccaagctggagtgggtgtgccagatccccaagggccgcacccccaagaccccagactggtacaacccagacagagctggcatccacggccccccactcatcatcgagggcagcgagtactggtttgtggccgacctgcacctgaactatgaggaggccgtgctgtactgtgccagcaaccacagcttcctggccaccatcaccagctttgtgggcctgaaggccatcaagaacaagatcgccaacatctctggagatggccagaagtggtggatccgcatcagcgagtggcccattgatgaccacttcacctacagccgctacccctggcaccgcttccctgtgaccttcggggaggagtgcctgtacatgtctgccaagacctggctgattgacctgggcaagcccacagactgcagcaccaagctgcccttcatctgtgagaagtacaacgtgagcagcctggagaagtacagcccagattctgctgccaaggtgcagtgcagcgagcagtggatccccttccagaacaagtgcttcctgaagatcaagcctgtgtccctgaccttcagccaggccagtgacacctgccacagctatggaggcaccctgcccagcgtgctgagccagatcgagcaggacttcatcaccagcctgctgcctgacatggaggccaccctgtggattggcctgcgctggacagcctatgagaagatcaacaagtggacagacaaccgggagctgacctacagcaacttccaccccctgctggtgtctggccgcctgcgcatccctgagaacttctttgaggaggagagccgctaccactgtgccctgatcctgaacctgcagaagagccccttcaccggcacctggaacttcaccagctgcagcgagcggcactttgtgtccctgtgccagaagtacagcgaggtgaagagccggcagaccctgcagaatgccagcgagaccgtgaagtacctgaacaacctgtacaagatcatccccaagaccctgacctggcacagcgccaagcgggagtgcctgaagagcaacatgcagctggtgtccatcacagacccctaccagcaggccttcctgtctgtgcaggccctgctgcacaacagcagcctgtggattggcctcttcagccaggatgatgagctgaactttggctggagcgatggcaagaggctgcacttcagccgctgggccgagaccaacggccagctggaggactgtgtggtgctggacacagatggcttctggaagacagtggactgcaatgacaaccagcccggggccatctgctactacagcggaaatgaaacagagaaggaggtgaagcctgtggacagcgtgaagtgccccagccctgtgctgaacaccccctggatccccttccagaactgctgctacaacttcatcatcaccaagaacagacacatggccaccacccaggatgaggtgcacaccaagtgccagaagctgaaccccaagagccacatcctgagcatcagagatgagaaggagaacaactttgtgctggagcagctgctgtacttcaactacatggcctcctgggtgatgctgggcatcacctacagaaacaagagcctgatgtggtttgacaagacccccctgagctacacccactggagggctggccggcccaccatcaagaatgagaagttcctggccggcctgagcacagatggcttctgggacatccagaccttcaaggtgattgaggaggccgtgtacttccaccagcacagcatcctggcctgcaagattgagatggtggactacaaggaggagtacaacaccaccctgccccagttcatgccctatgaagatggcatctacagcgtcatccagaagaaggtgacctggtatgaggccctgaacatgtgcagccagagcggcggccacctggcctctgtgcacaaccagaatggccagctgttcctggaggacatcgtgaagagagatggcttccccctgtgggtgggcctgagcagccatgatggcagcgagagcagctttgagtggagcgatggcagcacctttgactacatcccctggaagggccagaccagccctggcaactgtgtgctgctggaccccaagggcacctggaagcatgagaagtgcaacagcgtgaaggatggagccatctgctacaagcccaccaagagcaagaagctgagccggctgacctacagcagccgctgcccagctgccaaggaaaatggcagccgctggatccagtacaagggccactgctacaagagtgaccaggccctgcacagcttcagcgaggccaagaagctgtgcagcaagcatgaccacagcgccaccatcgtgtccatcaaggatgaagatgagaacaagtttgtgtcccggctgatgagggagaacaacaacatcaccatgagggtgtggctgggcctgagccagcacagcgtggaccagagctggagctggctggatggcagcgaggtgacctttgtgaagtgggagaacaagagcaagagcggcgtgggccgctgcagcatgctgattgccagcaatgagacctggaagaaggtggagtgtgagcacggcttcggccgggtggtgtgcaaggtgcccctggactgccccagcagcacctggatccagttccaggacagctgctacatcttcctgcaggaggccatcaaggtggagagcattgaagatgtgaggaaccagtgcacagaccacggggctgacatgatcagcatccacaatgaggaggagaatgccttcatcctggacaccctgaagaagcagtggaagggcccagatgacatcctgctgggcatgttttatgacacagatgatgccagcttcaagtggtttgacaacagcaacatgacctttgacaagtggacagaccaggatgatgatgaggacctggtggacacctgtgccttcctgcacatcaagacaggagagtggaagaagggcaactgtgaggtgtcctctgtggagggcaccctgtgcaagacagccatcccctacaagaggaagtacctgagtgacaaccacatcctgatcagcgccctggtgattgccagcaccgtcatcctgactgtgctgggcgccatcatctggttcctgtacaagaagcacagcgacagccgcttcaccaccgtcttcagcacagccccccagagcccctacaatgaagactgtgtgctggtggtgggggaggagaatgagtaccctgtgcagtttgattag

SEQ ID NO: 76042 - DNA, 5622 bp, Artificial Sequence
  derived and/or modified sequence
atgcggaccggctgggccaccccccggcggcccgccggcctgctgatgctgctgttttggtttttcgacctggccgagccttcagggagggcagctaacgaccccttcacgatcgtgcacggtaatacgggcaagtgtattaagcctgtttacggctggattgtggctgatgattgtgacgagaccgaggataaactgtggaagtgggtgtcacagcacaggctgttccacttacactctcagaagtgtctgggccttgacataacaaaatccgtaaacgagctccggatgttcagctgcgattcttcagctatgctgtggtggaagtgcgagcaccactccctttatggtgccgctcgatacagactggccttgaaggacgggcacggcactgcaattagtaatgcatccgatgtgtggaagaaggggggaagcgaggaatccctttgtgaccagccatatcatgagatttatacgcgagacggtaatagctatggccgaccttgtgagtttccctttctgattgacggcacctggcatcacgactgcatcttggatgaggatcatagtggcccttggtgcgctacaactttgaactacgagtatgatcgaaagtgggggatctgtctgaagccagaaaacgggtgcgaggacaactgggaaaagaatgaacagtttggatcctgttatcagttcaatacacagacagctctgtcttggaaggaagcctacgtgagctgtcaaaatcagggggccgaccttctgtccatcaactctgcggcagagttgacctacttgaaggaaaaagaaggcattgctaagatcttttggatcggactgaaccaattgtatagtgctcgaggctgggaatggtccgaccacaaacccctcaacttcctgaactgggatcctgatagaccctctgctcccacaatcggaggtagcagttgcgccaggatggatgcggagtcaggactttggcagagcttctcctgtgaggctcagttgccttacgtgtgcaggaaacccctgaacaacacagtggaattgaccgacgtgtggacgtacagtgatacccggtgtgatgcgggttggcttccaaacaacggcttctgctacttgttggttaacgagtctaattcctgggacaaggcccatgccaaatgcaaggcattcagttctgacttaataagcatacactctttggccgacgtggaagtggtggtcacgaaactccataacgaagacataaaggaggaggtgtggattgggttaaagaatatcaacatccccactctgtttcaatggtctgatggaaccgaagtcaccctcacctactgggatgagaatgaacctaatgtgccgtacaataagacccccaactgtgttagctatttaggagaactcgggcaatggaaggtgcagagctgtgaagagaagctcaagtacgtgtgcaaacgaaaaggcgaaaaactaaatgatgcttctagcgacaagatgtgccctcctgacgagggctggaaacgtcatggggagacgtgctataagatctacgaggacgaggttcctttcgggacaaactgtaacctcacaattacctccagatttgaacaagaatacctgaatgatctcatgaaaaagtacgataagtccctgaggaaatacttttggacaggactccgagacgttgactcctgtggggagtacaactgggctacagtcgggggtagacgcagggccgtgactttcagtaactggaattttctcgaacccgcctccccagggggctgtgttgcgatgtcgacaggcaaatccgtgggaaagtgggaggttaaggattgtcgatcatttaaggcactgtcgatctgcaaaaaaatgtccggccctcttggaccagaggaggctagtccgaagccggacgatccttgccccgaggggtggcagagcttccctgcatcactgagttgctataaagtctttcacgctgagcgcatcgtgcgcaagagaaactgggaagaggcggagcggttttgtcaagcactgggcgcccatttatcaagtttttcccatgtagatgaaatcaaagaattcttgcattttctaacagaccagtttagcgggcagcactggctctggattggacttaataaaaggtcccccgacttgcaagggtcctggcagtggagtgacagaacccctgtttctaccatcataatgccaaacgagttccaacaagattatgacattcgggactgcgccgcagtcaaggtattccatagaccctggagaaggggatggcacttttatgacgatagagagtttatttatctgaggccattcgcctgtgatacgaagctagaatgggtttgccaaatccccaaaggaaggacccccaagacccccgactggtacaaccccgacagagcaggaatccacggaccaccccttataatcgaagggtctgagtattggtttgttgccgatctgcacttaaattacgaggaagcagttttgtactgcgccagcaaccattcttttctcgctaccatcacatctttcgtaggcctgaaagccatcaaaaacaagatcgctaatatatccggagacgggcaaaaatggtggatcagaatttcagaatggccaatcgacgatcacttcacttatagcaggtacccatggcatcgctttcctgtgaccttcggcgaagagtgtctgtacatgtcagctaaaacctggctgatcgacttgggtaagcccactgattgctccacaaaactgccatttatttgtgagaaatataatgtcagttcgctcgaaaagtactctcctgattccgccgccaaggtccagtgttccgagcaatggatccccttccaaaacaagtgctttttgaaaattaagccggtcagccttacatttagtcaagcttctgacacatgtcattcctatggtggcactctgccctccgtcctgtcacagattgaacaagactttatcacttccttgctgcccgacatggaagccacactttggattggcctccggtggacagcttacgaaaaaatcaataaatggaccgacaatagggaactgacttattcaaattttcatcctctcctagtttctggcaggctgcgtatacctgaaaacttttttgaagaagagagtcgctatcactgtgctcttatactgaatctgcagaagagcccctttaccggaacatggaactttacttcatgcagcgagcgtcacttcgtgtccctatgtcagaaatactcagaggtcaaatccaggcaaacacttcagaacgccagcgagaccgtgaagtacctgaacaatctatacaagatcattccaaagacattgacttggcattccgccaagagagagtgcctgaaatctaatatgcagttagtctccatcaccgatccctaccaacaggcgttcctgtctgttcaggcgctgttacacaactcctctctttggatcggccttttctcacaggatgacgagctgaactttggctggagtgatggcaaacggctccactttagtcgctgggctgagacaaatggccaacttgaggactgtgtcgtactcgacaccgacggcttctggaagacagtggactgtaatgacaatcaacctggagccatatgttactacagtggtaatgagaccgagaaggaggtgaagccagtggacagtgtcaagtgcccgagcccagttctcaatacaccctggatcccatttcagaattgctgttataacttcatcatcaccaaaaacaggcatatggcgacaacccaggatgaagttcacaccaagtgccagaagctgaatcccaagagtcacatcctatcaattagagacgagaaggagaacaactttgtccttgagcagctgctgtactttaactatatggccagctgggtgatgctgggcataacataccgtaacaagtctctaatgtggtttgacaaaactccattgtcttacactcactggcgcgctggccgccctacaattaaaaacgagaaatttctggcgggcctatctactgacggtttttgggacatacagaccttcaaggtcatcgaggaagctgtgtacttccaccaacactcaatactcgcatgtaagatcgaaatggtagattacaaagaggagtacaacaccacattgcctcaattcatgccctatgaggacggcatttacagcgtcatccagaagaaagtgacgtggtacgaagccttgaacatgtgctctcaatctggtggacacttagccagcgtgcacaatcagaacggtcaactgttcctggaagacattgtgaagcgagatggatttcctttgtgggtcggtttgagctcacatgacgggagtgaatcatcctttgagtggtccgatggctcgacgttcgattacataccttggaagggacagacctcccctgggaattgcgttctgcttgacccaaaaggtacatggaaacacgagaaatgcaacagcgtgaaagatggtgcaatctgttacaaacctaccaaatcgaagaagctctctcgtttaacctactctagccgatgcccggctgctaaggagaacggtagcaggtggatccagtacaagggccattgttacaagtcagaccaggccctgcacagtttcagtgaggctaaaaaactctgtagcaaacacgatcatagcgcaactatagtgtctatcaaggacgaggacgagaacaagttcgtgtctcgcctgatgcgcgagaacaacaacattactatgagagtgtggctcggcctgagtcagcatagcgtcgatcagtcctggagctggctggacggctccgaagtaacatttgtgaaatgggagaataagagtaagtctggcgtgggtcgttgtagcatgctgatcgcgagcaatgagacctggaagaaagtcgagtgcgaacacgggtttggcagagtggtgtgtaaggtccctctcgactgtccttcctctacttggatccagtttcaggattcctgctacatcttcctccaggaagccatcaaagtggaatcaattgaagacgtgcggaaccaatgtacagaccacggagctgatatgatttccatacacaacgaagaagagaacgctttcatcttagatactctcaagaaacagtggaagggcccagatgatatcctgctaggaatgttttatgatacggatgatgcgtctttcaagtggtttgacaacagcaacatgacattcgataagtggaccgaccaggacgatgacgaagatcttgtggacacgtgtgcttttctgcatataaaaaccggggagtggaaaaaagggaattgtgaggtaagctctgtagaaggtaccttgtgcaaaaccgctattccgtacaaaagaaaatatctctcggacaatcacatcctcatctccgccttggtcattgcctcaacagtgatcttgaccgtgctgggtgctatcatctggtttctttataagaagcacagcgacagccggtttaccacagtgttctccacagcgccccagagtccctacaacgaggattgtgtcctggtcgtgggggaggaaaacgagtaccccgtgcagttcgattag

SEQ ID NO: 76043 - DNA, 5621 bp, Artificial Sequence
  derived and/or modified sequence
atgcgcaccggatgggctacaccaagaagaccagccggtttactgatgctgctcttctggttctttgatttggccgaaccctctggcagagccgctaacgatcccttcacaatcgtgcatggcaatacaggcaaatgtatcaaacctgtttatggttggatcgttgcagacgattgtgacgagacagaagacaaattatggaagtgggtgagccagcaccgactattccatctacactcccagaaatgcctgggacttgatataacaaagtcagtcaatgaactgcggatgttttcctgcgatagctcggctatgctgtggtggaaatgtgagcaccacagcctgtatggtgcggctcgttatagactcgccctgaaggacggccatgggactgctatatccaatgcttccgatgtatggaaaaaaggcggtagcgaggagtcactgtgtgaccagccctaccacgaaatttacactagagacggcaactcttacggcaggccatgcgagtttccattcctgattgacgggacttggcaccatgactgtattctagacgaggatcatagtggcccatggtgtgcgacaactcttaattacgagtacgaccggaaatggggtatatgtctcaaacctgaaaatggttgtgaagataattgggagaaaaacgagcagttcgggagttgctaccaattcaacactcagacagcacttagttggaaggaagcctatgtgtcttgtcagaatcagggggctgacttgcttagcattaactccgccgctgagcttacatacctgaaggagaaggagggaattgccaagattttctggattggcctgaatcagctgtatagcgctcgcggttgggagtggagcgatcacaagcccctgaacttccttaattgggatccagaccgtccttctgctcctacgattggagggtcctcttgcgctcgaatggatgccgaaagcgggctctggcagtcctttagctgtgaagcccagctaccgtacgtctgcaggaagcccctgaataatacagtagagttgaccgacgtctggacatatagcgatacccggtgcgatgctggctggctgcctaataacgggttctgctatcttctggtaaacgagtcaaatagctgggacaaagcccacgcgaagtgtaaggctttttcctcagatctgatcagcattcacagtctggcagacgttgaggtggtcgttacaaaactgcacaacgaagacatcaaagaagaggtgtggattggtttgaagaatatcaatatccctacgcttttccagtggagcgacgggacagaagtgactttgacttactgggatgagaatgaacctaacgtgccttacaataagacacctaattgcgtgagctatctcggagagctggggcaatggaaggtgcagtcctgcgaggagaagcttaaatacgtgtgcaaacgtaaaggcgagaaattaaacgatgccagttcagacaagatgtgcccacctgacgaaggctggaaacgtcatggcgagacatgttacaaaatctacgaggacgaggtaccattcggaacgaactgtaatctcacgattacatcccgctttgagcaggaatacctgaatgatctgatgaagaagtatgacaagtctcttcgcaaatacttctggactgggctcagagacgttgacagctgtggcgaatataattgggccactgtgggcggaagacgacgagccgttacattcagcaattggaactttctggagccggcatcccccggagggtgtgtcgctatgtcgactggtaagtcagtgggcaagtgggaggtaaaggattgccgatcgtttaaggccctgtcaatttgcaaaaaaatgtccggcccactggggccagaggaagcaagccctaagcctgacgacccatgtccagaaggatggcaatcgttcccggcatctctctcatgctacaaggtgttccacgccgagagaatcgttcgaaagaggaactgggaggaggctgaaagattctgccaggctttgggtgcgcacttgtcctcattttcgcatgtggatgaaattaaagaattcctccacttcctgactgaccagtttagtgggcagcactggttgtggattgggttgaataagcggtcccctgatttacagggctcctggcagtggagcgataggacgcccgtgagcaccattattatgcccaatgagttccagcaagattatgacatacgcgattgcgctgccgtcaaggtctttcatcgaccttggcgacggggatggcacttctacgatgaccgggaattcatctatctgcgacctttcgcctgtgacaccaagcttgaatgggtctgccagatcccaaaaggcagaacccctaagactcctgactggtataatcccgaccgggcaggcattcacggccctccgctaatcattgagggaagcgagtattggtttgtcgccgatctgcatctgaactatgaagaggcagtcttgtattgcgccagtaatcattcttttctggcaacaattacgagctttgttggattgaaggcgataaaaaacaagatcgctaatatatctggggacggccagaaatggtggataagaatttctgaatggccaattgacgatcacttcacctattcaaggtacccatggcatcggttcccagtgacttttggagaggagtgtctgtatatgtcagcaaagacgtggttaatcgacctgggtaaaccaacagactgcagtacaaaactgccctttatttgcgagaaatacaatgtctcgagcctggaaaagtacagtccagacagcgccgctaaagtccagtgctccgaacagtggatcccatttcagaacaaatgctttctgaagatcaaacctgtcagtctgacatttagccaggcttcagacacatgccactcctacggtggaactctgcccagtgtcctcagtcagatcgaacaagatttcatcacgtccttactccctgacatggaggctacactctggatcggactcagatggacagcttacgagaagatcaacaagtggaccgacaatcgagaactcacctactctaactttcatcctctcctcgtctcaggtcgactcagaatacctgagaatttttttgaggaagagagtaggtatcactgcgccctgatacttaacttacaaaaaagccctttcacagggacgtggaacttcactagttgcagtgaacggcattttgtgagcctgtgccagaagtacagcgaggtcaaatcacgtcagacattgcagaacgcatccgaaaccgtgaagtatctaaacaatctttataagattatccctaagactctgacctggcactccgcaaagcgagaatgtttgaaatccaacatgcaactcgtttctatcacagatccttatcaacaggcttttctttcagtgcaggccctgctccacaactccagcctgtggatcggcttattttcccaggacgacgaactgaatttcggctggtctgacgggaagcgtcttcatttctctagatgggccgagacaaatggtcagctggaggactgcgtggtgctcgatacagatggattttggaagaccgtcgactgtaatgataaccagcctggagctatttgctactatagcggaaatgaaacagaaaaagaagtgaaaccggtcgattcagtaaagtgtccctccccagtccttaacacaccatggatacccttccaaaactgctgttataactttatcatcacgaagaatcgacatatggccacaactcaggacgaggtccatacaaagtgtcagaagttgaaccccaagtctcacatcctctccatacgtgacgagaaagaaaacaatttcgtgctcgaacagctattatactttaactatatggcgagttgggtgatgctgggaataacataccggaataagagtctgatgtggtttgataagactccactgtcctacacccactggcgagcaggacggccaactataaaaaatgagaaattcctggctggacttagtacggacgggttttgggatatccagacgtttaaggtgatcgaagaggcggtgtacttccatcagcactccatcctcgcctgtaaaatcgaaatggtagactacaaagaagagtacaacacaacccttccccagtttatgccctatgaggacggcatatactcagtgatacagaaaaaagtcacgtggtacgaagccctgaacatgtgtagccaaagcgggggacatttggcttccgtgcacaatcaaaacgggcaattgtttcttgaagacattgtcaaaagggacggattccctctgtgggtggggctctcctctcacgacggttccgaaagtagtttcgaatggtctgatggctcaactttcgattatatcccttggaaaggccagacttctcctggtaactgcgttctgttggaccccaaagggacctggaaacatgaaaagtgtaattctgtcaaagacggggcaatctgttacaagcccactaagtctaaaaagctctccaggctcacctacagtagccggtgcccagcagctaaagaaaatgggtcgaggtggatccagtacaaggggcattgttacaagagtgatcaggcgctgcatagtttttctgaggccaaaaagttgtgttccaaacatgaccatagcgctacaattgtgagcatcaaggacgaggacgagaacaaatttgtgagtcgcttaatgcgggagaacaacaacatcactatgagagtgtggttgggactgtcccagcattccgtggaccaaagttggagttggcttgatggctccgaggtaaccttcgttaagtgggagaacaagagtaaaagtggcgtcgggaggtgctcaatgctgatcgccagtaatgagacatggaaaaaagtggaatgtgagcacgggttcggccgtgttgtttgtaaggtgcctctagactgccccagcagtacctggatccagtttcaggacagttgttatattttccttcaggaggctatcaaggtcgagtctatcgaagatgtcaggaatcagtgcacagatcacggggcagatatgatctccatccataacgaggaagagaacgctttcatcttggacaccctaaagaagcaatggaagggtccagatgacatactgctaggcatgttttatgacaccgatgatgcttcattcaaatggtttgataatagtaacatgacatttgataagtggacagatcaagacgatgacgaggatctggtggacacctgtgcattcctccatattaaaacaggagaatggaaaaaggggaactgcgaggtgtctagcgtagagggcactctgtgcaagactgcgatcccttacaagcggaaatatctctcagacaatcacatccttatttccgccttagtgatcgccagcactgtgattctcacagtactgggtgcaatcatatggttcctttataagaagcattctgactcacggttcaccaccgtgttctcaacagctcctcagtccccttacaatgaggactgtgtgctagtggttggagaggagaacgagtaccctgttcagttcgatta

SEQ ID NO: 76044 - DNA, 5622 bp, Artificial Sequence
  derived and/or modified sequence
atgagaaccggctgggctactccacgccggccagcaggcttgctcatgctgctcttttggtttttcgatctggcagagcccagcggcagggccgccaacgacccattcacaatcgtccacgggaatacggggaaatgtatcaagcccgtctacggatggatcgtggcggacgactgtgatgaaacggaagacaaactgtggaagtgggtgtctcaacacagactgttccacctgcattcgcagaagtgcttggggttagatataacgaagagcgtgaacgagcttaggatgttttcttgcgactcgagtgcgatgctatggtggaaatgcgagcatcatagcttatacggcgcagcgagatatcgtttggcactcaaggatggtcacggcacagcaattagcaacgctagcgatgtgtggaagaaaggcggtagcgaggaatcgctgtgtgatcagccctaccatgagatctatacaagagatggcaacagctacgggaggccttgtgaatttcctttcctcatcgacggaacctggcaccatgactgtattctggacgaagatcattccgggccttggtgtgccaccaccctgaattacgagtatgaccggaagtggggtatttgccttaagccagagaatggttgtgaggataattgggagaaaaacgagcagttcggtagttgttaccagttcaacacccaaactgccttgagttggaaggaagcgtacgtaagctgtcagaatcagggcgccgaccttctgtccattaactctgctgctgagctcacctacctgaaagaaaaggaaggaatcgcaaaaattttctggatcggcctcaaccagctctacagtgctaggggctgggagtggtccgatcacaaacctttgaacttcctgaactgggaccctgaccggcctagtgccccaactataggggggtcgtcatgtgccagaatggacgccgagagcggactctggcagagcttttcctgcgaggcccagctcccttacgtctgccgaaaaccgctaaacaacaccgtcgaactgacagacgtgtggacttattccgacacacgctgcgatgctggatggctgcccaacaatgggttttgttatctgctggtcaacgagagcaactcatgggacaaggctcatgctaaatgcaaagccttctccagtgacctcatcagcatacattcactggcggatgtagaagtggtagtgaccaaactgcataatgaggacattaaagaggaagtctggatcgggctgaaaaatattaatatacccacgctgttccagtggtccgatggcaccgaggtgactttaacctactgggatgagaatgaacccaatgtcccttacaacaagactcctaactgtgtgtcttaccttggtgaattggggcagtggaaggtgcagagctgtgaagagaagttaaagtatgtgtgtaaaaggaagggcgagaaactgaatgacgcatcatccgacaagatgtgcccccccgacgaagggtggaaacggcacggggaaacctgttacaagatctacgaggacgaagtacctttcggcactaactgcaatcttaccattacttcaaggttcgaacaggaatacctgaatgacctgatgaagaaatatgataagagcctgaggaaatatttctggacggggctgcgggatgtggattcctgcggggagtataactgggctaccgtgggtggacggcgccgggctgttactttctccaactggaacttcctcgagcctgcaagccctggtggctgcgtagcaatgtctacaggcaagtctgtaggcaaatgggaggtgaaagattgcagatccttcaaagcactcagtatatgcaagaaaatgtctgggcccctagggcccgaagaggcatccccaaaaccagatgacccatgtcctgaaggctggcagagtttccctgcctccttgagctgttacaaagtctttcacgctgaaaggattgtccggaagagaaactgggaggaggctgagcgtttctgccaagccttaggcgcccacttatcatctttcagccatgtggatgaaatcaaagaattcctgcacttcttaaccgaccagttcagtgggcagcactggttgtggatcggtctgaacaaacgctcccccgatctccagggttcctggcagtggtcagaccgcacccccgtttccactataatcatgcctaacgagtttcagcaagattatgatatcagagactgtgctgccgttaaagtattccataggccttggcgcaggggatggcacttttatgacgatcgggaatttatatacttaagacctttcgcttgcgacacaaagttggagtgggtgtgccagatcccaaagggccgaacacccaagacacccgattggtataacccggacagggccggtatccatggaccaccgcttattattgagggttccgagtattggttcgtggcagacctccacctgaactatgaggaggccgtgctatactgtgcaagcaaccactcctttttggcgacaattacttctttcgtgggacttaaggccataaaaaacaaaattgcaaatatctcgggagacggacagaaatggtggattcgcattagtgagtggcccatagacgatcactttacctactcccgctatccatggcacaggttccccgtcacattcggcgaagagtgtctgtatatgtccgcgaagacatggctcatcgaccttgggaaaccaaccgactgctccacaaagctgccgtttatctgcgagaaatacaatgtctcttccctcgagaaatacagccccgattctgctgcgaaagttcaatgttctgagcagtggattccgttccagaacaaatgttttctaaagattaagcccgtcagtctgacctttagtcaggccagcgatacgtgtcactcctacggaggcaccctgcctagtgtgctttcccagattgagcaggatttcattacgagcctactgccagatatggaagctacactctggatcgggcttaggtggaccgcctatgagaaaatcaacaaatggacagacaacagagagcttacctactccaatttccatccattactggtgagcggcaggctcaggatccctgagaattttttcgaggaagagagtcgctaccattgcgccttgatcctcaatctccagaagagtccctttaccggcacatggaatttcacctcatgttcggaacgtcattttgtttctttatgtcaaaagtacagcgaagtgaaatccagacagaccctccagaacgccagcgagacggtgaaatatctcaacaatctgtataagatcattcctaagacacttacatggcattccgcaaagcgagagtgcctcaagagtaatatgcagctggtgagcatcacggacccataccaacaggccttcctgtctgtgcaggcattgctgcataatagctctctttggataggcttgttctcccaagacgatgagctcaactttggctggagcgacggcaaacgcctgcatttcagcaggtgggctgagactaacgggcagctggaagactgcgtcgtcttggatacagacggattctggaagaccgtcgattgtaatgataatcagcctggggctatatgctactactctggcaacgagactgagaaagaggtgaagccagtagattccgtcaaatgcccatcaccagttctgaatacgccttggatcccctttcaaaactgctgttataatttcatcatcaccaaaaacaggcacatggccaccacgcaggatgaagtgcacaccaagtgtcaaaagctgaatccgaaaagccacatcctgtcaattagagacgaaaaggaaaataattttgttctcgaacagcttctttacttcaattacatggcttcgtgggttatgctgggcatcacctatcggaataaatctctgatgtggtttgataaaacgccattatcctatactcattggagagctgggcgcccaactattaaaaatgagaaattcctagccggactgagtacagacggattttgggatattcagacctttaaggttatcgaagaagcagtttatttccatcagcattcgattctggcctgcaagatcgagatggtcgattacaaggaggagtacaataccactctgccccagttcatgccttacgaggatggcatctactccgtgatccagaaaaaagtaacatggtacgaagctcttaacatgtgctcccagagcgggggccacctggctagtgttcacaaccagaacgggcaactgttcctggaggatatagtgaagcgagacggcttccctttgtgggtgggactgtcgagtcacgatggctccgagagtagtttcgagtggagcgacgggagtaccttcgactacatcccctggaagggtcagaccagtcctggcaattgtgtgcttttggacccaaagggcacttggaaacacgaaaagtgcaattcagtcaaagacggcgccatttgctacaagcctacaaaatcaaagaagctgtcacgactaacttattctagccggtgccccgccgccaaggagaacggatcaaggtggattcagtacaaggggcactgctataagtctgatcaggcactgcactctttctctgaagccaaaaagctgtgctcgaaacacgaccactctgccactatcgtgtcgatcaaagatgaggatgaaaacaaattcgtaagccgcttaatgcgcgagaataataacatcacaatgagggtgtggttgggactttcacaacattccgtggatcagagctggtcttggctggacgggagtgaggtgactttcgtgaagtgggaaaacaagtctaaaagcggtgtgggacgctgtagcatgcttatcgcgagtaatgaaacatggaaaaaggtggaatgcgaacacggatttgggcgagtggtctgcaaggtccccctggactgccccagctcaacatggattcagtttcaggacagttgctacattttcttgcaagaggccataaaagtggagtctatagaggacgtgcggaaccaatgtaccgatcatggtgccgatatgattagtattcacaacgaggaagagaacgcctttattctagataccctgaagaagcagtggaagggtcctgacgacattctcctcggaatgttttatgacactgacgacgcaagctttaagtggttcgataactccaacatgaccttcgacaagtggacagatcaggacgacgacgaagatcttgtggacacttgcgcctttctgcatattaaaacaggagagtggaaaaaaggcaattgcgaggtcagctctgtggagggcacattatgcaagacagctattccgtacaagagaaagtatctctctgataaccatattctcattagtgccctagtgatcgcctctactgtaatcttgaccgtacttggcgccatcatctggtttctgtataagaagcactccgatagccggttcaccaccgtatttagcaccgccccacagtcaccctacaacgaagactgtgtgctggtagtcggagaggagaacgaataccctgtgcagttcgactag

SEQ ID NO: 76045 - DNA, 5650 bp, Artificial Sequence
  derived and/or modified sequence
ccggccggaaggcttgcgccagctcaggatgaggacaggctgggcgacccctcgccgcccggcggggctcctcatgctgctcttctggttcttcgatctcgcggagccctctggccgcgcagctaatgaccccttcaccatcgtccatggaaatacgggcaagtgcatcaagccagtgtatggctggatagtagcagacgactgtgatgaaactgaggacaagttatggaagtgggtgtcccagcatcggctctttcatttgcactcccaaaagtgccttggcctcgatattaccaaatcggtaaatgagctgagaatgttcagctgtgactccagtgccatgctgtggtggaaatgtgagcaccactctctgtacggagctgcccggtaccggctggctctgaaggatggacatggcacagcaatctcaaatgcatctgatgtctggaagaaaggaggctcagaggaaagcctttgtgaccagccttatcatgagatctataccagagatgggaactcttatgggagaccttgtgaatttccattcttaattgatgggacctggcatcatgattgcattcttgatgaagatcatagtgggccatggtgtgccaccaccttaaattatgaatatgaccgaaagtggggcatctgcttaaagcctgaaaacggttgtgaagataattgggaaaagaacgagcagtttggaagttgctaccaatttaatactcagacggctctttcttggaaagaagcttatgtttcatgtcagaatcaaggagctgatttactgagcatcaacagtgctgctgaattaacttaccttaaagaaaaagaaggcattgctaagattttctggattggtttaaatcagctatactctgctagaggctgggaatggtcagaccacaaaccattaaactttctcaactgggatccagacaggcccagtgcacctactataggtggctccagctgtgcaagaatggatgctgagtctggtctgtggcagagcttttcctgtgaagctcaactgccctatgtctgcaggaaaccattaaataatacagtggagttaacagatgtctggacatactcagatacccgctgtgatgcaggctggctgccaaataatggattttgctatctgctggtaaatgaaagtaattcctgggataaggcacatgcgaaatgcaaagccttcagtagtgacctaatcagcattcattctctagcagatgtggaggtggttgtcacaaaactccataatgaggatatcaaagaagaagtgtggataggccttaagaacataaacataccaactttatttcagtggtcagatggtactgaagttactctaacatattgggatgagaatgagccaaatgttccctacaataagacgcccaactgtgtttcctacttaggagagctaggtcagtggaaagtccaatcatgtgaggagaaactaaaatatgtatgcaagagaaagggagaaaaactgaatgacgcaagttctgataagatgtgtcctccagatgagggctggaagagacatggagaaacctgttacaagatttatgaggatgaggtcccttttggaacaaactgcaatctgactatcactagcagatttgagcaagaatacctaaatgatttgatgaaaaagtatgataaatctctaagaaaatacttctggactggcctgagagatgtagattcttgtggagagtataactgggcaactgttggtggaagaaggcgggctgtaaccttttccaactggaattttcttgagccagcttccccgggcggctgcgtggctatgtctactggaaagtctgttggaaagtgggaggtgaaggactgcagaagcttcaaagcactttcaatttgcaagaaaatgagtggaccccttgggcctgaagaagcatcccctaagcctgatgacccctgtcctgaaggctggcagagtttccccgcaagtctttcttgttataaggtattccatgcagaaagaattgtaagaaagaggaactgggaagaagctgaacgattctgccaagcccttggagcacacctttctagcttcagccatgtggatgaaataaaggaatttcttcactttttaacggaccagttcagtggccagcattggctgtggattggtttgaataaaaggagcccagatttacaaggatcctggcaatggagtgatcgtacaccagtgtctactattatcatgccaaatgagtttcagcaggattatgacatcagagactgtgctgctgtcaaggtatttcataggccatggcgaagaggctggcatttctatgatgatagagaatttatttatttgaggccttttgcttgtgatacaaaacttgaatgggtgtgccaaattccaaaaggccgtactccaaaaacaccagactggtacaatccagaccgtgctggaattcatggacctccacttataattgaaggaagtgaatattggtttgttgctgatcttcacctaaactatgaagaagccgtcctgtactgtgccagcaatcacagctttcttgcaactataacatcttttgtgggactaaaagccatcaaaaacaaaatagcaaatatatctggtgatggacagaagtggtggataagaattagcgagtggccaatagatgatcattttacatactcacgatatccatggcaccgctttcctgtgacatttggagaggaatgcttgtacatgtctgccaagacttggcttatcgacttaggtaaaccaacagactgtagtaccaagttgcccttcatctgtgaaaaatataatgtttcttcgttagagaaatacagcccagattctgcagctaaagtgcaatgttctgagcaatggattccttttcagaataagtgttttctaaagatcaaacccgtgtctctcacattttctcaagcaagcgatacctgtcactcctatggtggcacccttccttcagtgttgagccagattgaacaagactttattacatccttgcttccggatatggaagctactttatggattggtttgcgctggactgcctatgaaaagataaacaaatggacagataacagagagctgacgtacagtaactttcacccattattggttagtgggaggctgagaataccagaaaatttttttgaggaagagtctcgctaccactgtgccctaatactcaacctccaaaaatcaccgtttactgggacgtggaattttacatcctgcagtgaacgccactttgtgtctctctgtcagaaatattcagaagttaaaagcagacagacgttgcagaatgcttcagaaactgtaaagtatctaaataatctgtacaaaataatcccaaagactctgacttggcacagtgctaaaagggagtgtctgaaaagtaacatgcagctggtgagcatcacggacccttaccagcaggcattcctcagtgtgcaggcgctccttcacaactcttccttatggatcggactcttcagtcaagatgatgaactcaactttggttggtcagatgggaaacgtcttcattttagtcgctgggctgaaactaatgggcaactcgaagactgtgtagtattagacactgatggattctggaaaacagttgattgcaatgacaatcaaccaggtgctatttgctactattcaggaaatgagactgaaaaagaggtcaaaccagttgacagtgttaaatgtccatctcctgttctaaatactccgtggataccatttcagaactgttgctacaatttcataataacaaagaataggcatatggcaacaacacaggatgaagttcatactaaatgccagaaactgaatccaaaatcacatattctgagtattcgagatgaaaaggagaataactttgttcttgagcaactgctgtacttcaattatatggcttcatgggtcatgttaggaataacttatagaaataagtctcttatgtggtttgataagaccccactgtcatatacacattggagagcaggaagaccaactataaaaaatgagaagtttttggctggtttaagtactgacggcttctgggatattcaaacctttaaagttattgaagaagcagtttattttcaccagcacagcattcttgcttgtaaaattgaaatggttgactacaaagaagaatataatactacactgccacagtttatgccatatgaagatggtatttacagtgttattcaaaaaaaggtaacatggtatgaagcattaaacatgtgttctcaaagtggaggtcacttggcaagcgttcacaaccaaaatggccagctctttctggaagatattgtaaaacgtgatggatttccactatgggttgggctctcaagtcatgatggaagtgaatcaagttttgaatggtctgatggtagtacatttgactatatcccatggaaaggccaaacatctcctggaaattgtgttctcttggatccaaaaggaacttggaaacatgaaaaatgcaactctgttaaggatggtgctatttgttataaacctacaaaatctaaaaagctgtcccgtcttacatattcatcaagatgtccagcagcaaaagagaatgggtcacggtggatccagtacaagggtcactgttacaagtctgatcaggcattgcacagtttttcagaggccaaaaaattgtgttcaaaacatgatcactctgcaactatcgtttccataaaagatgaagatgagaataaatttgtgagcagactgatgagggaaaataataacattaccatgagagtttggcttggattatctcaacattctgttgaccagtcttggagttggttagatggatcagaagtgacatttgtcaaatgggaaaataaaagtaagagtggtgttggaagatgtagcatgttgatagcttcaaatgaaacttggaaaaaagttgaatgtgaacatggttttggaagagttgtctgcaaagtgcctctggactgtccttcatctacttggattcagttccaagacagttgttacatttttctccaagaagccatcaaagtagaaagcatagaggatgtcagaaatcagtgtactgaccatggagcggacatgataagcatacataatgaagaagaaaatgcttttatactggatactttgaaaaagcaatggaaaggcccagatgatatcctactaggcatgttttatgacacagatgatgcgagtttcaagtggtttgataattcaaatatgacatttgataagtggacagaccaagatgatgatgaggatttagttgacacctgtgcttttctgcacatcaagacaggtgaatggaaaaaaggaaattgtgaagtttcttctgtggaaggaacactatgcaaaacagctatcccatacaaaaggaaatatttatcagataaccacattttaatatcagcattggtgattgctagcacggtaattttgacagttttgggagcaatcatttggttcctgtacaaaaaacattctgattctcgtttcaccacagttttttcaaccgcaccccaatcaccttataatgaagactgtgttttggtagttggagaagaaaatgaatatcctgttcaatttgactaa

SEQ ID NO: 76046 - DNA, 5622 bp, Artificial Sequence
  derived and/or modified sequence
atgcggaccggctgggccaccccccggcggcccgccggcctgctgatgctattgttctggttcttcgacttggctgagccaagtggccgcgctgcaaatgacccgtttacaattgtgcacggaaacacgggaaaatgcatcaagcctgtctacgggtggatagtcgcagatgattgcgatgaaactgaggataaactttggaagtgggttagtcagcataggctgtttcacctgcattcccagaaatgcctggggttggacattaccaagagtgtgaacgaattgcgcatgttcagttgcgatagctccgccatgttatggtggaaatgtgaacatcactcactgtacggagctgcccggtacaggctagccttaaaggatggacatggcactgccatcagcaatgccagtgacgtgtggaagaaagggggctctgaagaatcgttatgtgaccaaccttatcacgagatctacacacgcgacggcaactcctacggtcggccatgcgaatttccattcctaattgacggcacctggcaccatgattgtatcctggatgaggaccacagcggaccatggtgcgcgacgaccctgaattacgaatacgaccgcaagtgggggatttgcctcaagcctgaaaacggctgtgaggacaactgggagaagaacgaacagttcggtagctgctaccagtttaatacacagacagccttatcatggaaggaggcctacgtgagctgccagaatcaaggggcagatctcttgtccatcaattccgccgcagaactgacctacctcaaagagaaggagggcatagcaaaaatattttggatcgggctcaaccagctttacagcgcacggggctgggagtggtccgaccataagcccttgaattttctgaactgggatcctgacagaccctctgccccaaccatcggaggtagtagttgcgctcgcatggacgccgagagcggactatggcagtctttcagctgcgaagcgcagctcccttatgtgtgtcggaaaccgctgaataacactgtggagctcaccgacgtgtggacttacagcgatactcgctgtgatgcagggtggctccctaataatggattctgctacctgcttgtcaacgagtccaattcatgggacaaggctcatgccaaatgcaaggcattttcttccgacttaatttcaattcacagtctggccgacgtcgaggtggtcgttaccaaattacacaacgaggatatcaaagaggaggtgtggatcgggttaaaaaatataaatattcccacactgttccagtggagtgacggcactgaggtgactctcacctactgggacgaaaatgagcctaatgtaccatataacaagactccaaactgtgtgtcatatctgggtgaactgggccagtggaaggtccagtcctgcgaggagaagctcaagtacgtttgcaagcggaagggggaaaaactcaatgacgcatcttccgacaaaatgtgtccacctgatgagggctggaaaagacacggagaaacatgctacaaaatctatgaggacgaggtaccgtttggcaccaactgtaatctcactatcacctctagatttgaacaagagtacttgaacgacctcatgaaaaaatacgacaagtcacttcggaagtatttttggactggtctgcgagatgtagatagctgcggcgaatataattgggccacggttgggggacgccgtcgggctgttaccttcagcaattggaactttctagagcctgcctcacctggtggatgcgtagccatgtctaccggcaaaagcgtgggcaaatgggaagtgaaggattgcagatccttcaaggctttaagcatttgcaagaaaatgagtggaccgctgggacctgaagaggcttcgccgaaacctgatgacccatgccccgagggctggcagtcttttcctgccagtttgagttgttataaagtgtttcatgctgagcgcatcgtgcggaagcgcaattgggaagaagccgaacgattctgccaggccttgggggctcacctttcttcattctcacatgtggacgagattaaggagttcctccattttctcactgatcagttctccggccagcactggctctggatcggtctaaacaagcggagccccgatttgcaaggctcgtggcagtggtccgaccgcacccctgtttctaccattatcatgcctaatgaattccagcaggattacgacattcgtgattgcgctgcagtgaaggtgttccaccggccttggaggaggggttggcacttttacgatgatcgtgaattcatttacctgcgaccgtttgcctgcgatacaaagctggaatgggtgtgccaaattcccaagggtaggacccccaagacccctgactggtacaatcccgatagagcaggcatccatggacctccactgataatcgaagggtcagaatactggtttgttgccgacctgcatcttaactatgaggaagccgtgctgtactgtgcgtccaaccattctttccttgcaaccattaccagcttcgtggggctgaaggcgattaagaataagatagctaacatatcaggggatgggcaaaaatggtggatcagaattagcgagtggcccattgatgatcacttcacttactctaggtacccctggcatcgttttcccgtgacattcggagaggagtgtctttacatgtccgccaaaacttggcttatcgatcttgggaagcctacagattgctccacgaaactaccatttatttgcgagaagtacaacgtcagttctctggagaagtattcacctgactccgcagctaaagtccaatgttcggagcagtggattcctttccagaacaaatgtttcctcaagatcaagcccgtcagcctgactttttcccaggccagtgatacctgccacagctacggcggaactctacctagcgtgctgtcccagattgaacaggacttcattactagtctcttacccgacatggaggctactctgtggattggactacgctggactgcctacgagaaaataaacaagtggacagacaacagagaactgacctactccaactttcaccctctgttggtaagtgggcgcctgcgtattccagagaacttcttcgaagaagaatctagataccactgcgccttaattctgaaccttcaaaagtccccatttacaggtacttggaattttacaagctgtagtgagcgccattttgttagcctttgccagaaatattctgaagtgaagtctcgacagactctccagaatgcctctgagacagtgaaatatctcaacaacctatacaaaattatcccgaaaaccctgacatggcattcagccaaaagggaatgtctcaagtcaaatatgcagcttgtgtccatcacggacccataccagcaagcttttctttctgtccaggcccttctccacaattcctcactgtggattggacttttctctcaggatgatgagctgaacttcggttggagcgacggtaaacgactgcattttagccggtgggccgagacaaatgggcaactcgaagattgtgtcgtgctggacacggacggcttctggaaaactgtggactgcaatgataaccagcctggagctatttgctactattctggcaacgaaactgagaaggaggttaagccagtcgatagcgtaaaatgcccaagtccagtgctgaacaccccttggattccctttcagaactgctgttataattttatcatcacgaaaaaccgccatatggccacgacccaggatgaggtacataccaagtgtcagaagctcaatcccaagagtcacatcctatctatccgcgacgagaaggaaaacaacttcgtcctggagcaactgctgtatttcaactacatggccagctgggtgatgctggggatcacctaccgtaacaaaagcctcatgtggttcgataaaaccccactgtcatacacacactggagggccggtagaccaacgatcaagaatgagaaatttctggccggcctttccaccgatggtttctgggacatacagaccttcaaagtcattgaagaggcagtctacttccaccagcactccattctggcctgcaagatagagatggtggattataaagaggagtacaataccaccctgccgcagttcatgccctatgaagatgggatctactcggtcatccagaaaaaggtgacatggtatgaggccctgaatatgtgtagccagagcgggggccatttggcgagcgtgcacaaccaaaatggccagctgttcttagaggacatcgttaagcgggatgggtttccgctctgggtcggcttaagcagtcatgacgggagtgaaagcagtttcgagtggtccgatggatctacgttcgactatattccatggaaaggacagacctcccctggcaactgcgtcctgctcgatccaaagggtacatggaagcacgagaagtgtaactctgttaaggacggggcgatttgctacaagcccaccaagagtaagaagttgagtcgtctgacctactcatctcgctgcccagcagccaaggaaaacggctcaagatggatccaatacaaggggcactgttacaagagcgatcaggctcttcactcattctctgaggcaaagaaactgtgctctaaacacgatcactcagctacaatcgtgagcattaaggacgaggatgaaaataagttcgtctccaggctgatgcgcgagaacaataacatcactatgagggtgtggttagggctgagccaacacagtgtggatcagagttggtcctggctggacgggagcgaagttacttttgtgaagtgggaaaacaagtcgaaaagcggggtggggaggtgtagtatgctgattgcgtccaatgaaacttggaaaaaagtggagtgtgaacacggctttggcagggtggtttgtaaagttcccctggactgcccctcaagcacctggattcaattccaggatagttgctacatcttcctgcaggaagctatcaaggtggagtcaatagaagatgtgcgtaaccagtgtaccgaccacggcgccgacatgattagcattcacaacgaagaggagaacgctttcatcctcgataccctgaagaagcagtggaaaggccctgatgacatcctgctggggatgttctatgatacagacgacgcaagttttaagtggttcgacaattccaacatgacctttgacaagtggacagatcaggacgatgacgaagacttagtagatacttgcgctttcttgcacattaagactggcgagtggaagaagggaaattgtgaagtatctagtgtggagggcactttgtgcaaaactgcaatcccatataaaaggaagtacctcagcgacaaccatattctcattagcgcgctggtgattgcctccacagtgatactgaccgttctgggggcaattatctggttcttatacaaaaaacattctgacagtcggttcaccactgtgttctcaaccgctccacaatccccatacaacgaggattgcgtgctcgtcgtaggagaagagaatgaatacccagtccaatttgactag

SEQ ID NO: 76047 - DNA, 5621 bp, Artificial Sequence
  derived and/or modified sequence
atgcgcactgggtgggccactccacgcagacccgctggcctgttgatgcttttgttctggtttttcgatcttgccgaaccttctggaagagccgctaacgaccccttcacgatcgttcacggcaatactggaaaatgtattaaaccagtatacggctggattgttgctgatgactgtgacgagaccgaagacaagttgtggaagtgggtgtctcagcaccggctttttcacctccattctcagaagtgtctgggactcgatattacaaagagcgtcaacgagctcagaatgtttagctgtgactcgtccgccatgttgtggtggaaatgcgagcaccactcactgtacggggctgctaggtaccgactcgctctaaaagatgggcatgggacggcgatcagcaacgcctctgacgtgtggaagaagggaggctctgaggaatcactgtgtgaccagccttatcacgaaatttatacacgggacggaaacagttacggcagaccctgtgagtttcccttcctaattgatggtacttggcatcatgactgcatactggatgaagaccactcaggaccctggtgtgcgactaccctgaactatgagtacgatagaaagtggggtatctgcttaaaaccggaaaacggatgcgaggataattgggagaagaatgagcagtttgggagctgctaccagttcaatactcagacagccctgtcttggaaggaagcttacgtgtcttgccagaatcagggggctgacctcctaagtattaattcagccgcagagctgacctacttgaaagagaaggaggggattgccaaaatcttttggatcggcttgaatcagctgtactccgcccgtggatgggagtggtctgatcataaacctctcaattttttgaattgggacccagaccggcctagcgcacctaccattgggggatctagctgcgccaggatggacgccgaaagcggcttgtggcagtcgttcagctgcgaggctcagttgccctacgtttgtcggaagccacttaacaatactgtggagctaaccgatgtctggacttacagcgatacccgctgtgacgccggatggctgcccaacaatggattctgctatctgctagtgaatgagtccaattcatgggataaagcacatgcaaaatgcaaggcgttcagttctgatctcatcagtatacatagtctggctgatgttgaggtggttgtcaccaagctgcataatgaagacatcaaagaggaggtctggatcggacttaaaaatattaatatcccaacactgttccagtggagcgacggtaccgaggtgacactgacttactgggatgagaatgagcctaacgttccctacaacaaaacccctaactgcgtgtcatacctgggcgaactgggccagtggaaggttcaatcctgcgaggagaagcttaagtatgtgtgcaagcgaaaaggcgagaagctgaatgatgccagcagcgataaaatgtgtcccccagatgagggctggaaaaggcatggcgagacctgctacaaaatctacgaggatgaggtgcccttcggaacgaattgtaatctcactataacctccagatttgagcaggagtacctgaacgatcttatgaaaaaatatgataagtctcttaggaaatacttctggaccgggctgcgggatgtcgatagctgcggggagtacaactgggctactgtgggaggacgccgtcgcgctgtcacgttctctaattggaacttcttggaacccgcatccccaggtggatgcgtggccatgtcaacaggcaaaagcgtaggcaagtgggaagtcaaagactgcaggagttttaaggctctcagcatctgtaaaaagatgagcggacccttgggaccggaggaagcaagccctaaaccagacgacccttgccctgaggggtggcagtctttccccgctagcctctcttgctacaaggttttccatgccgaacgtatcgttcggaaacgcaattgggaggaagcggaacggttttgccaggcgttgggggcacacctgtcttcattctctcacgtggatgagatcaaggaatttttgcatttccttactgatcagttctccggacagcattggctgtggattggccttaataagcgctctcctgaccttcaggggagctggcagtggagcgaccgcacgccggttagtaccattattatgcctaatgagttccaacaggactatgatatccgtgactgtgcggcagtcaaagtgttccatcggccatggaggagagggtggcatttttatgacgaccgggagttcatctatcttcgtccatttgcatgtgataccaaactggaatgggtatgtcagatccctaagggaagaactcctaagaccccagactggtataacccagatagagccggaattcacggccctcccctgattattgaggggtctgaatattggtttgttgctgatctacacctgaattacgaggaggctgtgctgtattgtgcttcaaaccactcatttctggctaccatcaccagctttgtgggcctgaaagctattaagaataaaatcgccaatatctctggggacggccagaagtggtggattcgtatatccgaatggccaatagacgaccatttcacatactctagatatccttggcaccgatttccagtaacattcggtgaggagtgtctgtacatgtcagcaaagacctggctgatcgatctgggcaagccaaccgactgctcgacaaaactccctttcatttgcgaaaaatataacgtatcctccctggaaaaatactcacccgatagcgctgccaaggtccagtgctcagagcagtggatcccatttcaaaacaagtgctttttaaagataaaacctgtgagcctgaccttttcacaggcttcagacacctgccacagctacgggggtaccctccctagtgtcctgagccagatcgagcaggactttattacctctttgcttcccgacatggaagcgacactatggataggactcaggtggactgcctatgagaagatcaataaatggactgataatagggaactgacctactctaacttccacccactcctggtaagcggccgactgagaattcccgaaaacttttttgaagaagagagcaggtaccactgcgccctgatcctgaatctgcagaagtccccattcactgggacgtggaacttcactagttgtagcgagcggcatttcgtaagcctctgccagaagtattcggaggtgaaatcgaggcagacgctccagaatgcctccgaaaccgtgaaatatctgaacaatctctacaagatcatcccgaaaactctgacatggcactctgccaagcgggaatgtttaaaaagcaatatgcagcttgtgtccattaccgatccctatcaacaggcgtttctgtccgtacaggccctgttgcataattcctccttgtggattggactgttcagccaggacgacgagctcaactttggctggagtgatgggaaacgcctccacttttcaagatgggccgagacgaacggacaactggaggattgcgtcgtgctcgataccgacggtttttggaagaccgttgactgtaacgacaatcagcctggcgctatttgctactactctgggaatgaaaccgagaaggaggtcaagccggtcgactctgtgaaatgcccctcccccgtactgaatacaccatggataccattccagaactgctgttacaacttcattattaccaaaaatcgccacatggccaccacacaagacgaggtccacaccaagtgtcagaaactcaatcctaaatcccacatcctgagcatcagggacgagaaagaaaataatttcgtgcttgagcagcttctgtattttaactatatggcttcgtgggtcatgctgggtatcacctacagaaataagtctcttatgtggttcgacaaaacccccctgtcctacactcattggcgagccggaaggccaaccattaagaacgaaaagttcctggcaggactctccactgatggcttctgggacatccagacatttaaagtcattgaggaggcagtctatttccaccaacactccatcctggcttgtaagatcgagatggtggattataaggaggagtataacactaccttacctcagtttatgccctacgaggacggtatctacagcgtgatccagaagaaggtcacctggtacgaggccctcaacatgtgtagccaaagcggcggacaccttgcaagcgtccacaaccagaacggtcaattgtttcttgaggatattgtgaaaagagacgggtttcccctatgggtaggactatccagtcatgacggatcggagtcctcattcgaatggtccgatggtagcaccttcgactacattccctggaagggccagacctccccaggtaactgcgtgctgctagacccaaagggcacgtggaaacacgagaaatgcaactccgtgaaggacggggctatatgctataagccgaccaagtccaaaaagctatcccgactgacatactcaagtcggtgcccggcagctaaggaaaacgggagtcgctggatccagtataaggggcactgttataagtccgaccaggccttacattccttttcagaagccaagaaactttgtagtaaacacgaccactcggctacaatcgtgagcataaaagacgaagatgagaacaagttcgtgtcccggttaatgcgagaaaacaacaatatcacaatgcgggtgtggctcgggttgtcccaacattccgtggaccagtcctggagctggctggatggctcagaggttaccttcgttaaatgggaaaacaagagcaagtccggcgtgggcaggtgtagcatgctgattgcatccaatgagacctggaaaaaggtggagtgcgagcatggctttggccgtgtagtttgtaaagtccccctcgattgtccttcttccacttggatccagtttcaggactcatgttatattttcctgcaggaggctatcaaggtcgaaagtatcgaagacgttcgaaaccagtgcacagatcatggtgccgacatgattagcattcacaatgaggaggagaatgcgttcatattggacactttaaaaaagcagtggaagggcccagacgatatactgctgggcatgttttacgataccgatgacgcctcctttaagtggttcgataacagtaacatgacgtttgataagtggaccgatcaggatgacgatgaggatctggtggatacctgtgcattcctccacatcaaaactggcgaatggaaaaaaggcaattgcgaagtcagtagcgttgagggaactctttgtaaaacagctatcccgtacaagagaaaatatctctcagataaccacattttgatatctgccctggtaattgcaagtactgttatcctgaccgtcttgggcgcaatcatctggtttttgtacaaaaagcactctgattcccggttcaccaccgtgttcagcaccgcccctcagagtccgtataacgaagattgtgtccttgtggttggggaggaaaatgagtacccagtccagtttgacta

SEQ ID NO: 76048 - protein, 1817 aa, Artificial Sequence
  derived and/or modified sequence
MRTGWATPRRPAGLLMLLFWFFDLAEPSGRAANDPFTIVHGNTGKCIKPVYGWIVADDCDETEDKLWKWVSQHRLFHLHSQKCLGLDITKSVNELRMFSCDSSAMLWWKCEHHSLYGAARYRLALKDGHGTAISNASDVWKKGGSEESLCDQPYHEIYTRDGNSYGRPCEFPFLIDGTWHHDCILDEDHSGPWCATTLNYEYDRKWGICLKPENGCEDNWEKNEQFGSCYQFNTQTALSWKEAYVSCQNQGADLLSINSAAELTYLKEKEGIAKIFWIGLNQLYSARGWEWSDHKPLNFLNWDPDRPSAPTIGGSSCARMDAESGLWQSFSCEAQLPYVCRKPLNNTVELTDVWTYSDTRCDAGWLPNNGFCYLLVNESNSWDKAHAKCKAFSSDLISIHSLADVEVVVTKLHNEDIKEEVWIGLKNINIPTLFQWSDGTEVTLTYWDENEPNVPYNKTPNCVSYLGELGQWKVQSCEEKLKYVCKRKGEKLNDASSDKMCPPDEGWKRHGETCYKIYEDEVPFGTNCNLTITSRFEQEYLNDLMKKYDKSLRKYFWTGLRDVDSCGEYNWATVGGRRRAVTFSNWNFLEPASPGGCVAMSTGKSVGKWEVKDCRSFKALSICKKMSGPLGPEEASPKPDDPCPEGWQSFPASLSCYKVFHAERIVRKRNWEEAERFCQALGAHLSSFSHVDEIKEFLHFLTDQFSGQHWLWIGLNKRSPDLQGSWQWSDRTPVSTIIMPNEFQQDYDIRDCAAVKVFHRPWRRGWHFYDDREFIYLRPFACDTKLEWVCQIPKGRTPKTPDWYNPDRAGIHGPPLIIEGSEYWFVADLHLNYEEAVLYCASNHSFLATITSFVGLKAIKNKIANISGDGQKWWIRISEWPIDDHFTYSRYPWHRFPVTFGEECLYMSAKTWLIDLGKPTDCSTKLPFICEKYNVSSLEKYSPDSAAKVQCSEQWIPFQNKCFLKIKPVSLTFSQASDTCHSYGGTLPSVLSQIEQDFITSLLPDMEATLWIGLRWTAYEKINKWTDNRELTYSNFHPLLVSGRLRIPENFFEEESRYHCALILNLQKSPFTGTWNFTSCSERHFVSLCQKYSEVKSRQTLQNASETVKYLNNLYKIIPKTLTWHSAKRECLKSNMQLVSITDPYQQAFLSVQALLHNSSLWIGLFSQDDELNFGWSDGKRLHFSRWAETNGQLEDCVVLDTDGFWKTVDCNDNQPGAICYYSGNETEKEVKPVDSVKCPSPVLNTPWIPFQNCCYNFIITKNRHMATTQDEVHTKCQKLNPKSHILSIRDEKENNFVLEQLLYFNYMASWVMLGITYRNKSLMWFDKTPLSYTHWRAGRPTIKNEKFLAGLSTDGFWDIQTFKVIEEAVYFHQHSILACKIEMVDYKEEYNTTLPQFMPYEDGIYSVIQKKVTWYEALNMCSQSGGHLASVHNQNGQLFLEDIVKRDGFPLWVGLSSHDGSESSFEWSDGSTFDYIPWKGQTSPGNCVLLDPKGTWKHEKCNSVKDGAICYKPTKSKKLSRLTYSSRCPAAKENGSRWIQYKGHCYKSDQALHSFSEAKKLCSKHDHSATIVSIKDEDENKFVSRLMRENNNITMRVWLGLSQHSVDCPSSTWIQFQDSCYIFLQEAIKVESIEDVRNQCTDHGADMISIHNEEENAFILDTLKKQWKGPDDILLGMFYDTDDASFKWFDNSNMTFDKWTDQDDDEDLVDTCAFLHIKTGEWKKGNCEVSSVEGTLCKTAIPYKRKYLSDNHILISALVIASTVILTVLGAIIWFLYKKHSDSRFTTVFSTAPQSPYNEDCVLVVGEENEYPVQFD

SEQ ID NO: 76049 - DNA, 5454 bp, Artificial Sequence
  derived and/or modified sequence
atgagaaccggctgggccacccccagaagacccgccggcctgctgatgctgctgttctggttcttcgacctggccgagcccagcggcagagccgccaacgaccccttcaccatcgtgcacggcaacaccggcaagtgcatcaagcccgtgtacggctggatcgtggccgacgactgcgacgagaccgaggacaagctgtggaagtgggtgagccagcacagactgttccacctgcacagccagaagtgcctgggcctggacatcaccaagagcgtgaacgagctgagaatgttcagctgcgacagcagcgccatgctgtggtggaagtgcgagcaccacagcctgtacggcgccgccagatacagactggccctgaaggacggccacggcaccgccatcagcaacgccagcgacgtgtggaagaagggcggcagcgaggagagcctgtgcgaccagccctaccacgagatctacaccagagacggcaacagctacggcagaccctgcgagttccccttcctgatcgacggcacctggcaccacgactgcatcctggacgaggaccacagcggcccctggtgcgccaccaccctgaactacgagtacgacagaaagtggggcatctgcctgaagcccgagaacggctgcgaggacaactgggagaagaacgagcagttcggcagctgctaccagttcaacacccagaccgccctgagctggaaggaggcctacgtgagctgccagaaccagggcgccgacctgctgagcatcaacagcgccgccgagctgacctacctgaaggagaaggagggcatcgccaagatcttctggatcggcctgaaccagctgtacagcgccagaggctgggagtggagcgaccacaagcccctgaacttcctgaactgggaccccgacagacccagcgcccccaccatcggcggcagcagctgcgccagaatggacgccgagagcggcctgtggcagagcttcagctgcgaggcccagctgccctacgtgtgcagaaagcccctgaacaacaccgtggagctgaccgacgtgtggacctacagcgacaccagatgcgacgccggctggctgcccaacaacggcttctgctacctgctggtgaacgagagcaacagctgggacaaggcccacgccaagtgcaaggccttcagcagcgacctgatcagcatccacagcctggccgacgtggaggtggtggtgaccaagctgcacaacgaggacatcaaggaggaggtgtggatcggcctgaagaacatcaacatccccaccctgttccagtggagcgacggcaccgaggtgaccctgacctactgggacgagaacgagcccaacgtgccctacaacaagacccccaactgcgtgagctacctgggcgagctgggccagtggaaggtgcagagctgcgaggagaagctgaagtacgtgtgcaagagaaagggcgagaagctgaacgacgccagcagcgacaagatgtgcccccccgacgagggctggaagagacacggcgagacctgctacaagatctacgaggacgaggtgcccttcggcaccaactgcaacctgaccatcaccagcagattcgagcaggagtacctgaacgacctgatgaagaagtacgacaagagcctgagaaagtacttctggaccggcctgagagacgtggacagctgcggcgagtacaactgggccaccgtgggcggcagaagaagagccgtgaccttcagcaactggaacttcctggagcccgccagccccggcggctgcgtggccatgagcaccggcaagagcgtgggcaagtgggaggtgaaggactgcagaagcttcaaggccctgagcatctgcaagaagatgagcggccccctgggccccgaggaggccagccccaagcccgacgacccctgccccgagggctggcagagcttccccgccagcctgagctgctacaaggtgttccacgccgagagaatcgtgagaaagagaaactgggaggaggccgagagattctgccaggccctgggcgcccacctgagcagcttcagccacgtggacgagatcaaggagttcctgcacttcctgaccgaccagttcagcggccagcactggctgtggatcggcctgaacaagagaagccccgacctgcagggcagctggcagtggagcgacagaacccccgtgagcaccatcatcatgcccaacgagttccagcaggactacgacatcagagactgcgccgccgtgaaggtgttccacagaccctggagaagaggctggcacttctacgacgacagagagttcatctacctgagacccttcgcctgcgacaccaagctggagtgggtgtgccagatccccaagggcagaacccccaagacccccgactggtacaaccccgacagagccggcatccacggcccccccctgatcatcgagggcagcgagtactggttcgtggccgacctgcacctgaactacgaggaggccgtgctgtactgcgccagcaaccacagcttcctggccaccatcaccagcttcgtgggcctgaaggccatcaagaacaagatcgccaacatcagcggcgacggccagaagtggtggatcagaatcagcgagtggcccatcgacgaccacttcacctacagcagatacccctggcacagattccccgtgaccttcggcgaggagtgcctgtacatgagcgccaagacctggctgatcgacctgggcaagcccaccgactgcagcaccaagctgcccttcatctgcgagaagtacaacgtgagcagcctggagaagtacagccccgacagcgccgccaaggtgcagtgcagcgagcagtggatccccttccagaacaagtgcttcctgaagatcaagcccgtgagcctgaccttcagccaggccagcgacacctgccacagctacggcggcaccctgcccagcgtgctgagccagatcgagcaggacttcatcaccagcctgctgcccgacatggaggccaccctgtggatcggcctgagatggaccgcctacgagaagatcaacaagtggaccgacaacagagagctgacctacagcaacttccaccccctgctggtgagcggcagactgagaatccccgagaacttcttcgaggaggagagcagataccactgcgccctgatcctgaacctgcagaagagccccttcaccggcacctggaacttcaccagctgcagcgagagacacttcgtgagcctgtgccagaagtacagcgaggtgaagagcagacagaccctgcagaacgccagcgagaccgtgaagtacctgaacaacctgtacaagatcatccccaagaccctgacctggcacagcgccaagagagagtgcctgaagagcaacatgcagctggtgagcatcaccgacccctaccagcaggccttcctgagcgtgcaggccctgctgcacaacagcagcctgtggatcggcctgttcagccaggacgacgagctgaacttcggctggagcgacggcaagagactgcacttcagcagatgggccgagaccaacggccagctggaggactgcgtggtgctggacaccgacggcttctggaagaccgtggactgcaacgacaaccagcccggcgccatctgctactacagcggcaacgagaccgagaaggaggtgaagcccgtggacagcgtgaagtgccccagccccgtgctgaacaccccctggatccccttccagaactgctgctacaacttcatcatcaccaagaacagacacatggccaccacccaggacgaggtgcacaccaagtgccagaagctgaaccccaagagccacatcctgagcatcagagacgagaaggagaacaacttcgtgctggagcagctgctgtacttcaactacatggccagctgggtgatgctgggcatcacctacagaaacaagagcctgatgtggttcgacaagacccccctgagctacacccactggagagccggcagacccaccatcaagaacgagaagttcctggccggcctgagcaccgacggcttctgggacatccagaccttcaaggtgatcgaggaggccgtgtacttccaccagcacagcatcctggcctgcaagatcgagatggtggactacaaggaggagtacaacaccaccctgccccagttcatgccctacgaggacggcatctacagcgtgatccagaagaaggtgacctggtacgaggccctgaacatgtgcagccagagcggcggccacctggccagcgtgcacaaccagaacggccagctgttcctggaggacatcgtgaagagagacggcttccccctgtgggtgggcctgagcagccacgacggcagcgagagcagcttcgagtggagcgacggcagcaccttcgactacatcccctggaagggccagaccagccccggcaactgcgtgctgctggaccccaagggcacctggaagcacgagaagtgcaacagcgtgaaggacggcgccatctgctacaagcccaccaagagcaagaagctgagcagactgacctacagcagcagatgccccgccgccaaggagaacggcagcagatggatccagtacaagggccactgctacaagagcgaccaggccctgcacagcttcagcgaggccaagaagctgtgcagcaagcacgaccacagcgccaccatcgtgagcatcaaggacgaggacgagaacaagttcgtgagcagactgatgagagagaacaacaacatcaccatgagagtgtggctgggcctgagccagcacagcgtggactgccccagcagcacctggatccagttccaggacagctgctacatcttcctgcaggaggccatcaaggtggagagcatcgaggacgtgagaaaccagtgcaccgaccacggcgccgacatgatcagcatccacaacgaggaggagaacgccttcatcctggacaccctgaagaagcagtggaagggccccgacgacatcctgctgggcatgttctacgacaccgacgacgccagcttcaagtggttcgacaacagcaacatgaccttcgacaagtggaccgaccaggacgacgacgaggacctggtggacacctgcgccttcctgcacatcaagaccggcgagtggaagaagggcaactgcgaggtgagcagcgtggagggcaccctgtgcaagaccgccatcccctacaagagaaagtacctgagcgacaaccacatcctgatcagcgccctggtgatcgccagcaccgtgatcctgaccgtgctgggcgccatcatctggttcctgtacaagaagcacagcgacagcagattcaccaccgtgttcagcaccgccccccagagcccctacaacgaggactgcgtgctggtggtgggcgaggagaacgagtaccccgtgcagttcgactag

SEQ ID NO: 76050 - DNA, 5454 bp, Artificial Sequence
  derived and/or modified sequence
atgcgcaccggatgggccacccccagaaggcctgccggtctccttatgctccttttctggttcttcgatctggcagaaccttctggacgagcggctaacgatccttttactatagtgcacggtaacacgggcaagtgcataaaacctgtgtacggatggatagtggccgacgattgcgatgaaacggaggacaaactgtggaagtgggtttcccagcatagactgttccaccttcatagccaaaaatgtttgggcctggatataaccaaatcagtaaacgagctccgaatgtttagctgcgactccagtgccatgctatggtggaagtgcgagcaccactctttatacggggcggctcgttatagactggccttaaaagacggccacggcacagccatttctaacgcctccgacgtctggaagaaagggggaagcgaagaatctctctgcgaccagccctaccatgaaatatatacccgtgatgggaacagctatggcagaccctgcgagtttccattcctaattgacggtacatggcatcacgactgtatactcgatgaggaccactcaggtccttggtgcgcaacaacacttaattatgaatacgatcgcaagtggggtatttgcctgaaacccgagaacgggtgcgaagacaattgggaaaagaatgaacagttcggatcttgctaccagtttaacactcagacagccctgagctggaaagaggcatatgtgtcctgtcagaaccagggcgctgatctgctatcaatcaactctgccgctgagctcacgtacttgaaagagaaggagggtatcgctaagatattctggatcggcttgaaccaattgtactcggcaaggggatgggagtggagcgaccataaacctctcaacttcctgaattgggacccagataggccttccgccccaacaattggggggagtagttgcgctaggatggatgccgagagtggtttatggcagagcttttcctgcgaggcgcagctgccctacgtttgccgcaagccactcaacaacacggtcgagctcacggacgtatggacttactctgatacccgttgtgacgccggatggctgccaaacaatgggttctgctatctcttagtgaacgaatctaactcttgggataaagcccatgccaagtgtaaggcgttttcatcagacttaatttctatccacagcctggccgacgtggaggtagtcgtcacaaaactacataatgaggatataaaggaggaggtttggataggcttaaaaaatatcaacattcctaccctctttcagtggtctgatggcacggaagtgactctgacatattgggacgagaacgagcccaatgtgccatataacaaaaccccgaactgcgtgtcttacctaggagaactgggccagtggaaagtgcagtcctgcgaagagaagctcaagtacgtatgcaagcgtaagggtgagaaactcaatgatgctagttcagacaagatgtgtcctcccgatgagggttggaagcgccacggggagacttgctacaagatatacgaggacgaggtacctttcggtacgaattgcaacctgacaattacctcacggttcgaacaggagtatcttaacgacctgatgaagaagtatgataagtctttgcgaaagtacttttggacagggctgcgcgatgtggacagctgcggcgagtataattgggcaactgttggtggcaggagaagggcagtgacattttcaaactggaactttttggagccggctagccccgggggctgtgtggccatgtccaccggcaagtccgttggaaaatgggaagtgaaggattgccggtcctttaaagccctgtccatatgcaagaaaatgagcggcccactcggccccgaggaagcttcacccaagccagacgacccttgtccggaaggctggcaatcatttcccgccagtcttagctgttacaaggtcttccacgccgaaaggatcgtaaggaagcggaattgggaagaggcagaacgattttgtcaggccctgggagcccatttgagttctttctcacatgtcgacgagattaaagaattcctgcacttcctcaccgatcagttttcgggccagcactggttgtggatcggactgaacaagcgcagccccgatttacagggtagctggcaatggtctgaccggacgccagtgtcaaccattattatgcctaacgaattccagcaggattatgatataagggactgcgccgccgtgaaggtgttccaccggccatggaggcgtggctggcacttttatgatgatcgagaatttatctacctcagaccttttgcctgcgatacaaagctggagtgggtatgtcagattccgaaaggcaggacaccaaaaacccctgattggtacaatcctgatcgcgccggaattcacggcccccctctaattatcgaggggtcagaatactggttcgtggcggacctgcacctgaattacgaagaggccgtgctttattgcgcctctaatcactcattcctggccaccatcacctccttcgtgggactcaaggctattaagaacaaaattgcgaatatatccggagatggtcagaaatggtggattcgaatcagcgaatggcccattgacgatcactttacctacagtcgctatccctggcaccggtttccagtcacgttcggcgaggagtgcctctatatgtctgcaaagacctggttaatcgacctgggtaagccgactgattgttctacaaaactgcctttcatctgcgagaagtacaatgtgtctagcctggagaagtactccccggattctgcggccaaggtgcagtgctcagaacagtggatccccttccaaaacaagtgctttctaaaaattaagccagtgtctctcacgttcagtcaggcctccgacacttgccattcatacgggggtacgttacctagcgtgctgagccaaattgagcaagatttcatcacaagcttgcttcctgatatggaagccactttgtggatcgggcttaggtggacagcctacgagaagatcaataagtggacagacaatagggagctgacctacagcaattttcatccacttcttgtctctggccgattgcgaatccctgagaattttttcgaggaagagtctcgatatcactgtgctttaattctgaacctgcagaagtctcctttcaccggtacttggaacttcactagctgcagcgagaggcatttcgtgtcactgtgtcagaaatacagcgaggtcaagtctagacaaaccctgcaaaacgctagtgagacagttaaataccttaacaatctctataagattattcccaaaacactgacatggcatagtgcaaagcgtgaatgcctgaagagtaatatgcagctagtctctattacggacccctaccagcaggcctttttaagtgtgcaggctctcttacataattccagcctatggatcggcctcttctcacaagatgatgaactaaattttggctggtctgacggaaagcgactccatttctcaagatgggcggagaccaacggccagctggaagactgtgttgtgctagatactgacggcttctggaaaaccgtggactgcaatgacaatcagcccggcgccatctgctattactctggtaacgagaccgagaaggaggtcaaacccgttgattctgtaaaatgtccatcaccggtcctcaacacgccatggattccgttccagaattgctgctacaacttcattatcaccaagaatcgacacatggccactacacaggatgaagttcataccaaatgtcaaaaactgaacccgaaatcgcatattctcagcatcagagatgaaaaggaaaacaacttcgtgctcgagcaattgctgtatttcaactacatggccagctgggtcatgctcggcattacctacagaaacaaatccttgatgtggtttgataagacccctctgtcctacactcactggagagccggccggccgactatcaaaaacgagaaattcctcgcaggcctatctacagacggattttgggacatccagacttttaaagtgattgaagaagcagtttacttccatcaacatagtatcttagcctgcaaaattgagatggtcgactacaaggaagagtataacacaacattaccacaatttatgccatacgaggatggcatctactcagtcatccaaaaaaaggtaacttggtacgaggcactgaatatgtgttcacagtcgggggggcacctcgcctccgtccataaccaaaacggccaactgttcctggaggacatcgttaagcgagatggatttccactttgggtcgggttgagcagccatgacggcagtgagagcagctttgagtggtcagacgggagtactttcgactatatcccctggaaaggccaaactagcccagggaactgcgtcctgctggaccctaagggcacttggaaacacgagaaatgcaactccgtcaaggacggtgctatttgttacaagccaacgaaaagcaagaaactctctcggctcacttattcaagcagatgcccagccgccaaggaaaacggatcgcgctggatccagtacaagggccactgttacaagagcgaccaggcattgcattcctttagcgaggcaaagaaattatgcagtaagcacgaccatagtgcaacaattgtgagcattaaagacgaggacgaaaacaagttcgtcagccgcctgatgagagaaaataacaatatcacaatgagggtgtggctcggcctgagccagcattccgtggactgtccaagtagtacttggatacagttccaggatagctgctacatctttctgcaggaggctattaaggtggagtccatcgaggatgtgaggaaccagtgcactgaccacggggccgacatgattagtattcacaatgaagaagaaaatgctttcatcctcgacacactcaagaaacagtggaagggacctgacgatatactacttgggatgttctatgacacagatgacgcaagttttaagtggtttgataattccaacatgacctttgataaatggacggatcaggatgacgatgaggatttagtggacacctgcgcctttctgcatattaagactggcgaatggaaaaagggtaactgcgaagtatcatctgttgagggcactctgtgcaagacggctatcccttataagcgcaagtacctgagtgacaaccacattctgatcagtgccctggtgattgccagcacagttatcttgactgtcctgggcgccatcatttggttcctatataaaaagcattcagattctcgatttaccacagtgtttagcacagctccccagtccccctacaacgaggactgcgtgctggtcgttggggaggagaacgagtatcccgtacagttcgattag

SEQ ID NO: 76051 - DNA, 5454 bp, Artificial Sequence
  derived and/or modified sequence
atgaggacaggctgggcgacccctcgccgcccggcggggctcctcatgctgctcttctggttcttcgatctcgcggagccctctggccgcgcagctaatgaccccttcaccatcgtccatggaaatacgggcaagtgcatcaagccagtgtatggctggatagtagcagacgactgtgatgaaactgaggacaagttatggaagtgggtgtcccagcatcggctctttcatttgcactcccaaaagtgccttggcctcgatattaccaaatcggtaaatgagctgagaatgttcagctgtgactccagtgccatgctgtggtggaaatgtgagcaccactctctgtacggagctgcccggtaccggctggctctgaaggatggacatggcacagcaatctcaaatgcatctgatgtctggaagaaaggaggctcagaggaaagcctttgtgaccagccttatcatgagatctataccagagatgggaactcttatgggagaccttgtgaatttccattcttaattgatgggacctggcatcatgattgcattcttgatgaagatcatagtgggccatggtgtgccaccaccttaaattatgaatatgaccgaaagtggggcatctgcttaaagcctgaaaacggttgtgaagataattgggaaaagaacgagcagtttggaagttgctaccaatttaatactcagacggctctttcttggaaagaagcttatgtttcatgtcagaatcaaggagctgatttactgagcatcaacagtgctgctgaattaacttaccttaaagaaaaagaaggcattgctaagattttctggattggtttaaatcagctatactctgctagaggctgggaatggtcagaccacaaaccattaaactttctcaactgggatccagacaggcccagtgcacctactataggtggctccagctgtgcaagaatggatgctgagtctggtctgtggcagagcttttcctgtgaagctcaactgccctatgtctgcaggaaaccattaaataatacagtggagttaacagatgtctggacatactcagatacccgctgtgatgcaggctggctgccaaataatggattttgctatctgctggtaaatgaaagtaattcctgggataaggcacatgcgaaatgcaaagccttcagtagtgacctaatcagcattcattctctagcagatgtggaggtggttgtcacaaaactccataatgaggatatcaaagaagaagtgtggataggccttaagaacataaacataccaactttatttcagtggtcagatggtactgaagttactctaacatattgggatgagaatgagccaaatgttccctacaataagacgcccaactgtgtttcctacttaggagagctaggtcagtggaaagtccaatcatgtgaggagaaactaaaatatgtatgcaagagaaagggagaaaaactgaatgacgcaagttctgataagatgtgtcctccagatgagggctggaagagacatggagaaacctgttacaagatttatgaggatgaggtcccttttggaacaaactgcaatctgactatcactagcagatttgagcaagaatacctaaatgatttgatgaaaaagtatgataaatctctaagaaaatacttctggactggcctgagagatgtagattcttgtggagagtataactgggcaactgttggtggaagaaggcgggctgtaaccttttccaactggaattttcttgagccagcttccccgggcggctgcgtggctatgtctactggaaagtctgttggaaagtgggaggtgaaggactgcagaagcttcaaagcactttcaatttgcaagaaaatgagtggaccccttgggcctgaagaagcatcccctaagcctgatgacccctgtcctgaaggctggcagagtttccccgcaagtctttcttgttataaggtattccatgcagaaagaattgtaagaaagaggaactgggaagaagctgaacgattctgccaagcccttggagcacacctttctagcttcagccatgtggatgaaataaaggaatttcttcactttttaacggaccagttcagtggccagcattggctgtggattggtttgaataaaaggagcccagatttacaaggatcctggcaatggagtgatcgtacaccagtgtctactattatcatgccaaatgagtttcagcaggattatgacatcagagactgtgctgctgtcaaggtatttcataggccatggcgaagaggctggcatttctatgatgatagagaatttatttatttgaggccttttgcttgtgatacaaaacttgaatgggtgtgccaaattccaaaaggccgtactccaaaaacaccagactggtacaatccagaccgtgctggaattcatggacctccacttataattgaaggaagtgaatattggtttgttgctgatcttcacctaaactatgaagaagccgtcctgtactgtgccagcaatcacagctttcttgcaactataacatcttttgtgggactaaaagccatcaaaaacaaaatagcaaatatatctggtgatggacagaagtggtggataagaattagcgagtggccaatagatgatcattttacatactcacgatatccatggcaccgctttcctgtgacatttggagaggaatgcttgtacatgtctgccaagacttggcttatcgacttaggtaaaccaacagactgtagtaccaagttgcccttcatctgtgaaaaatataatgtttcttcgttagagaaatacagcccagattctgcagctaaagtgcaatgttctgagcaatggattccttttcagaataagtgttttctaaagatcaaacccgtgtctctcacattttctcaagcaagcgatacctgtcactcctatggtggcacccttccttcagtgttgagccagattgaacaagactttattacatccttgcttccggatatggaagctactttatggattggtttgcgctggactgcctatgaaaagataaacaaatggacagataacagagagctgacgtacagtaactttcacccattattggttagtgggaggctgagaataccagaaaatttttttgaggaagagtctcgctaccactgtgccctaatactcaacctccaaaaatcaccgtttactgggacgtggaattttacatcctgcagtgaacgccactttgtgtctctctgtcagaaatattcagaagttaaaagcagacagacgttgcagaatgcttcagaaactgtaaagtatctaaataatctgtacaaaataatcccaaagactctgacttggcacagtgctaaaagggagtgtctgaaaagtaacatgcagctggtgagcatcacggacccttaccagcaggcattcctcagtgtgcaggcgctccttcacaactcttccttatggatcggactcttcagtcaagatgatgaactcaactttggttggtcagatgggaaacgtcttcattttagtcgctgggctgaaactaatgggcaactcgaagactgtgtagtattagacactgatggattctggaaaacagttgattgcaatgacaatcaaccaggtgctatttgctactattcaggaaatgagactgaaaaagaggtcaaaccagttgacagtgttaaatgtccatctcctgttctaaatactccgtggataccatttcagaactgttgctacaatttcataataacaaagaataggcatatggcaacaacacaggatgaagttcatactaaatgccagaaactgaatccaaaatcacatattctgagtattcgagatgaaaaggagaataactttgttcttgagcaactgctgtacttcaattatatggcttcatgggtcatgttaggaataacttatagaaataagtctcttatgtggtttgataagaccccactgtcatatacacattggagagcaggaagaccaactataaaaaatgagaagtttttggctggtttaagtactgacggcttctgggatattcaaacctttaaagttattgaagaagcagtttattttcaccagcacagcattcttgcttgtaaaattgaaatggttgactacaaagaagaatataatactacactgccacagtttatgccatatgaagatggtatttacagtgttattcaaaaaaaggtaacatggtatgaagcattaaacatgtgttctcaaagtggaggtcacttggcaagcgttcacaaccaaaatggccagctctttctggaagatattgtaaaacgtgatggatttccactatgggttgggctctcaagtcatgatggaagtgaatcaagttttgaatggtctgatggtagtacatttgactatatcccatggaaaggccaaacatctcctggaaattgtgttctcttggatccaaaaggaacttggaaacatgaaaaatgcaactctgttaaggatggtgctatttgttataaacctacaaaatctaaaaagctgtcccgtcttacatattcatcaagatgtccagcagcaaaagagaatgggtcacggtggatccagtacaagggtcactgttacaagtctgatcaggcattgcacagtttttcagaggccaaaaaattgtgttcaaaacatgatcactctgcaactatcgtttccataaaagatgaagatgagaataaatttgtgagcagactgatgagggaaaataataacattaccatgagagtttggcttggattatctcaacattctgttgactgtccttcatctacttggattcagttccaagacagttgttacatttttctccaagaagccatcaaagtagaaagcatagaggatgtcagaaatcagtgtactgaccatggagcggacatgataagcatacataatgaagaagaaaatgcttttatactggatactttgaaaaagcaatggaaaggcccagatgatatcctactaggcatgttttatgacacagatgatgcgagtttcaagtggtttgataattcaaatatgacatttgataagtggacagaccaagatgatgatgaggatttagttgacacctgtgcttttctgcacatcaagacaggtgaatggaaaaaaggaaattgtgaagtttcttctgtggaaggaacactatgcaaaacagctatcccatacaaaaggaaatatttatcagataaccacattttaatatcagcattggtgattgctagcacggtaattttgacagttttgggagcaatcatttggttcctgtacaaaaaacattctgattctcgtttcaccacagttttttcaaccgcaccccaatcaccttataatgaagactgtgttttggtagttggagaagaaaatgaatatcctgttcaatttgactaa

SEQ ID NO: 76052 - DNA, 5454 bp, Artificial Sequence
  derived and/or modified sequence
atgaggacaggctgggccaccccaagaagacctgctggcctgctgatgctgctcttctggttctttgacctggccgagcccagcggccgggccgccaatgaccccttcaccatcgtgcacggcaacacaggcaagtgcatcaagcctgtgtatggctggatcgtggctgatgactgtgatgaaacagaggacaagctgtggaagtgggtgtcccagcacaggctcttccacctgcacagccagaagtgcctgggcctggacatcaccaagtctgtgaatgagctgaggatgttcagctgtgacagcagcgccatgctgtggtggaagtgtgagcaccacagcctgtatggagctgcccgctaccgcctggccctgaaggatggccatggaacagccatcagcaatgccagtgatgtgtggaagaagggcggcagcgaggagagcctgtgtgaccagccctaccacgagatctacaccagagatggcaacagctatggccggccctgtgagttccccttcctgattgatggcacctggcaccacgactgcatcctggatgaggaccacagcggcccctggtgtgccaccaccctgaactatgaatatgacaggaagtggggcatctgcctgaagccagaaaatggctgtgaggacaactgggagaagaatgagcagtttggcagctgctaccagttcaacacccagacagccctgtcctggaaggaggcctacgtgtcctgccagaaccagggcgctgacctgctgagcatcaacagcgctgctgagctgacctacctgaaggagaaggagggcatcgccaagatcttctggattggcctgaaccagctgtacagcgcccggggctgggagtggagcgaccacaagcccctgaacttcctgaactgggaccctgaccggcccagcgcccccaccatcggcggcagcagctgtgccaggatggatgctgagagcggcctgtggcagagcttcagctgtgaggcccagctgccctacgtgtgcaggaagcccctgaacaacacagtggagctgacagatgtgtggacctacagcgacacccgctgtgatgctggctggctgcccaacaacggcttctgctacctgctggtgaatgaaagcaacagctgggacaaggcccacgccaagtgcaaggccttcagcagtgacctgatcagcatccacagcctggctgatgtggaggtggtggtgaccaagctgcacaatgaagacatcaaggaggaggtgtggattggcctgaagaacatcaacatccccaccctcttccagtggagcgatggaacagaggtgaccctgacctactgggatgaaaatgagcccaacgtgccctacaacaagacccccaactgtgtgtcctacctgggggagctgggccagtggaaggtgcagagctgtgaggagaagctgaagtatgtgtgcaagaggaagggggagaagctgaatgatgccagcagtgacaagatgtgccccccagatgagggctggaagagacatggagagacctgctacaagatctatgaagatgaggtgcccttcggcaccaactgcaacctgaccatcaccagcagatttgagcaggagtacctgaatgacctgatgaagaagtatgacaagagcctgaggaagtacttctggacaggcctgagagatgtggacagctgtggggagtacaactgggccaccgtgggcggcagaagaagagctgtgaccttcagcaactggaacttcctggagcccgccagccctgggggctgtgtggccatgagcacaggcaagtctgtgggcaagtgggaggtgaaggactgccgctccttcaaggccctgagcatctgcaagaagatgagcggccccctgggccctgaggaggccagccccaagccagatgacccctgcccagagggctggcagagcttccctgccagcctgagctgctacaaggtgttccacgccgagagaattgtgaggaagaggaactgggaggaggccgagcgcttctgccaggccctgggcgcccacctgagcagcttcagccacgtggatgagatcaaggagttcctgcacttcctgacagaccagttcagcggccagcactggctgtggattggcctgaacaagaggagcccagacctgcagggctcctggcagtggagcgacaggacccctgtgtccaccatcatcatgcccaatgagttccagcaggactatgacatccgggactgtgccgctgtgaaggtgttccaccggccctggaggcggggctggcacttctatgatgaccgggagttcatctacctgcggccctttgcctgtgacaccaagctggagtgggtgtgccagatccccaagggccgcacccccaagaccccagactggtacaacccagacagagctggcatccacggccccccactcatcatcgagggcagcgagtactggtttgtggccgacctgcacctgaactatgaggaggccgtgctgtactgtgccagcaaccacagcttcctggccaccatcaccagctttgtgggcctgaaggccatcaagaacaagatcgccaacatctctggagatggccagaagtggtggatccgcatcagcgagtggcccattgatgaccacttcacctacagccgctacccctggcaccgcttccctgtgaccttcggggaggagtgcctgtacatgtctgccaagacctggctgattgacctgggcaagcccacagactgcagcaccaagctgcccttcatctgtgagaagtacaacgtgagcagcctggagaagtacagcccagattctgctgccaaggtgcagtgcagcgagcagtggatccccttccagaacaagtgcttcctgaagatcaagcctgtgtccctgaccttcagccaggccagtgacacctgccacagctatggaggcaccctgcccagcgtgctgagccagatcgagcaggacttcatcaccagcctgctgcctgacatggaggccaccctgtggattggcctgcgctggacagcctatgagaagatcaacaagtggacagacaaccgggagctgacctacagcaacttccaccccctgctggtgtctggccgcctgcgcatccctgagaacttctttgaggaggagagccgctaccactgtgccctgatcctgaacctgcagaagagccccttcaccggcacctggaacttcaccagctgcagcgagcggcactttgtgtccctgtgccagaagtacagcgaggtgaagagccggcagaccctgcagaatgccagcgagaccgtgaagtacctgaacaacctgtacaagatcatccccaagaccctgacctggcacagcgccaagcgggagtgcctgaagagcaacatgcagctggtgtccatcacagacccctaccagcaggccttcctgtctgtgcaggccctgctgcacaacagcagcctgtggattggcctcttcagccaggatgatgagctgaactttggctggagcgatggcaagaggctgcacttcagccgctgggccgagaccaacggccagctggaggactgtgtggtgctggacacagatggcttctggaagacagtggactgcaatgacaaccagcccggggccatctgctactacagcggaaatgaaacagagaaggaggtgaagcctgtggacagcgtgaagtgccccagccctgtgctgaacaccccctggatccccttccagaactgctgctacaacttcatcatcaccaagaacagacacatggccaccacccaggatgaggtgcacaccaagtgccagaagctgaaccccaagagccacatcctgagcatcagagatgagaaggagaacaactttgtgctggagcagctgctgtacttcaactacatggcctcctgggtgatgctgggcatcacctacagaaacaagagcctgatgtggtttgacaagacccccctgagctacacccactggagggctggccggcccaccatcaagaatgagaagttcctggccggcctgagcacagatggcttctgggacatccagaccttcaaggtgattgaggaggccgtgtacttccaccagcacagcatcctggcctgcaagattgagatggtggactacaaggaggagtacaacaccaccctgccccagttcatgccctatgaagatggcatctacagcgtcatccagaagaaggtgacctggtatgaggccctgaacatgtgcagccagagcggcggccacctggcctctgtgcacaaccagaatggccagctgttcctggaggacatcgtgaagagagatggcttccccctgtgggtgggcctgagcagccatgatggcagcgagagcagctttgagtggagcgatggcagcacctttgactacatcccctggaagggccagaccagccctggcaactgtgtgctgctggaccccaagggcacctggaagcatgagaagtgcaacagcgtgaaggatggagccatctgctacaagcccaccaagagcaagaagctgagccggctgacctacagcagccgctgcccagctgccaaggaaaatggcagccgctggatccagtacaagggccactgctacaagagtgaccaggccctgcacagcttcagcgaggccaagaagctgtgcagcaagcatgaccacagcgccaccatcgtgtccatcaaggatgaagatgagaacaagtttgtgtcccggctgatgagggagaacaacaacatcaccatgagggtgtggctgggcctgagccagcacagcgtggactgccccagcagcacctggatccagttccaggacagctgctacatcttcctgcaggaggccatcaaggtggagagcattgaagatgtgaggaaccagtgcacagaccacggggctgacatgatcagcatccacaatgaggaggagaatgccttcatcctggacaccctgaagaagcagtggaagggcccagatgacatcctgctgggcatgttttatgacacagatgatgccagcttcaagtggtttgacaacagcaacatgacctttgacaagtggacagaccaggatgatgatgaggacctggtggacacctgtgccttcctgcacatcaagacaggagagtggaagaagggcaactgtgaggtgtcctctgtggagggcaccctgtgcaagacagccatcccctacaagaggaagtacctgagtgacaaccacatcctgatcagcgccctggtgattgccagcaccgtcatcctgactgtgctgggcgccatcatctggttcctgtacaagaagcacagcgacagccgcttcaccaccgtcttcagcacagccccccagagcccctacaatgaagactgtgtgctggtggtgggggaggagaatgagtaccctgtgcagtttgattag

SEQ ID NO: 76053 - DNA, 5454 bp, Artificial Sequence
  derived and/or modified sequence
atgcggaccggctgggccaccccccggcggcccgccggcctgctgatgctgctgttttggttctttgatcttgccgagccttccggccgcgcagccaacgacccatttactatagtgcacggaaataccggtaaatgtataaagccagtttacggttggatcgtggccgacgactgcgatgaaacagaggacaaattatggaagtgggtttctcagcatagactgttccacctgcactcccaaaaatgcctgggcctcgatatcactaagtctgtgaatgaactgcgaatgttcagctgcgactcaagtgcgatgctctggtggaaatgtgagcaccatagtttgtacggcgcagctaggtaccgactcgcccttaaggatgggcacgggactgcgatctcaaacgcaagtgacgtgtggaagaagggggggtccgaagagtctctctgcgaccagccctaccatgagatctacacccgtgatggcaacagttacgggcggccctgtgagttcccattcctgatcgatggcacatggcaccacgactgtattttggacgaagaccactccggcccctggtgcgctactacgctaaattacgagtacgatagaaaatggggtatctgcctgaagccagaaaatgggtgcgaagataactgggagaaaaacgaacagttcgggagctgctaccagtttaatacacagaccgcgttatcgtggaaggaggcttatgtcagttgtcaaaatcagggtgctgacttgctgtccatcaattctgccgccgaactgacctatttgaaggaaaaggagggaatagctaagatcttctggataggtctcaaccagctctattctgccaggggatgggagtggtctgaccacaagcccttaaattttctgaactgggaccccgaccgacctagcgcgccaactataggtggcagcagttgtgccaggatggacgctgaaagcgggctctggcaatcattcagttgcgaagcacagctgccgtacgtgtgtagaaagcccctcaataacaccgtcgaactcactgatgtgtggacgtactcagacactcgctgcgatgccggctggctacccaacaatggattttgctacctgcttgtgaacgaatctaacagctgggacaaagctcacgctaaatgcaaggcattttcctcagacctgatcagcatacactcccttgcggatgtggaggtggtggttactaaattgcacaatgaggacattaaggaggaggtttggatcggccttaagaacataaatatccccacgctgtttcagtggagtgatggtaccgaggtcacgctgacatactgggatgagaatgaacccaatgtcccttacaacaaaacccccaattgcgtctcgtacctcggtgaattgggccagtggaaagttcagtcttgcgaggagaagctcaagtacgtgtgtaagcgcaagggggaaaagctcaacgatgcctcctccgacaagatgtgccctccagatgagggctggaagagacatggcgagacttgctacaagatttatgaggacgaggtgcccttcggcactaactgtaaccttacaattacctcaagattcgagcaagaatacttgaacgaccttatgaaaaagtatgataagtccctccgcaaatacttttggacaggccttcgtgatgtcgactcttgcggggagtacaactgggcaactgtaggtgggaggcggcgtgctgtgacattttctaattggaattttctggaacccgctagtcctgggggctgtgtcgccatgagcacgggtaaaagcgtagggaaatgggaagtgaaggattgccggagctttaaggctctttccatctgcaaaaagatgtccggaccattaggcccagaggaggcaagtccaaagccggatgacccttgccctgagggatggcagagtttccctgcaagtctttcctgttacaaagtgttccacgccgaaaggattgtacggaagaggaattgggaagaggccgaacgcttctgccaagctttaggagcccatctcagcagtttttcccacgtagacgaaattaaggagttcctgcattttttgacggaccagtttagtggacagcactggctctggattggattgaataaaagaagccctgatctgcagggcagctggcagtggagcgaccgcactcctgtcagcacgatcatcatgcctaacgagttccagcaggactatgacatccgagactgtgccgcggtgaaagtgtttcaccgaccatggaggaggggatggcacttctacgacgaccgcgaattcatttatctcagacctttcgcctgtgacactaaacttgagtgggtctgtcagatcccaaagggaaggactccaaagaccccagattggtacaatcctgatagggcgggcatccatggtccacccttgatcattgaaggtagcgagtactggttcgtggcagatctccacctgaattacgaggaagctgtcctttactgtgctagcaaccacagtttcctcgccaccatcaccagttttgtcggcctaaaggctatcaagaataaaatcgctaacatctccggggatgggcagaaatggtggattcgcatctctgagtggccgatcgacgaccactttacatactctcggtacccctggcaccggttccctgttacatttggagaggagtgtctctatatgtctgccaaaacctggcttatcgatctcggtaagcccacagattgctcgactaaacttccattcatatgtgagaaatataacgtgtcatcccttgaaaaatattcccctgactctgccgctaaggtgcagtgtagcgagcagtggatacccttccagaacaagtgctttttaaaaataaagcctgtcagcctgactttttcccaagcgtcagatacatgccacagttacggcggcaccctgcccagcgtcctgtcacagattgagcaggatttcatcacgagtctgctcccggatatggaggcaacactatggatcgggttgcgctggacagcctatgagaagatcaataagtggaccgacaatagagagctcacttattctaacttccacccattgctggtttcaggtcggctgcgcatacccgagaactttttcgaggaggaaagcaggtaccactgcgcactgatactgaacctgcagaagagccccttcacaggaacgtggaactttacttcatgctccgaaaggcacttcgtctcattgtgtcagaagtactccgaagttaaatcgcggcaaactctgcagaacgctagcgaaaccgtgaagtacttgaataacttgtacaaaatcattcctaagacccttacctggcattcagcaaaacgcgagtgtctgaaatccaatatgcagctcgtgagtattaccgacccctatcagcaggccttcctgagcgtgcaggccctccttcacaacagctcgctgtggattgggctcttttctcaggatgacgagctgaacttcggttggtccgacggcaagagattacacttcagtagatgggccgagacaaatggccagctggaagattgcgtagtcctggatacagacggtttttggaagaccgtggactgcaatgataatcagccaggcgccatctgctactactccggaaatgagaccgaaaaggaggttaaacctgtcgatagcgtcaagtgcccaagccccgtgctgaataccccttggatacccttccaaaactgttgttataattttatcatcacaaagaacaggcacatggcaaccacacaggacgaagtacataccaaatgtcaaaaacttaaccccaaaagccatatactctccatccgggacgaaaaagaaaacaattttgtgctggaacagctgctttattttaattacatggccagttgggtgatgcttgggattacatacaggaacaagagcctcatgtggtttgataagacccctctgagctatacacactggagggccggacggcccactattaaaaacgagaagttcctggctggactctcaactgacggattctgggatatccagacttttaaggttatcgaggaggccgtctacttccaccagcatagtatcctggcctgtaagattgagatggtagattataaagaagagtacaacactactctgccgcagtttatgccttatgaggacggcatctattcagtcatccaaaagaaagtcacttggtacgaagccctgaatatgtgctcgcagagtggaggccatctcgcatcagtgcataatcagaatggccagctgtttctcgaggacatagtcaagcgcgacggatttcctctctgggtaggattgtctagtcatgatggctccgagtctagctttgagtggtccgacggctcaaccttcgactatatcccctggaagggtcagacatcacccggaaattgcgttctgctggatccgaagggaacctggaagcatgaaaagtgtaactccgtgaaggatggggccatttgttacaagcctactaaatctaagaagctgtccaggttgacatacagcagtcggtgccccgcagctaaagaaaatggatcaaggtggatacagtataaggggcattgttataagagtgatcaggctctgcacagcttcagcgaggctaagaagctgtgcagtaaacacgatcatagcgccactattgtatccattaaagatgaggacgagaataagtttgtcagtaggttaatgcgggagaacaataatatcaccatgcgggtatggctgggactgagccagcactccgtggattgtccctcttctacctggatccaattccaagactcctgctatatatttctccaggaagcgataaaagtggaatctatcgaggacgttaggaatcagtgtacagaccacggtgccgacatgatatccattcacaacgaggaagagaacgcctttatactggacaccctgaagaagcagtggaaaggcccagatgacattcttctcggaatgttttacgatacagacgacgcaagcttcaagtggtttgataacagcaacatgacctttgacaagtggacagaccaggatgacgatgaggatttagtggatacatgtgccttcttgcacatcaagactggggagtggaaaaaagggaactgtgaagtttcatccgttgaggggaccctgtgcaagacagccataccctataagcggaagtatctgtctgacaaccatatcttgatttctgctctggtgattgccagcacggtaattctgacagtgttgggtgcgatcatatggttcttatataagaagcattcagattcacggtttaccactgtcttttctaccgccccccagagcccctacaacgaagactgcgtgctcgtcgtgggcgaagagaatgaatatccagtgcagttcgattag

SEQ ID NO: 76054 - DNA, 5453 bp, Artificial Sequence
  derived and/or modified sequence
atgcgcaccggatgggccactcctcgaaggcctgccggtctgctgatgctacttttttggttcttcgacttagccgagcccagtggcagggccgctaacgatccatttactatcgtacacggaaacacaggcaaatgcatcaagccagtatacggctggatagtggccgacgattgcgatgaaaccgaggataagctgtggaaatgggtgagccagcatcgcctgtttcacctccacagtcagaagtgtctcgggctggatattacgaagagcgtaaacgagttacgcatgttttcttgtgatagtagcgccatgctgtggtggaagtgtgagcaccattctctctacggagccgctcgatatcgactcgccttaaaagacgggcacggtactgccatctctaatgcgagcgacgtgtggaaaaaagggggatccgaggaatcactgtgcgatcagccctaccatgaaatttacacgagggacggcaactcttatggcaggccatgtgagttcccctttttgatagacggcacctggcaccatgactgcatacttgacgaagaccattcaggtccatggtgcgctacaacactgaactatgagtatgatcgcaagtggggcatatgccttaagccggagaacggctgtgaagacaactgggagaagaacgagcaatttggtagctgctaccagtttaacacacaaaccgcactgagctggaaggaggcatatgtgtcatgccagaatcagggcgctgatctgctaagtattaactctgcagccgagctcacttatctgaaggagaaagaggggatcgccaagattttctggataggcctgaatcagctgtattctgccagaggatgggaatggagtgaccataaacccttgaattttctgaattgggatccagacaggccatccgcgcctacaatcggaggcagcagctgtgccaggatggacgcagagtcggggctgtggcagagcttcagctgtgaagctcaattgccgtatgtctgtcggaaacctctaaacaataccgtcgaactaacagatgtgtggacttactctgacacccgatgtgatgccggatggctgcctaacaatggcttctgttatctgctagtgaatgaatcaaattcatgggacaaagcccatgccaaatgtaaggctttctcgtcagatctcataagcatccattcgcttgcagacgttgaagtggtggtgacgaagctacataacgaagatatcaaagaggaagtatggatcgggctcaaaaacatcaatattcctacgctgtttcagtggtctgatggtaccgaagttactttaacatattgggacgagaacgagccaaacgtcccttacaataaaacccctaactgcgttagctaccttggggagctcggccagtggaaggttcagtcttgcgaagagaagctgaagtatgtgtgcaaaagaaagggggagaagctcaacgatgcatcctccgacaaaatgtgtccacctgacgagggctggaagagacacggcgaaacctgttataaaatctacgaagacgaggtccccttcggcacgaactgtaacctgaccatcacgtctaggttcgagcaggaatatctaaatgatttgatgaaaaagtatgacaaaagcttgaggaagtatttttggactggccttcgtgatgttgatagctgcggggaatataattgggcaaccgtgggaggacgtaggagagcagtgacattttcaaattggaacttcctggagccggctagccctggaggctgcgtagccatgagtacaggaaaaagcgtggggaagtgggaagttaaagattgtagatcctttaaagccctttccatctgcaagaaaatgtctggcccactaggccctgaggaggctagcccgaagccagacgacccttgccccgagggatggcaaagtttcccggcttctctcagctgttacaaagtgtttcacgccgagcgaatcgttagaaaaagaaattgggaggaggctgagcgtttttgtcaagcgttgggcgcacatctgtcttccttttctcatgttgacgaaattaaggagtttcttcatttcttgactgaccagttcagcggccagcactggctgtggattggcctgaataaaaggtctccggaccttcagggtagttggcagtggagcgataggacacctgtgtcaaccattatcatgccgaacgaatttcagcaggattacgatatcagggattgtgccgcagtgaaggttttccaccggccatggagacgagggtggcacttctatgacgatcgggagtttatctatctacggccattcgcatgtgacacgaagctggagtgggtgtgccagatccccaaggggagaaccccgaagactcccgattggtacaatccagatagggctgggatccatgggcctcctctgatcatagaaggctctgaatactggtttgtggctgacctacacctaaactacgaggaggcggtcttatattgtgcctcaaatcattcttttctggcaaccatcacctcttttgttggattaaaggcaattaaaaacaagattgccaatattagtggggatggtcaaaaatggtggatccgcattagtgaatggccgatcgatgaccactttacctactctcggtacccttggcacaggttcccagtaacctttggtgaggaatgcctctacatgtccgctaagacgtggcttatagaccttgggaagccaactgattgttcaactaagctcccctttatctgcgagaaatacaatgtttcgagcctggaaaagtattcgccagattccgcggcaaaggtacagtgcagcgaacaatggatccctttccaaaataagtgcttccttaaaataaagcccgtttccctgacctttagccaggcatctgatacctgtcattcctatggtggaacgctgccctctgtgctcagtcaaatcgagcaggactttattactagcctgctgcccgatatggaggcaactctatggatcggcctcagatggacggcctacgaaaaaatcaacaagtggacagacaatcgtgaactgacctactccaactttcatccgctgcttgtgtccggcagactgagaatacctgaaaatttctttgaggaggaatctagataccactgcgccctgatcctgaacctgcagaagagcccatttaccgggacttggaacttcacaagctgctcagaacgccactttgtttccctgtgtcaaaaatacagtgaggtgaaatctcgccagacattacagaacgcgagtgaaacggttaagtatctgaacaatctctacaaaatcattcccaaaacactgacatggcattccgctaagagagaatgcttgaagtctaacatgcagttggtgtcgattacggacccttaccagcaggcctttctgtcagtgcaggccctcttacacaatagtagcctgtggataggtcttttcagccaggacgacgagctgaatttcggttggtctgacggtaaacgtctgcacttcagcagatgggccgagacgaacggccaacttgaggattgtgtagtactcgatacagacggattttggaaaaccgtagactgtaatgataatcagcccggagctatctgttactacagcggtaatgaaacggagaaggaggtgaaaccagtggactccgtgaaatgtcccagccccgtgctgaacactccctggataccattccagaattgctgctacaactttattattacaaagaaccgccatatggccactacccaggacgaagttcacactaagtgccagaaactgaacccaaaaagtcatattctatctatacgtgacgaaaaggaaaataacttcgttctcgaacaactcctgtactttaattacatggcatcatgggtgatgctgggaatcacctatcgcaataagtctctgatgtggttcgacaagacgccccttagttacacccactggcgtgcgggaaggcccacaatcaagaacgagaagtttttagccggactgtccactgacggtttttgggacattcagaccttcaaggtgattgaagaagccgtttactttcaccaacattccattctggcctgtaagatcgagatggtggactataaagaggagtataacacaaccctaccacagttcatgccatatgaagacggtatatactctgtaatccagaagaaggttacctggtacgaggctctgaatatgtgctcacagtcaggagggcacttagcgtccgtgcacaatcagaacgggcagctcttcctggaagatatcgtgaagcgggacggatttcccctgtgggttgggctgtccagccacgacggatcggagagttcttttgaatggtcagatggatcaaccttcgactatattccctggaagggacagacctcccctggaaactgtgtgctcctcgaccccaagggcacctggaagcatgagaagtgtaactccgtcaaggatggagctatttgctacaagcctaccaagtccaaaaaactgtcacgcctgacatattcctcgagatgtccagcagctaaagaaaatgggtctaggtggattcaatacaaagggcactgttataaatctgatcaggcgctgcactcattttccgaagccaagaagttgtgcagtaagcacgaccactcagcaactatcgtgtctattaaggacgaagatgaaaataaatttgtctcaagattgatgcgagagaacaataatattaccatgcgcgtgtggctcggccttagtcaacactcggtagattgcccgtcctctacatggatacaattccaggacagctgctacatcttcctccaggaagctataaaggttgagagcatcgaggatgtcaggaaccaatgcacagaccatggagctgatatgatctccattcataatgaggaggaaaacgcttttatactcgacactttgaagaaacagtggaaaggcccagatgacattctgctaggcatgttttacgacacagacgacgcatcatttaagtggttcgataattctaacatgacctttgacaagtggacagatcaggacgacgacgaggacttggtggatacctgtgcatttcttcatatcaaaacaggcgaatggaaaaaaggaaattgtgaagtctctagtgtggaagggacactatgtaagactgccattccatataaacgtaaatatctttctgataaccacatcctgatttccgctctcgtgattgccagtacagtgatcctgactgtgctaggagccataatttggttcctgtacaagaagcactcggactcccggtttacaacagtcttttctacagcacctcaatccccatataacgaagattgcgttctcgtggtgggcgaggaaaacgaatatcccgtgcagtttgacta

SEQ ID NO: 76055 - DNA, 5454 bp, Artificial Sequence
  derived and/or modified sequence
atgagaactggatgggctactcctaggaggccagctggactgctgatgttacttttctggttttttgacttggcagaacccagtggacgggctgcaaacgaccccttcaccatcgtacacggcaacacaggtaagtgcataaagcctgtgtacgggtggattgtggccgatgactgcgacgaaacagaagacaagctgtggaaatgggtaagccagcaccgtctcttccacctgcacagtcaaaaatgtcttggactggatatcacaaagtctgtgaatgagcttaggatgttctcttgcgacagtagcgcaatgttgtggtggaagtgcgagcatcattcgttatacggagccgcccggtatcggctggcgcttaaagacgggcacggtactgctatcagcaacgccagcgacgtctggaaaaagggcgggagtgaggaatctctgtgtgaccaaccgtatcacgaaatctacactagggacgggaacagttacgggcgtccttgcgagtttcctttcctgatcgacgggacctggcaccatgactgcatcctggacgaagaccatagcggaccatggtgcgctactacattaaattacgagtacgaccgaaagtggggcatctgcttgaaacctgagaatggctgcgaagataattgggaaaagaatgaacagtttgggtcgtgttaccagttcaacacacagactgcgttatcatggaaagaagcttatgtgtcttgccaaaaccagggcgctgacctcttgtccattaactccgcggcagaattaacatacttaaaggagaaggagggaatcgctaaaatcttctggatcggcttgaaccagctatactccgctagaggctgggaatggtctgaccataagccattaaactttctcaactgggatccggacagaccttccgccccaacaatcggtggcagttcttgcgccagaatggacgcagagtccggactgtggcagagcttcagttgtgaggcccagctcccttacgtgtgtaggaagcccctcaataatactgtggaacttaccgacgtgtggacttattccgacacaagatgtgatgcgggctggctgccaaataacggtttttgctacctgcttgtgaatgaaagcaatagttgggataaagcccatgcaaagtgcaaggcgttctcctccgatctgatcagcatccattctttagccgacgtggaggtagtagtgaccaaattgcataatgaggacatcaaagaggaagtgtggattgggctgaagaatatcaacatccccaccctcttccaatggtcagacgggacggaggtcacactcacctactgggacgaaaatgaaccaaacgtgccttacaataagaccccaaactgcgtgagctacctgggcgagcttgggcagtggaaggtccagagttgcgaagagaagctgaaatacgtgtgcaaacggaaaggagaaaaactcaatgacgctagctccgataaaatgtgccctcctgatgagggttggaaacgccatggagagacttgctataagatctacgaagacgaagtcccattcgggaccaattgtaatttgaccataacatcacgattcgagcaggagtacctaaatgatttgatgaagaaatacgacaagagcttgaggaaatacttctggacagggttaagggatgtagattcatgtggagaatataactgggccacagtcggtggtagacggcgcgctgtgacctttagcaattggaacttcctcgagccagcatctcctggtggatgtgtcgcaatgtctactggaaagtcagtgggcaaatgggaagttaaggattgtaggtccttcaaggccctgtccatctgcaagaaaatgagcggaccgcttgggccagaggaagccagcccgaagccagacgatccatgtcccgagggctggcagtcattccctgcctcacttagctgttacaaggtgtttcacgccgagcgcattgttagaaagagaaattgggaggaggcagaaaggttctgccaggccctgggagcccatctgagttccttctctcacgtggacgagataaaagagttcctccattttctgaccgaccaattctcaggtcagcattggttgtggattggattgaacaagaggagtcccgacctccagggcagctggcaatggagcgatcgtacgccggtctcgacaatcattatgcccaacgagttccaacaggactacgacatcagagattgcgccgcagtcaaggtgttccatcgcccatggagacggggctggcatttttacgatgatcgagaatttatctatctcagaccattcgcctgtgataccaagctggaatgggtttgtcagatccctaaagggaggacacccaaaactcccgattggtacaatcctgacagggcaggtattcatggtcctcccctgattattgaaggatctgagtattggtttgtagcagacctccacctaaactatgaggaggcggtgctgtactgcgccagcaaccattcctttctcgccacgatcacctctttcgtggggttgaaagctatcaagaacaaaattgcaaatattagtggagacggacagaaatggtggatccggatctcagaatggcccatcgatgatcacttcacttactcccggtacccttggcatagattccccgtcaccttcggcgaagaatgcttatatatgagtgccaagacctggctgatagacttgggcaagcccaccgactgttccactaagctgcctttcatttgcgagaagtacaatgtgagctcattggagaaatactcgccagattccgcagccaaagtgcaatgtagcgaacaatggattccatttcagaacaagtgcttcttgaaaattaagcccgtgtctctcacgttctcacaggcctcggacacatgtcacagctacgggggaacactgccttcagtcctgagtcagattgaacaggatttcatcacatctctactgccagatatggaggccaccctatggatcggactgcgttggactgcctacgagaaaataaacaaatggactgataacagagaactgacctatagcaattttcatcccctgctggtctcaggtagacttaggatccccgagaatttcttcgaagaagagagcaggtaccactgtgccctgattctgaacctgcagaaaagtccctttaccggaacctggaatttcacatcatgtagcgagcgacatttcgttagcctgtgccagaagtatagcgaggtgaagtctaggcagacactgcagaatgcgtctgagacggtcaaatacctgaacaacttgtataagatcatcccgaaaaccttgacctggcactccgcaaagagggaatgtctgaagtctaacatgcagctcgtatccatcacggacccttaccagcaggcatttttatccgtccaggccctgctgcacaatagtagcctgtggattgggctgttttcccaggacgacgagctgaactttgggtggtccgacggaaagcggcttcacttttcaaggtgggccgagactaatgggcagctcgaggattgcgttgtgctcgatacagacgggttttggaagaccgtcgattgtaatgataaccagcccggcgccatctgttactatagtggcaacgagaccgaaaaagaggtgaaacctgtggatagcgtcaaatgcccctcacctgtgcttaataccccctggatcccctttcaaaactgctgctataacttcatcatcacaaagaacagacatatggccacaacacaagatgaggtgcatacaaagtgccagaagttgaatccaaaatcccacatcttatctatccgagacgaaaaggagaataactttgtgctggaacagctgctttactttaactacatggctagttgggtgatgctgggcataacttaccgcaataaaagcctgatgtggttcgacaagacccctttaagctacacccattggcgtgcgggacgaccaacaattaaaaacgagaaatttctggccggcctatcaacagacggcttctgggacattcagaccttcaaggtcattgaagaggccgtctattttcaccagcattcaattctggcctgcaaaatcgagatggtggactacaaggaagaatataataccacactgccacaatttatgccctacgaggacggcatttatagcgtcatacagaagaaggtgacttggtacgaagccttaaacatgtgcagccagagcggaggccatctggcatctgttcataaccagaatggccaactgtttctagaggacatcgtgaagcgcgacggctttcccttatgggttggtctcagcagtcacgacggctcagaatccagctttgagtggtctgacggctctacttttgattacataccatggaagggtcagactagtcccgggaattgcgtccttttggacccaaaagggacatggaaacacgaaaaatgtaacagcgttaaagacggcgctatctgctataaaccaacaaagtcaaaaaagttaagtaggctgacatacagtagccggtgccccgccgccaaggagaacggctcacgctggatacagtacaaaggacattgctacaagtcggaccaagctttgcactctttctccgaggccaagaagctgtgctcaaaacatgatcacagcgccacgattgtgagcatcaaggatgaggatgagaacaagttcgtttctcgtctcatgagagagaataacaatatcacaatgagggtatggctgggattgtctcagcattccgtggactgcccatcatccacttggatccagttccaggactcctgctatattttcctgcaggaggccatcaaggtggagtccattgaggatgtcagaaaccagtgcacagaccacggagctgacatgatttcaatacacaacgaggaagagaatgccttcattctggacaccttaaaaaaacagtggaagggccctgacgatatactgctgggtatgttttacgacaccgatgacgcctctttcaagtggtttgacaattccaatatgactttcgacaaatggactgatcaggatgatgacgaggatcttgtggatacctgtgcattccttcatattaaaactggggaatggaaaaaaggtaattgcgaggtttcttctgtagagggcacattatgcaagacagcaattccttacaaaagaaagtatctctcagataatcatatcctcatcagcgcgttagttatcgctagcaccgttattctcaccgttctaggcgctatcatttggttcctttataagaaacattccgattctagattcacaaccgtgttcagtaccgctccccaatctccctataacgaagactgcgttttggtcgtgggagaagagaatgaatatcccgtgcagtttgactag

SEQ ID NO: 76056 - DNA, 5482 bp, Artificial Sequence
  derived and/or modified sequence
ccggccggaaggcttgcgccagctcaggatgaggacaggctgggcgacccctcgccgcccggcggggctcctcatgctgctcttctggttcttcgatctcgcggagccctctggccgcgcagctaatgaccccttcaccatcgtccatggaaatacgggcaagtgcatcaagccagtgtatggctggatagtagcagacgactgtgatgaaactgaggacaagttatggaagtgggtgtcccagcatcggctctttcatttgcactcccaaaagtgccttggcctcgatattaccaaatcggtaaatgagctgagaatgttcagctgtgactccagtgccatgctgtggtggaaatgtgagcaccactctctgtacggagctgcccggtaccggctggctctgaaggatggacatggcacagcaatctcaaatgcatctgatgtctggaagaaaggaggctcagaggaaagcctttgtgaccagccttatcatgagatctataccagagatgggaactcttatgggagaccttgtgaatttccattcttaattgatgggacctggcatcatgattgcattcttgatgaagatcatagtgggccatggtgtgccaccaccttaaattatgaatatgaccgaaagtggggcatctgcttaaagcctgaaaacggttgtgaagataattgggaaaagaacgagcagtttggaagttgctaccaatttaatactcagacggctctttcttggaaagaagcttatgtttcatgtcagaatcaaggagctgatttactgagcatcaacagtgctgctgaattaacttaccttaaagaaaaagaaggcattgctaagattttctggattggtttaaatcagctatactctgctagaggctgggaatggtcagaccacaaaccattaaactttctcaactgggatccagacaggcccagtgcacctactataggtggctccagctgtgcaagaatggatgctgagtctggtctgtggcagagcttttcctgtgaagctcaactgccctatgtctgcaggaaaccattaaataatacagtggagttaacagatgtctggacatactcagatacccgctgtgatgcaggctggctgccaaataatggattttgctatctgctggtaaatgaaagtaattcctgggataaggcacatgcgaaatgcaaagccttcagtagtgacctaatcagcattcattctctagcagatgtggaggtggttgtcacaaaactccataatgaggatatcaaagaagaagtgtggataggccttaagaacataaacataccaactttatttcagtggtcagatggtactgaagttactctaacatattgggatgagaatgagccaaatgttccctacaataagacgcccaactgtgtttcctacttaggagagctaggtcagtggaaagtccaatcatgtgaggagaaactaaaatatgtatgcaagagaaagggagaaaaactgaatgacgcaagttctgataagatgtgtcctccagatgagggctggaagagacatggagaaacctgttacaagatttatgaggatgaggtcccttttggaacaaactgcaatctgactatcactagcagatttgagcaagaatacctaaatgatttgatgaaaaagtatgataaatctctaagaaaatacttctggactggcctgagagatgtagattcttgtggagagtataactgggcaactgttggtggaagaaggcgggctgtaaccttttccaactggaattttcttgagccagcttccccgggcggctgcgtggctatgtctactggaaagtctgttggaaagtgggaggtgaaggactgcagaagcttcaaagcactttcaatttgcaagaaaatgagtggaccccttgggcctgaagaagcatcccctaagcctgatgacccctgtcctgaaggctggcagagtttccccgcaagtctttcttgttataaggtattccatgcagaaagaattgtaagaaagaggaactgggaagaagctgaacgattctgccaagcccttggagcacacctttctagcttcagccatgtggatgaaataaaggaatttcttcactttttaacggaccagttcagtggccagcattggctgtggattggtttgaataaaaggagcccagatttacaaggatcctggcaatggagtgatcgtacaccagtgtctactattatcatgccaaatgagtttcagcaggattatgacatcagagactgtgctgctgtcaaggtatttcataggccatggcgaagaggctggcatttctatgatgatagagaatttatttatttgaggccttttgcttgtgatacaaaacttgaatgggtgtgccaaattccaaaaggccgtactccaaaaacaccagactggtacaatccagaccgtgctggaattcatggacctccacttataattgaaggaagtgaatattggtttgttgctgatcttcacctaaactatgaagaagccgtcctgtactgtgccagcaatcacagctttcttgcaactataacatcttttgtgggactaaaagccatcaaaaacaaaatagcaaatatatctggtgatggacagaagtggtggataagaattagcgagtggccaatagatgatcattttacatactcacgatatccatggcaccgctttcctgtgacatttggagaggaatgcttgtacatgtctgccaagacttggcttatcgacttaggtaaaccaacagactgtagtaccaagttgcccttcatctgtgaaaaatataatgtttcttcgttagagaaatacagcccagattctgcagctaaagtgcaatgttctgagcaatggattccttttcagaataagtgttttctaaagatcaaacccgtgtctctcacattttctcaagcaagcgatacctgtcactcctatggtggcacccttccttcagtgttgagccagattgaacaagactttattacatccttgcttccggatatggaagctactttatggattggtttgcgctggactgcctatgaaaagataaacaaatggacagataacagagagctgacgtacagtaactttcacccattattggttagtgggaggctgagaataccagaaaatttttttgaggaagagtctcgctaccactgtgccctaatactcaacctccaaaaatcaccgtttactgggacgtggaattttacatcctgcagtgaacgccactttgtgtctctctgtcagaaatattcagaagttaaaagcagacagacgttgcagaatgcttcagaaactgtaaagtatctaaataatctgtacaaaataatcccaaagactctgacttggcacagtgctaaaagggagtgtctgaaaagtaacatgcagctggtgagcatcacggacccttaccagcaggcattcctcagtgtgcaggcgctccttcacaactcttccttatggatcggactcttcagtcaagatgatgaactcaactttggttggtcagatgggaaacgtcttcattttagtcgctgggctgaaactaatgggcaactcgaagactgtgtagtattagacactgatggattctggaaaacagttgattgcaatgacaatcaaccaggtgctatttgctactattcaggaaatgagactgaaaaagaggtcaaaccagttgacagtgttaaatgtccatctcctgttctaaatactccgtggataccatttcagaactgttgctacaatttcataataacaaagaataggcatatggcaacaacacaggatgaagttcatactaaatgccagaaactgaatccaaaatcacatattctgagtattcgagatgaaaaggagaataactttgttcttgagcaactgctgtacttcaattatatggcttcatgggtcatgttaggaataacttatagaaataagtctcttatgtggtttgataagaccccactgtcatatacacattggagagcaggaagaccaactataaaaaatgagaagtttttggctggtttaagtactgacggcttctgggatattcaaacctttaaagttattgaagaagcagtttattttcaccagcacagcattcttgcttgtaaaattgaaatggttgactacaaagaagaatataatactacactgccacagtttatgccatatgaagatggtatttacagtgttattcaaaaaaaggtaacatggtatgaagcattaaacatgtgttctcaaagtggaggtcacttggcaagcgttcacaaccaaaatggccagctctttctggaagatattgtaaaacgtgatggatttccactatgggttgggctctcaagtcatgatggaagtgaatcaagttttgaatggtctgatggtagtacatttgactatatcccatggaaaggccaaacatctcctggaaattgtgttctcttggatccaaaaggaacttggaaacatgaaaaatgcaactctgttaaggatggtgctatttgttataaacctacaaaatctaaaaagctgtcccgtcttacatattcatcaagatgtccagcagcaaaagagaatgggtcacggtggatccagtacaagggtcactgttacaagtctgatcaggcattgcacagtttttcagaggccaaaaaattgtgttcaaaacatgatcactctgcaactatcgtttccataaaagatgaagatgagaataaatttgtgagcagactgatgagggaaaataataacattaccatgagagtttggcttggattatctcaacattctgttgactgtccttcatctacttggattcagttccaagacagttgttacatttttctccaagaagccatcaaagtagaaagcatagaggatgtcagaaatcagtgtactgaccatggagcggacatgataagcatacataatgaagaagaaaatgcttttatactggatactttgaaaaagcaatggaaaggcccagatgatatcctactaggcatgttttatgacacagatgatgcgagtttcaagtggtttgataattcaaatatgacatttgataagtggacagaccaagatgatgatgaggatttagttgacacctgtgcttttctgcacatcaagacaggtgaatggaaaaaaggaaattgtgaagtttcttctgtggaaggaacactatgcaaaacagctatcccatacaaaaggaaatatttatcagataaccacattttaatatcagcattggtgattgctagcacggtaattttgacagttttgggagcaatcatttggttcctgtacaaaaaacattctgattctcgtttcaccacagttttttcaaccgcaccccaatcaccttataatgaagactgtgttttggtagttggagaagaaaatgaatatcctgttcaatttgactaa

SEQ ID NO: 76057 - DNA, 5454 bp, Artificial Sequence
  derived and/or modified sequence
atgcggaccggctgggccaccccccggcggcccgccggcctgctgatgctgctcttctggtttttcgatctcgccgaaccctcgggacgggcagccaatgatccttttaccatcgtgcacggtaacactgggaaatgtatcaagcccgtttatggttggatcgttgccgacgattgtgatgaaaccgaagataagttgtggaagtgggtgtctcagcacagactctttcatctgcattctcaaaagtgtctgggcctggatataaccaaatccgtgaatgaactacgcatgttcagctgcgattcctctgcaatgctgtggtggaagtgcgagcaccacagtctatatggagcagcccgctatcgattagccctgaaagatgggcatggcacagcgatatccaatgcttcagatgtctggaagaaaggcggcagtgaggagagcctgtgcgatcagccgtaccacgagatctatacacgggatggcaacagctacgggagaccgtgcgaattcccatttctgattgacggaacctggcaccatgactgtatcctggatgaagatcatagcgggccttggtgcgcgaccactttgaactacgagtacgatcgcaagtggggcatatgcctcaagcccgaaaatggatgcgaggataattgggagaagaacgaacagtttgggagctgttaccaattcaatactcaaactgccctgtcttggaaagaggcctacgtgagctgtcaaaatcagggcgccgatttattatccatcaactccgcagcagagctgacctatttgaaagaaaaagaaggcatagcaaagattttctggatcgggctcaaccaactctatagcgctcggggctgggaatggagcgaccataagccactaaatttcttaaactgggacccagatcgcccatccgcacccacaattgggggatcttcatgcgcccgcatggatgcggaatccggactctggcaatcattctcctgcgaggctcagcttccatatgtttgccgcaagcccctgaataacactgtcgaactgacagatgtgtggacctacagtgacacccgctgcgacgctggttggctgcccaataacggcttttgttatctattggtcaacgaatctaactcctgggataaagcacacgcgaagtgcaaggctttctcgtcagacctgattagcattcacagcctggcagatgtggaagtggtggtaacaaaactccataatgaagacattaaggaagaggtgtggatcggattgaagaatatcaacattcctaccctattccaatggtctgatggaacagaggtgacactgacctattgggatgaaaacgagcccaacgtcccctacaataagacgccgaactgcgtgtcgtacctaggcgagcttggacagtggaaggtgcagtcttgcgaggaaaagctgaaatacgtctgtaagcggaaaggcgagaagcttaatgatgctagctctgacaagatgtgtcctcctgacgaaggttggaagaggcacggcgagacttgttacaagatttacgaagacgaggttcctttcgggaccaattgtaacttaacaataacctctcggttcgagcaagaatatctgaacgacctaatgaagaagtacgacaagtcgctgcgtaaatatttttggacaggtctacgggatgtggactcctgcggcgagtataactgggctacagtgggaggaaggcgcagagcggttaccttttctaactggaactttcttgagccagcctcacccgggggatgcgtggccatgagcaccgggaagtcagtagggaagtgggaggttaaagattgcagatcatttaaggctctttcaatctgtaaaaagatgagcggccctctcggacctgaggaggcctcaccaaagccagacgacccctgtcccgaaggctggcagtcttttccggccagcctgagttgctacaaagtcttccatgctgaaaggattgtgcggaaacgtaattgggaggaagctgaacgcttctgccaagcactgggcgcgcacttgtcttcgtttagtcacgtggatgaaattaaagaattcctgcactttctgaccgaccagtttagcggccagcactggctgtggatcggcttaaataaaaggtcccctgatttgcagggcagctggcagtggtccgatcgcactccggtgagtaccattattatgcccaatgagttccagcaggactacgatatccgcgactgcgccgctgtgaaggtgttccacagaccttggcgacgcggatggcacttctacgatgatagagagttcatataccttcggcccttcgcgtgcgatactaaactagagtgggtctgccagataccaaaaggccggacccccaagacccctgattggtataacccagaccgagcggggatccacggcccccctctgatcattgagggatctgagtattggttcgtggcagatctacatctgaactacgaggaagcggtcctttactgcgcctctaaccattccttcctggccacgataacctctttcgtgggcctcaaggccattaaaaataaaatagctaatatttcgggagatgggcaaaaatggtggattcggattagcgagtggccaatcgacgaccatttcacatattctcgatatccctggcacagatttccggtcacatttggagaggaatgcctctacatgtcggctaaaacttggctgatcgatttaggtaaacccaccgactgctccactaagctcccatttatttgcgaaaaatacaacgttagcagcctcgagaagtatagcccagacagcgcagcaaaggtgcagtgttccgagcaatggatcccttttcagaacaagtgctttttaaagattaaacctgtgagcctcactttttcgcaggctagtgacacttgccatagctacggcggaacacttccttcggtgctctcccaaatagagcaggatttcatcaccagtctattgccagatatggaagcaacattatggatcgggctgaggtggacggcttatgagaaaatcaacaaatggacggacaatagggaactgacatactctaactttcatccgcttctggtttcggggagactgcgcatccctgagaatttcttcgaggaagagtccaggtaccattgtgcactgatcttgaacctgcagaaatccccatttactggcacatggaattttacgtcttgttctgaacgtcatttcgtgagcctgtgccaaaagtattctgaagtgaaatcacgccagacactgcagaacgcaagtgaaactgttaagtacctgaataatctgtataagattatcccaaaaaccttgacctggcacagtgctaagcgggagtgtttaaaaagtaacatgcagctggtctctattacagatccgtatcaacaggctttcctgtcagtgcaggcgctccttcacaatagttctctgtggatcggcctgttctcccaggatgatgagctgaattttggatggtcagacggaaagcgcctccacttctcccggtgggccgagactaacgggcaactcgaagactgtgtggtgcttgatacggacggcttctggaagaccgtggattgcaatgataaccagcctggagccatctgttactatagcggaaacgagactgaaaaggaggttaaaccagtggactccgtgaagtgcccttcacccgttctcaacactccctggatccctttccaaaattgctgctacaattttattataaccaagaaccgccacatggcaaccacacaagacgaggtacataccaaatgccaaaagttaaaccctaaatcccacatcctgtctattagagatgagaaagaaaacaacttcgttctggaacagttactgtacttcaattatatggctagttgggtgatgctgggaatcacctatagaaataaatctctcatgtggttcgacaagacacctctgtcatacacacattggcgcgctggcaggccgaccattaagaacgagaagtttttagcaggactgtcaactgatggcttctgggacatacagacattcaaagttattgaggaggctgtgtacttccaccagcatagcatcctcgcttgtaaaatcgagatggttgactacaaagaagagtacaataccaccctgccccagttcatgccatacgaagacggaatctattctgtcatccagaaaaaggtgacatggtatgaagcattaaacatgtgtagtcagtccggtggacacctcgcctcagtgcacaatcagaacgggcagctgtttctggaggacattgtcaaacgggacggcttcccactgtgggtggggctgtcgagtcatgacgggtctgaatcgagtttcgaatggtctgacgggtccacatttgattacatcccctggaagggacaaaccagtcctggcaattgcgtgttgctagacccaaaaggtacatggaaacatgagaagtgtaattctgtaaaagatggtgccatttgttataaacctactaagagtaagaagctgtcacgattgacatactcctctagatgcccagccgccaaagaaaacgggtcaagatggatacaatacaaaggccattgctacaagtctgaccaggccctccacagcttttcggaggccaaaaagctttgttccaaacacgaccacagcgcaactatcgtgtccatcaaagatgaagatgaaaacaaattcgtttcaagactgatgcgggagaataacaacatcactatgcgggtttggttgggtctgagccagcactccgtggattgcccatcttcaacttggatacagttccaggattcctgctatatattcctgcaggaagcgatcaaggtggagtccatcgaagacgtacgaaaccagtgtacggaccatggcgccgacatgatctctattcataatgaagaagaaaacgcatttatcctggacacactgaagaagcagtggaaaggcccagacgacattttattggggatgttttatgatacggacgacgcctcttttaaatggtttgacaactctaatatgacctttgacaagtggacagaccaggacgatgacgaagacttggtggacacctgcgcttttttgcatataaaaacgggcgaatggaagaaaggaaactgtgaggtatcatcagttgaggggacactctgtaagaccgccatcccttacaagcggaagtacctatcagataaccacatccttatctccgcattagtgatcgctagtaccgtgattttaaccgtactgggagcgatcatctggttcctttacaaaaaacacagtgattccaggttcaccacagtcttttcgacggcccctcagtccccttacaatgaggattgcgtgttggtggtgggcgaggagaatgagtatcccgtccagtttgactag

SEQ ID NO: 76058 - DNA, 5453 bp, Artificial Sequence
  derived and/or modified sequence
atgaggacggggtgggccaccccccgacgcccagccggtcttctcatgctgttgttttggtttttcgatctggccgagccctcggggagagccgctaatgaccctttcaccatagtgcacggtaacactgggaagtgtattaagcctgtgtacggttggattgtcgctgacgattgcgacgaaactgaagataagctttggaagtgggtatcacagcaccgtcttttccacctgcatagccagaagtgcctcgggctcgatattactaagtctgttaatgagctaaggatgttttcctgcgactctagcgccatgttatggtggaaatgtgaacatcattcgttgtacggtgcagcgaggtatcgtctggctcttaaggacggtcatggaactgcaatcagcaatgcaagcgatgtgtggaagaaggggggatcagaggagagcctctgtgaccaaccttaccacgagatttacacccgggacgggaatagttatggtagaccttgcgagtttccctttctgattgatggtacctggcatcacgattgcatcctcgacgaggaccacagcggcccatggtgtgctacgacgcttaattatgagtacgataggaaatggggtatctgcctcaagcctgagaacggatgcgaggataattgggaaaagaatgaacaatttggaagctgctatcaatttaacactcagaccgctctgtcctggaaagaagcttacgtgagctgccaaaatcagggcgcagatcttctgtccattaattctgcagcagaactcacatatttaaaagaaaaggagggaatcgccaagatcttttggattgggttgaatcagctttactccgccagagggtgggaatggtccgatcacaagcccctgaactttcttaattgggaccctgatcgtccaagtgctcccaccattgggggaagttcatgcgctaggatggatgcggaaagcgggctctggcaaagcttttcgtgtgaggcacagttaccttatgtgtgtcgtaaaccactgaacaatacagtcgagctgactgatgtgtggacctattccgacacacgctgcgacgcagggtggctacctaataatgggttctgctatctcttggtaaacgaaagtaactcatgggacaaagctcacgccaaatgtaaagccttctcctctgaccttattagtattcacagcttggccgacgtcgaagtagtggtgacaaaattgcacaacgaagacattaaagaagaagtgtggatcgggctgaaaaacattaacatccccaccttgttccagtggtccgatgggaccgaggttacactgacgtactgggatgaaaacgaaccgaatgtcccgtataataagacccccaattgtgttagctacctgggcgaactgggtcagtggaaggtccaaagttgtgaggaaaaactcaagtacgtatgtaagcgtaagggcgagaaattgaacgatgccagcagcgataagatgtgcccgcctgacgagggatggaaacggcacggtgaaacatgttataaaatatacgaggatgaggtgccgttcggtacaaattgtaacttgacaattacgtctaggttcgagcaggaatatctgaatgatctaatgaagaaatatgataagagtctccgcaagtacttttggactggcttaagggacgtggattcatgtggtgagtataactgggctacggtgggcggacggcgaagggctgtcacattctccaactggaacttccttgagccagcatctcctgggggttgtgttgccatgtccacaggtaagagcgtgggcaagtgggaggtgaaagattgtaggtcattcaaagccctgtcaatctgcaagaagatgtctggccctttagggcctgaggaagctagcccaaaaccagacgacccttgtccggagggttggcagtcatttccggcttccctgtcctgctacaaagtgttccacgctgagcgcatcgtccgaaagcggaattgggaagaggccgaacgcttttgccaggctctgggtgcccacctctctagtttcagccacgtcgacgaaattaaggaatttttgcactttctgaccgaccaattctcaggacagcattggctctggatcggtttaaacaagagatccccagacttacaaggaagttggcagtggtcggatcgcacccctgtgtcaaccataatcatgcccaatgagtttcaacaagactacgatatcagagactgtgccgctgtaaaggtgttccatagaccctggagacggggatggcatttctacgacgatcgcgaatttatctacctgcgaccctttgcctgtgataccaaactggagtgggtttgtcagatcccgaagggcaggacccccaaaaccccagactggtacaatccagatagggcaggaattcacggacctcccctgatcatcgagggttccgagtactggttcgttgccgatcttcatctgaactacgaagaagctgtgttatactgtgccagcaaccacagcttcctcgctacaattacaagctttgttggactcaaagctataaagaataaaatagccaatataagcggagatggacagaaatggtggataaggatcagcgaatggcctattgacgaccacttcacctatagcagatatccatggcaccggttcccagtcactttcggggaggaatgcctgtatatgtctgccaaaacatggctcattgacttggggaagcccacagattgctccacaaagctcccgttcatatgcgagaaatacaatgtctcgtcactcgagaagtacagccccgatagcgctgcgaaggtccaatgctccgaacagtggatcccgtttcagaacaagtgttttcttaaaattaaacctgtgtctcttacgttctcgcaagctagcgacacatgtcacagctacggcggaacacttccgtcagttctcagccagatcgagcaggactttataacaagcctcttgccggatatggaagcaacactgtggataggtcttagatggacagcctatgagaagattaacaagtggacagacaatcgcgagttgacttattctaattttcatccattgcttgtatcagggagactcaggattcccgagaactttttcgaagaagagtcccgttaccactgtgctctgattcttaacctccagaagagccccttcacaggcacttggaattttaccagctgctctgagcgccacttcgtctccttgtgtcagaagtactccgaagtgaaatcgaggcagaccctgcaaaacgctagcgagactgttaagtacctgaataatctctataagattataccgaaaactctgacctggcacagcgctaagagggaatgcctgaaatccaacatgcaactcgttagtatcacagacccctatcagcaggccttcctgagcgtccaggccttgcttcacaatagttctctttggattggcctcttttctcaggacgacgagctcaacttcggatggagcgacggcaaacgactgcatttctcaagatgggccgaaaccaacgggcagctcgaggactgtgtggttctggacactgacggtttctggaaaactgtggactgtaacgacaaccagccaggcgcaatttgttattatagtggaaatgagaccgagaaggaggtcaaaccagtagatagtgtgaagtgcccctctccagttctaaacactccttggatcccctttcagaactgttgttataacttcatcattacgaagaaccgacacatggccacgacacaggacgaggtccacacaaagtgccagaagctcaaccctaaatctcacatactcagtatccgcgatgagaaggaaaataatttcgtccttgagcaactgctgtacttcaattacatggcctcttgggttatgttagggattacttatcggaataaaagcctaatgtggttcgataaaactccactgtcctacacccattggcgggcaggtaggcccacaatcaagaatgaaaaattcctggccggtttgtctacagacggtttttgggatattcaaacttttaaagtcattgaagaggccgtctattttcatcagcactcaatcctcgcgtgcaagatagaaatggttgactataaagaagaatataatactaccctcccacagtttatgccgtacgaggacggaatttactctgttattcagaagaaagtcacttggtatgaggcactgaacatgtgttcgcaaagtggaggacatctggcaagtgttcacaatcagaacggccagctttttctggaggatatagtcaagagagatggattcccgctgtgggtcggcctgtccagtcatgacggatctgagtcatcctttgagtggtccgatggatctacttttgattatatcccttggaaggggcaaacctcccccggtaattgtgtactcctcgatcccaaggggacctggaaacacgagaagtgcaatagtgttaaggatggagctatctgctacaaacctactaagagtaaaaaactatccaggttgacgtactcttcccggtgtcctgctgcaaaggagaacggatctcggtggattcagtataaaggccattgttataagtctgaccaggctctgcatagtttctctgaagcaaaaaagctctgctctaaacatgaccactcagccaccatagtaagcatcaaggacgaagatgagaacaaattcgtgagccgcctgatgcgtgaaaataacaacataaccatgagagtatggctagggcttagtcagcactcagtagattgtccttcctcaacttggatacagttccaggacagctgttacatattcctgcaggaagcgatcaaggtagaaagtatcgaggatgtgcggaatcagtgtacggatcacggggctgacatgatatcaatccacaatgaagaggaaaacgcgttcatcctggacaccctgaagaaacagtggaaaggtccggacgatatattgttgggcatgttttacgataccgacgacgccagcttcaagtggtttgataactcgaacatgacatttgacaagtggaccgaccaggatgacgacgaggatctggtcgacacctgcgcatttttacacatcaaaaccggtgagtggaaaaagggaaattgtgaggtgagcagcgttgagggaacactatgcaagaccgcaatcccttacaagcggaaatacctgtctgacaaccacatcttaatcagtgcgcttgtcattgcctctacggtgattctgaccgtactgggggctattatctggttcctctacaagaagcactctgacagcaggtttaccaccgtgttctctaccgctccccaaagcccatataatgaggattgcgtgctggttgtgggggaggagaacgagtaccctgtccagttcgatta

SEQ ID NO: 76059 - protein, 174 aa, Artificial Sequence
  derived and/or modified sequence
MLRAALPALLLPLLGLAAAAVADCPSSTWIQFQDSCYIFLQEAIKVESIEDVRNQCTDHGADMISIHNEEENAFILDTLKKQWKGPDDILLGMFYDTDVPYKRKYLSDNHILISALVIASTVILTVLGAIIWFLYKKHSDSRFTTVFSTAPQSPYNEDCVLVVGEENEYPVQFD

SEQ ID NO: 76060 - DNA, 525 bp, Artificial Sequence
  derived and/or modified sequence
atgctgcgggccgctctgccggcgctgctgctgccactgcttggcttggccgccgccgctgtcgcggattgccctagcagtacctggatccagttccaggactcctgttatatttttctccaagaagccataaaggttgaatctattgaagatgtgcggaatcagtgtactgaccatggcgctgacatgatcagcatccacaatgaggaggagaatgcattcatcctggataccttaaagaaacagtggaagggccccgatgacattcttctgggaatgttttacgatactgatgtgccctacaaaagaaaatacctgtccgataatcacatcctgatctccgccctggtgattgctagcactgtaattctcacggtgctcggagccataatctggtttttatacaagaagcatagcgatagtagattcactactgtcttctccactgcaccacagtcgccctacaatgaagactgtgtgcttgtggtgggtgaggaaaacgaatacccagtgcaattcgactag

SEQ ID NO: 76061 - DNA, 525 bp, Artificial Sequence
  derived and/or modified sequence
atgctgcgggccgccctgcctgccctgctgctgcccctgctgggcctggccgctgctgctgtggccgactgccccagcagcacctggatccagttccaggacagctgctacatcttcctgcaggaggccatcaaggtggagagcattgaagatgtgaggaaccagtgcacagaccatggagctgacatgatcagcatccacaatgaggaggagaatgccttcatcctggacaccctgaagaagcagtggaagggcccagatgacatcctgctgggcatgttttatgacacagatgtgccctacaagaggaagtacctgagtgacaaccacatcctgatcagcgccctggtgattgccagcaccgtcatcctgactgtgctgggcgccatcatctggttcctgtacaagaagcacagcgacagccgcttcaccaccgtcttcagcacagccccccagagcccctacaatgaagactgtgtgctggtggtgggggaggagaatgagtaccctgtgcagtttgattag

SEQ ID NO: 76062 - DNA, 525 bp, Artificial Sequence
  derived and/or modified sequence
atgctgcgggccgccctgcccgccctgctgctgcccctgctgggcttggcagcagctgccgtggctgactgtcccagctcaacttggatacagtttcaggattcatgttatatttttctgcaagaggctattaaagtggagagtatagaggacgtgcgcaaccagtgcactgaccacggggcggacatgattagcattcataacgaggaagaaaatgcgttcattttggatactcttaaaaagcagtggaaaggacctgatgacatactcctcggaatgttttacgacacggacgtaccatataagcggaaatacctctccgataatcatattctgatctctgccctggttattgctagtacagtcattctgaccgtgctgggagcaatcatttggtttctctataagaagcacagcgattcaagattcaccacagtgttctccacggcccctcagagcccctacaacgaagattgtgttctagtggttggagaagagaatgagtacccggtgcagtttgactag

SEQ ID NO: 76063 - DNA, 525 bp, Artificial Sequence
  derived and/or modified sequence
atgctgagagcggcactgccagcactattattacctttgctgggcctggctgcggctgcagttgccgactgcccatcaagtacctggatacaatttcaagattcctgctacatcttcctgcaagaagctatcaaggtcgagtctatcgaggacgtcagaaaccagtgtacggatcacggggctgacatgattagtattcacaatgaagaggaaaacgcatttattttagacaccttgaagaaacagtggaagggccctgatgatatcctgctgggtatgttctacgatactgacgttccatataagagaaaatacctctccgataatcacatcttgatctctgccctcgtaatagccagcactgtcatactgacggtacttggtgccattatttggtttctctacaagaaacatagtgacagccgtttcactactgtcttttccacagcccctcagtctccatataacgaagactgtgtccttgtggtgggcgaggagaatgagtaccccgtacaatttgactag

SEQ ID NO: 76064 - DNA, 831 bp, Artificial Sequence
  derived and/or modified sequence
ctctccggccgcgcagccgctgccgcccacccgcacccgccgtcatgctccgggccgcgctgcccgcgctcctgctgccgttgctgggcctcgccgctgctgccgtcgcggactgtccttcatctacttggattcagttccaagacagttgttacatttttctccaagaagccatcaaagtagaaagcatagaggatgtcagaaatcagtgtactgaccatggagcggacatgataagcatacataatgaagaagaaaatgcttttatactggatactttgaaaaagcaatggaaaggcccagatgatatcctactaggcatgttttatgacacagatgtcccatacaaaaggaaatatttatcagataaccacattttaatatcagcattggtgattgctagcacggtaattttgacagttttgggagcaatcatttggttcctgtacaaaaaacattctgattctcgtttcaccacagttttttcaaccgcaccccaatcaccttataatgaagactgtgttttggtagttggagaagaaaatgaatatcctgttcaatttgactaagtttttggtaatcttgcactaagacatcaacaaaatgccctggcagagataacttgggaaagattttaatataaaacttgacattggatattagagctttaatggtattccttattccagtaacatttttatgtactcatctgctgtgaaaagtctttaggttcattaaaaaaacaggttttagaaatgatcttagatctaatatagtgattttaagcatcccgtcaaaggcagaatctgtcacttgaatgaaggaaagctt

SEQ ID NO: 76065 - DNA, 525 bp, Artificial Sequence
  derived and/or modified sequence
atgctgagagccgccctgcccgccctgctgctgcccctgctgggcctggccgccgccgccgtggccgactgccccagcagcacctggatccagttccaggacagctgctacatcttcctgcaggaggccatcaaggtggagagcatcgaggacgtgagaaaccagtgcaccgaccacggcgccgacatgatcagcatccacaacgaggaggagaacgccttcatcctggacaccctgaagaagcagtggaagggccccgacgacatcctgctgggcatgttctacgacaccgacgtgccctacaagagaaagtacctgagcgacaaccacatcctgatcagcgccctggtgatcgccagcaccgtgatcctgaccgtgctgggcgccatcatctggttcctgtacaagaagcacagcgacagcagattcaccaccgtgttcagcaccgccccccagagcccctacaacgaggactgcgtgctggtggtgggcgaggagaacgagtaccccgtgcagttcgactag

SEQ ID NO: 76066 - DNA, 846 bp, Artificial Sequence
  derived and/or modified sequence
atgggcgacaccgtggtggagcccgcccccctgaagcccaccagcgagcccaccagcggcccccccggcaacaacggcggcagcctgctgagcgtgatcaccgagggcgtgggcgagctgagcgtgatcgaccccgaggtggcccagaaggcctgccaggaggtgctggagaaggtgaagctgctgcacggcggcgtggccgtgagcagcagaggcacccccctggagctggtgaacggcgacggcgtggacagcgagatcagatgcctggacgacccccccgcccagatcagagaggaggaggacgagatgggcgccgccgtggccagcggcaccgccaagggcgccagaagaagaagacagaacaacagcgccaagcagagctggctgctgagactgttcgagagcaagctgttcgacatcagcatggccatcagctacctgtacaacagcaaggagcccggcgtgcaggcctacatcggcaacagactgttctgcttcagaaacgaggacgtggacttctacctgccccagctgctgaacatgtacatccacatggacgaggacgtgggcgacgccatcaagccctacatcgtgcacagatgcagacagagcatcaacttcagcctgcagtgcgccctgctgctgggcgcctacagcagcgacatgcacatcagcacccagagacacagcagaggcaccaagctgagaaagctgatcctgagcgacgagctgaagcccgcccacagaaagagagagctgcccagcctgagccccgcccccgacaccggcctgagccccagcaagagaacccaccagagaagcaagagcgacgccaccgcctag

SEQ ID NO: 76067 - DNA, 846 bp, Artificial Sequence
  derived and/or modified sequence
atgggagacaccgtcgttgagccagcgccccttaaaccgaccagcgagccgacctctggaccccctggcaataacggaggtagtctcctatcagttatcaccgaaggggtcggcgagctgtccgtgattgatcccgaagttgcccagaaggcctgccaggaggtcctggaaaaggtcaagttactgcacggaggagtcgccgtgtcatccagaggcacaccactggagcttgtgaatggagatggggtggactccgagatccggtgtttggacgacccccctgctcaaattagggaggaggaggatgagatgggggctgccgtagcaagtgggactgcgaagggggctcggcggagaagacaaaataactcagcaaagcagtcatggctgctgcgcttgttcgagtctaaactgtttgacattagtatggctatctcctatctatacaatagtaaagagccgggtgtgcaggcatatataggcaaccggcttttttgctttcggaacgaggatgtcgatttctacctgcctcaattactcaacatgtacatccacatggacgaggacgtcggcgatgcaatcaagccttacattgtccaccgttgcaggcagagcatcaacttctccttacagtgcgctctgctgctgggggcatacagttcggacatgcacattagcactcagaggcacagtcgtggcacaaaactccgtaaactgattctgagtgatgaactgaagcctgcgcacaggaagagggagctaccatctctctcccccgctccagacaccgggcttagcccctcaaagaggacacaccagcggtcaaagagcgatgccactgcttag

SEQ ID NO: 76068 - DNA, 846 bp, Artificial Sequence
  derived and/or modified sequence
atgggagacacagtggtggagcccgcccccctgaagcccaccagcgagcccaccagcggccccccaggcaacaatggaggcagcctgctgagcgtcatcacagagggcgtgggggagctgtctgtgattgatcctgaggtggcccagaaggcctgccaggaggtgctggagaaggtgaagctgctgcatggaggagtggccgtgagcagccggggcacccccctggagctggtgaatggagatggagtggacagcgagatccgctgcctggatgatcctccagcccagatccgggaggaggaggatgagatgggcgctgctgtggccagcggcacagccaagggggccaggagaagacggcagaacaacagcgccaagcagagctggctgctgcggctgtttgagagcaagctgtttgacatctccatggccatctcctacctgtacaacagcaaggagcccggggtgcaggcctacatcggcaacagactcttctgcttcagaaatgaagatgtggacttctacctgccccagctgctgaacatgtacatccacatggatgaagatgtgggagatgccatcaagccctacatcgtgcaccgctgccggcagagcatcaacttcagcctgcagtgtgccctgctgctgggcgcctacagcagtgacatgcacatcagcacccagaggcacagccggggcaccaagctgaggaagctgatcctgagtgatgagctgaagccagcccacaggaagcgggagctgcccagcctgagccctgccccagacaccggcctgagccccagcaagaggacccaccagaggagcaagagtgatgccacagcctag

SEQ ID NO: 76069 - DNA, 846 bp, Artificial Sequence
  derived and/or modified sequence
atgggcgacaccgtggtggagcccgcccccctgaagcccaccagcgaaccaacgagtgggccccccggaaataatggcgggtccctcttatctgtcataacggagggcgtcggcgaactgagtgttattgacccggaggtggcacaaaaagcctgccaggaagtcctcgagaaggtcaaattattgcacggcggcgtggctgtgtcctcaaggggaacaccattagaattagtcaatggcgacggcgtggacagcgagattagatgtctcgacgatccccctgcccagatcagagaagaagaggacgaaatgggggccgccgtggccagcggtacggccaagggcgcccggagaaggcgccagaacaatagcgcgaaacagagctggttgcttcgtctctttgaatccaaactcttcgacatttcaatggcaattagttacctgtataactccaaggagccaggtgtgcaggcctatattggcaataggttgttctgctttcggaatgaggacgtggacttttatctgccacagctcttaaacatgtacatccacatggacgaggatgtaggcgacgcgatcaaaccctacatcgtgcacaggtgcaggcagagtattaacttttcactgcagtgtgcattactgttgggggcctatagttccgacatgcatatctcgacacagcgtcacagcagggggactaaacttaggaaacttattctctccgacgaacttaaaccggctcacaggaagcgcgaattaccatccttgagccctgctccggatacaggactcagcccctctaaaaggactcaccaacggagcaaatctgacgccacggcgtag

SEQ ID NO: 76070 - DNA, 846 bp, Artificial Sequence
  derived and/or modified sequence
atgggcgatacagtagtggaacctgccccactcaagcctacgtccgaaccaacaagcggaccgccaggaaacaatgggggttcactcctcagtgtcatcaccgagggcgtgggggagcttagcgtcatcgaccctgaagtggcccagaaggcatgtcaggaggttttggaaaaggtgaagctgctccatgggggagtcgctgtgtcaagccgaggtacccccctggaactcgttaacggagatggtgttgactcggagattcgttgcctggatgatcccccagcacagattcgcgaggaggaggatgagatgggggctgccgtcgcatcagggactgcgaaaggtgctcgacgcagacgacagaacaactcggctaaacagtcctggctcctcagactcttcgagtcaaagctttttgacatcagtatggcgatatcctatctttacaacagcaaggagccaggcgtgcaggcatacattggaaatcgacttttctgtttcagaaacgaagacgtggacttttaccttccacagctgctcaatatgtatatccacatggacgaagacgttggtgatgcgatcaaaccctacatagtgcaccggtgtcgacagtcgattaacttttccttgcaatgtgctctgctattgggtgcatactcatccgacatgcacattagcacacagcggcactctcgaggcacgaaacttcggaaactgatcctgtctgacgaattaaaacctgcgcacaggaagagagagctgccatcactgagtccagcccctgataccggcttgtctccttctaaacggacccaccaacggtccaagtcagacgccactgcctag

SEQ ID NO: 76071 - DNA, 965 bp, Artificial Sequence
  derived and/or modified sequence
agccggggcctggtgcagcctccgcggccgctgtcagggaagcgcaggcggccaatggaacccgggagcggtcgctgctgctgaggcggcagtgtcggcagtccaaccgcgactgcccgcaccccctccgcgggggtcccccagaggatcaactaaaccttgaactaagaagaaaaatgtgttgtgagcagggggagcctcagctgcctcaggccgttcaggacagaagggtgtttctgaaggccggagcaagttttgaagaagtccctatcagattacacttggttgactactccggagcagccactaagagggatgaacaggcctgcgtggaaattgaatgagattcctgttcgactggctcctgagagagaattcatcaagtccctgatggcgatcggcaagcggctggccacgctccccaccaaagagcagaaaacacagaggctgatctcagagctctccctgctcaaccataagctccctgcccgagtctggctgcccactgctggctttgaccaccacgtggtccgtgtaccccacacacaggctgttgtcctcaactccaaggacaaggctccctacctgatttatgtggaagtccttgaatgtgaaaactttgacaccaccagtgtccctgcccggatccccgagaaccgaattcggagtacgaggtccgtagaaaacttgcccgaatgtggtattacccatgagcagcgagctggcagcttcagcactgtgcccaactatgacaacgatgatgaggcctggtcggtggatgacataggcgagctgcaagtggagctccccgaagtgcataccaacagctgtgacaacatctcccagttctctgtggacagcatcaccagccaggagagcaaggagcctgtgttcattgcagcaggggacatccgccggcgcctttcggaacagctggctcataccccgacagccttcaaacgaga

SEQ ID NO: 76072 - DNA, 558 bp, Artificial Sequence
  derived and/or modified sequence
agcctccgcggccgctgtcagggaagcgcaggcggccaatggaacccgggagcggtcgctgctgctgaggcggcagtgtcggcagtccaaccgcgactgcccgcaccccctccgcgggggtcccccagaggactcaccagcgctctaagtcagatgccactgccagcataagtctcagcagcaacctgaaacgaacagccagcaaccctaaagtggagaatgaggatgagcctgttcgactggctcctgagagagaattcatcaagtccctgatggcgatcggcaagcggctggccacgctccccaccaaagagcagaaaacacagaggctgatctcagagctctccctgctcaaccataagctccctgcccgagtctggctgcccactgctggctttgaccaccacgtggtccgtgtaccccacacacaggctgttgtcctcaactccaaggacaaggctccctacctgatttatgtggaagtccttgaatgtgaaaactttgacaccaccagtgtccctgcccggatccccgagaaccgaattcggagtacgaggt

SEQ ID NO: 76073 - DNA, 576 bp, Artificial Sequence
  derived and/or modified sequence
atggccatcggcaagagactggccaccctgcccaccaaggagcagaagacccagagactgatcagcgagctgagcctgctgaaccacaagctgcccgccagagtgtggctgcccaccgccggcttcgaccaccacgtggtgagagtgccccacacccaggccgtggtgctgaacagcaaggacaaggccccctacctgatctacgtggaggtgctggagtgcgagaacttcgacaccaccagcgtgcccgccagaatccccgagaacagaatcagaagcaccagaagcgtggagaacctgcccgagtgcggcatcacccacgagcagagagccggcagcttcagcaccgtgcccaactacgacaacgacgacgaggcctggagcgtggacgacatcggcgagctgcaggtggagctgcccgaggtgcacaccaacagctgcgacaacatcagccagttcagcgtggacagcatcaccagccaggagagcaaggagcccgtgttcatcgccgccggcgacatcagaagaagactgagcgagcagctggcccacacccccaccgccttcaagagatag

SEQ ID NO: 76074 - DNA, 288 bp, Artificial Sequence
  derived and/or modified sequence
atggccatcggcaagagactggccaccctgcccaccaaggagcagaagacccagagactgatcagcgagctgagcctgctgaaccacaagctgcccgccagagtgtggctgcccaccgccggcttcgaccaccacgtggtgagagtgccccacacccaggccgtggtgctgaacagcaaggacaaggccccctacctgatctacgtggaggtgctggagtgcgagaacttcgacaccaccagcgtgcccgccagaatccccgagaacagaatcagaagcaccagatag

SEQ ID NO: 76075 - DNA, 576 bp, Artificial Sequence
  derived and/or modified sequence
atggccattggaaagaggctggcaacattacctacgaaggaacagaagacgcagagactgatcagtgagctctctcttttgaaccataagctgcccgctcgtgtgtggctgcctaccgccggctttgaccaccacgtcgttagggtgccccatacccaggcagtggtgctaaattccaaggacaaggctccatacctaatttacgtggaagtgcttgagtgcgagaacttcgatacaacctcagttcccgcccggatccccgagaacaggattcgcagtacccggagcgtggagaatctccccgagtgcggcatcacccacgaacagagggctggctcttttagcacggtccctaattatgataacgatgatgaagcctggtccgtcgatgatattggcgagctgcaggtagaactgcccgaagtgcacacgaactcttgcgacaacataagccaatttagcgtcgacagcataacatcccaggagagcaaggagcccgtatttatagccgcgggtgatatcaggcggcgcctgtctgaacaactggcccacacccctaccgcctttaaacggtag

SEQ ID NO: 76076 - DNA, 288 bp, Artificial Sequence
  derived and/or modified sequence
atggccataggcaaacggctggccacattgccaactaaagaacagaagacacagaggctgatttcagagctcagtctgctcaatcacaaactcccggcccgtgtttggctgcccaccgctgggtttgatcatcatgtagtccgcgtgccgcacacacaggccgttgtgctcaactcgaaggacaaggccccctatcttatatacgtcgaggtgttagaatgtgagaacttcgacactacatccgtgccagccaggattccggagaacagaatacgttcaaccagatag

SEQ ID NO: 76077 - DNA, 576 bp, Artificial Sequence
  derived and/or modified sequence
atggccatcggcaagaggctggccaccctgcccaccaaggagcagaagacccagaggctcatcagcgagctgagcctgctgaaccacaagctgcctgcccgggtgtggctgcccacagctggctttgaccaccacgtggtgcgggtgccccacacccaggccgtggtgctgaacagcaaggacaaggccccctacctgatctacgtggaggtgctggagtgtgaaaattttgacaccacctctgtgcctgcccgcatccctgagaaccgcatccgcagcaccaggtctgtggagaacctgcctgaatgtggcatcacccatgagcagagagctggcagcttcagcacagtgcccaactatgacaatgatgatgaggcctggagcgtggatgacatcggggagctgcaggtggagctgcctgaggtgcacaccaacagctgtgacaacatcagccagttctctgtggacagcatcaccagccaggagagcaaggagcccgtcttcatcgctgctggggacatcagaagaaggctgtctgagcagctggcccacacccccacagccttcaagaggtag

SEQ ID NO: 76078 - DNA, 288 bp, Artificial Sequence
  derived and/or modified sequence
atggccatcggcaagaggctggccaccctgcccaccaaggagcagaagacccagaggctcatcagcgagctgagcctgctgaaccacaagctgcctgcccgggtgtggctgcccacagctggctttgaccaccacgtggtgcgggtgccccacacccaggccgtggtgctgaacagcaaggacaaggccccctacctgatctacgtggaggtgctggagtgtgaaaattttgacaccacctctgtgcctgcccgcatccctgagaaccgcatccgcagcaccaggtag

SEQ ID NO: 76079 - DNA, 576 bp, Artificial Sequence
  derived and/or modified sequence
atggccatcggcaagcggctggccaccctgcccaccaaggagcagaagactcagaggctgatatctgaactctccctgctcaaccataagctgccagccagggtgtggcttccaactgccggattcgatcaccacgtggtgcgggtgccccatacacaggccgtggtcctaaattctaaagacaaagcaccctatttaatttacgtggaggtccttgagtgcgaaaattttgacaccacgagcgtgccggctcggatcccagaaaacagaatccgcagcacacggagtgtcgaaaacctgcccgagtgtggaataacacatgagcagcgggcaggcagcttctctactgttcccaattatgataatgatgacgaggcctggtccgtcgacgacattggcgaattgcaggtagaactgcccgaggtccataccaatagctgcgacaatatttcccaattcagtgtggactccatcacatcacaggagagtaaagagcctgtctttatcgccgctggggacattagaagaaggctgtctgagcagctggcacatactccaacagcctttaaaaggtag

SEQ ID NO: 76080 - DNA, 288 bp, Artificial Sequence
  derived and/or modified sequence
atggccatcggcaagcggctggccaccctgcccaccaaggagcagaagacccagcgactcatctcggaattgtctctgcttaaccataaactgcccgcgagggtgtggctcccgacggcgggatttgatcaccacgtggtgcgcgtccctcatacccaggctgtggttctcaactcgaaggataaagccccctacttgatctacgtcgaagtcctggagtgtgaaaatttcgatacaacatctgtgcccgctcggattcctgaaaacagaataagaagtacaaggtag

SEQ ID NO: 76081 - DNA, 576 bp, Artificial Sequence
  derived and/or modified sequence
atggcaatcgggaaaaggcttgctacactacctacaaaggaacagaaaacccaacggctgataagcgaattaagcctgttaaatcacaagcttcctgcacgagtttggttacccaccgcaggtttcgaccatcatgtcgtgagagtccctcacacccaagccgtcgtgctgaactccaaagacaaagccccttatctcatttacgttgaagtgttggaatgtgaaaatttcgatactacttccgtcccagctcgcatcccagagaaccggatcagatccacgcgttctgtggagaatttgccagagtgcggcatcacacatgaacagagagccggatcttttagtaccgtcccaaactatgataacgacgatgaagcctggtccgtggacgacatcggggagttgcaggtggagcttccagaggtccacaccaattcttgtgataacatatcccagttttctgtggattccatcacaagccaggaaagtaaagaacccgtctttatcgccgcaggcgatattcgcaggagactgtccgagcagttggctcatacacccaccgcattcaagcgctag

SEQ ID NO: 76082 - DNA, 288 bp, Artificial Sequence
  derived and/or modified sequence
atggccattggaaaaagattggccactcttcctactaaggagcagaagactcagagactgatctctgagctgtccctcctcaaccacaaactgcctgccagagtgtggctccctaccgccggattcgaccaccatgtggtgagagtgccacatacgcaggccgtcgtgcttaatagcaaggacaaggctccatatctcatatacgtggaggtgctggaatgcgaaaacttcgatactacctctgtgcctgccaggatacccgagaatagaatcaggagcaccagatag

SEQ ID NO: 76083 - protein, 764 aa, Artificial Sequence
  derived and/or modified sequence
MYRVTWSTFWLRFQHYTCTMSLKPRVVDFDETWNKLLTTIKAVVMLEYVERATWNDRFSDIYALCVAYPEPLGERLYTETKIFLENHVRHLHKRVLESEEQVLVMYHRYWEEYSKGADYMDCLYRYLNTQFIKKNKLTEADLQYGYGGVDMNEPLMEIGELALDMWRKLMVEPLQAILIRMLLREIKNDRGGEDPNQKVIHGVINSFVHVEQYKKKFPLKFYQEIFESPFLTETGEYYKQEASNLLQESNCSQYMEKVLGRLKDEEIRCRKYLHPSSYTKVIHECQQRMVADHLQFLHAECHNIIRQEKKNDMANMYVLLRAVSTGLPHMIQELQNHIHDEGLRATSNLTQENMPTLFVESVLEVHGKFVQLINTVLNGDQHFMSALDKALTSVVNYREPKSVCKAPELLAKYCDNLLKKSAKGMTENEVEDRLTSFITVFKYIDDKDVFQKFYARMLAKRLIHGLSMSMDSEEAMINKLKQACGYEFTSKLHRMYTDMSVSADLNNKFNNFIKNQDTVIDLGISFQIYVLQAGAWPLTQAPSSTFAIPQELEKSVQMFELFYSQHFSGRKLTWLHYLCTGEVKMNYLGKPYVAMVTTYQMAVLLAFNNSETVSYKELQDSTQMNEKELTKTIKSLLDVKMINHDSEKEDIDAESSFSLNMNFSSKRTKFKITTSMQKDTPQEMEQTRSAVDEDRKMYLQAAIVRIMKARKVLRHNALIQEVISQSRARFNPSISMIKKCIEVLIDKQYIERSQASADEYSYVA

SEQ ID NO: 76084 - DNA, 2295 bp, Artificial Sequence
  derived and/or modified sequence
atgtacagagtgacctggagcaccttctggctgagattccagcactacacctgcaccatgagcctgaagcccagagtggtggacttcgacgagacctggaacaagctgctgaccaccatcaaggccgtggtgatgctggagtacgtggagagagccacctggaacgacagattcagcgacatctacgccctgtgcgtggcctaccccgagcccctgggcgagagactgtacaccgagaccaagatcttcctggagaaccacgtgagacacctgcacaagagagtgctggagagcgaggagcaggtgctggtgatgtaccacagatactgggaggagtacagcaagggcgccgactacatggactgcctgtacagatacctgaacacccagttcatcaagaagaacaagctgaccgaggccgacctgcagtacggctacggcggcgtggacatgaacgagcccctgatggagatcggcgagctggccctggacatgtggagaaagctgatggtggagcccctgcaggccatcctgatcagaatgctgctgagagagatcaagaacgacagaggcggcgaggaccccaaccagaaggtgatccacggcgtgatcaacagcttcgtgcacgtggagcagtacaagaagaagttccccctgaagttctaccaggagatcttcgagagccccttcctgaccgagaccggcgagtactacaagcaggaggccagcaacctgctgcaggagagcaactgcagccagtacatggagaaggtgctgggcagactgaaggacgaggagatcagatgcagaaagtacctgcaccccagcagctacaccaaggtgatccacgagtgccagcagagaatggtggccgaccacctgcagttcctgcacgccgagtgccacaacatcatcagacaggagaagaagaacgacatggccaacatgtacgtgctgctgagagccgtgagcaccggcctgccccacatgatccaggagctgcagaaccacatccacgacgagggcctgagagccaccagcaacctgacccaggagaacatgcccaccctgttcgtggagagcgtgctggaggtgcacggcaagttcgtgcagctgatcaacaccgtgctgaacggcgaccagcacttcatgagcgccctggacaaggccctgaccagcgtggtgaactacagagagcccaagagcgtgtgcaaggcccccgagctgctggccaagtactgcgacaacctgctgaagaagagcgccaagggcatgaccgagaacgaggtggaggacagactgaccagcttcatcaccgtgttcaagtacatcgacgacaaggacgtgttccagaagttctacgccagaatgctggccaagagactgatccacggcctgagcatgagcatggacagcgaggaggccatgatcaacaagctgaagcaggcctgcggctacgagttcaccagcaagctgcacagaatgtacaccgacatgagcgtgagcgccgacctgaacaacaagttcaacaacttcatcaagaaccaggacaccgtgatcgacctgggcatcagcttccagatctacgtgctgcaggccggcgcctggcccctgacccaggcccccagcagcaccttcgccatcccccaggagctggagaagagcgtgcagatgttcgagctgttctacagccagcacttcagcggcagaaagctgacctggctgcactacctgtgcaccggcgaggtgaagatgaactacctgggcaagccctacgtggccatggtgaccacctaccagatggccgtgctgctggccttcaacaacagcgagaccgtgagctacaaggagctgcaggacagcacccagatgaacgagaaggagctgaccaagaccatcaagagcctgctggacgtgaagatgatcaaccacgacagcgagaaggaggacatcgacgccgagagcagcttcagcctgaacatgaacttcagcagcaagagaaccaagttcaagatcaccaccagcatgcagaaggacaccccccaggagatggagcagaccagaagcgccgtggacgaggacagaaagatgtacctgcaggccgccatcgtgagaatcatgaaggccagaaaggtgctgagacacaacgccctgatccaggaggtgatcagccagagcagagccagattcaaccccagcatcagcatgatcaagaagtgcatcgaggtgctgatcgacaagcagtacatcgagagaagccaggccagcgccgacgagtacagctacgtggcctag

SEQ ID NO: 76085 - DNA, 4312 bp, Artificial Sequence
  derived and/or modified sequence
cggcggccggccggggaggcggcctcggcgcacagtaatggcagcgctgtgagcaggggaacgcgagctgacagccgccgccgccgccgcctccgcccaccttcctcgccggggcttcgtctttcactccttcgggctgcctccccctccccttgtcccctgccccttgccctgcttctgcagaagagcgctgacccgtaagccctgccaccccctggactggatcccgggcctccccaacccgatcttggccgcctctcccgcggccccattttccttcgaaggagggaagatttcaacactacacttgcacaatgtctttgaaaccaagagtagtagattttgatgaaacatggaacaaacttttgacgacaataaaagccgtggtcatgttggaatacgtcgaaagagcaacatggaatgaccgtttctcagatatctatgctttatgtgtggcctatcctgaaccccttggagaaagactttatacagaaactaagatttttttggaaaatcatgttcggcatttgcataagagagttttggagtcagaagaacaagtacttgttatgtatcataggtactgggaagaatacagcaagggtgcagactatatggactgcttatataggtatctcaacacccagtttattaaaaagaataaattaacagaagcggaccttcagtatggctatggtggtgtagatatgaatgaaccacttatggaaataggagagctagcattggatatgtggaggaaattgatggttgaaccacttcaggccatccttatccgaatgctgctccgagaaatcaaaaatgatcgtggtggagaagacccaaaccagaaagtaatccatggggttattaactcctttgttcatgttgaacagtataagaaaaaattccccttaaagttttatcaggaaatttttgagtctccctttctgactgaaacaggagagtattacaaacaagaagcttcaaatttattacaagaatcaaactgctcacagtatatggaaaaggttctaggtagattaaaagatgaagaaattcgatgtcgaaaatacctacatccaagttcatatactaaggtgattcatgaatgtcaacaacgaatggtagcagaccacttacagtttttacatgcagaatgtcataatataattcgacaagagaaaaaaaatgacatggcaaatatgtacgtcttactccgtgctgtgtccactggtttacctcatatgattcaggagctgcaaaaccacatccatgatgagggccttcgagcaaccagcaaccttactcaggaaaacatgccaacactatttgtggagtcagttttggaagtgcatggtaaatttgttcagcttatcaacactgttttgaatggtgatcagcattttatgagtgcgttggataaggcccttacgtcagttgtaaattacagagaacctaagtctgtttgcaaagcacctgaactgcttgctaagtactgtgacaacttactgaagaagtcagcgaaagggatgacagagaatgaagtggaagacaggctcacgagcttcatcacagtgttcaaatacattgatgacaaggacgtctttcaaaagttctacgcaagaatgctggcaaaacgtttaattcatgggttatccatgtctatggactctgaagaagccatgatcaacaaattaaagcaagcctgtggttatgagtttaccagcaagctacatcggatgtatacagatatgagtgtcagcgctgatctcaacaataagttcaacaattttatcaaaaaccaagacacagtaatagatttgggaattagttttcaaatatatgttctacaggctggtgcgtggcctcttactcaggctccttcatctacgtttgcaattccccaggaattagaaaaaagtgtacagatgtttgaattattttatagccaacatttcagtggaaggaaacttacatggttacattatctgtgtacaggtgaagttaaaatgaactatttgggcaaaccatatgtagccatggttacaacataccaaatggcagttcttcttgcctttaacaacagtgaaactgtcagttataaagagcttcaggacagcactcagatgaatgaaaaggaactgacaaaaacaatcaaatcattacttgatgtgaaaatgattaaccatgattcagaaaaggaagatattgatgcagaatcttcgttttcattaaatatgaactttagcagtaaaagaacaaaatttaaaattactacatcaatgcagaaagacacaccacaagaaatggagcagactagaagtgcagttgatgaggaccggaaaatgtatctccaagctgctatagttcgtatcatgaaagcacgaaaagtgcttcggcacaatgcccttattcaagaggtgattagccagtcaagagctaggtttaatcccagtatcagcatgattaagaagtgtattgaagttctgatagacaaacaatacatagaacgcagccaggcgtcggcagatgaatacagctacgtcgcgtgatgtcgctctcctccagcgtggtgtgagaagatcattgccatcaccatttggtgtgttcctgtgggaaaaagcaggactgtgcctccataatttggtcatttggcagcccctgttttctgctgtttacaacatcaccagtgccacgtcatgagcgtcaaagaaaatgcctagagatatttcaagctcatgtcattatgacatttcttaaaactttattaaaagaatgagtgaagtattgctgaaaagtggaaattcggttgggtaccatgctttttctccccttcacgtttgcagttgatgtgtctttttttttttttttaatgtatcttaaaggacataaaatttaaaaacttaaatattgtaatatgacagataacctaataattgtatctacattaaaatgacaaacatgatactgctgcttgtcaaataaaaaaaaaataaagaaatagaatgccttttttatgtggatggagtatcaggttgaccacaaaatatattgactcaaagcagctaatgcatctttagttgcgtttttatctgaatggtttaattcacttgtactcctatttaaatcctacatgaaaaatgtctagattattgttcttgactgcataggactgcattcagcataaagaatgctttatttttatggattagatatattggatctaaacattttgaatcttgaagatgtaattccatcagcagtttctggtggtgtgctactccacagacatcgcagagtgtgagcaggatgcttggtgacctcaagtctggcacagagagagcttttcattcaaaagttgtctttcttcggttgcataatccattaattctagcatagactagtaccctagctctgtggccttccctgagtcttaggaaatctatgataccaacatattccttctatatgcctcccctacctgttacccttacaaccctcctccaacagtttagatactagagtcactctcatcaatcacagatgtgcttagcaatgcataacctaaatacttttttaaaaaagaaaattgtacattgtactgggtgccacatatataaatcccattattttgtttattttatatatatatatatatataatatatatatatatatatctcaacagcagtgttaagagtactgcgatctattatcatatttattgtctatccacaccatcaccaccaccaccacacccctcctccctcaacatacaatttttctttattttaaaaaaaataagagacggggtttcgccatgtttcccaggctagtctggaacttctggcctcaagcaatcctatctctgtctcccaaagtgctgggattacaagcatgagccactgcatccatccaacacaaaatttttaaaatcggaatattttaaagcaaatcacacaaattatttcacttataatacttcagtaaggcctttaaaaaatccacagtgatattattactcctaacaaaaacaataattacttagtatcatctaatatgtggttcatatttaaatttgttgttttgagatgggtcttacaattggtttattcaattgcattttttctaactcgtgtctcaagtgttttaaaaatctactgaacttataatgacttatataatgtatttctcattttacctttcttccaaaagaggaaataatggcaaaccatataatattgtacattcactgtcaaaaagcaaacccttgttttgataacttgttgattgataaaagttttccaaattga

SEQ ID NO: 76086 - DNA, 4208 bp, Artificial Sequence
  derived and/or modified sequence
ggcggcggccggccggggaggcggcctcggcgcacagtaatggcagcgctgtgagcaggggaacgcgagctgacagccgccgccgccgccgcctccgcccaccttcctcgccggggcttcgtctttcactccttcgggctgcctccccctccccttgtcccctgccccttgccctgcttctgcagaagatttcaacactacacttgcacaatgtctttgaaaccaagagtagtagattttgatgaaacatggaacaaacttttgacgacaataaaagccgtggtcatgttggaatacgtcgaaagagcaacatggaatgaccgtttctcagatatctatgctttatgtgtggcctatcctgaaccccttggagaaagactttatacagaaactaagatttttttggaaaatcatgttcggcatttgcataagagagttttggagtcagaagaacaagtacttgttatgtatcataggtactgggaagaatacagcaagggtgcagactatatggactgcttatataggtatctcaacacccagtttattaaaaagaataaattaacagaagcggaccttcagtatggctatggtggtgtagatatgaatgaaccacttatggaaataggagagctagcattggatatgtggaggaaattgatggttgaaccacttcaggccatccttatccgaatgctgctccgagaaatcaaaaatgatcgtggtggagaagacccaaaccagaaagtaatccatggggttattaactcctttgttcatgttgaacagtataagaaaaaattccccttaaagttttatcaggaaatttttgagtctccctttctgactgaaacaggagagtattacaaacaagaagcttcaaatttattacaagaatcaaactgctcacagtatatggaaaaggttctaggtagattaaaagatgaagaaattcgatgtcgaaaatacctacatccaagttcatatactaaggtgattcatgaatgtcaacaacgaatggtagcagaccacttacagtttttacatgcagaatgtcataatataattcgacaagagaaaaaaaatgacatggcaaatatgtacgtcttactccgtgctgtgtccactggtttacctcatatgattcaggagctgcaaaaccacatccatgatgagggccttcgagcaaccagcaaccttactcaggaaaacatgccaacactatttgtggagtcagttttggaagtgcatggtaaatttgttcagcttatcaacactgttttgaatggtgatcagcattttatgagtgcgttggataaggcccttacgtcagttgtaaattacagagaacctaagtctgtttgcaaagcacctgaactgcttgctaagtactgtgacaacttactgaagaagtcagcgaaagggatgacagagaatgaagtggaagacaggctcacgagcttcatcacagtgttcaaatacattgatgacaaggacgtctttcaaaagttctacgcaagaatgctggcaaaacgtttaattcatgggttatccatgtctatggactctgaagaagccatgatcaacaaattaaagcaagcctgtggttatgagtttaccagcaagctacatcggatgtatacagatatgagtgtcagcgctgatctcaacaataagttcaacaattttatcaaaaaccaagacacagtaatagatttgggaattagttttcaaatatatgttctacaggctggtgcgtggcctcttactcaggctccttcatctacgtttgcaattccccaggaattagaaaaaagtgtacagatgtttgaattattttatagccaacatttcagtggaaggaaacttacatggttacattatctgtgtacaggtgaagttaaaatgaactatttgggcaaaccatatgtagccatggttacaacataccaaatggcagttcttcttgcctttaacaacagtgaaactgtcagttataaagagcttcaggacagcactcagatgaatgaaaaggaactgacaaaaacaatcaaatcattacttgatgtgaaaatgattaaccatgattcagaaaaggaagatattgatgcagaatcttcgttttcattaaatatgaactttagcagtaaaagaacaaaatttaaaattactacatcaatgcagaaagacacaccacaagaaatggagcagactagaagtgcagttgatgaggaccggaaaatgtatctccaagctgctatagttcgtatcatgaaagcacgaaaagtgcttcggcacaatgcccttattcaagaggtgattagccagtcaagagctaggtttaatcccagtatcagcatgattaagaagtgtattgaagttctgatagacaaacaatacatagaacgcagccaggcgtcggcagatgaatacagctacgtcgcgtgatgtcgctctcctccagcgtggtgtgagaagatcattgccatcaccatttggtgtgttcctgtgggaaaaagcaggactgtgcctccataatttggtcatttggcagcccctgttttctgctgtttacaacatcaccagtgccacgtcatgagcgtcaaagaaaatgcctagagatatttcaagctcatgtcattatgacatttcttaaaactttattaaaagaatgagtgaagtattgctgaaaagtggaaattcggttgggtaccatgctttttctccccttcacgtttgcagttgatgtgtctttttttttttttttaatgtatcttaaaggacataaaatttaaaaacttaaatattgtaatatgacagataacctaataattgtatctacattaaaatgacaaacatgatactgctgcttgtcaaataaaaaaaaaataaagaaatagaatgccttttttatgtggatggagtatcaggttgaccacaaaatatattgactcaaagcagctaatgcatctttagttgcgtttttatctgaatggtttaattcacttgtactcctatttaaatcctacatgaaaaatgtctagattattgttcttgactgcataggactgcattcagcataaagaatgctttatttttatggattagatatattggatctaaacattttgaatcttgaagatgtaattccatcagcagtttctggtggtgtgctactccacagacatcgcagagtgtgagcaggatgcttggtgacctcaagtctggcacagagagagcttttcattcaaaagttgtctttcttcggttgcataatccattaattctagcatagactagtaccctagctctgtggccttccctgagtcttaggaaatctatgataccaacatattccttctatatgcctcccctacctgttacccttacaaccctcctccaacagtttagatactagagtcactctcatcaatcacagatgtgcttagcaatgcataacctaaatacttttttaaaaaagaaaattgtacattgtactgggtgccacatatataaatcccattattttgtttattttatatatatatatatatataatatatatatatatatatctcaacagcagtgttaagagtactgcgatctattatcatatttattgtctatccacaccatcaccaccaccaccacacccctcctccctcaacatacaatttttctttattttaaaaaaaataagagacggggtttcgccatgtttcccaggctagtctggaacttctggcctcaagcaatcctatctctgtctcccaaagtgctgggattacaagcatgagccactgcatccatccaacacaaaatttttaaaatcggaatattttaaagcaaatcacacaaattatttcacttataatacttcagtaaggcctttaaaaaatccacagtgatattattactcctaacaaaaacaataattacttagtatcatctaatatgtggttcatatttaaatttgttgttttgagatgggtcttacaattggtttattcaattgcattttttctaactcgtgtctcaagtgttttaaaaatctactgaacttataatgacttatataatgtatttctcattttacctttcttccaaaagaggaaataatggcaaaccatataatattgtacattcactgtcaaaaagcaaacccttgttttgataacttgttgattgataaaagttttccaaattga

SEQ ID NO: 76087 - DNA, 767 bp, Artificial Sequence
  derived and/or modified sequence
gttgcagttgagcccaaactgaatgctgtctgtagaaggaaacaacaaactttgtactttatgtacagagtaacatggtcaactttttggcttagatttcaacactacacttgcacaatgtctttgaaaccaagagtagtagattttgatgaaacatggaacaaacttttgacgacaataaaagccgtggtcatgttggaatacgtcgaaagagcaacatggaatgaccgtttctcagatatctatgctttatgtgtggcctatcctgaaccccttggagaaagactttatacagaaactaagatttttttggaaaatcatgttcggcatttgcataagagagttttggagtcagaagaacaagtacttgttatgtatcataggtactgggaagaatacagcaagggtgcagactatatggactgcttatataggtatctcaacacccagtttattaaaaagaataaattaacagaagcggaccttcagtatggctatggtggtgtagatatgaatgaaccacttatggaaataggagagctagcattggatatgtggaggaaattgatggttgaaccacttcaggccatccttatccgaatgctgctccgagaaatcaaaaatgatcgtggtggagaagacccaaaccagaaagtaatccatggggttattaactcctttgttcatgttgaacagtataagaaaaaattccccttaaagttttatcaggaaatttttgagtctccctttctgactgaaacaggaga

SEQ ID NO: 76088 - DNA, 2376 bp, Artificial Sequence
  derived and/or modified sequence
atgttgcagttgagcccaaactgaatgctgtctgtagaaggaaacaacaaactttgtactttatgtacagagtaacatggtcaactttttggcttagatttcaacactacacttgcacaatgtctttgaaaccaagagtagtagattttgatgaaacatggaacaaacttttgacgacaataaaagccgtggtcatgttggaatacgtcgaaagagcaacatggaatgaccgtttctcagatatctatgctttatgtgtggcctatcctgaaccccttggagaaagactttatacagaaactaagatttttttggaaaatcatgttcggcatttgcataagagagttttggagtcagaagaacaagtacttgttatgtatcataggtactgggaagaatacagcaagggtgcagactatatggactgcttatataggtatctcaacacccagtttattaaaaagaataaattaacagaagcggaccttcagtatggctatggtggtgtagatatgaatgaaccacttatggaaataggagagctagcattggatatgtggaggaaattgatggttgaaccacttcaggccatccttatccgaatgctgctccgagaaatcaaaaatgatcgtggtggagaagacccaaaccagaaagtaatccatggggttattaactcctttgttcatgttgaacagtataagaaaaaattccccttaaagttttatcaggaaatttttgagtctccctttctgactgaaacaggagagtattacaaacaagaagcttcaaatttattacaagaatcaaactgctcacagtatatggaaaaggttctaggtagattaaaagatgaagaaattcgatgtcgaaaatacctacatccaagttcatatactaaggtgattcatgaatgtcaacaacgaatggtagcagaccacttacagtttttacatgcagaatgtcataatataattcgacaagagaaaaaaaatgacatggcaaatatgtacgtcttactccgtgctgtgtccactggtttacctcatatgattcaggagctgcaaaaccacatccatgatgagggccttcgagcaaccagcaaccttactcaggaaaacatgccaacactatttgtggagtcagttttggaagtgcatggtaaatttgttcagcttatcaacactgttttgaatggtgatcagcattttatgagtgcgttggataaggcccttacgtcagttgtaaattacagagaacctaagtctgtttgcaaagcacctgaactgcttgctaagtactgtgacaacttactgaagaagtcagcgaaagggatgacagagaatgaagtggaagacaggctcacgagcttcatcacagtgttcaaatacattgatgacaaggacgtctttcaaaagttctacgcaagaatgctggcaaaacgtttaattcatgggttatccatgtctatggactctgaagaagccatgatcaacaaattaaagcaagcctgtggttatgagtttaccagcaagctacatcggatgtatacagatatgagtgtcagcgctgatctcaacaataagttcaacaattttatcaaaaaccaagacacagtaatagatttgggaattagttttcaaatatatgttctacaggctggtgcgtggcctcttactcaggctccttcatctacgtttgcaattccccaggaattagaaaaaagtgtacagatgtttgaattattttatagccaacatttcagtggaaggaaacttacatggttacattatctgtgtacaggtgaagttaaaatgaactatttgggcaaaccatatgtagccatggttacaacataccaaatggcagttcttcttgcctttaacaacagtgaaactgtcagttataaagagcttcaggacagcactcagatgaatgaaaaggaactgacaaaaacaatcaaatcattacttgatgtgaaaatgattaaccatgattcagaaaaggaagatattgatgcagaatcttcgttttcattaaatatgaactttagcagtaaaagaacaaaatttaaaattactacatcaatgcagaaagacacaccacaagaaatggagcagactagaagtgcagttgatgaggaccggaaaatgtatctccaagctgctatagttcgtatcatgaaagcacgaaaagtgcttcggcacaatgcccttattcaagaggtgattagccagtcaagagctaggtttaatcccagtatcagcatgattaagaagtgtattgaagttctgatagacaaacaatacatagaacgcagccaggcgtcggcagatgaatacagctacgtcgcgtgatgtcgctctcctccagcgt

SEQ ID NO: 76089 - DNA, 2295 bp, Artificial Sequence
  derived and/or modified sequence
atgtatcgggtcacatggtctacgttctggctgaggttccagcactacacctgtacaatgagcttaaagccaagggtggttgacttcgatgagacttggaacaaactgctcaccacaattaaagccgtggttatgctagaatacgtcgagcgtgccacctggaacgacaggttttcagacatttacgccctgtgcgttgcctacccagaacccctcggcgagcgactgtacaccgagaccaaaattttcctggagaatcatgtgagacacctacacaaacgagtgctggaaagtgaggaacaagtgcttgtgatgtatcatagatattgggaggaatatagcaagggggccgattatatggattgcctctaccgatacctcaacacccagttcattaaaaaaaataagcttactgaagccgatttgcaatacgggtatgggggtgtggatatgaatgagcccttgatggagattggcgagctcgcgttggacatgtggagaaaattgatggtggagcctctgcaggccatcctcattcgtatgttgctgagagaaatcaaaaatgatcgcggcggtgaggaccctaaccagaaagtgattcatggcgtgattaactcttttgtgcacgttgaacagtacaaaaagaagttccccctcaaattctaccaggagatctttgagagtcctttcctgacggaaacaggggagtattacaagcaagaggcttcgaacttacttcaggagtcaaattgtagccaatacatggagaaagtgttaggccggttaaaggatgaagagattagatgccggaagtacctgcacccttcatcctacaccaaggtgatccatgagtgtcagcagcgcatggtggctgatcatctgcaattcctgcacgctgaatgccacaacattattcgccaagaaaagaaaaatgatatggctaatatgtatgtcctcctacgcgccgtcagcacaggccttcctcacatgatacaggaattgcagaatcatatacatgacgaaggcctgagggccacttcaaaccttactcaggagaacatgcccactcttttcgttgagtcagtcttagaggtgcacggtaagtttgttcagctgatcaatactgttctcaatggggatcagcacttcatgtccgccctggataaagccctgacaagcgtcgtcaattaccgcgagccaaaatcagtgtgtaaggcacctgaactgctcgcaaaatattgtgacaacctgctgaagaagagtgcgaaaggtatgactgagaacgaggttgaggaccggttgacgtcttttattacagtgtttaaatacatcgacgataaggacgtgtttcagaagttctatgcccgtatgctggccaaacgtctcattcacggactgagcatgagcatggattcagaagaggcaatgattaataaactgaagcaggcgtgtggatacgagttcacatccaagcttcataggatgtatacagacatgagcgttagcgccgatctgaacaataagttcaacaattttataaagaaccaggacaccgtaatcgacctcggtatttcattccaaatctatgtcctgcaggcaggagcctggccactaacacaggcacctagcagcacttttgccattccacaagaactggagaagtccgtgcagatgttcgagctgttctacagtcagcacttcagcgggcggaagttaacttggcttcattatctgtgtaccggagaggttaagatgaactacctgggcaagccatacgtggcaatggtgaccacttaccagatggcagtgctgctggccttcaataacagtgagactgttagttacaaggaacttcaggattccacccagatgaacgaaaaagaattaacgaagaccattaagtctctgctggacgtcaagatgattaatcacgattccgagaaagaagacatcgacgcagaatcgagcttttcgttgaacatgaacttcagttccaagaggacgaaattcaaaattaccacctcaatgcagaaggacacgccacaggaaatggagcaaacgcgcagcgcagttgatgaagaccgtaagatgtatttgcaggctgccatcgtccggatcatgaaagcacgaaaggtgctgaggcacaacgcactgattcaggaggtcatttcccaatcacgggccagatttaacccatctatctctatgatcaagaaatgtatagaggtcttgatagacaaacagtatattgaaaggagccaggccagcgcagacgagtattcttacgttgcttag

SEQ ID NO: 76090 - DNA, 2295 bp, Artificial Sequence
  derived and/or modified sequence
atgtacagagtgacctggagcaccttctggctgcgcttccagcactacacctgcaccatgagcctgaagccccgggtggtggactttgatgagacctggaacaagctgctgaccaccatcaaggctgtggtgatgctggagtatgtggagcgggccacctggaatgaccgcttcagtgacatctatgccctgtgtgtggcctacccagagcccctgggggagcggctgtacacagagaccaagatcttcctggagaaccacgtgcgccacctgcacaagagggtgctggagagcgaggagcaggtgctggtgatgtaccaccgctactgggaggagtacagcaaaggagctgactacatggactgcctgtaccgctacctgaacacccagttcatcaagaagaacaagctgacagaggccgacctgcagtatggctacggcggcgtggacatgaatgagcccctgatggagatcggggagctggccctggacatgtggaggaagctgatggtggagcccctgcaggccatcctgatccgcatgctgctgcgggagatcaagaatgacagaggaggagaggaccccaaccagaaggtgattcatggagtcatcaacagctttgtgcacgtggagcagtacaagaagaagttccccctgaagttctaccaggagatctttgagagccccttcctgacagagaccggggagtactacaagcaggaggccagcaacctgctgcaggagagcaactgcagccagtacatggagaaggtgctgggccgcctgaaggatgaggagatccgctgcaggaagtacctgcaccccagcagctacaccaaggtgattcatgagtgccagcagaggatggtggccgaccacctgcagttcctgcatgctgagtgccacaacatcatccggcaggagaagaagaatgacatggccaacatgtatgtgctgctgcgggctgtgtccacaggcctgccccacatgatccaggagctgcagaaccacatccatgatgagggcctgcgggccaccagcaacctgacccaggagaacatgcccaccctgtttgtggagagcgtgctggaggtgcacggcaagtttgtgcagctgatcaacacagtgctgaatggagaccagcacttcatgtctgccctggacaaggccctgacctctgtggtgaactaccgggagcccaagtctgtgtgcaaggcccctgagctgctggccaagtactgtgacaacctgctgaagaagagcgccaagggcatgacagaaaatgaggtggaggaccggctgaccagcttcatcaccgtcttcaagtacattgatgacaaggatgtgttccagaagttctacgccaggatgctggccaagaggctcatccacggcctgtccatgtccatggacagcgaggaggccatgatcaacaagctgaagcaggcctgtggctatgagttcaccagcaagctgcacaggatgtacacagacatgtctgtgtctgctgacctgaacaacaagttcaacaacttcatcaagaaccaggacaccgtcatcgacctgggcatctccttccagatctacgtgctgcaggccggggcctggcccctgacccaggcccccagcagcacctttgccatcccccaggagctggagaagtctgtgcagatgtttgagctgttctacagccagcacttcagcggcaggaagctgacctggctgcactacctgtgcaccggggaggtgaagatgaactacctgggcaagccctacgtggccatggtgaccacctaccagatggctgtgctgctggccttcaacaacagcgagaccgtgtcctacaaggagctgcaggacagcacccagatgaatgagaaggagctgaccaagaccatcaagagcctgctggatgtgaagatgatcaaccacgacagcgagaaggaggacattgatgctgagagcagcttcagcctgaacatgaacttcagcagcaagaggaccaagttcaagatcaccacctccatgcagaaggacaccccccaggagatggagcagaccaggtctgctgtggatgaggacaggaagatgtacctgcaggccgccatcgtgcgcatcatgaaggccaggaaggtgctgcggcacaatgccctgatccaggaggtgatcagccagagccgggcccgcttcaaccccagcatctccatgatcaagaagtgcatcgaggtgctgattgacaagcagtacatcgagaggagccaggccagcgcagatgagtacagctatgtggcctag

SEQ ID NO: 76091 - DNA, 2295 bp, Artificial Sequence
  derived and/or modified sequence
atgtaccgggtgacctggagcaccttctggctgcggttccagcactacacgtgcactatgagcctgaagccacgggtcgtggactttgatgagacgtggaacaagcttctgaccactatcaaggcagtggttatgttggaatatgtggagagagccacgtggaacgacagatttagcgacatatacgcactctgcgtagcttatcctgagcctctgggcgaaagactgtacactgagaccaaaattttcctggaaaatcatgttaggcacctacacaaaagggtactggagtctgaagagcaggtgctggtaatgtaccataggtactgggaagagtattccaaaggtgcagactatatggactgtctgtaccggtatctgaatacccaattcattaaaaaaaacaagctgacagaagcagatctgcagtacgggtacgggggcgtcgatatgaatgaacctctgatggagataggggagcttgctctggatatgtggcgcaagttgatggtggagccccttcaggctattctcattcgcatgctgctgcgggagatcaaaaacgaccgggggggtgaggatcctaaccagaaagtgatccatggagtgatcaactcattcgtgcacgtcgagcaatacaagaagaagtttcccttgaaattctaccaggaaatattcgagagtcctttcctgactgagactggcgaatactataaacaggaagcctctaatttgctacaggagtccaactgcagccagtacatggagaaagtactgggtaggctgaaggacgaggagatcagatgccgcaagtacttgcacccatcaagctatacaaaggtgattcacgaatgccagcagcgcatggtggctgaccacttgcagttcctgcacgcagagtgccataacatcatccgtcaagagaaaaaaaatgacatggccaacatgtacgtactacttcgggctgtgtcaactgggcttcctcatatgatccaggaacttcagaatcacattcacgatgagggcctgagggccacctccaatctgactcaggagaatatgccgacgctgttcgtggaatcagtactggaggtgcacggcaagtttgtccagctcattaatacagtcctgaacggggatcaacattttatgtctgccttggataaggcactgacgtcagtggtcaattaccgggagccaaaatcggtctgtaaagcgccggaattgctagcaaagtactgcgataacctgctgaagaaaagcgctaagggcatgacagagaatgaagtcgaggaccgcttgacgagctttatcacagtcttcaagtacatagacgacaaagacgtgtttcaaaagttctatgcccgaatgctggccaaaagattgattcacggcctcagcatgagcatggactccgaggaggctatgattaataagttgaaacaggcgtgtggttacgaatttacctccaagctgcatcggatgtataccgacatgagtgtcagcgctgacttgaacaacaagttcaataacttcataaagaatcaggacacagtgattgacctgggcatctctttccaaatttacgtgctgcaggctggggcttggcccctgacgcaggctccatcctctacctttgctatcccgcaggaactggagaagtccgtccagatgtttgagctcttttactctcagcatttcagcgggcggaagctgacctggctccattatctgtgtaccggggaggtgaagatgaactatctcggcaagccgtatgtagcgatggtaacgacctaccagatggcagttttactggctttcaataattcagaaacagttagctacaaagaactccaggacagcacccagatgaacgagaaggagctgacgaagaccataaaatctctcttagacgtcaagatgataaaccacgattccgagaaagaagacatcgatgccgagtcgtcgttcagcctgaatatgaatttttcctccaaacgtactaaatttaagatcaccacttcgatgcagaaggacactccacaagaaatggaacaaacacgttcggctgtggacgaggacagaaaaatgtatttacaggcagccatcgtgcgcatcatgaaagcacgaaaggtcctgcgacataatgcccttattcaggaagtcataagccagagtagggcccgcttcaatccctccattagcatgattaaaaagtgcattgaggtcttgatcgataagcagtacatcgaaagaagccaggctagtgccgatgaatatagctacgtggcttag

SEQ ID NO: 76092 - DNA, 2295 bp, Artificial Sequence
  derived and/or modified sequence
atgtatcgggttacatggtcgaccttttggctgcgtttccagcattatacctgtaccatgagcctgaagccccgagttgtcgatttcgacgagacatggaacaagctcctgacaactattaaggcagtggtgatgttggaatacgtggagagagctacctggaacgatcggttcagtgacatctacgctctgtgtgtcgcataccccgagccgctgggcgagcgcctttataccgaaaccaagatttttctggagaaccatgtgcgccacctccataagcgcgtgctggagagtgaggaacaggtgttagtcatgtaccataggtattgggaagagtattccaagggagctgactatatggactgtctttaccggtacttaaacacgcagtttattaagaagaataaactgacggaagccgacctgcagtacggttatggtggcgtcgatatgaacgagcccttgatggagattggcgaactcgctctagatatgtggagaaagctcatggtggagcccctgcaggcgatcttgattcggatgctcttacgcgagataaaaaatgatagggggggtgaggatccgaaccagaaggtgatccacggtgtgatcaatagctttgtacacgtcgaacagtataagaagaagtttccactgaagttctatcaggagatattcgaaagtccatttctgaccgaaacgggtgagtactacaagcaagaagcttctaatctacttcaggagtctaattgttcccagtatatggagaaagtgctcgggaggctcaaggacgaagagattcgatgccggaagtatctgcaccccagttcatacactaaggtgatccacgagtgccagcagaggatggtagccgaccatctgcaattccttcacgctgagtgccataatataatcagacaagaaaaaaagaatgacatggctaacatgtatgtgctgcttcgggcagtatcaacagggctcccccacatgatccaggagctgcaaaatcatatccatgacgaaggcctgagggccaccagtaatctaactcaagaaaatatgccaaccctgttcgtggagtctgttctcgaggtacatggcaagtttgtgcagctgattaacactgtgttgaatggagatcagcactttatgagtgctctggacaaggctcttactagtgtggtaaattacagggaaccaaaatcggtgtgtaaggcccctgaattactggctaagtactgtgacaatctgctcaaaaagagcgctaagggaatgaccgagaacgaagtggaagacaggctgactagttttatcacagtgtttaagtatattgacgacaaggatgtgtttcagaaattttacgctcggatgctcgctaaacgactcatccacggattatcaatgtccatggacagtgaagaggctatgattaacaagttgaagcaggcttgtggatatgaattcacttctaagctacaccgtatgtacactgatatgtcagtgtccgctgatttgaacaataagttcaataacttcattaaaaatcaggatacagtcatcgacttgggcatctcttttcaaatctacgtcttacaggctggggcttggccattaacacaggccccatcatctacctttgccatccctcaagagctcgagaaatcagttcagatgttcgaattattttattcacagcattttagtgggcgtaaactgacatggttgcattacctctgtacaggtgaggtgaaaatgaattatcttggtaaaccatacgtagccatggtgacgacttatcaaatggcggtgctcttggcctttaataattccgaaacagtctcatataaagagctccaagactcaacccagatgaacgagaaggaacttacaaagactattaaatcactcctggacgtcaaaatgatcaaccacgactcggaaaaggaggatatagacgccgagtcgagtttcagcctcaacatgaatttcagttcgaagcgaaccaagttcaaaattacaaccagtatgcagaaagataccccacaagagatggagcagactcggagcgctgtcgatgaggacaggaaaatgtatttacaggctgctatcgtgagaattatgaaggcccgaaaggtcctccgacacaacgcgttaattcaggaagttatcagtcagtcaagagctcgatttaaccccagcatcagcatgattaagaagtgcatcgaagtcctgattgacaaacagtatatagagcggagccaggcgagtgccgatgagtattcctatgtcgcgtag

SEQ ID NO: 76093 - protein, 216 aa, Artificial Sequence
  derived and/or modified sequence
MSLKPRVVDFDETWNKLLTTIKAVVMLEYVERATWNDRFSDIYALCVAYPEPLGERLYTETKIFLENHVRHLHKRVLESEEQVLVMYHRYWEEYSKGADYMDCLYRYLNTQFIKKNKLTEADLQYGYGGVDMNEPLMEIGELALDMWRKLMVEPLQAILIRMLLREIKNDRGGEDPNQKVIHGVINSFVHVEQYKKKFPLKFYQEIFESPFLTETG

SEQ ID NO: 76094 - DNA, 2787 bp, Artificial Sequence
  derived and/or modified sequence
attgctttccgggtggcgggggggatttggcagcagcggaagaaggagaccggagggtgtgtgttgggcaaagccggaggcagaggaggacgattgttttacggatcccgtgatcggcccgtccttctcccctttccccccctccctaccgcccctgtcccgccggggagcggcggcggccttggactttgctgtctttcctcgcggagacagatttcaacactacacttgcacaatgtctttgaaaccaagagtagtagattttgatgaaacatggaacaaacttttgacgacaataaaagccgtggtcatgttggaatacgtcgaaagagcaacatggaatgaccgtttctcagatatctatgctttatgtgtggcctatcctgaaccccttggagaaagactttatacagaaactaagatttttttggaaaatcatgttcggcatttgcataagagagttttggagtcagaagaacaagtacttgttatgtatcataggtactgggaagaatacagcaagggtgcagactatatggactgcttatataggtatctcaacacccagtttattaaaaagaataaattaacagaagcggaccttcagtatggctatggtggtgtagatatgaatgaaccacttatggaaataggagagctagcattggatatgtggaggaaattgatggttgaaccacttcaggccatccttatccgaatgctgctccgagaaatcaaaaatgatcgtggtggagaagacccaaaccagaaagtaatccatggggttattaactcctttgttcatgttgaacagtataagaaaaaattccccttaaagttttatcaggaaatttttgagtctccctttctgactgaaacaggagagtattacaaacaagaagcttcaaatttattacaagaatcaaactgctcacagtatatggaaaaggttctaggtagattaaaagatgaagaaattcgatgtcgaaaatacctacatccaagttcatatactaaggtgattcatgaatgtcaacaacgaatggtagcagaccacttacagtttttacatgcagaatgtcataatataattcgacaagagaaaaaaaatgacatggcaaatatgtacgtcttactccgtgctgtgtccactggtttacctcatatgattcaggagctgcaaaaccacatccatgatgagggccttcgagcaaccagcaaccttactcaggaaaacatgccaacactatttgtggagtcagttttggaagtgcatggtaaatttgttcagcttatcaacactgttttgaatggtgatcagcattttatgagtgcgttggataaggcccttacgtcagttgtaaattacagagaacctaagtctgtttgcaaagcacctgaactgcttgctaagtactgtgacaacttactgaagaagtcagcgaaagggatgacagagaatgaagtggaagacaggctcacgagcttcatcacagtgttcaaatacattgatgacaaggacgtctttcaaaagttctacgcaagaatgctggcaaaacgtttaattcatgggttatccatgtctatggactctgaagaagccatgatcaacaaattaaagcaagcctgtggttatgagtttaccagcaagctacatcggatgtatacagatatgagtgtcagcgctgatctcaacaataagttcaacaattttatcaaaaaccaagacacagtaatagatttgggaattagttttcaaatatatgttctacaggctggtgcgtggcctcttactcaggctccttcatctacgtttgcaattccccaggaattagaaaaaagtgtacagatgtttgaattattttatagccaacatttcagtggaaggaaacttacatggttacattatctgtgtacaggtgaagttaaaatgaactatttgggcaaaccatatgtagccatggttacaacataccaaatggcagttcttcttgcctttaacaacagtgaaactgtcagttataaagagcttcaggacagcactcagatgaatgaaaaggaactgacaaaaacaatcaaatcattacttgatgtgaaaatgattaaccatgattcagaaaaggaagatattgatgcagaatcttcgttttcattaaatatgaactttagcagtaaaagaacaaaatttaaaattactacatcaatgcagaaagacacaccacaagtgattagccagtcaagagctaggtttaatcccagtatcagcatgattaagaagtgtattgaagttctgatagacaaacaatacatagaacgcagccaggcgtcggcagatgaatacagctacgtcgcgtgatgtcgctctcctccagcgtggtgtgagaagatcattgccatcaccatttggtgtgttcctgtgggaaaaagcaggactgtgcctccataatttggtcatttggcagcccctgttttctgctgtttacaacatcaccagtgccacgtcatgagcgtcaaagaaaatgcctagagatatttcaagctcatgtcattatgacatttcttaaaactttattaaaagaatgagtgaagtattgctgaaaagtggaaattcggttgggtaccatgctttttctccccttcacgtttgcagttgatgtgtctttttttttttttttaatgtatcttaaaggacataaaatttaaaaacttaaatattgtaatatgacagataacctaataattgtatctacattaaaatgacaaacatgatactgctgcttgtcaaat

SEQ ID NO: 76095 - DNA, 4233 bp, Artificial Sequence
  derived and/or modified sequence
attgctttccgggtggcgggggggatttggcagcagcggaagaaggagaccggagggtgtgtgttgggcaaagccggaggcagaggaggacgattgttttacggatcccgtgatcggcccgtccttctcccctttccccccctccctaccgcccctgtcccgccggggagcggcggcggccttggactttgctgtctttcctcgcggagacagatttcaacactacacttgcacaatgtctttgaaaccaagagtagtagattttgatgaaacatggaacaaacttttgacgacaataaaagccgtggtcatgttggaatacgtcgaaagagcaacatggaatgaccgtttctcagatatctatgctttatgtgtggcctatcctgaaccccttggagaaagactttatacagaaactaagatttttttggaaaatcatgttcggcatttgcataagagagttttggagtcagaagaacaagtacttgttatgtatcataggtactgggaagaatacagcaagggtgcagactatatggactgcttatataggtatctcaacacccagtttattaaaaagaataaattaacagaagcggaccttcagtatggctatggtggtgtagatatgaatgaaccacttatggaaataggagagctagcattggatatgtggaggaaattgatggttgaaccacttcaggccatccttatccgaatgctgctccgagaaatcaaaaatgatcgtggtggagaagacccaaaccagaaagtaatccatggggttattaactcctttgttcatgttgaacagtataagaaaaaattccccttaaagttttatcaggaaatttttgagtctccctttctgactgaaacaggagagtattacaaacaagaagcttcaaatttattacaagaatcaaactgctcacagtatatggaaaaggttctaggtagattaaaagatgaagaaattcgatgtcgaaaatacctacatccaagttcatatactaaggtgattcatgaatgtcaacaacgaatggtagcagaccacttacagtttttacatgcagaatgtcataatataattcgacaagagaaaaaaaatgacatggcaaatatgtacgtcttactccgtgctgtgtccactggtttacctcatatgattcaggagctgcaaaaccacatccatgatgagggccttcgagcaaccagcaaccttactcaggaaaacatgccaacactatttgtggagtcagttttggaagtgcatggtaaatttgttcagcttatcaacactgttttgaatggtgatcagcattttatgagtgcgttggataaggcccttacgtcagttgtaaattacagagaacctaagtctgtttgcaaagcacctgaactgcttgctaagtactgtgacaacttactgaagaagtcagcgaaagggatgacagagaatgaagtggaagacaggctcacgagcttcatcacagtgttcaaatacattgatgacaaggacgtctttcaaaagttctacgcaagaatgctggcaaaacgtttaattcatgggttatccatgtctatggactctgaagaagccatgatcaacaaattaaagcaagcctgtggttatgagtttaccagcaagctacatcggatgtatacagatatgagtgtcagcgctgatctcaacaataagttcaacaattttatcaaaaaccaagacacagtaatagatttgggaattagttttcaaatatatgttctacaggctggtgcgtggcctcttactcaggctccttcatctacgtttgcaattccccaggaattagaaaaaagtgtacagatgtttgaattattttatagccaacatttcagtggaaggaaacttacatggttacattatctgtgtacaggtgaagttaaaatgaactatttgggcaaaccatatgtagccatggttacaacataccaaatggcagttcttcttgcctttaacaacagtgaaactgtcagttataaagagcttcaggacagcactcagatgaatgaaaaggaactgacaaaaacaatcaaatcattacttgatgtgaaaatgattaaccatgattcagaaaaggaagatattgatgcagaatcttcgttttcattaaatatgaactttagcagtaaaagaacaaaatttaaaattactacatcaatgcagaaagacacaccacaagaaatggagcagactagaagtgcagttgatgaggaccggaaaatgtatctccaagctgctatagttcgtatcatgaaagcacgaaaagtgcttcggcacaatgcccttattcaagaggtgattagccagtcaagagctaggtttaatcccagtatcagcatgattaagaagtgtattgaagttctgatagacaaacaatacatagaacgcagccaggcgtcggcagatgaatacagctacgtcgcgtgatgtcgctctcctccagcgtggtgtgagaagatcattgccatcaccatttggtgtgttcctgtgggaaaaagcaggactgtgcctccataatttggtcatttggcagcccctgttttctgctgtttacaacatcaccagtgccacgtcatgagcgtcaaagaaaatgcctagagatatttcaagctcatgtcattatgacatttcttaaaactttattaaaagaatgagtgaagtattgctgaaaagtggaaattcggttgggtaccatgctttttctccccttcacgtttgcagttgatgtgtctttttttttttttttaatgtatcttaaaggacataaaatttaaaaacttaaatattgtaatatgacagataacctaataattgtatctacattaaaatgacaaacatgatactgctgcttgtcaaataaaaaaaaaataaagaaatagaatgccttttttatgtggatggagtatcaggttgaccacaaaatatattgactcaaagcagctaatgcatctttagttgcgtttttatctgaatggtttaattcacttgtactcctatttaaatcctacatgaaaaatgtctagattattgttcttgactgcataggactgcattcagcataaagaatgctttatttttatggattagatatattggatctaaacattttgaatcttgaagatgtaattccatcagcagtttctggtggtgtgctactccacagacatcgcagagtgtgagcaggatgcttggtgacctcaagtctggcacagagagagcttttcattcaaaagttgtctttcttcggttgcataatccattaattctagcatagactagtaccctagctctgtggccttccctgagtcttaggaaatctatgataccaacatattccttctatatgcctcccctacctgttacccttacaaccctcctccaacagtttagatactagagtcactctcatcaatcacagatgtgcttagcaatgcataacctaaatacttttttaaaaaagaaaattgtacattgtactgggtgccacatatataaatcccattattttgtttattttatatatatatatatatataatatatatatatatatatctcaacagcagtgttaagagtactgcgatctattatcatatttattgtctatccacaccatcaccaccaccaccacacccctcctccctcaacatacaatttttctttattttaaaaaaaataagagacggggtttcgccatgtttcccaggctagtctggaacttctggcctcaagcaatcctatctctgtctcccaaagtgctgggattacaagcatgagccactgcatccatccaacacaaaatttttaaaatcggaatattttaaagcaaatcacacaaattatttcacttataatacttcagtaaggcctttaaaaaatccacagtgatattattactcctaacaaaaacaataattacttagtatcatctaatatgtggttcatatttaaatttgttgttttgagatgggtcttacaattggtttattcaattgcattttttctaactcgtgtctcaagtgttttaaaaatctactgaacttataatgacttatataatgtatttctcattttacctttcttccaaaagaggaaataatggcaaaccatataatattgtacattcactgtcaaaaagcaaacccttgttttgataacttgttgattgataaaagttttccaaattga

SEQ ID NO: 76096 - protein, 755 aa, Artificial Sequence
  derived and/or modified sequence
MLDCSDYVLDSRMNNPSETSKPSMESGDGNTGTQTNGLDFQKQPVPVGGAISTAQAQAFLGHLHQVQLAGTSLQAAAQSLNVQSKSNEESGDSQQPSQPSQQPSVQAAIPQTQLMLAGGQITGLTLTPAQQQLLLQQAQAQAQLLAAAVQQHSASQQHSAAGATISASAATPMTQIPLSQPIQIAQDLQQLQQLQQQNLNLQQFVLVHPTTNLQPAQFIISQTPQGQQGLLQAQNLLTQLPQQSQANLLQSQPSITLTSQPATPTRTIAATPIQTLPQSQSTPKRIDTPSLEEPSDLEELEQFAKTFKQRRIKLGFTQGDVGLAMGKLYGNDFSQTTISRFEALNLSFKNMCKLKPLLEKWLNDAENLSSDSSLSSPSALNSPGIEGLSRRRKKRTSIETNIRVALEKSFLENQKPTSEEITMIADQLNMEKEVIRVWFCNRRQKEKRINPPSSGGTSSSPIKAIFPSPTSLVATTPSLVTSSAATTLTVSPVLPLTSAAVTNLSVTGTSDTTSNNTATVISTAPPASSAVTSPSLSPSPSASASTSEASSASETSTTQTTSTPLSSPLGTSQVMVTASGLQTAAAAALQGAAQLPANASLAAMAAAAGLNPSLMAPSQFAAGGALLSLNPGTLSGALSPALMSNSTLATIQALASGGSLPITSLDATGNLVFANAGGAPNIVTAPLFLNPQNLSLLTSNPVSLVSAAAASAGNSAPVASLHATSTSAESIQNSLFTVASASGAASTTTTASKAQ

SEQ ID NO: 76097 - DNA, 2268 bp, Artificial Sequence
  derived and/or modified sequence
atgcttgactgctccgattatgtgcttgacagtagaatgaacaaccctagcgagacgtccaaaccttctatggaaagtggggacggtaacacgggtacccagactaacggactggacttccagaaacagcccgttccggtggggggagccatcagtaccgctcaggcgcaggccttcttaggacacctgcaccaggtgcagttagccggaacgagcctacaagccgccgctcagagcttaaatgttcaatcaaagagcaacgaggagagcggggacagccagcaaccctcccaaccttcgcagcagcctagcgtgcaagcagctattccacagacgcaactcatgctggctggcggacagattaccggtctgactctgactcccgcccagcaacagttactcctgcagcaggctcaggcccaggctcagctcctagcggccgctgttcagcaacatagcgcatcccagcagcactctgcagctggagctaccatcagcgccagcgctgccacgccaatgactcagatccccctgagtcagccaatccagattgcccaggatttgcagcaactgcagcagcttcagcagcaaaatctgaatctgcagcagtttgtgctcgtgcatcctacaacaaatctgcaacccgcacagtttataattagccagaccccgcaagggcagcagggacttttacaggcacagaacctcctcacacagctgccacagcagagtcaggctaatctgctgcagtctcagcccagtattaccctcacgtcacagcctgctactcccaccagaactatcgccgctacaccaattcagacgctgccccagtcacagagtacacctaaacggatagacactccttccttggaagagccgtcggacctcgaggaactggagcaatttgccaaaacattcaaacaacggagaattaaacttgggtttacccagggggacgtcggactggcgatgggcaaactttacggcaatgacttttcgcagaccaccatatcccgctttgaagctttgaacctgagctttaagaacatgtgcaagttgaagcccctgcttgagaagtggctgaatgatgcggagaatcttagctcagatagtagcctatcatccccatctgctctcaacagtccaggaattgaaggcctgtccagaaggaggaagaagagaacttcgattgagacaaatatacgggtggctctcgagaagtctttcctggagaaccagaagccaactagcgaagaaattaccatgatcgctgatcaactgaacatggagaaggaagtgatccgcgtgtggttctgcaaccgcaggcagaaagagaaaaggattaacccaccctccagtggaggcacatcctcctcccccataaaggcgatcttccccagcccgacgtccctggtcgctaccactcccagccttgtcacctcatccgccgctactaccttgacggtttctccagttttgccactgacatccgctgcggtcaccaatctctctgtgaccggcacaagcgacacaacaagtaataacaccgccaccgtaatatctacagcccccccggctagtagtgcggtgacaagcccctctctgtctccctctcctagtgcttctgccagcacatccgaggcaagcagtgcttccgaaacatcaacaacccagacaaccagcacacctctgagctcacctcttggaacttctcaggtcatggttacagcatcaggactgcagacagctgctgccgctgctctccagggagccgctcagcttcccgccaacgccagcctggcagcaatggccgcggccgccggtctgaacccatctctcatggcgccctcccagtttgcagcaggcggagccctcctcagcctgaatcctggcactctctccggcgccctctcccccgctttaatgagtaatagcactttagccactatccaagccctggcctcgggaggctcacttccaatcacaagtctcgatgcgacaggtaacctcgtctttgctaatgcgggtggcgcgcccaacatcgtcacggcccccctcttcctcaacccacaaaatctatcactcttgacttcaaaccccgtgtccctcgtgtctgctgctgccgcttccgccggcaattccgcgccggttgctagcctgcacgccaccagtacaagcgctgagtccatccaaaattccctttttaccgtggcctcagccagtggggctgcgagtacaaccactaccgcttccaaagctcaatag

SEQ ID NO: 76098 - DNA, 2268 bp, Artificial Sequence
  derived and/or modified sequence
atgctggattgcagcgactacgtactggatagccgtatgaataatccctctgagacctccaagcccagcatggagtcaggtgatgggaatacggggacacagaccaacgggttggatttccaaaaacaacctgtgcccgtgggcggagcgatcagcacagctcaggctcaggcctttcttggacatctgcatcaggtgcagctagccgggacttcactgcaggcggccgcgcagtcactcaatgtgcagagtaaaagcaacgaggaatcgggcgactcacaacagccgagccagccatcacagcagccatctgtacaagccgcaattccccagacccaactgatgttggctggcggccagattactgggcttacactgacccctgcccagcagcaattgcttctgcagcaggctcaggcacaggcacaactgctggcagctgcagtgcaacagcactcagcctctcaacagcattccgccgctggagcaacaatctccgcctcagccgccacaccaatgactcaaatacctttatctcaaccaatccaaatcgctcaggacctccagcagctgcagcagctacagcaacaaaaccttaacctccagcaatttgtactggtgcacccaacaacaaacctgcagcctgctcagttcattataagccaaacaccccagggccagcagggcctgctgcaggctcagaaccttctaacgcagctgccccagcagtcacaagctaacctattgcagtcccagccgtcaatcacattaaccagccagcccgccacaccaactcgcaccattgcagctacccccattcaaaccctgccacaaagccaatcaacacccaagagaattgacactccatcactcgaggagccctccgatctcgaggagcttgagcaattcgccaagacgttcaagcagcgcaggatcaagctcggatttacccaaggagatgtgggtttggccatgggcaagctctatggcaatgatttctcacaaacaactattagccgtttcgaggcccttaacctctcctttaagaacatgtgtaagttgaaacctctgcttgagaagtggttaaatgatgccgagaacttgtcctcagacagttcgctgagctcaccaagcgccctgaactcgccaggcatcgagggactctcacgacgaaggaagaaacgcaccagcattgagaccaacatccgagtcgcgttagaaaagtcatttctggagaaccagaaacccacatctgaggagataacaatgatagcagaccagctgaacatggaaaaggaggtgatacgcgtttggttctgtaataggcgtcagaaagagaaacgtataaaccccccttccagcggaggtacatcttcctctccgattaaggcaatctttcctagccccacatcactggtggccactactccgtcactcgtgacatctagcgccgccaccacactgacagtgtcccctgtcctgccgttaactagcgctgcagtgaccaatctgtctgtgacaggcaccagcgataccacctccaacaacacggccacagtcataagcactgcaccccccgcaagttcagccgtgacttctccctctctatccccctcacctagtgcatccgcttcgacaagcgaggcatcttcagcctccgaaacaagcactactcagacaacctcgaccccactgagtagccccctgggcacaagtcaggtcatggtaaccgcaagtggtctacagactgctgcagcagccgccttacagggcgctgcccagctcccagctaatgcatccctggccgccatggctgccgctgcagggctcaacccatcactcatggcaccatcacagttcgccgctggcggcgctctgctgtcattaaatccgggaaccctgtccggggctttgagccccgctctcatgtcgaatagtacactggcaactatccaagctttagcatctggagggtccctccctatcacctctctggacgctacaggaaatctcgtgttcgccaatgctggtggtgcaccaaacatagtgacagctccactgttcctaaacccacagaatctctccctattaaccagcaaccctgttagcctcgtatcagccgctgcggcatctgctggaaactcagctccggtcgcttcactccatgctacaagcactagcgctgaatccatccagaactcccttttcaccgtcgcttcagcctccggagccgccagcactacgaccaccgcttctaaggctcagtag

SEQ ID NO: 76099 - DNA, 2268 bp, Artificial Sequence
  derived and/or modified sequence
atgctggactgcagcgactatgtgctggacagcaggatgaacaaccccagcgagaccagcaagcccagcatggagagcggagatggcaacacaggcacccagaccaacggcctggacttccagaagcagcctgtgcctgtgggcggggccatcagcacagcccaggcccaggccttcctgggccacctgcaccaggtgcagctggccggcaccagcctgcaggccgccgcccagagcctgaatgtgcagagcaagagcaatgaggagagcggggacagccagcagcccagccagcccagccagcagcccagcgtgcaggccgccatcccccagacccagctgatgctggccggcggccagatcaccggcctgaccctgaccccagcccagcagcagctgctgctgcagcaggcccaggcccaggcccagctgctggccgctgctgtgcagcagcacagcgccagccagcagcacagcgctgctggggccaccatcagcgccagcgctgccacccccatgacccagatccccctgagccagcccatccagatcgcccaggacctgcagcagctgcagcagctgcagcagcagaacctgaacctgcagcagtttgtgctggtgcaccccaccaccaacctgcagcctgcccagttcatcatcagccagaccccccagggccagcagggcctgctgcaggcccagaacctgctgacccagctgccccagcagagccaggccaacctgctgcagagccagcccagcatcaccctgaccagccagcctgccacccccaccaggaccatcgccgccacccccatccagaccctgccccagagccagagcacccccaagagaattgacacccccagcctggaggagcccagcgacctggaggagctggagcagtttgccaagaccttcaagcagaggcgcatcaagctgggcttcacccagggagatgtgggcctggccatgggcaagctgtatggaaatgacttcagccagaccaccatcagcagatttgaggccctgaacctgtccttcaagaacatgtgcaagctgaagcccctgctggagaagtggctgaatgatgctgagaacctgagcagtgacagcagcctgagcagccccagcgccctgaacagccctggcatcgagggcctgagcagaagaaggaagaagaggaccagcattgagaccaacatccgggtggccctggagaagagcttcctggagaaccagaagcccaccagcgaggagatcaccatgattgctgaccagctgaacatggagaaggaggtgatccgggtgtggttctgcaacagacggcagaaggagaagaggatcaacccccccagcagcggcggcaccagcagcagccccatcaaggccatcttccccagccccaccagcctggtggccaccacccccagcctggtgaccagcagcgctgccaccaccctgactgtgtcccctgtgctgcccctgaccagcgctgctgtgaccaacctgtctgtgacaggcaccagtgacaccaccagcaacaacacagccaccgtcatcagcacagcccccccagccagcagcgctgtgaccagccccagcctgagccccagccccagcgccagcgccagcaccagcgaggccagcagcgccagcgagaccagcaccacccagaccaccagcacccccctgagcagccccctgggcaccagccaggtgatggtgacagccagcggcctgcagacagctgctgctgctgccctgcagggcgccgcccagctgcctgccaatgccagcctggccgccatggctgctgctgctggcctgaaccccagcctgatggcccccagccagtttgctgctgggggcgccctgctgagcctgaaccctggcaccctgagcggggccctgagccctgccctgatgagcaacagcaccctggccaccatccaggccctggccagcggcggcagcctgcccatcaccagcctggatgccaccggcaacctggtgtttgccaatgctgggggcgcccccaacatcgtgacagcccccctcttcctgaacccccagaacctgagcctgctgaccagcaaccctgtgtccctggtgtctgctgctgctgccagcgctggcaacagcgcccctgtggccagcctgcacgccaccagcaccagcgctgagagcatccagaacagcctcttcaccgtggccagcgccagcggggccgccagcaccaccaccacagccagcaaggcccagtag

SEQ ID NO: 76100 - DNA, 13937 bp, Artificial Sequence
  derived and/or modified sequence
atggcggacggaggagcagcgagtcaagatgagagttcagccgcggcggcagcagcagcagactggaaaagtaagaagagctttcctgcctttttaattaccaaactactctcagttttcaatgaatcagttcaaagaaagaatgcagtctttctatacctgactcaagaatgaacaatccgtcagaaaccagtaaaccatctatggagagtggagatggcaacacaggcacacaaaccaatggtctggactttcagaagcagcctgtgcctgtaggaggagcaatctcaacagcccaggcgcaggctttccttggacatctccatcaggtccaactcgctggaacaagtttacaggctgctgctcagtctttaaatgtacagtctaaatctaatgaagaatcgggggattcgcagcagccaagccagccttcccagcagccttcagtgcaggcagccattccccagacccagcttatgctagctggaggacagataactgggcttactttgacgcctgcccagcaacagttactactccagcaggcacaggcacaggcacagctgctggctgctgcagtgcagcagcactccgccagccagcagcacagtgctgctggagccaccatctccgcctctgctgccacgcccatgacgcagatccccctgtctcagcccatacagatcgcacaggatcttcaacaactgcaacagcttcaacagcagaatctcaacctgcaacagtttgtgttggtgcatccaaccaccaatttgcagccagcgcagtttatcatctcacagacgccccagggccagcagggtctcctgcaagcgcaaaatcttctaacgcaactacctcagcaaagccaagccaacctcctacagtcgcagccaagcatcaccctcacctcccagccagcaaccccaacacgcacaatagcagcaaccccaattcagacacttccacagagccagtcaacaccaaagcgaattgatactcccagcttggaggagcccagtgaccttgaggagcttgagcagtttgccaagaccttcaaacaaagacgaatcaaacttggattcactcagggtgatgttgggctcgctatggggaaactatatggaaatgacttcagccaaactaccatctctcgatttgaagccttgaacctcagctttaagaacatgtgcaagttgaagccacttttagagaagtggctaaatgatgcagagaacctctcatctgattcgtccctctccagcccaagtgccctgaattctccaggaattgagggcttgagccgtaggaggaagaaacgcaccagcatagagaccaacatccgtgtggccttagagaagagtttcttggagaatcaaaagcctacctcggaagagatcactatgattgctgatcagctcaatatggaaaaagaggtgattcgtgtttggttctgtaaccgccgccagaaagaaaaaagaatcaacccaccaagcagtggtgggaccagcagctcacctattaaagcaattttccccagcccaacttcactggtggcgaccacaccaagccttgtgactagcagtgcagcaactaccctcacagtcagccctgtcctccctctgaccagtgctgctgtgacgaatctttcagttacaggcacttcagacaccacctccaacaacacagcaaccgtgatttccacagcgcctccagcttcctcagcagtcacgtccccctctctgagtccctccccttctgcctcagcctccacctccgaggcatccagtgccagtgagaccagcacaacacagaccacctccactcctttgtcctcccctcttgggaccagccaggtgatggtgacagcatcaggtttgcaaacagcagcagctgctgcccttcaaggagctgcacagttgccagcaaatgccagtcttgctgccatggcagctgctgcaggactaaacccaagcctgatggcaccctcacagtttgcggctggaggtgccttactcagtctgaatccagggaccctgagcggtgctctcagcccagctctaatgagcaacagtacactggcaactattcaagctcttgcttctggtggctctcttccaataacatcacttgatgcaactgggaacctggtatttgccaatgcgggaggagcccccaacatcgtgactgcccctctgttcctgaaccctcagaacctctctctgctcaccagcaaccctgttagcttggtctctgccgccgcagcatctgcagggaactctgcacctgtagccagccttcacgccacctccacctctgctgagtccatccagaactctctcttcacagtggcctctgccagcggggctgcgtccaccaccaccaccgcctccaaggcacagtgagctgggcagagctgggctgccagaagcctttttcactctgcagtgtgattggactgccagccaggttaataaactgaaaaatgtgattggcttcctctcgccgtgttgtgagggcaaaggagagaagggagaaaaaaaaaaaaaaaccacacacacccatacacacataccagaaaaagaaagaaaggatggagacggaacatttgcctaattttgtaataaaacactgtcttttcaggattgcttcatggattggagaactttctaaccaaaaattaaaaaaaaaaaaaaaaaaagaaacaaaaaaatcaaaaacaaacaaaaataagtgaaaggactacttatcatttccagcagtcatgatgacaagttaaggtgggttaccaattccaatataggaaggggatttcttgtttgtctaaatttctttttttcttaaaaaaaaaaaatcatttttatgggtctgttgtacaggccattaagtcataacaaggtgtttataatcgtatcaattgtgttgggggttcctttcttaactggtacaatttaggcaggcctgtattactgtattattattgttgttgttgttattgttttatatatatagtttggacatgtttattatctcttgctcctggatcctatttcagtgagctcccacactgtggggagggagggttttggggtaaggggagacttctgttcttaactgtggggaatgttcttgctggtttccttatccttgatgactcttacagaggtgctagaaaattattttcttttgccacttatgcaagaggcttggtgcagaagctgaaggcagtgtgtgcaaacactcccattccacacacgccccttcccctccccacatcaggtggtgcctttggagcacttttgtgtaggaaggaattcctgctgaactgtagctctcactcacccccaaatcattgaatgaccctgaggcccagttcctgtggtgcaacagtgctgctttctgctactttcaatgggaacagctgtacatgttgcagggcaggatttggttcccaagagcaaagactactgcagacacctgacttggtggttctcctgatttcttatctcctgaaaaatgctcctgctgttggtgtgtttgtttgtttgttccattttgtggaagtttttcatccaaactttaactaacttggcaaagaaaaaaaactgacttactgaaattgggaaacttttcccttcttttattttctaaaggaattctactagactattttccattgataatatatacaaaagaggtgtgatgagaagggtataaggttaccaccttttcctctagagagccacagacttcctttccactggatggtttataaattcctctaaccctgagattcttcttggttctctgactaaaggaggcacttattagccgggctgggatctgtagaacctttgaagaaggactttgagcaggaactttgcacacaccttaagtgtctccttggtttgttcatgatgctcctgctaggtaggtctaaatggcaatacacatctctttattcaatgtagaaagtaattagctctgtaattattttcagggtgtttgtagactatataaatgagcccattgaaaaggaagagtttgtgaaagtggatgaagaggaataagggtaacttggagattaaattcctttttttgtcagtgtactgttgttatgccatctgtaccaaaaaattttccaaaagactggatcactgcagtgcagctcatctaagttccccttcttattggagttaaaggttcccatttggtggctgtgggtgcttgcttaaatctctggtggtcccaagactgcactttttctccctttcgagctggggatgtagagagaacttacaggtgatttttattctgattgcttttgtttgtgtccacaagggagcttggattctgtgtacttgtctctttcccattgtccagtaaggcagtaaatacagacacaatgtgtacttttgtgtgtgattcaagtgggagacagtctgttaaaaggtcagaaacattttagtcccctttaaaatatttcttttagtttatttctatcgtgttttatttcacagatatttaattaccacccctaaatttcctcctcttacccttcaccttccctaaaatccttccaaaatcagtgaactgcaagcagggaaactaacaaatgtccattcaccctttttgtgtggtgtgtttttttatgttttgttttgttttttaactaagcttgaaccaaagtcaatttttagcaagctgctgtactaatggactagttgataacgtgcagttcagacacatcgaggagatagatgctactgacaatttctttttcatttgtctttattaattttatatgaaagttgctgcttgtttttaatcttttatgttggtaaattgtgatatcctctgggcagacattaacttgatgtttaactagtttattaggttggtgtgtaaatagaatgacaatgtcaattactaatttctctcctctccattcactttttctctgttgtagttaaatttaatcttctatcctgacttgacatctctacctttagtctgtggaaatgattttagggctatcagtaatgctgtagctgcccataataatgagtccctcccttgggagtggtgaaacttagaaggaaggattcagggagggaaatgctggtacccagtatactggattagaagttatagcattaatttctcaaaattgctaccaaaggaagtgtggagtcccaagggactcaagctcagtgaggtaagacaaagggcaaggaaaggctgtttgggtggtttttttttccccacatatggtttagaaaatgatccctttcccaaacaaaactcaccaacagactttaatattagaaaagatactaagctttaaatgtcaatacagtggtcttttattccctgccctgtctatattttctactcaatttgggataaggggattttatgtgaagcacttgatgagggtagaccagcataaaaaatctgtttaaaagaagaaataatctttaggaaaagataaatctttagataaaaataaatttttttctctttttttacttatttaaaaataagttgtgaaatgaaaggtacatttacacatgtacacacgaaacactaatatagctttttggtggttgtttagtttaaaatcaactccctatccatcatccctagatattctacttatcgtattgcttcatgaacaccttagtcattttttactttacgtatatatttttttatcatctcaagaaatgcattttgaattgaatgaactatcttctaagctaagatactcaaatttaacttttagccaccttatatgggagagcctggaaactaaaggggaccagggaccatttgaccaaaagaggtgtttggtggagtttctgcatttcaaagaagaaaggccagataggtcatcacaattcattgtattattctttttttttccccttaatgtttatgcaaattttattttatatttctgaatttggttagcacatactaagccaaagactattctaaatgcatttatagtgaatactatgtatgcccatggtaatgggtcctccctaaggagtggtgaatgtaattgtgtgaatcctgcttatcacaagtggtgcaatttggtcataaactttatttataccctgtatacatctgaataacagagcagaaagacctaaaaaagggcttctcacaggaacaatattactatgttgttctaagaaaaaataagttgagtgctgtattagtttaagtgtttctaaagttctataggcagcattttagaattaagaattgtgtatatccattaactgatataattcacatgtccttttatttgttatcagaaagatcaatactatcccaatttattcaacttgttacccaagaaatggaaccaaaggaatccaactttcattttgtgtagaatcatacctacttatacttaatgctagcactgtaagaaataagtcttttttgtttaaaaaagggaagataagattaaagattcttagtgagatcatcttgccaatttgttgtacatctctcattcattgttgggggaaaaaaaagcacaactatacctctttaatgttattttcttccattatccctcatttatttggaaagataagggaaaccttgtctgtattatccagaagcacagatatttgcttgacacaatatttaaattcagcccaatctttaacattaaaaaattttctttttaacttgctggaaaagttggatacattggcaaatatagggaattcatgtcttttttttttttttttttctggtcttgctctgttgcctaggctagagtgcaacggcatgatctcggctcactgcaacctctgcctcccgggttcaagcaattctcctgcttcagcctcccaagtagctgggattacaggcgcccaccaccgcacccggctaatttttgtatttttagtagggacgggatttctccgtgttggccaggctttttgaactcctgaccttaggtgatctgcctgccttggcctcccaaagtgctgggattacaggtatgagccactgtgcccatcctcatgtcaatttttaaagtgataaatcctgatattatacattgcaattagtgtagaataaacgcttggcttatagaactctctgttcttagtctaaagctgttcccaaaccaggtcatcctcacgaaacattcttgaccaagaaaaaagataaggtcattgagataggaagacagaggaaaagcctcttgctgttgtttcttcccaagaaaggagaagccctgccagggagaagtcagtagtattgctgactcactgtatcactgagtgtagggtgtggtagcaaggaggaggcaggggattcacgctgacaggtggctctggcctggctcttggggggccttctgaagaccagtctgcagtttgaggaagggccccaacaattcatttggagagcttggccaaatactttctcattaaatcagcacctaaacttgatgaacttaaagtttgtttattagagttgaaaacattaaaagatgactgatactaatgggagaaaaatactaaagacccaaaatttaaaattttccaaaatggacaagaattgatgggttaatttgctcataactgatatgagtttgcttttatgtgtgtgtggaaagcatttaatgtgtgatgctgttcatagtcctggctatttgatgtcattttcagttttacaacattttgaggatgacactttataaaatggtaaatctttctcagcgtttacaaacttggcttttgagaagggaaaaatcctctttgctatttctgtaagaagaataactgagatcagctattatataggtttgcatggatggtgtccacaatacaaatgtaaacttggacaggaataggataaataaattgctttcatcataaaggccaatcatccatttcttagtccaaggagattaaatataaataggacacccctgagatttccagtaaggtatttgaaaggattccactgggagggcagggaatatattttttctcagagcatccagtttgtacccagttttctatatggtttgtgaactgtagcttttaaaaaaaaattttgtagttttcttctaaccttattcattaagtagttccttgttttggcccttctactcttggccttagctaaaagcagtaaatgtgagtgaattttatgttgattatgtcacctggatctcctttccttcccttctttttctcattgaatggtggtaccttaatttgggtaacagctagcttctggcaccttcataaaatacctcagaatagcttagcattgttgcaaaactggttttaaactaaaaaccaaataaataagtgaaaaaattttataaatagtggaaataattctagctgtagcatttagttgaactaatgtttattatgatcgataaacaagattgatgctgtatgtatttgggatcctgtttataggttacaatttatagggttagggagggttgggtgggggaagaggagatgttgattatgttagaaggaaaacattgctcgtgtgtgtgtttgttttttcttatatctgtcttgccaaaggaaacttgattttccctgtgattggctttggcctctgtggtctggtctgcagcagtgtgtggtggcatgcaggtaacatatggggtgtccagtaggttcagggaccctgagggtgcatttacatcccttcctatggttgcccatgccccccagaccctgccaacctctcctaatgattcattacctctgtacatagcaaaagcataggcaaaggatgaatgcgtgaatgcctggatgtgcagttgagaaacagaggcagacatagacatgcaccaattaatttggagccaagaggtgagtgattgatgtatcttaaatctaggaaagttaaagtgaaacaggttctttgtgttgccctctgtcaagttactgaatgttgtgctaataacacaacactttaaaaccttacttacttttctcataccaaggctagttctttctagaccaaaaacacaaacaggataaaaagcaaaccaagaagttgaaagctaacctgcccacctcacccctgtgatacaaagtgtgaaccttaaggattagttggtgggattgaggagagaattattcttggtgggaacatgaatgagaaatgatgctggcttaggaaaaatcacaagccctttctgcccatactctgggacaaactttcttggctccctgagttcggatatagactgtatctctagaaaggctatttttttaaataaatgatcccacagaacttaagtgggatttggtttagataccaaagacactgctaatgtcattgcttatccttaagttttcaaaacaggcagagggaataggagcaaaaagccaaaatttggaaaagctttactttatctctttccttcccttttccccttttcccagtcccctgctttttgaaggaagtcttcttggttatcctggctttggaaaagagatttattttgttttgctctgctggctctttaaagatggatagttgctcaatctagcagtgatgttcttggaattgctgagaaatttggggagggcaaaagataggggtagaattttttcattatttccctttatctaatacttttaaatagaaccaacacagcctatatgagttcagacaatatttagatgtggtatctccatctgtctcctgtaaaagataagaattttcaagaacaggattacgtggaaaaccaaaagatcttcccttactctcctataaatgttttgttccaaatgtttttatatatgggctctagggagtcaggtagttcattgtttcggtgtactattgataggacacagaaagggagagagggtaaagaaatgtatcactctctgaatattgcatcaaaaatgattaggttgcagaacttcatgaaagctttactaataatcttattgttctgacattatgtaaaggtggtattaatattgtatgacttgtcaaagtgctagataggtttataagtaggtaatagggatgttgaagattagagcacttgaaacagaagttctgggaaaacaaggtgtgtgtaatggaacaccactttgagcacagaaacaaaggtcccttggacctggtagggaagatgtgatttatgattgtttctgtgtccctgtatctgcccaccctgcacagggctccaccacccagggccaccttctggtttaaacccaggacactgtcaaaaagttaagaccccaaaactaatttactgtaaaaaacattgaggactgctgcaaagttttcccttgttttctttgtgtacttgttcatcattgtataagttagccacagcttcacaagagcagcttaaggcttctttcataaattggcagtggcattgagttctcaaacattatatcccaaagtctgcaggcagacagctggatacagcgctgtgtataaatgagacgtccaaacacttgagtttcttaagattgggatctctttcaaatgaaaaaggacagagccaagtagagaaaagactttgtgctcccacccagccttaatgagtctcatggtctaaaagtataggaagaaatgaaatgcactttcagaagctaaaatgacagtgtctgctacaaaaggctgtagttgtaggcagtcggggatgccatgtccttggttccattcctgcgtgagtctgcagaaggcacacactttgtaagagtagagtggactagtgccagcctgaataggtttaaaactgcaaacagttggagaacatggaacaggttggtgcaggaagcctaagattttgcaatcatattataacattggcttttgacaacataaatgttgtatcttccctaaggtcaggtcggggaaagaaagacttccagcttcttacctctgcgtgcatgggcacgtgtgcattgctcagtccgcaggaggtctcactccgcaggaaacgctctcctcccgcataagtctgtacttccatcccctcatctgtggtagtagtgaaggctaggtgagtaagcgtgggctgttctacccaccagaagtccaggagctgttgtatacctcatttctaactcgtgaccgagtgacttgctttaactttctcgaaatcctacagagttgccaagtctgccctccctcctcagtcatgttaaactctggcctatagcatcatgggacctgtagcctagggtgggaccccctaaagcctctgaatgtcgctgcttaaaagctactgcaaactgagggcaaattgcaatcttctattcctttttgttgcaaggggtcttcacaggtctcttaacatctgctttccctgccaccctgcctttaggggctggccagctatccacacccctaacccaccctgtgtttctgacagctggccacacgtcaacttctgtacttgccttttccttggtggggtagaggccaaccccttctcctctgaggcctcagggttctgtttcttttcaggactttgggtagaagggaagacaccaaaggctcctttaagctgactgctgcatacacatttcactttttttcctttgacatgaccaaaaatatccaaatatttaagtttattattattattattattatttgacaatcttatatccaatgggctctctagaagctgcatccccagccctttcaccttttctttgaatgtagttcccaaccttcaattcccacccctaatgctgacaaaaagcttagccaggtcatgatactgctgctataagccaggggagggtggtttctttgttttgttttgttttgttttgtttttcaaatttccagccaaaaccaaagatttcttaatgattgtataaactcaaaacaaacaaaagaaccaaagaaaagggaagtcttcagcatcagtccagtctgtggtgtcctggcacttagaagagtgaggccagggaaggtggggcggggggaccctctgactggatcagaaagggcaggcaagctgcttaccaccttccagggtccagcacaggtgcatgcccctagctttggccctcacaaacttgtgagcatgccctgaaacaaattggcatttcagattttccaaaacaaaagtcaaaaaaccccatcaccaccatcatccaccctacaccaaccagggtcactatggggacttagcacagggcctagggagggtgggagctgctgctggactggcccgaggactccacagagtgggggacgttgaagacactggcgcacgattggctgctctgctgggtgctttaacctctggggctgggcgaatgcacgccacggtgcccttctgagcctttttttcttttcctgtactggaactgcttggaagtggctgtcctgtttgtgagaaaacatgcagaaagattatcaagcttttcatttctctttattgtagttttctttcctttttgcagcaccactgtgcaactatgcattgtacttcacaaccttttgtgctaggtagatgcctgtgactttttaacttggggggtggggggattgcaaatgaaggaactttttacatggatctttttaatctcagttggttgggggaggggggtacttggttcttgggtcacacaagctctatcccaaagcaaaatccaaatgttaataatattagcctgatgcagataccaaagataatttctttcctgcagaaccttagactcgtgtattaagtacgattacccagcacttgcattagtctaacctcagtaattccaaagcttagatgtatattttggtatatttctgggatattaaaaaaaaaatgtcgtttaacttcttgtttgtttcagtgtaatgctcttaaagtcatagcatgaaaataattgaactgtcctattcttagtagtttgaaataatagtatttttgtatgttttgggtgtgtctatgtatgtattaacataacagttttcactgcctaggtgttcataataaaaaagaaaatgaaaaaagttctgagtgtacataatattcaataataatctcccaccaggtgtcaatttagattgcatattcctcattactgttcccaactgggattttgttttcttttaaagagacagtgatcgtgtttttctaaagatgttttctttctctctttcaatatcttaactcactttttttttcttccttttttgtcttaattattaattcaggggtgtttgtccactgttgtcaaaggaggggcacaaggggaattggcccccggcctcctagaactttttgttttatgtactttaaaatgtgagtttgagttcttctttgtggaaacttaagatgtggtgtaaatgattctttccaaaattgtccagcagcttgaatgaggcagtgacaattctgaggtggtttattgggagtccttctacatttctcttagataactctgcactctgggtggctattgtgtagccttactgccccagagtgcctgttagccaaatatttcccctctgataggaatattttctaagaatcagctgataacttgcgtgctggaccttgttatctgtgcccctgggagacacacgttttcttggttttgaaaacctgaaacacaggcaactttacattttggggaattagctgatgcctcctgaagcctgaggaggtggcggggaatatgagcggtgctgtctctctcaaaagtgccctttagatgattccccctcctagggctgcctgcaggggctgtaggcttgggaaagattgtgtaggtgacagtgaatcagaatgaagtggtagattttgtgtagatgcatttgtctgctgtaattttttatatatatattaaacttactgtaactgtacagttcatttctgttgtaaaacatcattaaaccatcttccaagtgttttcacattg

SEQ ID NO: 76101 - DNA, 14038 bp, Artificial Sequence
  derived and/or modified sequence
aaactcctctgagcaactgaagtttccttattcagttgaagattgctatggtgtaacagaagttgtattttgcttttccccttaatccactttccaccctacgcaacccccctcttttcgcttaagaacatactgtagatttgttagaaatagtagtaccttctttccccaccccaaactgctacctgtttcttccttgtttggactctctgctcctctagaagatttcacagcaatgctggactgcagtgactatgttctagactcaagaatgaacaatccgtcagaaaccagtaaaccatctatggagagtggagatggcaacacaggcacacaaaccaatggtctggactttcagaagcagcctgtgcctgtaggaggagcaatctcaacagcccaggcgcaggctttccttggacatctccatcaggtccaactcgctggaacaagtttacaggctgctgctcagtctttaaatgtacagtctaaatctaatgaagaatcgggggattcgcagcagccaagccagccttcccagcagccttcagtgcaggcagccattccccagacccagcttatgctagctggaggacagataactgggcttactttgacgcctgcccagcaacagttactactccagcaggcacaggcacaggcacagctgctggctgctgcagtgcagcagcactccgccagccagcagcacagtgctgctggagccaccatctccgcctctgctgccacgcccatgacgcagatccccctgtctcagcccatacagatcgcacaggatcttcaacaactgcaacagcttcaacagcagaatctcaacctgcaacagtttgtgttggtgcatccaaccaccaatttgcagccagcgcagtttatcatctcacagacgccccagggccagcagggtctcctgcaagcgcaaaatcttctaacgcaactacctcagcaaagccaagccaacctcctacagtcgcagccaagcatcaccctcacctcccagccagcaaccccaacacgcacaatagcagcaaccccaattcagacacttccacagagccagtcaacaccaaagcgaattgatactcccagcttggaggagcccagtgaccttgaggagcttgagcagtttgccaagaccttcaaacaaagacgaatcaaacttggattcactcagggtgatgttgggctcgctatggggaaactatatggaaatgacttcagccaaactaccatctctcgatttgaagccttgaacctcagctttaagaacatgtgcaagttgaagccacttttagagaagtggctaaatgatgcagagaacctctcatctgattcgtccctctccagcccaagtgccctgaattctccaggaattgagggcttgagccgtaggaggaagaaacgcaccagcatagagaccaacatccgtgtggccttagagaagagtttcttggagaatcaaaagcctacctcggaagagatcactatgattgctgatcagctcaatatggaaaaagaggtgattcgtgtttggttctgtaaccgccgccagaaagaaaaaagaatcaacccaccaagcagtggtgggaccagcagctcacctattaaagcaattttccccagcccaacttcactggtggcgaccacaccaagccttgtgactagcagtgcagcaactaccctcacagtcagccctgtcctccctctgaccagtgctgctgtgacgaatctttcagttacaggcacttcagacaccacctccaacaacacagcaaccgtgatttccacagcgcctccagcttcctcagcagtcacgtccccctctctgagtccctccccttctgcctcagcctccacctccgaggcatccagtgccagtgagaccagcacaacacagaccacctccactcctttgtcctcccctcttgggaccagccaggtgatggtgacagcatcaggtttgcaaacagcagcagctgctgcccttcaaggagctgcacagttgccagcaaatgccagtcttgctgccatggcagctgctgcaggactaaacccaagcctgatggcaccctcacagtttgcggctggaggtgccttactcagtctgaatccagggaccctgagcggtgctctcagcccagctctaatgagcaacagtacactggcaactattcaagctcttgcttctggtggctctcttccaataacatcacttgatgcaactgggaacctggtatttgccaatgcgggaggagcccccaacatcgtgactgcccctctgttcctgaaccctcagaacctctctctgctcaccagcaaccctgttagcttggtctctgccgccgcagcatctgcagggaactctgcacctgtagccagccttcacgccacctccacctctgctgagtccatccagaactctctcttcacagtggcctctgccagcggggctgcgtccaccaccaccaccgcctccaaggcacagtgagctgggcagagctgggctgccagaagcctttttcactctgcagtgtgattggactgccagccaggttaataaactgaaaaatgtgattggcttcctctcgccgtgttgtgagggcaaaggagagaagggagaaaaaaaaaaaaaaaccacacacacccatacacacataccagaaaaagaaagaaaggatggagacggaacatttgcctaattttgtaataaaacactgtcttttcaggattgcttcatggattggagaactttctaaccaaaaattaaaaaaaaaaaaaaaaaaagaaacaaaaaaatcaaaaacaaacaaaaataagtgaaaggactacttatcatttccagcagtcatgatgacaagttaaggtgggttaccaattccaatataggaaggggatttcttgtttgtctaaatttctttttttcttaaaaaaaaaaaatcatttttatgggtctgttgtacaggccattaagtcataacaaggtgtttataatcgtatcaattgtgttgggggttcctttcttaactggtacaatttaggcaggcctgtattactgtattattattgttgttgttgttattgttttatatatatagtttggacatgtttattatctcttgctcctggatcctatttcagtgagctcccacactgtggggagggagggttttggggtaaggggagacttctgttcttaactgtggggaatgttcttgctggtttccttatccttgatgactcttacagaggtgctagaaaattattttcttttgccacttatgcaagaggcttggtgcagaagctgaaggcagtgtgtgcaaacactcccattccacacacgccccttcccctccccacatcaggtggtgcctttggagcacttttgtgtaggaaggaattcctgctgaactgtagctctcactcacccccaaatcattgaatgaccctgaggcccagttcctgtggtgcaacagtgctgctttctgctactttcaatgggaacagctgtacatgttgcagggcaggatttggttcccaagagcaaagactactgcagacacctgacttggtggttctcctgatttcttatctcctgaaaaatgctcctgctgttggtgtgtttgtttgtttgttccattttgtggaagtttttcatccaaactttaactaacttggcaaagaaaaaaaactgacttactgaaattgggaaacttttcccttcttttattttctaaaggaattctactagactattttccattgataatatatacaaaagaggtgtgatgagaagggtataaggttaccaccttttcctctagagagccacagacttcctttccactggatggtttataaattcctctaaccctgagattcttcttggttctctgactaaaggaggcacttattagccgggctgggatctgtagaacctttgaagaaggactttgagcaggaactttgcacacaccttaagtgtctccttggtttgttcatgatgctcctgctaggtaggtctaaatggcaatacacatctctttattcaatgtagaaagtaattagctctgtaattattttcagggtgtttgtagactatataaatgagcccattgaaaaggaagagtttgtgaaagtggatgaagaggaataagggtaacttggagattaaattcctttttttgtcagtgtactgttgttatgccatctgtaccaaaaaattttccaaaagactggatcactgcagtgcagctcatctaagttccccttcttattggagttaaaggttcccatttggtggctgtgggtgcttgcttaaatctctggtggtcccaagactgcactttttctccctttcgagctggggatgtagagagaacttacaggtgatttttattctgattgcttttgtttgtgtccacaagggagcttggattctgtgtacttgtctctttcccattgtccagtaaggcagtaaatacagacacaatgtgtacttttgtgtgtgattcaagtgggagacagtctgttaaaaggtcagaaacattttagtcccctttaaaatatttcttttagtttatttctatcgtgttttatttcacagatatttaattaccacccctaaatttcctcctcttacccttcaccttccctaaaatccttccaaaatcagtgaactgcaagcagggaaactaacaaatgtccattcaccctttttgtgtggtgtgtttttttatgttttgttttgttttttaactaagcttgaaccaaagtcaatttttagcaagctgctgtactaatggactagttgataacgtgcagttcagacacatcgaggagatagatgctactgacaatttctttttcatttgtctttattaattttatatgaaagttgctgcttgtttttaatcttttatgttggtaaattgtgatatcctctgggcagacattaacttgatgtttaactagtttattaggttggtgtgtaaatagaatgacaatgtcaattactaatttctctcctctccattcactttttctctgttgtagttaaatttaatcttctatcctgacttgacatctctacctttagtctgtggaaatgattttagggctatcagtaatgctgtagctgcccataataatgagtccctcccttgggagtggtgaaacttagaaggaaggattcagggagggaaatgctggtacccagtatactggattagaagttatagcattaatttctcaaaattgctaccaaaggaagtgtggagtcccaagggactcaagctcagtgaggtaagacaaagggcaaggaaaggctgtttgggtggtttttttttccccacatatggtttagaaaatgatccctttcccaaacaaaactcaccaacagactttaatattagaaaagatactaagctttaaatgtcaatacagtggtcttttattccctgccctgtctatattttctactcaatttgggataaggggattttatgtgaagcacttgatgagggtagaccagcataaaaaatctgtttaaaagaagaaataatctttaggaaaagataaatctttagataaaaataaatttttttctctttttttacttatttaaaaataagttgtgaaatgaaaggtacatttacacatgtacacacgaaacactaatatagctttttggtggttgtttagtttaaaatcaactccctatccatcatccctagatattctacttatcgtattgcttcatgaacaccttagtcattttttactttacgtatatatttttttatcatctcaagaaatgcattttgaattgaatgaactatcttctaagctaagatactcaaatttaacttttagccaccttatatgggagagcctggaaactaaaggggaccagggaccatttgaccaaaagaggtgtttggtggagtttctgcatttcaaagaagaaaggccagataggtcatcacaattcattgtattattctttttttttccccttaatgtttatgcaaattttattttatatttctgaatttggttagcacatactaagccaaagactattctaaatgcatttatagtgaatactatgtatgcccatggtaatgggtcctccctaaggagtggtgaatgtaattgtgtgaatcctgcttatcacaagtggtgcaatttggtcataaactttatttataccctgtatacatctgaataacagagcagaaagacctaaaaaagggcttctcacaggaacaatattactatgttgttctaagaaaaaataagttgagtgctgtattagtttaagtgtttctaaagttctataggcagcattttagaattaagaattgtgtatatccattaactgatataattcacatgtccttttatttgttatcagaaagatcaatactatcccaatttattcaacttgttacccaagaaatggaaccaaaggaatccaactttcattttgtgtagaatcatacctacttatacttaatgctagcactgtaagaaataagtcttttttgtttaaaaaagggaagataagattaaagattcttagtgagatcatcttgccaatttgttgtacatctctcattcattgttgggggaaaaaaaagcacaactatacctctttaatgttattttcttccattatccctcatttatttggaaagataagggaaaccttgtctgtattatccagaagcacagatatttgcttgacacaatatttaaattcagcccaatctttaacattaaaaaattttctttttaacttgctggaaaagttggatacattggcaaatatagggaattcatgtcttttttttttttttttttctggtcttgctctgttgcctaggctagagtgcaacggcatgatctcggctcactgcaacctctgcctcccgggttcaagcaattctcctgcttcagcctcccaagtagctgggattacaggcgcccaccaccgcacccggctaatttttgtatttttagtagggacgggatttctccgtgttggccaggctttttgaactcctgaccttaggtgatctgcctgccttggcctcccaaagtgctgggattacaggtatgagccactgtgcccatcctcatgtcaatttttaaagtgataaatcctgatattatacattgcaattagtgtagaataaacgcttggcttatagaactctctgttcttagtctaaagctgttcccaaaccaggtcatcctcacgaaacattcttgaccaagaaaaaagataaggtcattgagataggaagacagaggaaaagcctcttgctgttgtttcttcccaagaaaggagaagccctgccagggagaagtcagtagtattgctgactcactgtatcactgagtgtagggtgtggtagcaaggaggaggcaggggattcacgctgacaggtggctctggcctggctcttggggggccttctgaagaccagtctgcagtttgaggaagggccccaacaattcatttggagagcttggccaaatactttctcattaaatcagcacctaaacttgatgaacttaaagtttgtttattagagttgaaaacattaaaagatgactgatactaatgggagaaaaatactaaagacccaaaatttaaaattttccaaaatggacaagaattgatgggttaatttgctcataactgatatgagtttgcttttatgtgtgtgtggaaagcatttaatgtgtgatgctgttcatagtcctggctatttgatgtcattttcagttttacaacattttgaggatgacactttataaaatggtaaatctttctcagcgtttacaaacttggcttttgagaagggaaaaatcctctttgctatttctgtaagaagaataactgagatcagctattatataggtttgcatggatggtgtccacaatacaaatgtaaacttggacaggaataggataaataaattgctttcatcataaaggccaatcatccatttcttagtccaaggagattaaatataaataggacacccctgagatttccagtaaggtatttgaaaggattccactgggagggcagggaatatattttttctcagagcatccagtttgtacccagttttctatatggtttgtgaactgtagcttttaaaaaaaaattttgtagttttcttctaaccttattcattaagtagttccttgttttggcccttctactcttggccttagctaaaagcagtaaatgtgagtgaattttatgttgattatgtcacctggatctcctttccttcccttctttttctcattgaatggtggtaccttaatttgggtaacagctagcttctggcaccttcataaaatacctcagaatagcttagcattgttgcaaaactggttttaaactaaaaaccaaataaataagtgaaaaaattttataaatagtggaaataattctagctgtagcatttagttgaactaatgtttattatgatcgataaacaagattgatgctgtatgtatttgggatcctgtttataggttacaatttatagggttagggagggttgggtgggggaagaggagatgttgattatgttagaaggaaaacattgctcgtgtgtgtgtttgttttttcttatatctgtcttgccaaaggaaacttgattttccctgtgattggctttggcctctgtggtctggtctgcagcagtgtgtggtggcatgcaggtaacatatggggtgtccagtaggttcagggaccctgagggtgcatttacatcccttcctatggttgcccatgccccccagaccctgccaacctctcctaatgattcattacctctgtacatagcaaaagcataggcaaaggatgaatgcgtgaatgcctggatgtgcagttgagaaacagaggcagacatagacatgcaccaattaatttggagccaagaggtgagtgattgatgtatcttaaatctaggaaagttaaagtgaaacaggttctttgtgttgccctctgtcaagttactgaatgttgtgctaataacacaacactttaaaaccttacttacttttctcataccaaggctagttctttctagaccaaaaacacaaacaggataaaaagcaaaccaagaagttgaaagctaacctgcccacctcacccctgtgatacaaagtgtgaaccttaaggattagttggtgggattgaggagagaattattcttggtgggaacatgaatgagaaatgatgctggcttaggaaaaatcacaagccctttctgcccatactctgggacaaactttcttggctccctgagttcggatatagactgtatctctagaaaggctatttttttaaataaatgatcccacagaacttaagtgggatttggtttagataccaaagacactgctaatgtcattgcttatccttaagttttcaaaacaggcagagggaataggagcaaaaagccaaaatttggaaaagctttactttatctctttccttcccttttccccttttcccagtcccctgctttttgaaggaagtcttcttggttatcctggctttggaaaagagatttattttgttttgctctgctggctctttaaagatggatagttgctcaatctagcagtgatgttcttggaattgctgagaaatttggggagggcaaaagataggggtagaattttttcattatttccctttatctaatacttttaaatagaaccaacacagcctatatgagttcagacaatatttagatgtggtatctccatctgtctcctgtaaaagataagaattttcaagaacaggattacgtggaaaaccaaaagatcttcccttactctcctataaatgttttgttccaaatgtttttatatatgggctctagggagtcaggtagttcattgtttcggtgtactattgataggacacagaaagggagagagggtaaagaaatgtatcactctctgaatattgcatcaaaaatgattaggttgcagaacttcatgaaagctttactaataatcttattgttctgacattatgtaaaggtggtattaatattgtatgacttgtcaaagtgctagataggtttataagtaggtaatagggatgttgaagattagagcacttgaaacagaagttctgggaaaacaaggtgtgtgtaatggaacaccactttgagcacagaaacaaaggtcccttggacctggtagggaagatgtgatttatgattgtttctgtgtccctgtatctgcccaccctgcacagggctccaccacccagggccaccttctggtttaaacccaggacactgtcaaaaagttaagaccccaaaactaatttactgtaaaaaacattgaggactgctgcaaagttttcccttgttttctttgtgtacttgttcatcattgtataagttagccacagcttcacaagagcagcttaaggcttctttcataaattggcagtggcattgagttctcaaacattatatcccaaagtctgcaggcagacagctggatacagcgctgtgtataaatgagacgtccaaacacttgagtttcttaagattgggatctctttcaaatgaaaaaggacagagccaagtagagaaaagactttgtgctcccacccagccttaatgagtctcatggtctaaaagtataggaagaaatgaaatgcactttcagaagctaaaatgacagtgtctgctacaaaaggctgtagttgtaggcagtcggggatgccatgtccttggttccattcctgcgtgagtctgcagaaggcacacactttgtaagagtagagtggactagtgccagcctgaataggtttaaaactgcaaacagttggagaacatggaacaggttggtgcaggaagcctaagattttgcaatcatattataacattggcttttgacaacataaatgttgtatcttccctaaggtcaggtcggggaaagaaagacttccagcttcttacctctgcgtgcatgggcacgtgtgcattgctcagtccgcaggaggtctcactccgcaggaaacgctctcctcccgcataagtctgtacttccatcccctcatctgtggtagtagtgaaggctaggtgagtaagcgtgggctgttctacccaccagaagtccaggagctgttgtatacctcatttctaactcgtgaccgagtgacttgctttaactttctcgaaatcctacagagttgccaagtctgccctccctcctcagtcatgttaaactctggcctatagcatcatgggacctgtagcctagggtgggaccccctaaagcctctgaatgtcgctgcttaaaagctactgcaaactgagggcaaattgcaatcttctattcctttttgttgcaaggggtcttcacaggtctcttaacatctgctttccctgccaccctgcctttaggggctggccagctatccacacccctaacccaccctgtgtttctgacagctggccacacgtcaacttctgtacttgccttttccttggtggggtagaggccaaccccttctcctctgaggcctcagggttctgtttcttttcaggactttgggtagaagggaagacaccaaaggctcctttaagctgactgctgcatacacatttcactttttttcctttgacatgaccaaaaatatccaaatatttaagtttattattattattattattatttgacaatcttatatccaatgggctctctagaagctgcatccccagccctttcaccttttctttgaatgtagttcccaaccttcaattcccacccctaatgctgacaaaaagcttagccaggtcatgatactgctgctataagccaggggagggtggtttctttgttttgttttgttttgttttgtttttcaaatttccagccaaaaccaaagatttcttaatgattgtataaactcaaaacaaacaaaagaaccaaagaaaagggaagtcttcagcatcagtccagtctgtggtgtcctggcacttagaagagtgaggccagggaaggtggggcggggggaccctctgactggatcagaaagggcaggcaagctgcttaccaccttccagggtccagcacaggtgcatgcccctagctttggccctcacaaacttgtgagcatgccctgaaacaaattggcatttcagattttccaaaacaaaagtcaaaaaaccccatcaccaccatcatccaccctacaccaaccagggtcactatggggacttagcacagggcctagggagggtgggagctgctgctggactggcccgaggactccacagagtgggggacgttgaagacactggcgcacgattggctgctctgctgggtgctttaacctctggggctgggcgaatgcacgccacggtgcccttctgagcctttttttcttttcctgtactggaactgcttggaagtggctgtcctgtttgtgagaaaacatgcagaaagattatcaagcttttcatttctctttattgtagttttctttcctttttgcagcaccactgtgcaactatgcattgtacttcacaaccttttgtgctaggtagatgcctgtgactttttaacttggggggtggggggattgcaaatgaaggaactttttacatggatctttttaatctcagttggttgggggaggggggtacttggttcttgggtcacacaagctctatcccaaagcaaaatccaaatgttaataatattagcctgatgcagataccaaagataatttctttcctgcagaaccttagactcgtgtattaagtacgattacccagcacttgcattagtctaacctcagtaattccaaagcttagatgtatattttggtatatttctgggatattaaaaaaaaaatgtcgtttaacttcttgtttgtttcagtgtaatgctcttaaagtcatagcatgaaaataattgaactgtcctattcttagtagtttgaaataatagtatttttgtatgttttgggtgtgtctatgtatgtattaacataacagttttcactgcctaggtgttcataataaaaaagaaaatgaaaaaagttctgagtgtacataatattcaataataatctcccaccaggtgtcaatttagattgcatattcctcattactgttcccaactgggattttgttttcttttaaagagacagtgatcgtgtttttctaaagatgttttctttctctctttcaatatcttaactcactttttttttcttccttttttgtcttaattattaattcaggggtgtttgtccactgttgtcaaaggaggggcacaaggggaattggcccccggcctcctagaactttttgttttatgtactttaaaatgtgagtttgagttcttctttgtggaaacttaagatgtggtgtaaatgattctttccaaaattgtccagcagcttgaatgaggcagtgacaattctgaggtggtttattgggagtccttctacatttctcttagataactctgcactctgggtggctattgtgtagccttactgccccagagtgcctgttagccaaatatttcccctctgataggaatattttctaagaatcagctgataacttgcgtgctggaccttgttatctgtgcccctgggagacacacgttttcttggttttgaaaacctgaaacacaggcaactttacattttggggaattagctgatgcctcctgaagcctgaggaggtggcggggaatatgagcggtgctgtctctctcaaaagtgccctttagatgattccccctcctagggctgcctgcaggggctgtaggcttgggaaagattgtgtaggtgacagtgaatcagaatgaagtggtagattttgtgtagatgcatttgtctgctgtaattttttatatatatattaaacttactgtaactgtacagttcatttctgttgtaaaacatcattaaaccatcttccaagtgttttcacattg

SEQ ID NO: 76102 - DNA, 2124 bp, Artificial Sequence
  derived and/or modified sequence
cggaggagcagcgagtcaagatgagagttcagccgcggcggcagcagcagcagactggaaaagtaagaagagctttcctgcctttttaattaccaaactactctcagttttcaatgaatcagttcaaagaaagaatgcagtctttctatacctgactcaagaatgaacaatccgtcagaaaccagtaaaccatctatggagagtggagatggcaacacaggcacacaaaccaatggtctggactttcagaagcagcctgtgcctgtaggaggagcaatctcaacagcccaggcgcaggctttccttggacatctccatcaggtccaactcgctggaacaagtttacaggctgctgctcagtctttaaatgtacagtctaaatctaatgaagaatcgggggattcgcagcagccaagccagccttcccagcagccttcagtgcaggcagccattccccagacccagcttatgctagctggaggacagataactgggcttactttgacgcctgcccagcaacagttactactccagcaggcacaggcacaggcacagctgctggctgctgcagtgcagcagcactccgccagccagcagcacagtgctgctggagccaccatctccgcctctgctgccacgcccatgacgcagatccccctgtctcagcccatacagatcgcacaggatcttcaacaactgcaacagcttcaacagcagaatctcaacctgcaacagtttgtgttggtgcatccaaccaccaatttgcagccagcgcagtttatcatctcacagacgccccagggccagcagggtctcctgcaagcgcaaaatcttctaacgcaactacctcagcaaagccaagccaacctcctacagtcgcagccaagcatcaccctcacctcccagccagcaaccccaacacgcacaatagcagcaaccccaattcagacacttccacagagccagtcaacaccaaagcgaattgatactcccagcttggaggagcccagtgaccttgaggagcttgagcagtttgccaagaccttcaaacaaagacgaatcaaacttggattcactcagggtgatgttgggctcgctatggggaaactatatggaaatgacttcagccaaactaccatctctcgatttgaagccttgaacctcagctttaagaacatgtgcaagttgaagccacttttagagaagtggctaaatgatgcagagaacctctcatctgattcgtccctctccagcccaagtgccctgaattctccaggaattgagggcttgagccgtaggaggaagaaacgcaccagcatagagaccaacatccgtgtggccttagagaagagtttcttggagaatcaaaagcctacctcggaagagatcactatgattgctgatcagctcaatatggaaaaagaggtgattcgtgtttggttctgtaaccgccgccagaaagaaaaaagaatcaacccaccaagcagtggtgggaccagcagctcacctattaaagcaattttccccagcccaacttcactggtggcgaccacaccaagccttgtgactagcagtgcagcaactaccctcacagtcagccctgtcctccctctgaccagtgctgctgtgacgaatctttcagttacaggcacttcagacaccacctccaacaacacagcaaccgtgatttccacagcgcctccagcttcctcagcagtcacgtccccctctctgagtccctccccttctgcctcagcctccacctccgaggcatccagtgccagtgagaccagcacaacacagaccacctccactcctttgtcctcccctcttgggaccagccaggtgatggtgacagcatcaggtttgcaaacagcagcagctgctgcccttcaaggagctgcacagttgccagcaaatgccagtcttgctgccatggcagctgctgcaggactaaacccaagcctgatggcaccctcacagtttgcggctggaggtgccttactcagtctgaatccagggaccctgagcggtgctctcagcccagctctaatgagcaacagtacactggcaactattcaaggattgcttcatggattggagaactttctaaccaaaaattaa

SEQ ID NO: 76103 - DNA, 1195 bp, Artificial Sequence
  derived and/or modified sequence
attcaaaatggcggacggaggagcagcgagtcaagatgagagttcagccgcggcggcagcagcagcagactggaaaagtaagaagagctttcctgcctttttaattaccaaactactctcagttttcaatgaatcagttcaaagaaagaatgcagtctttctatacctgactcaagaatgaacaatccgtcagaaaccagtaaaccatctatggagagtggagatggcaacacaggcacacaaaccaatggtctggactttcagaagcagcctgtgcctgtaggaggagcaatctcaacagcccaggcgcaggctttccttggacatctccatcaggtccaactcgctggaacaagtttacaggctgctgctcagtctttaaatgtacagtctaaatctaatgaagaatcgggggattcgcagcagccaagccagccttcccagcagccttcagtgcaggcagccattccccagacccagcttatgctagctggaggacagataactgggcttactttgacgcctgcccagcaacagttactactccagcaggcacaggcacaggcacagctgctggctgctgcagtgcagcagcactccgccagccagcagcacagtgctgctggagccaccatctccgcctctgctgccacgcccatgacgcagatccccctgtctcagcccatacagatcgcacaggatcttcaacaactgcaacagcttcaacagcagaatctcaacctgcaacagtttgtgttggtgcatccaaccaccaatttgcagccagcgcagtttatcatctcacagacgccccagggccagcagggtctcctgcaagcgcaaaatcttctaacgcaactacctcagcaaagccaagccaacctcctacagtcgcagccaagcatcaccctcacctcccagatctggcccagtccagcctgaggtttctggagctggggtaacttatctgtaaccaccccatctaaagccagcaaccccaacacgcacaatagcagcaaccccaattcagacacttccacagagccagtcaacaccaaagcgaattgatactcccagcttggaggagcccagtgaccttgaggagcttgagcagtttgccaagaccttcaaacaaagacgaatcaaacttggattcactcagggtgatgttgggctcgctatggggaaactatat

SEQ ID NO: 76104 - DNA, 557 bp, Artificial Sequence
  derived and/or modified sequence
gattttggttaaaatattcaaaatggcggacggaggagcagcgagtcaagatgagagttcagccgcggcggcagcagcagcagctactactgggctgtaaacagtgatgccagcaaaatgttacttcagctgatgaagtgatgctgtttcgagaatttgaaagcaatttttcagtggataaagaagttgacagcacgatttgttggatgtgatgaaggattaatgagcatacaccttcacttgtattagcttaagatggaatggttctgggcaatataaaataacagactggaaaagtaagaagagctttcctgcctttttaattaccaaactactctcagttttcaatgaatcagttcaaagaaagaatgcagtctttctatacctgactcaagaatgaacaatccgtcagaaaccagtaaaccatctatggagagtggagatggcaacacaggcacacaaaccaatggtctggactttcagaagcagcctgtgcctgtaggaggagcaatctcaacagcccaggcgcaggctttccttggacatctccatcaggt

SEQ ID NO: 76105 - DNA, 2502 bp, Artificial Sequence
  derived and/or modified sequence
cttattcagttgaagattgctatggtgtaacagaagttgtattttgcttttccccttaatccactttccaccctacgcaacccccctcttttcgcttaagaacatactgtagatttgttagaaatagtagtaccttctttccccaccccaaactgctacctgtttcttccttgtttggactctctgctcctctagaagatttcacagcaatgctggactgcagtgactatgttctagactcaagaatgaacaatccgtcagaaaccagtaaaccatctatggagagtggagatggcaacacaggcacacaaaccaatggtctggactttcagaagcagcctgtgcctgtaggaggagcaatctcaacagcccaggcgcaggctttccttggacatctccatcaggtccaactcgctggaacaagtttacaggctgctgctcagtctttaaatgtacagtctaaatctaatgaagaatcgggggattcgcagcagccaagccagccttcccagcagccttcagtgcaggcagccattccccagacccagcttatgctagctggaggacagataactgggcttactttgacgcctgcccagcaacagttactactccagcaggcacaggcacaggcacagctgctggctgctgcagtgcagcagcactccgccagccagcagcacagtgctgctggagccaccatctccgcctctgctgccacgcccatgacgcagatccccctgtctcagcccatacagatcgcacaggatcttcaacaactgcaacagcttcaacagcagaatctcaacctgcaacagtttgtgttggtgcatccaaccaccaatttgcagccagcgcagtttatcatctcacagacgccccagggccagcagggtctcctgcaagcgcaaaatcttctaacgcaactacctcagcaaagccaagccaacctcctacagtcgcagccaagcatcaccctcacctcccagccagcaaccccaacacgcacaatagcagcaaccccaattcagacacttccacagagccagtcaacaccaaagcgaattgatactcccagcttggaggagcccagtgaccttgaggagcttgagcagtttgccaagaccttcaaacaaagacgaatcaaacttggattcactcagggtgatgttgggctcgctatggggaaactatatggaaatgacttcagccaaactaccatctctcgatttgaagccttgaacctcagctttaagaacatgtgcaagttgaagccacttttagagaagtggctaaatgatgcagagaacctctcatctgattcgtccctctccagcccaagtgccctgaattctccaggaattgagggcttgagccgtaggaggaagaaacgcaccagcatagagaccaacatccgtgtggccttagagaagagtttcttggagaatcaaaagcctacctcggaagagatcactatgattgctgatcagctcaatatggaaaaagaggtgattcgtgtttggttctgtaaccgccgccagaaagaaaaaagaatcaacccaccaagcagtggtgggaccagcagctcacctattaaagcaattttccccagcccaacttcactggtggcgaccacaccaagccttgtgactagcagtgcagcaactaccctcacagtcagccctgtcctccctctgaccagtgctgctgtgacgaatctttcagttacaggcacttcagacaccacctccaacaacacagcaaccgtgatttccacagcgcctccagcttcctcagcagtcacgtccccctctctgagtccctccccttctgcctcagcctccacctccgaggcatccagtgccagtgagaccagcacaacacagaccacctccactcctttgtcctcccctcttgggaccagccaggtgatggtgacagcatcaggtttgcaaacagcagcagctgctgcccttcaaggagctgcacagttgccagcaaatgccagtcttgctgccatggcagctgctgcaggactaaacccaagcctgatggcaccctcacagtttgcggctggaggtgccttactcagtctgaatccagggaccctgagcggtgctctcagcccagctctaatgagcaacagtacactggcaactattcaagctcttgcttctggtggctctcttccaataacatcacttgatgcaactgggaacctggtatttgccaatgcgggaggagcccccaacatcgtgactgcccctctgttcctgaaccctcagaacctctctctgctcaccagcaaccctgttagcttggtctctgccgccgcagcatctgcagggaactctgcacctgtagccagccttcacgccacctccacctctgctgagtccatccagaactctctcttcacagtggcctctgccagcggggctgcgtccaccaccaccaccgcctccaaggcacagtgagctgggcagagctgggctgccagaa

SEQ ID NO: 76106 - DNA, 2268 bp, Artificial Sequence
  derived and/or modified sequence
atgctggactgcagcgactacgtgctggacagccggatgaacaacccatccgagacatcaaagccatccatggagagtggagacggcaatactggcacccagactaacggcctcgacttccagaagcaaccagtacctgtgggcggcgccatcagtaccgcgcaggcacaagcattcctgggccatctacaccaggtgcagttagccggcacatcccttcaggctgcagcacagtctttgaacgtccagtcgaagtcaaatgaggagtcaggtgactcccaacagccaagtcagccatctcaacaaccatcagtccaggcagctataccccaaacccagcttatgttggccggcggccagatcaccggactcactttgactccagcccagcaacagctgttgctgcagcaggcacaggcccaggcccagctgctcgctgccgccgttcagcagcacagtgcctctcagcagcatagcgccgcaggcgctaccatttcggcttccgccgccactcccatgacccagatccccctttcccaaccgattcaaatcgcacaggacctccagcagctgcagcaactccagcagcagaacctcaacctgcagcagtttgtcctggttcatcctaccacaaatctgcagccggctcagtttatcatctctcagacaccacagggccagcagggactccttcaggcccaaaacttactgacccagctgcctcagcagagtcaggccaatctgctccagtctcagccctccatcacccttacgagtcagcctgctaccccgactaggacaatcgctgccaccccgatccaaaccctgccacagtcacaaagcacgcccaagcgtattgatacaccaagcttggaggagccgtccgatctggaggagctcgagcagttcgctaagaccttcaagcagagacgcataaaactgggatttacccaaggtgatgtgggattggcaatgggcaagctgtatggcaatgatttttctcagacaacaatctctcggttcgaggcgttaaatctaagtttcaaaaatatgtgcaagttaaagccactactggagaagtggctgaatgatgccgaaaacctttccagcgacagctccctatcctctccctccgcccttaatagccccggcatcgaaggactcagcagaagacgaaagaagagaacatcaatagaaaccaacatcagagttgcacttgagaaatcttttttggaaaaccaaaaacccaccagtgaagagattaccatgatcgccgaccagttgaacatggaaaaggaagtgatcagagtctggttctgtaatagacgacagaaggagaagcgaatcaatcccccttccagcggcggcactagctcgtctccaatcaaagcgatctttccatcccctactagcctcgtcgccaccaccccctcacttgtaacgtcatctgccgccaccaccttaaccgtgtcacctgttctgccactgactagcgccgcagtcacaaatctcagtgtcacggggacctctgacactacctctaacaacactgccaccgtgatctctactgcaccgccagccagcagtgccgtgacgtccccatctctttctccttccccatcagcaagtgcctccacctccgaagcctcgtcagctagtgagacgtcaacaacacaaacaacctccacgccactctcctctcccctgggcacgtcccaagtgatggtgaccgcctccgggctgcagaccgcagccgcagccgcccttcagggagctgcccaactgcccgcaaatgcttccctcgccgctatggcagctgccgccggtctgaaccccagcctgatggccccctctcagttcgctgccggaggtgccttgctcagcctgaaccctgggaccctgtctggcgcactctctcctgcactgatgtcgaactccacactggccactatccaggctctggcgtccggcggaagtttgcccatcacctctttggacgcaacggggaatctcgtgtttgctaatgccggcggcgcacccaatattgttacagcacctctgtttctgaacccccagaatttatctctcctgacctccaatccagtgtcactggtaagcgccgccgcagcctcggcaggcaactctgctcccgtggcatccctgcacgctacctccacaagcgctgagtccatccaaaactctctgtttacggtggcatccgcttccggcgcagcttccacaacaactactgcctcaaaggcccaatag

SEQ ID NO: 76107 - DNA, 2268 bp, Artificial Sequence
  derived and/or modified sequence
atgctggactgcagcgactacgtgctggacagccggatgaacaacccgagcgaaacatctaagccatctatggaaagtggtgacgggaacaccggaactcagaccaacggcctagacttccagaaacaacccgtccccgtggggggcgcgatatccacggcccaggcgcaggcattcctcggccacttgcaccaggtacaacttgccggaacctcgctccaagccgccgcccagagcctcaacgtccagtctaaaagcaacgaggagagcggagactctcagcagccgagccagccatcccagcaaccatcagtccaggccgccatacctcaaactcagctgatgctggctggcggccagatcactggcctgactctaactccagcgcagcaacagctgctgctgcaacaagcacaagcacaggctcagctgctcgccgcagccgtccagcaacattccgccagtcaacagcactctgcggccggcgcaactatttccgccagcgctgctacccctatgacccagatccccctgagccaaccaattcagatagcccaggatttacaacaacttcagcagttgcagcagcagaacctcaacttgcagcagttcgtgttggtgcacccaactaccaacctgcagccagcacagttcatcatctcacagactcctcagggacagcagggactgctgcaggcccagaacttgcttacacagctgccccagcagagtcaggccaacttgctgcaaagccaaccatccatcacattaacaagtcagccagccacccccacccgcaccattgctgctacccctattcagacgttgccgcagagtcagagcacccccaagcgcattgacacccccagccttgaggaaccaagtgatctagaagagctggagcaattcgcgaagacttttaaacagcggaggataaaacttggctttacacaaggtgatgttgggttggcgatggggaaactttacggcaatgatttttcccagaccaccatttccagattcgaggccctgaatctgtcctttaaaaacatgtgtaaactaaagcctttgcttgagaaatggctgaacgacgcagaaaatctcagctctgacagctccctgagcagcccatccgccttgaatagccctgggatcgagggcctctcccggcgaagaaagaagcggaccagtatcgagaccaacatccgagttgccctagaaaagtcattccttgagaatcagaaacctacttcagaggagatcaccatgatcgctgaccagctgaatatggagaaggaggtgattagggtgtggttttgcaaccggagacagaaggagaagcggatcaatcccccaagcagcggcggcacctctagctctccaattaaggctatctttccgagtcctacctctctagttgccaccacaccctccctagtcacttccagcgcagccaccacactcacggtgtcgcctgttctccctcttacgtccgccgccgtcactaacttgagtgtgaccgggactagcgatactacaagcaataacactgctacggtcatatccacagcacctcctgcttctagcgcagttaccagcccctctttgtctccttcgccatccgcgtccgcatctacatccgaggcatccagcgcgagtgaaacctcgacaactcagaccacatctacacctctgtcctcacctctaggtacaagccaagtcatggtgactgcatcgggcctgcagactgctgctgcagcagctttgcagggcgcggcccaactccccgccaatgcgtcacttgccgcaatggcagccgccgcaggcctgaacccaagcctgatggcccccagccaatttgccgccggaggggcgctcttgagcctgaaccctggcacactgtcaggagctttgtccccagctttaatgtctaactccacactggccaccattcaggctttagccagcggaggctctctgccaattaccagtttggacgccacagggaatctcgtgttcgcaaacgccggaggtgcaccaaatatcgttacagctccactttttctgaatccacaaaacctgtccctgttgacatccaaccccgtttccttagtttcagccgctgcggcttccgcaggcaatagcgcaccggtggcctccctgcatgctactagcaccagtgctgagtccatccagaattctcttttcacagtggcgtctgccagcggagctgctagtactaccaccacagcaagcaaggcccagtag

SEQ ID NO: 76108 - DNA, 2268 bp, Artificial Sequence
  derived and/or modified sequence
atgctagattgctccgattatgtcctggactctagaatgaacaatccttccgagacaagcaagccgtctatggaaagtggggacggcaataccggcactcagacaaacggactagacttccagaagcagccagtccctgtgggaggagcgatttccacagcacaggcccaagccttcttgggtcacctgcatcaggtacagctggccggaacatctttacaggcagcagcacagagtctcaacgtccagtcaaagtcaaacgaggagtccggtgactcacaacagcctagccagccttctcagcagccttcagtgcaggccgctatcccccagacacaactcatgctggctggtggacaaattacaggtctgacacttacaccagcccagcagcagctgcttctgcagcaggctcaggctcaggcccagctcctagctgcagctgttcagcagcatagtgcttcgcagcaacatagcgccgctggcgctaccatctcagcctccgccgctacccccatgactcagatccctctgtctcagcctatccaaatcgctcaggatcttcaacagttgcagcaactgcagcagcagaacctgaatctccaacagttcgtgttggtgcacccaacgacaaatctgcagccagcccaattcataatctcgcagacaccccagggacaacagggtctgctgcaagcacagaatcttctaacccaactgccgcagcagtctcaggctaacctgttgcagagccaaccgagcatcacactgacctcacagcccgctactccaacccggacaatagcagctacgcctatccaaactctgccccagtctcaatctacccctaagcgaatagatacaccgagcctagaggagccttccgacctggaggaactggagcagttcgcaaaaacatttaaacagcgtaggataaaattgggatttacgcagggagatgtaggcctcgccatgggcaagctgtacggcaacgatttcagtcagaccacaattagtagatttgaggccctgaatctctcttttaaaaatatgtgcaagctaaagcccctcctggaaaagtggctgaacgatgctgagaatctgagctctgacagcagcctcagctcaccctccgcactgaactctcctgggatagaggggctgtctcggcgaagaaagaagagaacgagtattgaaacgaatatacgggtcgccctcgaaaagagttttcttgagaaccaaaagcctacttccgaagaaatcacaatgatcgccgatcagctaaacatggaaaaggaagttatcagagtttggttctgtaatcgcagacagaaggagaagaggatcaaccctccctcttctgggggtactagcagctcacccattaaggccatttttccaagcccaacaagtctggtggctacaacaccttccctggtgaccagcagtgcagccacgactctaaccgtgtctcccgttctgcctctgaccagtgccgcagtgactaacctttcggttaccggtacaagcgatacaacatctaataatactgccaccgtaatcagtacggcccctccggcatctagcgcagtcacctctcccagtctgagcccctcacccagcgctagcgcctccacttcagaggcctcatccgcctctgaaacaagtacgactcaaacaacatccacccccctaagctctccattggggacctctcaggtgatggtcaccgcgtctggattgcagactgctgcagccgctgccctccaaggagccgcacagcttcccgctaacgcgtcactcgcagcaatggctgcggctgccggtctgaacccgagtctgatggctcccagccagtttgctgccggtggggctctcctcagcttgaacccgggaactctttcgggtgctctctctccggcacttatgagtaactctacactggctaccattcaggccctggcctcagggggtagcctccctataacgtcactggatgccaccggtaatcttgtgttcgcaaacgccggtggcgctccaaacattgtgacggcgcctttgttccttaacccacaaaacctctccctgctgacgtctaatcccgtcagtctggtgtcggccgctgcagcgtcagctggtaatagtgcccctgtggcctccctgcatgccacaagcacctcagctgagtccatccagaacagtttgttcacagtggcctcagctagcggtgccgcttccacaactacaacagcgtccaaggcacagtag

SEQ ID NO: 76109 - DNA, 2268 bp, Artificial Sequence
  derived and/or modified sequence
atgctggattgctctgactacgtcctcgatagcaggatgaacaatccttctgagacgagcaagcctagcatggagtccggagacgggaatacagggacacagactaacggtctcgacttccagaagcaacccgtccctgtgggaggggcaatcagcactgcgcaggcacaggccttcctcggccatctacaccaagtgcaactggccggaaccagcctacaagccgcagcacaaagtttgaacgtccagagcaagtctaacgaagaatccggggacagccagcagccaagtcaaccttctcaacagcctagtgtgcaggccgctattccacagacccagcttatgctcgccggtggacagattactggccttactctgactcccgctcagcagcagcttctgttacaacaggctcaagcacaggcccagctccttgcagccgcagtgcaacagcatagtgccagccagcagcattccgctgcaggagcgacaatctccgcctcagccgcaacacccatgacgcagatcccactgtctcagccaattcagatcgcccaggacctccagcaattacagcaattacagcaacaaaatttgaatctgcagcagtttgtcctagtccatcctactacgaacctgcaacccgcacagtttataattagtcagacgccacaaggacagcagggactcctacaggcccagaacttgttgacgcagctaccccagcaatcacaggccaatctcctgcagagccagccatcaattacgttgacctcgcagcccgctactcctactaggactatagcagctacacccatccagaccctgccacaatctcagagtactccaaagcgaattgatacacctagcttagaagagccgagcgacttagaggaactggaacagtttgccaagacctttaaacagcgtcgcattaaactggggttcacccaaggcgatgtggggctcgcaatgggcaaactgtacggcaacgacttctctcagaccactattagccgctttgaggccctgaatctttcctttaagaacatgtgcaagctaaaacctctcctagagaagtggctcaacgacgccgagaatctaagctcagactccagcctgtcttccccgagcgctttgaattctccaggaattgagggcctgagcagacggcgaaaaaagcgcacctcaattgagactaatatacgtgtggccttggagaaatcattcctagaaaatcagaagcccaccagcgaggaaatcacaatgatcgccgaccagctcaatatggagaaggaagttatccgggtgtggttctgcaatcggagacagaaagagaagcgtatcaatcctccttcgtcaggaggcaccagctcaagcccgatcaaagccatttttcctagtccgactagcttggtggctaccaccccttccctggtcacctcctctgccgcaaccactctgaccgtgtcccccgttttacctctcactagcgccgcagtgactaacctttccgtgactggtacatcggatactacgagcaacaacaccgctaccgtgatttcaacagcaccccctgcctcctccgccgttacctctccttcgctgagtccttcaccctccgcgtcagcatctacttccgaggcatcttctgcgtccgagacctcaaccacccagaccacaagtactcctctctcatcacctctgggcacctctcaagtgatggtcaccgctagtgggctccagactgccgctgcagcggcactgcagggagccgcacaactgcccgctaacgcaagcctggcagcaatggccgcagcagccggattaaacccatctttgatggcaccttcacagttcgctgcagggggagctctcctttccctgaacccaggcactttgtcaggcgctctttccccagccctcatgagtaacagcactttagcaacaatccaagctctggcttccggtggcagcctcccaattacctccttggacgccaccggaaaccttgtgttcgcaaatgcagggggagcccctaatatcgtgacggctccccttttcctgaatccacagaatcttagcttgctaacgagtaaccccgtttcactggtaagcgccgctgccgcaagcgccggaaatagtgccccagtagcatcactgcacgccacaagtacctccgcggaaagtattcagaactcactgtttactgtggcttccgcgtccggggcagcttctacaaccaccacagccagtaaggcccaatag

SEQ ID NO: 76110 - DNA, 2268 bp, Artificial Sequence
  derived and/or modified sequence
atgctggactgcagcgactacgtgctggacagcagaatgaacaaccccagcgagaccagcaagcccagcatggagagcggcgacggcaacaccggcacccagaccaacggcctggacttccagaagcagcccgtgcccgtgggcggcgccatcagcaccgcccaggcccaggccttcctgggccacctgcaccaggtgcagctggccggcaccagcctgcaggccgccgcccagagcctgaacgtgcagagcaagagcaacgaggagagcggcgacagccagcagcccagccagcccagccagcagcccagcgtgcaggccgccatcccccagacccagctgatgctggccggcggccagatcaccggcctgaccctgacccccgcccagcagcagctgctgctgcagcaggcccaggcccaggcccagctgctggccgccgccgtgcagcagcacagcgccagccagcagcacagcgccgccggcgccaccatcagcgccagcgccgccacccccatgacccagatccccctgagccagcccatccagatcgcccaggacctgcagcagctgcagcagctgcagcagcagaacctgaacctgcagcagttcgtgctggtgcaccccaccaccaacctgcagcccgcccagttcatcatcagccagaccccccagggccagcagggcctgctgcaggcccagaacctgctgacccagctgccccagcagagccaggccaacctgctgcagagccagcccagcatcaccctgaccagccagcccgccacccccaccagaaccatcgccgccacccccatccagaccctgccccagagccagagcacccccaagagaatcgacacccccagcctggaggagcccagcgacctggaggagctggagcagttcgccaagaccttcaagcagagaagaatcaagctgggcttcacccagggcgacgtgggcctggccatgggcaagctgtacggcaacgacttcagccagaccaccatcagcagattcgaggccctgaacctgagcttcaagaacatgtgcaagctgaagcccctgctggagaagtggctgaacgacgccgagaacctgagcagcgacagcagcctgagcagccccagcgccctgaacagccccggcatcgagggcctgagcagaagaagaaagaagagaaccagcatcgagaccaacatcagagtggccctggagaagagcttcctggagaaccagaagcccaccagcgaggagatcaccatgatcgccgaccagctgaacatggagaaggaggtgatcagagtgtggttctgcaacagaagacagaaggagaagagaatcaacccccccagcagcggcggcaccagcagcagccccatcaaggccatcttccccagccccaccagcctggtggccaccacccccagcctggtgaccagcagcgccgccaccaccctgaccgtgagccccgtgctgcccctgaccagcgccgccgtgaccaacctgagcgtgaccggcaccagcgacaccaccagcaacaacaccgccaccgtgatcagcaccgccccccccgccagcagcgccgtgaccagccccagcctgagccccagccccagcgccagcgccagcaccagcgaggccagcagcgccagcgagaccagcaccacccagaccaccagcacccccctgagcagccccctgggcaccagccaggtgatggtgaccgccagcggcctgcagaccgccgccgccgccgccctgcagggcgccgcccagctgcccgccaacgccagcctggccgccatggccgccgccgccggcctgaaccccagcctgatggcccccagccagttcgccgccggcggcgccctgctgagcctgaaccccggcaccctgagcggcgccctgagccccgccctgatgagcaacagcaccctggccaccatccaggccctggccagcggcggcagcctgcccatcaccagcctggacgccaccggcaacctggtgttcgccaacgccggcggcgcccccaacatcgtgaccgcccccctgttcctgaacccccagaacctgagcctgctgaccagcaaccccgtgagcctggtgagcgccgccgccgccagcgccggcaacagcgcccccgtggccagcctgcacgccaccagcaccagcgccgagagcatccagaacagcctgttcaccgtggccagcgccagcggcgccgccagcaccaccaccaccgccagcaaggcccagtag

SEQ ID NO: 76111 - protein, 703 aa, Artificial Sequence
  derived and/or modified sequence
MADGGAASQDESSAAAAAAADSRMNNPSETSKPSMESGDGNTGTQTNGLDFQKQPVPVGGAISTAQAQAFLGHLHQVQLAGTSLQAAAQSLNVQSKSNEESGDSQQPSQPSQQPSVQAAIPQTQLMLAGGQITGDLQQLQQLQQQNLNLQQFVLVHPTTNLQPAQFIISQTPQGQQGLLQAQNLLTQLPQQSQANLLQSQPSITLTSQPATPTRTIAATPIQTLPQSQSTPKRIDTPSLEEPSDLEELEQFAKTFKQRRIKLGFTQGDVGLAMGKLYGNDFSQTTISRFEALNLSFKNMCKLKPLLEKWLNDAENLSSDSSLSSPSALNSPGIEGLSRRRKKRTSIETNIRVALEKSFLENQKPTSEEITMIADQLNMEKEVIRVWFCNRRQKEKRINPPSSGGTSSSPIKAIFPSPTSLVATTPSLVTSSAATTLTVSPVLPLTSAAVTNLSVTGTSDTTSNNTATVISTAPPASSAVTSPSLSPSPSASASTSEASSASETSTTQTTSTPLSSPLGTSQVMVTASGLQTAAAAALQGAAQLPANASLAAMAAAAGLNPSLMAPSQFAAGGALLSLNPGTLSGALSPALMSNSTLATIQALASGGSLPITSLDATGNLVFANAGGAPNIVTAPLFLNPQNLSLLTSNPVSLVSAAAASAGNSAPVASLHATSTSAESIQNSLFTVASASGAASTTTTASKAQ

SEQ ID NO: 76112 - protein, 92 aa, Artificial Sequence
  derived and/or modified sequence
MNNPSETSKPSMESGDGNTGTQTNGLDFQKQPVPVGGAISTAQAQAFLGHLHQVQLAGTSLQAAAQSLNVQSKSNEESGDSQQPSQPSQQPS

SEQ ID NO: 76113 - DNA, 2112 bp, Artificial Sequence
  derived and/or modified sequence
atggcagatgggggagcagcgtcccaagatgagtcctcggccgctgccgcagcagcagccgattccagaatgaacaatccttctgagacctctaagcccagcatggagtccggggacggcaacaccggcacacagaccaacggcctggacttccaaaagcagcccgtgcctgtaggaggtgccatttccacagcacaggctcaggcattcttaggtcatctccaccaggttcagctggcgggcacttcactgcaggcagccgcgcaatctcttaacgtgcagtctaagtccaacgaagagtcgggcgactctcagcagccttcgcaacctagccagcagccctctgtgcaggccgccattccacaaactcagctcatgctggcaggcggtcaaattaccggagaccttcagcagctacaacagctgcagcaacagaatctcaatctccaacaatttgtgctggtgcatcccactaccaacctccaaccggcccagttcataatctcccagacccctcagggtcagcagggactgctccaagctcagaacctcttaactcagttacctcaacagagtcaggctaatctgttgcagtctcagccctccattacgctgaccagccagcctgctacgccgacaagaacaattgccgcaacaccgatacagactttaccccaatctcagagcactccaaagagaattgacaccccatccctggaggagccttctgacctggaagagctcgaacagtttgcaaaaacgttcaaacagcggcggattaaactgggattcactcagggcgacgtcggccttgccatgggaaaactgtacggcaacgacttttctcagaccacaatcagccgctttgaggctctgaatctcagctttaagaacatgtgtaaactgaagccactgcttgagaagtggctaaatgatgcggagaatttgtctagcgacagctcactgagtagtccctccgccctcaactcaccaggcattgaaggtctctccaggcgccggaagaagcgcacctccatcgagactaacataagagtagccctcgaaaaatcatttctggagaaccaaaagcctacctcagaagaaatcacaatgatcgctgaccagctgaatatggagaaagaagttatcagggtgtggttctgtaaccggcgccagaaagagaaaaggatcaacccaccctcttcaggaggtacgagttcctctcccatcaaagccattttcccctcgcctacttccctcgtggcaaccacaccctccctggtgaccagctccgccgcaaccaccttaacagtaagtcctgtgctgcccctgacttctgccgccgtgaccaacctgagcgtcacagggacatccgacacgacttccaataacaccgccaccgtgataagtaccgccccacctgcttctagcgcagttacctcgccaagtctatccccctccccttccgcttcagcaagcacaagcgaagctagctcggcaagcgagactagcacaacccagaccacttcaacccccttgtcttcacccctaggtacatctcaggtgatggtaactgcatccggcctgcagacagccgctgctgccgctctgcaaggggccgcccagctgcccgccaatgcttctctggctgctatggccgcagccgcgggtttgaaccctagccttatggccccatctcaatttgccgctggcggggccctgctgagcttaaatcctgggacactcagcggtgctctgagccctgcactgatgtcaaatagtacactggccaccattcaggctttagctagcggtggctcacttcctatcacaagtctagacgccaccggcaacctggtgtttgccaatgccggtggagctcctaatatcgtgacagctcctcttttcctgaacccacagaacttatccctgctcacaagtaacccagtgagtctagtgagcgccgctgctgcctctgcaggcaattccgccccagtggcttcactgcacgccacgtcaacttccgcagagtccatccagaattcgctctttacagtcgcttctgcctcaggagcagccagcactactacaaccgctagcaaagcccagtag

SEQ ID NO: 76114 - DNA, 2112 bp, Artificial Sequence
  derived and/or modified sequence
atggctgatggaggagctgccagccaggatgagagcagcgctgctgctgctgctgctgctgacagcaggatgaacaaccccagcgagaccagcaagcccagcatggagagcggagatggcaacacaggcacccagaccaacggcctggacttccagaagcagcctgtgcctgtgggcggggccatcagcacagcccaggcccaggccttcctgggccacctgcaccaggtgcagctggccggcaccagcctgcaggccgccgcccagagcctgaatgtgcagagcaagagcaatgaggagagcggggacagccagcagcccagccagcccagccagcagcccagcgtgcaggccgccatcccccagacccagctgatgctggccggcggccagatcactggagacctgcagcagctgcagcagctgcagcagcagaacctgaacctgcagcagtttgtgctggtgcaccccaccaccaacctgcagcctgcccagttcatcatcagccagaccccccagggccagcagggcctgctgcaggcccagaacctgctgacccagctgccccagcagagccaggccaacctgctgcagagccagcccagcatcaccctgaccagccagcctgccacccccaccaggaccatcgccgccacccccatccagaccctgccccagagccagagcacccccaagagaattgacacccccagcctggaggagcccagcgacctggaggagctggagcagtttgccaagaccttcaagcagaggcgcatcaagctgggcttcacccagggagatgtgggcctggccatgggcaagctgtatggaaatgacttcagccagaccaccatcagcagatttgaggccctgaacctgtccttcaagaacatgtgcaagctgaagcccctgctggagaagtggctgaatgatgctgagaacctgagcagtgacagcagcctgagcagccccagcgccctgaacagccctggcatcgagggcctgagcagaagaaggaagaagaggaccagcattgagaccaacatccgggtggccctggagaagagcttcctggagaaccagaagcccaccagcgaggagatcaccatgattgctgaccagctgaacatggagaaggaggtgatccgggtgtggttctgcaacagacggcagaaggagaagaggatcaacccccccagcagcggcggcaccagcagcagccccatcaaggccatcttccccagccccaccagcctggtggccaccacccccagcctggtgaccagcagcgctgccaccaccctgactgtgtcccctgtgctgcccctgaccagcgctgctgtgaccaacctgtctgtgacaggcaccagtgacaccaccagcaacaacacagccaccgtcatcagcacagcccccccagccagcagcgctgtgaccagccccagcctgagccccagccccagcgccagcgccagcaccagcgaggccagcagcgccagcgagaccagcaccacccagaccaccagcacccccctgagcagccccctgggcaccagccaggtgatggtgacagccagcggcctgcagacagctgctgctgctgccctgcagggcgccgcccagctgcctgccaatgccagcctggccgccatggctgctgctgctggcctgaaccccagcctgatggcccccagccagtttgctgctgggggcgccctgctgagcctgaaccctggcaccctgagcggggccctgagccctgccctgatgagcaacagcaccctggccaccatccaggccctggccagcggcggcagcctgcccatcaccagcctggatgccaccggcaacctggtgtttgccaatgctgggggcgcccccaacatcgtgacagcccccctcttcctgaacccccagaacctgagcctgctgaccagcaaccctgtgtccctggtgtctgctgctgctgccagcgctggcaacagcgcccctgtggccagcctgcacgccaccagcaccagcgctgagagcatccagaacagcctcttcaccgtggccagcgccagcggggccgccagcaccaccaccacagccagcaaggcccagtag

SEQ ID NO: 76115 - DNA, 2248 bp, Artificial Sequence
  derived and/or modified sequence
attcaaaatggcggacggaggagcagcgagtcaagatgagagttcagccgcggcggcagcagcagcagactcaagaatgaacaatccgtcagaaaccagtaaaccatctatggagagtggagatggcaacacaggcacacaaaccaatggtctggactttcagaagcagcctgtgcctgtaggaggagcaatctcaacagcccaggcgcaggctttccttggacatctccatcaggtccaactcgctggaacaagtttacaggctgctgctcagtctttaaatgtacagtctaaatctaatgaagaatcgggggattcgcagcagccaagccagccttcccagcagccttcagtgcaggcagccattccccagacccagcttatgctagctggaggacagataactggggatcttcaacaactgcaacagcttcaacagcagaatctcaacctgcaacagtttgtgttggtgcatccaaccaccaatttgcagccagcgcagtttatcatctcacagacgccccagggccagcagggtctcctgcaagcgcaaaatcttctaacgcaactacctcagcaaagccaagccaacctcctacagtcgcagccaagcatcaccctcacctcccagccagcaaccccaacacgcacaatagcagcaaccccaattcagacacttccacagagccagtcaacaccaaagcgaattgatactcccagcttggaggagcccagtgaccttgaggagcttgagcagtttgccaagaccttcaaacaaagacgaatcaaacttggattcactcagggtgatgttgggctcgctatggggaaactatatggaaatgacttcagccaaactaccatctctcgatttgaagccttgaacctcagctttaagaacatgtgcaagttgaagccacttttagagaagtggctaaatgatgcagagaacctctcatctgattcgtccctctccagcccaagtgccctgaattctccaggaattgagggcttgagccgtaggaggaagaaacgcaccagcatagagaccaacatccgtgtggccttagagaagagtttcttggagaatcaaaagcctacctcggaagagatcactatgattgctgatcagctcaatatggaaaaagaggtgattcgtgtttggttctgtaaccgccgccagaaagaaaaaagaatcaacccaccaagcagtggtgggaccagcagctcacctattaaagcaattttccccagcccaacttcactggtggcgaccacaccaagccttgtgactagcagtgcagcaactaccctcacagtcagccctgtcctccctctgaccagtgctgctgtgacgaatctttcagttacaggcacttcagacaccacctccaacaacacagcaaccgtgatttccacagcgcctccagcttcctcagcagtcacgtccccctctctgagtccctccccttctgcctcagcctccacctccgaggcatccagtgccagtgagaccagcacaacacagaccacctccactcctttgtcctcccctcttgggaccagccaggtgatggtgacagcatcaggtttgcaaacagcagcagctgctgcccttcaaggagctgcacagttgccagcaaatgccagtcttgctgccatggcagctgctgcaggactaaacccaagcctgatggcaccctcacagtttgcggctggaggtgccttactcagtctgaatccagggaccctgagcggtgctctcagcccagctctaatgagcaacagtacactggcaactattcaagctcttgcttctggtggctctcttccaataacatcacttgatgcaactgggaacctggtatttgccaatgcgggaggagcccccaacatcgtgactgcccctctgttcctgaaccctcagaacctctctctgctcaccagcaaccctgttagcttggtctctgccgccgcagcatctgcagggaactctgcacctgtagccagccttcacgccacctccacctctgctgagtccatccagaactctctcttcacagtggcctctgccagcggggctgcgtccaccaccaccaccgcctccaaggcacagtgagctgggcagagctgggctgccagaagcctttttcactctgcagtgtgattggactgccagccaggttaataaactgaaaaatgtgattggcttcctctcgccgtgttgtgagggcaaaggagagaaggg

SEQ ID NO: 76116 - DNA, 496 bp, Artificial Sequence
  derived and/or modified sequence
attcaaaatggcggacggaggagcagcgagtcaagatgagagttcagccgcggcggcagcagcagcagactggaaaagtaagaagagctttcctgcctttttaattaccaaactactctcagttttcaatgaatcagttcaaagaaagaatgcagtctttctatacctggttttcttccatcatctgtgacagcttcttgatctgtccccagactcaagaatgaacaatccgtcagaaaccagtaaaccatctatggagagtggagatggcaacacaggcacacaaaccaatggtctggactttcagaagcagcctgtgcctgtaggaggagcaatctcaacagcccaggcgcaggctttccttggacatctccatcaggtccaactcgctggaacaagtttacaggctgctgctcagtctttaaatgtacagtctaaatctaatgaagaatcgggggattcgcagcagccaagccagccttcccagcagccttca

SEQ ID NO: 76117 - DNA, 2112 bp, Artificial Sequence
  derived and/or modified sequence
atggccgacggcggcgccgccagccaggacgagagcagcgccgccgccgcagccgccgcagacagcagaatgaataacccatctgaaacgagcaagcccagcatggagtctggcgacggcaacactggaacgcagaccaatggactggatttccagaaacagcctgtgcccgtcgggggcgcaatttcgaccgcgcaggcccaggcattcctcggacatttacaccaggtgcagctggcaggcacttcactgcaggctgctgcacagtccttaaacgtgcaatctaaaagcaacgaagaaagcggcgacagccagcagccatcacaaccatcccaacagccttctgttcaggccgccatccctcagacacagctgatgctagcagggggacagattaccggggacttgcagcaactacaacaactgcaacagcagaatttaaatttgcagcagtttgtccttgtccaccctacaaccaatctccaacccgctcagtttatcatttcccagaccccgcaagggcagcagggtttgcttcaggcccagaatttgctgacacaactccctcagcaatctcaagcaaatctgctgcagagccagccatccatcacgcttacatctcagcctgcaacgcccacacgtactattgcagccacacccattcagacccttcctcagtcccaatcgacaccgaagcgtattgacaccccctctctagaggagcccagtgacctggaagagctggagcaatttgccaagaccttcaaacagaggcgaattaaactgggcttcacacaaggcgacgttggtctcgccatggggaaactctacggcaatgatttttcccagactaccatttctcgcttcgaggccctgaatctgtcgttcaaaaacatgtgcaaattgaaacctttgttagagaagtggcttaacgatgcggaaaacctaagttccgactctagcctaagcagcccttccgctctgaacagccctggtatcgagggcctgagtaggcggagaaaaaaaaggacgtccatcgaaaccaacatacgcgtggcactcgagaagagcttcctggagaatcagaagccaactagtgaggaaataacaatgatcgcagatcagttaaatatggaaaaagaagtgataagagtgtggttttgtaacaggcggcagaaagagaagcgtataaaccccccctcatcggggggaaccagctctagtcccattaaagcaattttccctagcccaaccagcctcgtggccaccacacctagcttggtcacgtcttccgcggctaccacattgacggtaagtcctgtgctgccgttaaccagtgccgctgtgaccaacctcagcgtgaccggtacttcagacaccaccagcaataacacagccactgtgatctcgacagctccgcctgcctcgtccgcagtgacctcaccatccctaagcccctccccgagtgcgtccgctagcacatcggaggcttccagcgcctccgaaacgagcactacgcaaacaacctctaccccattaagtagtcccttgggtacttcacaggtcatggtgactgctagtggccttcagacggccgcggccgccgccctgcaaggcgcagcccaactcccggcgaacgcatctctggcagcaatggctgcagccgctggcttgaaccccagtctgatggcccccagtcagttcgccgccgggggagcacttctctcgcttaacccaggcaccctttctggcgcactgtccccagcgctgatgtctaactccacattggccacaatccaggctcttgccagcggcggcagccttcctattacgagtttggatgccacgggcaatttggtgtttgcaaatgctggtggggctcctaatattgtgacagctcctctgttcctgaatccccaaaatctatctttactcacaagtaaccccgtaagccttgtgtcggctgcggctgcctctgccggaaattccgctcccgtggcaagtctccatgcaacctccacaagcgccgaaagcatccagaactctctcttcacggttgcctcggcctcgggggcggccagcaccacaacaacagcaagcaaggcacaatag

SEQ ID NO: 76118 - DNA, 2112 bp, Artificial Sequence
  derived and/or modified sequence
atggcagacggcggagctgctagtcaggacgagtcttcagctgccgctgcagcggctgctgatagcaggatgaacaacccttcagaaacaagtaaaccatccatggagagcggggacggaaacacggggacacagacaaatggcctggactttcagaaacagcctgtgcctgttggcggagcaatctccacagcgcaagcccaggcatttctcggccatctgcaccaggttcagctcgccggaacctcactacaggctgctgcgcagtcccttaacgtacaatccaaatccaatgaggagtctggggactcccaacagccctcacagccgtctcagcagccatccgttcaggcagctattccgcagacacagcttatgctggctggcggtcagattacaggcgacctacagcaactgcagcagctccaacagcagaatttgaatctccagcaatttgtgctcgtccatcccacgacaaatcttcagccggctcagttcattatttctcagacccctcagggacagcaaggactgttgcaggctcagaatctgctgactcagctgccccaacagagccaggcaaaccttttacaaagtcagcctagcatcaccctaacatcccagcctgccacccccaccaggactatcgccgcaaccccgatacagacactgcctcagtcccaatctaccccgaagcggattgacactcctagcttggaagagcctagcgatctcgaggaattggaacaattcgcaaagacattcaaacagcgccgaattaagctggggttcacccaaggcgacgtgggcctggccatgggtaaattgtatggtaacgatttctcccagaccacaatcagcagatttgaggccttgaatctgtcctttaaaaacatgtgcaagctgaagccgctactggagaaatggctgaatgacgccgagaatctgtccagcgattcctcactgtcttcaccatctgctctcaactcccccggtatagagggactcagccgtcgcaggaaaaagcgtacgtcaatcgagactaatatcagggttgccctggagaaatcctttctcgagaaccagaagcccaccagcgaagagattaccatgatcgccgaccagctgaacatggagaaagaggtgatccgggtttggttttgtaaccgtagacagaaagaaaagcgaatcaatcctccatcctctggtgggaccagttcctcacctatcaaagccatcttcccatctcctacaagccttgtggccaccaccccatccctggttacaagtagcgccgctactacgcttaccgtgtctcctgtcctcccattgactagtgccgcagtaactaatttgagtgtgactggcaccagcgatacgacttccaataatactgcaacggtcatttccacagcccctcccgcttcttccgccgttacgagtcccagcttgtcccccagtccatccgccagcgcctctacatccgaggcttcaagtgcatcggagacctcaacgacgcagactacaagcacgccacttagtagcccactggggacttcccaggtcatggtgaccgcctctgggttgcagacagcagctgcagccgctctgcaaggcgctgcgcagctgccagccaacgcttcccttgctgccatggccgctgctgctgggctgaatccgagcttgatggcccctagccagtttgccgctggcggtgccctgctgtctttaaaccccggaacactgtccggggcactgtcacctgcccttatgtctaactcaacactggccacgatacaggcactcgcctccggcggaagccttcctattacaagtctggatgctactggcaatctggtctttgccaatgctggcggagccccaaatattgtcacagctccgctgtttcttaatccacagaacctgtcactcctgacctctaatcctgtatcattagttagcgctgctgctgcatccgctggcaactcagcgccagtggcctcactgcatgcgactagtacttcagcggagagcatccagaatagtctctttactgtagcttctgcatctggtgccgcttcaaccacaactaccgcttctaaggcccaatag

SEQ ID NO: 76119 - DNA, 2112 bp, Artificial Sequence
  derived and/or modified sequence
atggccgacggcggcgccgccagccaggacgagagcagcgccgccgccgccgccgccgccgacagcagaatgaacaaccccagcgagaccagcaagcccagcatggagagcggcgacggcaacaccggcacccagaccaacggcctggacttccagaagcagcccgtgcccgtgggcggcgccatcagcaccgcccaggcccaggccttcctgggccacctgcaccaggtgcagctggccggcaccagcctgcaggccgccgcccagagcctgaacgtgcagagcaagagcaacgaggagagcggcgacagccagcagcccagccagcccagccagcagcccagcgtgcaggccgccatcccccagacccagctgatgctggccggcggccagatcaccggcgacctgcagcagctgcagcagctgcagcagcagaacctgaacctgcagcagttcgtgctggtgcaccccaccaccaacctgcagcccgcccagttcatcatcagccagaccccccagggccagcagggcctgctgcaggcccagaacctgctgacccagctgccccagcagagccaggccaacctgctgcagagccagcccagcatcaccctgaccagccagcccgccacccccaccagaaccatcgccgccacccccatccagaccctgccccagagccagagcacccccaagagaatcgacacccccagcctggaggagcccagcgacctggaggagctggagcagttcgccaagaccttcaagcagagaagaatcaagctgggcttcacccagggcgacgtgggcctggccatgggcaagctgtacggcaacgacttcagccagaccaccatcagcagattcgaggccctgaacctgagcttcaagaacatgtgcaagctgaagcccctgctggagaagtggctgaacgacgccgagaacctgagcagcgacagcagcctgagcagccccagcgccctgaacagccccggcatcgagggcctgagcagaagaagaaagaagagaaccagcatcgagaccaacatcagagtggccctggagaagagcttcctggagaaccagaagcccaccagcgaggagatcaccatgatcgccgaccagctgaacatggagaaggaggtgatcagagtgtggttctgcaacagaagacagaaggagaagagaatcaacccccccagcagcggcggcaccagcagcagccccatcaaggccatcttccccagccccaccagcctggtggccaccacccccagcctggtgaccagcagcgccgccaccaccctgaccgtgagccccgtgctgcccctgaccagcgccgccgtgaccaacctgagcgtgaccggcaccagcgacaccaccagcaacaacaccgccaccgtgatcagcaccgccccccccgccagcagcgccgtgaccagccccagcctgagccccagccccagcgccagcgccagcaccagcgaggccagcagcgccagcgagaccagcaccacccagaccaccagcacccccctgagcagccccctgggcaccagccaggtgatggtgaccgccagcggcctgcagaccgccgccgccgccgccctgcagggcgccgcccagctgcccgccaacgccagcctggccgccatggccgccgccgccggcctgaaccccagcctgatggcccccagccagttcgccgccggcggcgccctgctgagcctgaaccccggcaccctgagcggcgccctgagccccgccctgatgagcaacagcaccctggccaccatccaggccctggccagcggcggcagcctgcccatcaccagcctggacgccaccggcaacctggtgttcgccaacgccggcggcgcccccaacatcgtgaccgcccccctgttcctgaacccccagaacctgagcctgctgaccagcaaccccgtgagcctggtgagcgccgccgccgccagcgccggcaacagcgcccccgtggccagcctgcacgccaccagcaccagcgccgagagcatccagaacagcctgttcaccgtggccagcgccagcggcgccgccagcaccaccaccaccgccagcaaggcccagtag

SEQ ID NO: 76120 - protein, 357 aa, Artificial Sequence
  derived and/or modified sequence
MEVLRPQLIRIDGRNYRKNPVQEQTYQHEEDEEDFYQGSMECADEPCDAYEVEQTPQGFRSTLRAPSLLYKHIVGKRGDTRKKIEMETKTSISIPKPGQDGEIVITGQHRNGVISARTRIDVLLDTFRRKQPFTHFLAFFLNEVEVQEGFLRFQEEVLAKCSMDHGVDSSIFQNPKKLHLTIGMLVLLSEEEIQQTCEMLQQCKEEFINDISGGKPLEVEMAGIEYMNDDPGMVDVLYAKVHMKDGSNRLQELVDRVLERFQASGLIVKEWNSVKLHATVMNTLFRKDPNAEGRYNLYTAEGKYIFKERESFDGRNILKLFENFYFGSLKLNSIHISQRFTVDSFGNYASCGQIDFS

SEQ ID NO: 76121 - protein, 123 aa, Artificial Sequence
  derived and/or modified sequence
MEVLRPQLIRIDGRNYRKNPVQEQTYQHEEDEEDFYQGSMECADEPCDAYEVEQTPQGFRSTLRAPSLLYKHIVGKRGDTRKKIEMETKTSISIPKPGQDGEIVITGQHRNGVISARTRIDVL

SEQ ID NO: 76122 - protein, 103 aa, Artificial Sequence
  derived and/or modified sequence
MEVLRPQLIRIDGRNYRKNPVQEQTYQHEEDEEDFYQGSMECADEPCDAYEVEQTPQGFRSTLRAPSLLYKHIVGKRGDTRKKIEMETKTSISIPKPGQDGEI

SEQ ID NO: 76123 - protein, 379 aa, Artificial Sequence
  derived and/or modified sequence
MMKYPGTWPCQGIIGISFGESVMEVLRPQLIRIDGRNYRKNPVQEQTYQHEEDEEDFYQGSMECADEPCDAYEVEQTPQGFRSTLRAPSLLYKHIVGKRGDTRKKIEMETKTSISIPKPGQDGEIVITGQHRNGVISARTRIDVLLDTFRRKQPFTHFLAFFLNEVEVQEGFLRFQEEVLAKCSMDHGVDSSIFQNPKKLHLTIGMLVLLSEEEIQQTCEMLQQCKEEFINDISGGKPLEVEMAGIEYMNDDPGMVDVLYAKVHMKDGSNRLQELVDRVLERFQASGLIVKEWNSVKLHATVMNTLFRKDPNAEGRYNLYTAEGKYIFKERESFDGRNILKLFENFYFGSLKLNSIHISQRFTVDSFGNYASCGQIDFS

SEQ ID NO: 76124 - DNA, 1074 bp, Artificial Sequence
  derived and/or modified sequence
atggaagtgctgcgcccacagcttatcagaattgacggtcgtaattatcgcaaaaaccccgttcaggaacagacataccagcacgaagaagacgaagaggatttttaccagggtagtatggaatgcgccgacgagccatgcgatgcctatgaggttgagcaaaccccccaaggcttccgtagtaccctccgcgctcctagtctcttatacaaacacatagtagggaaacggggggataccaggaaaaagatcgagatggagaccaagacatccatctctattccaaaaccgggccaggacggtgaaattgtgataacaggtcagcacaggaatggcgttatctccgccagaacacgcattgacgtgctgctggacacattccggcggaagcagccctttacacatttccttgcattttttcttaacgaggtggaggttcaggagggctttctgagattccaggaggaagtcctcgcaaaatgttccatggaccacggggtggactccagtatattccagaacccgaagaaattacacctaaccattgggatgctggttttactctcggaggaggaaattcaacagacctgtgaaatgctgcagcagtgcaaagaggaatttatcaacgacatctccggagggaagcccttggaagtggagatggctggaatagaatatatgaacgatgatccaggcatggtcgacgtcctttacgccaaggtgcatatgaaagatggcagcaataggctgcaggaactagtagatcgtgtcctcgaacgctttcaggcatctggcctcatagttaaggagtggaacagcgtgaagctccacgcaacagtcatgaatacactgttccgaaaggatcccaatgccgaagggcggtacaatctgtacaccgctgaagggaaatatatcttcaaggaacgtgagagctttgacggacgaaacatcctgaaactctttgagaatttctacttcggaagcctgaagcttaattctattcatatatcacaaagatttacagtggattctttcggaaattacgcatcctgcggccagatagacttctcatag

SEQ ID NO: 76125 - DNA, 1074 bp, Artificial Sequence
  derived and/or modified sequence
atggaggtcttacggcctcagttgatccgtattgatgggagaaactatcggaagaatccagttcaggagcagacctaccaacacgaggaggatgaggaggacttttatcagggctcgatggaatgcgcagatgagccctgcgacgcgtacgaagttgaacaaacaccacaaggcttccgctccacactgagggccccttccttgctgtacaagcatatagtgggcaaaagaggagatacccggaaaaagattgaaatggaaactaaaacaagtataagtataccaaagcctggccaggatggagaaatcgtaatcactggacagcatagaaacggcgtaatttcagcaagaactcgtatcgatgtcctgttggacacgttcaggaggaaacagcccttcactcattttctagccttcttcctcaacgaagtcgaggtgcaagagggcttcctgcgatttcaggaagaggtactcgcaaaatgtagcatggaccacggcgttgacagcagcatttttcagaatccaaagaagctgcatctgaccattggtatgctggtcctgctatccgaggaggaaatacagcagacctgcgagatgctacagcaatgcaaagaagagtttatcaacgatatctctgggggcaagcccctagaggtggagatggccggaattgaatacatgaatgatgatcctgggatggtggatgttctctatgcgaaagtgcacatgaaggacggatccaaccgtctgcaggagctcgtggatcgtgtgctggaacggttccaggcaagtgggcttatcgttaaggagtggaatagtgttaagcttcacgccaccgtgatgaacaccttgtttcggaaagaccccaacgctgaaggccgatacaacctgtacaccgccgaggggaaatacatcttcaaagaacgggaatcttttgatggacgtaacatattgaagctatttgagaacttttattttggatccctgaagctaaactcaatccatatatcccagagattcactgtagatagctttggcaattatgcctcctgcggccagattgatttctcctag

SEQ ID NO: 76126 - DNA, 1074 bp, Artificial Sequence
  derived and/or modified sequence
atggaagttctccgcccccagctaatcagaatagacggacgaaattatcgaaaaaatccggttcaagagcagacttatcagcatgaagaggacgaggaagacttctaccaaggctcaatggagtgtgccgacgagccctgtgacgcctacgaagtggagcaaaccccacaggggtttcggtctacattgcgcgccccatcgttgctctacaaacatatcgtgggaaagcgcggggacacacgtaagaagatcgagatggaaacaaagacatccatcagcatccccaaacccgggcaggacggtgagatcgtaatcaccggacagcaccgtaacggagtgatttccgctcgaactagaatcgacgtcctgctggatacgttccgccggaaacagccctttacccattttctcgcctttttcctgaatgaggtagaggttcaggaaggctttctgcgctttcaagaggaggtgttggctaaatgtagcatggaccatggcgtcgactcctcaatcttccaaaacccaaaaaagctgcatcttacaatcggaatgctggttctcctgtccgaggaagagatccaacagacctgtgagatgttgcagcagtgtaaggaggagttcatcaatgacatttctggcgggaagcctctggaggtggagatggccggcatagagtacatgaacgacgacccaggtatggttgatgtgctatatgctaaagtgcacatgaaagacggctcaaatcgactgcaggagctggtggatagggtgcttgagaggttccaggctagtgggttgatcgttaaagagtggaactccgtcaaactgcacgctaccgtgatgaatacactttttcggaaggaccccaacgctgaggggagatataacctgtatactgccgaaggaaagtacatcttcaaggagcgggaaagcttcgacgggcggaacatcctgaaacttttcgaaaacttctatttcggtagtctaaagttgaactcaattcacatcagtcagagatttaccgtggattcattcggtaactacgcgtcttgcgggcagattgattttagctag

SEQ ID NO: 76127 - DNA, 1074 bp, Artificial Sequence
  derived and/or modified sequence
atggaggtgctccgccctcagctgatacgaatcgatgggcggaattataggaagaaccctgtgcaagaacagacgtatcaacacgaagaggacgaagaagacttctaccaagggagtatggaatgcgccgacgagccctgcgacgcctacgaggtcgaacagactccacagggcttcagatccaccttgagagctccttcgcttctctataagcatattgtagggaagagaggcgataccagaaaaaaaatcgagatggagactaaaacctccatcagtattcccaagccgggccaggatggggagatcgtgataactggacagcaccgtaatggggtgatctcagctcggactagaattgatgtgctcctggatacctttcgccggaagcagcctttcactcatttcttggccttctttctcaatgaggtcgaggtgcaggagggatttctgaggtttcaggaggaagtactcgccaagtgctcaatggaccacggcgtggactcatccatttttcagaatcctaagaagctccacttaactataggcatgctagttctcctctctgaagaagagatccaacagacatgcgagatgcttcaacagtgtaaggaagaatttatcaatgatattagcgggggcaagccgctggaagtcgagatggctggaatcgagtatatgaatgacgatcccggcatggtcgacgtgctttacgccaaagtccatatgaaagacgggagtaacagactccaggagctcgttgaccgggttctcgaaagatttcaggccagcggcctcatagttaaggagtggaatagcgtaaaactgcacgctactgtgatgaacaccttgtttaggaaggatccgaatgccgagggccgatacaacctgtacacagctgaggggaagtatatcttcaaggagcgggaatcttttgacggccgaaatattttgaaactgtttgagaacttctacttcggcagcctgaagctaaactccatccatatcagtcagcgttttacagtcgatagttttggaaactatgccagctgtgggcaaatcgatttttcttag

SEQ ID NO: 76128 - DNA, 1140 bp, Artificial Sequence
  derived and/or modified sequence
atgatgaagtatccagggacctggccctgtcagggtatcattgggatcagtttcggcgagtctgtaatggaagttctgaggcctcaactgattcgcattgatggcaggaactatcgaaaaaaccctgtccaggagcagacatatcaacatgaggaggacgaagaggacttttaccagggatccatggagtgtgccgacgaaccatgtgatgcatacgaagtggagcagacgccccagggatttcgatcgacgctcagggcaccttctctgctgtacaagcacattgtggggaagcgaggggacactcgaaaaaaaatcgaaatggaaacgaagacatccatatccattcccaaacctggccaggacggagagattgtgatcactggacagcacagaaacggagtgatctccgcacgcacgcggatcgacgtgcttcttgacactttccggcgtaaacagccattcactcactttctcgccttctttctgaacgaagtggaggttcaagagggtttcctgagattccaggaggaggtgttagcaaagtgctcaatggatcacggcgtggattcttccatatttcagaacccaaagaagttacacctgacaatcggaatgttagttctgctctctgaagaggaaatacaacagacctgcgaaatgctccaacaatgtaaagaggaatttatcaacgatatctcgggtggcaagcctctggaggtagaaatggcaggcattgagtatatgaacgacgaccccgggatggttgatgtgttgtatgccaaagtgcatatgaaggacggcagtaatagactgcaggagctggttgatcgagtgctcgaacgttttcaggcaagtggtctcattgtcaaggagtggaattcagttaaactgcacgcaaccgtcatgaatacacttttcagaaaggacccaaacgccgagggcaggtacaatctttacaccgctgaaggaaaatacatctttaaggagagagagtcattcgatggtaggaacatcttgaagctcttcgagaatttctatttcgggagcctgaaactgaactcaatacatatctcccagcgctttacggtggacagttttggaaattacgcgagttgtggccagatcgactttagctag

SEQ ID NO: 76129 - DNA, 1074 bp, Artificial Sequence
  derived and/or modified sequence
atggaggtgctgcggccccagctgatcagaattgatggcaggaactacaggaagaaccctgtgcaggagcagacctaccagcacgaggaggatgaggaggacttctaccagggctccatggagtgtgctgatgagccctgtgatgcctatgaggtggagcagaccccccagggcttccgcagcaccctgcgggcccccagcctgctgtacaagcacatcgtgggcaagagaggagacaccaggaagaagattgagatggagaccaagaccagcatcagcatccccaagccaggccaggatggagaaattgtcatcaccggccagcacagaaatggagtcatcagcgcccggaccagaattgatgtgctgctggacaccttccggaggaagcagcccttcacccacttcctggccttcttcctgaatgaggtggaggtgcaggagggcttcctgcgcttccaggaggaggtgctggccaagtgcagcatggaccatggagtggacagcagcatcttccagaaccccaagaagctgcacctgaccatcggcatgctggtgctgctgtctgaggaggagatccagcagacctgtgagatgctgcagcagtgcaaggaggagttcatcaatgacatcagcggcggcaagcccctggaggtggagatggccggcatcgagtacatgaatgatgatcctggcatggtggatgtgctgtatgccaaggtgcacatgaaggatggcagcaaccggctgcaggagctggtggacagagtgctggagcgcttccaggccagcggcctgattgtgaaggagtggaacagcgtgaagctgcacgccaccgtgatgaacaccctcttcaggaaggaccccaatgctgagggccgctacaacctgtacacagctgagggcaagtacatcttcaaggagcgggagagctttgatggaagaaacatcctgaagctgtttgagaacttctacttcggcagcctgaagctgaacagcatccacatcagccagcgcttcaccgtggacagctttggaaattatgccagctgtggccagattgacttctcctag

SEQ ID NO: 76130 - DNA, 1140 bp, Artificial Sequence
  derived and/or modified sequence
atgatgaagtacccaggcacctggccctgccagggcatcatcggcatcagctttggagagagcgtgatggaggtgctgcggccccagctgatcagaattgatggcaggaactacaggaagaaccctgtgcaggagcagacctaccagcacgaggaggatgaggaggacttctaccagggctccatggagtgtgctgatgagccctgtgatgcctatgaggtggagcagaccccccagggcttccgcagcaccctgcgggcccccagcctgctgtacaagcacatcgtgggcaagagaggagacaccaggaagaagattgagatggagaccaagaccagcatcagcatccccaagccaggccaggatggagaaattgtcatcaccggccagcacagaaatggagtcatcagcgcccggaccagaattgatgtgctgctggacaccttccggaggaagcagcccttcacccacttcctggccttcttcctgaatgaggtggaggtgcaggagggcttcctgcgcttccaggaggaggtgctggccaagtgcagcatggaccatggagtggacagcagcatcttccagaaccccaagaagctgcacctgaccatcggcatgctggtgctgctgtctgaggaggagatccagcagacctgtgagatgctgcagcagtgcaaggaggagttcatcaatgacatcagcggcggcaagcccctggaggtggagatggccggcatcgagtacatgaatgatgatcctggcatggtggatgtgctgtatgccaaggtgcacatgaaggatggcagcaaccggctgcaggagctggtggacagagtgctggagcgcttccaggccagcggcctgattgtgaaggagtggaacagcgtgaagctgcacgccaccgtgatgaacaccctcttcaggaaggaccccaatgctgagggccgctacaacctgtacacagctgagggcaagtacatcttcaaggagcgggagagctttgatggaagaaacatcctgaagctgtttgagaacttctacttcggcagcctgaagctgaacagcatccacatcagccagcgcttcaccgtggacagctttggaaattatgccagctgtggccagattgacttctcctag

SEQ ID NO: 76131 - DNA, 1074 bp, Artificial Sequence
  derived and/or modified sequence
atggaggtgctgcggccccagctgatccggatcgacggccggaactaccggaaaaatccagtgcaggaacaaacataccagcacgaagaagatgaggaagacttctatcagggaagtatggagtgcgcagacgagccatgtgatgcctacgaggtggagcagaccccacagggcttccgttccacacttagagctccatctctcctttacaaacacatcgtgggaaaacgcggcgatacccggaagaaaatagaaatggagactaaaactagcatcagtatacccaagcctggacaagacggagaaatcgtgattacgggccaacatcggaacggtgtgatatccgcaaggacacgcattgatgtgttgcttgacacattccggagaaagcaacccttcacacacttcttagcatttttcctgaatgaggtggaggtccaagaaggcttcttgaggtttcaggaggaggtacttgctaagtgctcaatggatcatggtgtggactcctcgatcttccaaaaccctaagaaactgcatctgaccattggcatgctagtgctactctctgaagaggaaatccagcagacttgtgaaatgttgcaacagtgcaaggaggagttcatcaacgatatctctggaggtaagcccttggaagttgagatggccggtattgagtacatgaatgatgacccgggcatggtggatgtcctgtacgcaaaggtacacatgaaagatggatcgaatcggctccaggagctcgtggacagagttcttgaacgcttccaggcttctggcctaatcgttaaagaatggaacagcgtcaaattgcacgcaacagtgatgaatactctgtttcggaaagaccctaacgcagagggcagatataacctttatactgcggaggggaaatacatcttcaaggagcgggagtcttttgacggacgcaatatcctcaagctgtttgagaatttctattttgggtcattaaagttgaacagcatacacatctcccagaggtttacggtggacagttttgggaattacgctagttgcggacagattgacttcagctag

SEQ ID NO: 76132 - DNA, 1074 bp, Artificial Sequence
  derived and/or modified sequence
atggaggtgctgcggccccagctgatccggatcgacggccggaactaccgcaagaaccccgtgcaggagcaaacttaccagcacgaagaggacgaagaagacttctaccagggttcaatggagtgcgctgatgagccttgcgacgcatacgaggtggagcagactccgcagggtttccgtagtacccttcgagctccctcactcctttacaagcacatagtgggtaagcggggggatacccgcaaaaaaatcgagatggagaccaagacgtcaatttcaattcccaaaccagggcaggatggcgaaatcgtgatcaccgggcaacaccgtaacggcgtgatctctgccagaacaaggatcgatgtgctgttagataccttccgtcggaagcaaccctttacccacttcttggccttcttccttaacgaggtcgaagtccaggagggcttccttcgattccaggaagaggtgctcgccaagtgctccatggaccacggcgtcgactcatccattttccagaaccccaagaaactccacctcaccataggcatgctggtgttactcagcgaggaagaaatccagcaaacctgtgaaatgcttcaacaatgcaaagaggagttcatcaatgacatatcagggggaaaaccactagaagtcgagatggccgggattgagtatatgaacgatgaccctggcatggtggatgtgctctacgccaaggttcatatgaaagatggatccaaccgactccaagagctggttgatcgtgtcctagagagattccaagccagcgggctgatagtgaaagagtggaactctgtaaagctgcatgcaacagtcatgaatactctgttccgtaaggaccccaatgccgagggacgctataacctgtacactgccgagggcaaatacatctttaaggagagggagagcttcgacggacggaatattcttaaactctttgaaaatttttactttggatcactaaaactaaactctatacacataagccagcggtttactgtagatagttttggcaactacgccagctgcgggcagattgacttttcttag

SEQ ID NO: 76133 - DNA, 1074 bp, Artificial Sequence
  derived and/or modified sequence
atggaggtgctgcggccccagctgatccggatcgacggccggaactaccgaaagaatccagtccaagagcagacctaccagcacgaggaagatgaagaggatttttatcagggttccatggagtgtgcagacgaaccctgcgacgcctatgaggtcgagcagactccacaaggctttcggagcacccttcgcgcaccctccctgctatataagcacatagtcggtaagcgaggcgacacccgaaagaaaattgagatggagactaagaccagcatcagtatccccaaaccaggtcaagacggagagatagtaattaccggccagcatcgcaacggcgttatatctgctcgtacaaggatcgatgtgctcctggataccttccgccgtaaacaaccattcacacacttcctggctttcttcctgaacgaagttgaggtacaagagggattcctgcgcttccaggaggaggtcttggcgaaatgcagcatggaccatggtgtggacagttctattttccagaatcccaagaaactgcatttgactatcggcatgttggtgctactctcagaggaggagattcagcagacttgtgaaatgctgcagcaatgcaaagaagaattcatcaatgatatttccggcggaaaaccgctggaagttgaaatggccggcatcgaatatatgaatgacgaccccggcatggtggatgtactatacgccaaagtgcacatgaaggatggttccaataggctgcaagagttagtcgacagggtcttggaaagattccaggcctcaggtctgatagtgaaggaatggaacagcgtgaaactgcacgctactgtgatgaatacactgtttcgcaaagacccaaacgctgaaggtcgctataacttatacaccgcagaaggaaagtatatctttaaagaacgagagagctttgacggtaggaacattctgaaactgtttgagaatttttatttcggttccctcaagctgaacagcatccacatctcccagcgttttaccgtggatagcttcggcaattacgccagctgtgggcagatagatttcagttag

SEQ ID NO: 76134 - DNA, 1074 bp, Artificial Sequence
  derived and/or modified sequence
atggaggtgctgcggccccagctgatccggatcgacggccggaactatagaaagaacccggttcaggaacagacctaccagcatgaagaggacgaagaagacttctaccaggggagtatggagtgcgcagacgaaccatgcgacgcgtacgaagtagaacaaacgccacagggttttcgttctaccctgcgcgccccaagcttactctataagcacattgttggaaagagaggcgatactcgcaaaaagattgagatggagacaaaaacctccatctctataccaaagcctggtcaggacggtgagatcgtaatcacgggccagcaccgcaacggagtgatctctgcccggactagaatcgacgtgctcctcgatacgttccgcagaaaacagcccttcacgcactttttggcatttttcctcaatgaggttgaggtgcaggagggtttcctccggtttcaggaggaagtgctggcgaagtgttccatggaccacggcgtcgactcgtcgatcttccaaaacccaaagaaactacatctgacaatcgggatgctggtcctcctgtccgaggaagagatacaacagacatgcgagatgctgcagcaatgtaaagaggagtttatcaacgatatctccggcggcaaacccctggaggtcgaaatggcggggatcgaatatatgaacgatgatcctggcatggttgatgtgctctatgccaaggtccacatgaaggacggctcaaaccgcctgcaggagcttgtggaccgggtgctggaacggttccaggcttcgggtctgatcgtgaaggagtggaactctgtcaagcttcacgctactgtaatgaacactctgttcaggaaagaccccaatgctgaaggccgctataacctatataccgcagaaggcaaatatatcttcaaggagcgcgaaagctttgatggccggaacattctgaagctattcgagaacttctacttcggcagtttgaagctcaattcaatccatatctcccaaaggttcacagtggattccttcggaaactatgcgagctgcggccaaatcgacttctcttag

SEQ ID NO: 76135 - DNA, 1140 bp, Artificial Sequence
  derived and/or modified sequence
atgatgaagtaccccggcacctggccctgccagggcatcatcggcatttcatttggggagtcagtcatggaagtgctgcggccacaactaataaggatcgatggaagaaattatcggaagaacccagtgcaagagcaaacataccagcatgaggaggacgaagaggacttttatcaaggaagcatggagtgtgcagacgagccctgtgacgcctacgaggtggagcagactccccaaggtttccgtagcactttgcgcgcaccaagtctgttgtataaacatatagttggaaagaggggcgacaccagaaagaaaatcgagatggaaacgaaaacctccattagcatccccaagcccggccaggacggagagatcgtcattaccggccaacaccgaaatggcgtgattagtgcgcggactcgcattgatgtccttctggacacatttcgacggaagcaacctttcacccattttttggcatttttcctgaacgaggttgaggtacaggagggctttctgagatttcaggaggaggtgctggctaagtgttcaatggaccacggcgtcgactcgtccattttccagaaccctaagaagctgcatctcacgattggtatgcttgtcctcctgtctgaggaggaaatccaacagacatgtgagatgctgcagcagtgcaaagaagagttcatcaatgatattagcggaggtaagccactggaagtcgagatggcaggaatcgagtatatgaacgacgatcctggtatggtcgacgtgttgtatgccaaggttcatatgaaagacgggagcaaccggctccaggaattagtggaccgagtcctggagagattccaagcttcggggctgattgtgaaggagtggaatagcgtaaagctccacgctactgtgatgaatacactcttccgcaaagatcccaacgccgaggggcggtataatctttacaccgctgaaggaaaatatatctttaaggaaagagaatcctttgatgggaggaacatcctaaagctgttcgagaacttctacttcggctccctgaagctgaattcgatccatatttcacagaggttcacggtagattctttcggtaattatgccagttgtggtcagatcgacttctcatag

SEQ ID NO: 76136 - DNA, 1074 bp, Artificial Sequence
  derived and/or modified sequence
atggaggtgctgcggccacagctgatccgaatcgacggacggaactaccgcaagaatccagtgcaggaacagacctatcagcacgaagaagatgaggaagacttttaccaggggtcaatggagtgcgccgacgagccttgtgatgcctacgaggttgagcagacacctcagggatttagaagcactctaagggctccatcactcttgtacaagcatatcgtgggaaaaagaggagacaccagaaagaaaatagaaatggaaacgaagaccagcatcagtatccccaaacccggtcaggacggggaaatcgtgatcacaggccagcacagaaacggggttatttcagctcgcacaagaatagatgtcttactggataccttcaggcgcaagcagccatttactcatttcctggccttcttcctaaatgaagtggaagtacaggagggttttttgcggttccaggaagaggtgttggcaaagtgctccatggaccatggtgtggatagctctatctttcagaatcccaaaaagctgcatttaaccatcgggatgcttgtgttactgtcagaagaagagatccagcagacatgcgaaatgttacagcagtgtaaagaagaatttattaatgacattagcggaggtaaaccactggaagtcgaaatggccggaatcgaatacatgaatgatgacccagggatggttgacgtgctgtatgctaaggtgcacatgaaggatggatcaaatagactgcaggaactggttgaccgcgtcttggaaagatttcaagcctcgggattgatcgtgaaggagtggaactcagtgaagctccatgccacagtcatgaatactctgttccgaaaggaccccaacgcagagggacggtataatctgtataccgccgagggtaaatacatattcaaggagagggagagctttgatggaagaaacatacttaagctgttcgaaaatttttacttcggcagcctgaaactcaacagcatacacatctcgcagaggtttaccgttgatagctttggcaactacgccagctgcggccagatcgacttctcttag

SEQ ID NO: 76137 - DNA, 1074 bp, Artificial Sequence
  derived and/or modified sequence
atggaagtcctgagacctcaattgatcagaatcgacggcaggaactacaggaagaatcccgtccaagagcagacatatcagcatgaggaggacgaggaagacttctaccagggatccatggaatgtgcagatgagccttgcgatgcttacgaggtggaacagacaccgcagggctttcggtcaacccttcgcgctccttcactgctatacaagcacatagtgggcaaacggggagacacacggaagaagattgagatggaaactaagacatctatttctatccccaaacctgggcaggacggtgagattgtcataaccggacaacacagaaacggtgtcatctctgcaaggacgagaattgacgtgctcttagatacattccgtcgcaagcaacccttcactcacttcctcgcattcttcctcaatgaggtggaggttcaggagggtttcctcaggttccaggaggaggtgcttgcgaaatgtagcatggaccacggtgtcgacagcagcatattccagaatccaaagaagttgcatctgacaataggcatgcttgtgcttctctcagaggaggagattcaacagacatgcgaaatgttacagcagtgtaaggaggaattcattaacgatatctcggggggtaaaccactggaggtcgaaatggctggaatcgagtatatgaacgacgatcctgggatggtggacgtgttgtatgccaaggtgcatatgaaggatgggtctaataggctgcaagaattggtggatagagtcctggagcgcttccaggcctccggcctgatagtgaaagagtggaatagcgtaaaactccacgccaccgtgatgaacaccctgttccgcaaagaccccaatgctgagggcagatacaatctttatacagcagagggtaagtatatctttaaggagagagagtcttttgacggtcggaacattctcaaactgttcgagaacttctactttggctcgcttaaacttaactctatccacatctcccagcgttttacggtggactccttcggtaattacgcttcttgcggacagattgatttctcctag

SEQ ID NO: 76138 - DNA, 1074 bp, Artificial Sequence
  derived and/or modified sequence
atggaagtgcttcggcctcagctgatccgaatcgacggccgtaattaccgcaagaatcctgtgcaggagcagacataccagcacgaggaggacgaggaggatttctaccagggatcgatggaatgcgctgatgagccttgcgatgcatacgaggtggaacagacaccacaaggctttcgctctactctcagggcgccttctcttctgtacaagcatattgtcggaaagcggggagacactcggaaaaagatcgagatggagaccaagactagtatttcaattccgaaacccggacaagacggtgaaatcgtaatcacagggcaacatcgtaacggagttatttcagccaggactagaattgacgtcctgctggatacgtttcgccgaaagcaaccatttactcacttcttagccttttttctgaacgaggtcgaagtccaggagggattcctgagatttcaggaggaggtgctggccaagtgcagtatggatcacggcgtggatagctcaattttccagaatcccaagaaactgcacctcaccattggcatgttggtgctgctgtcggaagaagaaatccagcagacctgtgagatgttacaacagtgtaaggaagagttcatcaacgatattagcggtgggaagcccctagaggtcgaaatggccggtatagagtacatgaacgatgacccaggcatggttgacgtattgtacgcaaaggtccacatgaaggatggttcaaataggctgcaagagctggttgacagagtcctagagcgtttccaagcttctgggctgatcgtcaaggagtggaatagtgtcaaactgcatgccaccgtcatgaacaccctctttaggaaagaccccaatgcagaaggtcgttacaatctgtacacagcagagggcaaatacatttttaaggaacgcgagtcctttgatggacgaaacattctgaaactgttcgaaaatttctacttcggatcgctcaagctaaattcaattcatatttcccagagattcacagtggactcctttggcaattacgcctcctgcgggcaaatcgacttctcctag

SEQ ID NO: 76139 - DNA, 1074 bp, Artificial Sequence
  derived and/or modified sequence
atggaggtgcttcggccacagctgattagaattgacggtaggaactaccggaaaaatccggtgcaggagcagacctaccagcacgaagaggacgaggaggatttctaccagggtagtatggaatgcgccgatgagccttgtgacgcttatgaagtagaacaaaccccacagggattccggtcaactctccgcgctccctctctactctataagcacatcgtgggcaaaaggggcgatactaggaagaagatagaaatggagactaaaacaagcattagcatccccaaaccgggacaggatggggaaatcgtgatcactgggcagcataggaatggggtcatctccgcccgtaccaggatcgacgtgttgttagatacgtttcgtcgcaaacaacccttcacacatttcctagccttcttcctgaatgaggttgaagtgcaggagggctttctgagattccaggaggaggtactagccaagtgctctatggaccacggtgtagacagctctatttttcaaaatcctaagaagctgcatctgactattggtatgctggtgttactctcagaggaggagatccagcagacctgcgagatgcttcagcagtgtaaggaggagttcattaacgacatctctggcggaaaaccactggaggtagagatggccggtatcgaatatatgaacgacgacccaggcatggtggacgtgctgtatgctaaggtgcatatgaaggatggttcaaataggttacaggagttggtggatagggtgctggaacgcttccaggccagcggactcattgttaaagagtggaacagcgtgaaactgcatgcaactgtgatgaacactttgttccgaaaagacccaaacgcagaagggagatacaatctttatacggcagagggaaaatacatatttaaggagcgagagagcttcgatggccgaaacatcttgaaattgtttgagaatttttactttgggagtctgaagctgaatagcattcacatctcccagagatttaccgttgatagcttcggcaactatgcatcctgcgggcagatagactttagctag

SEQ ID NO: 76140 - DNA, 1140 bp, Artificial Sequence
  derived and/or modified sequence
atgatgaaataccccggaacatggccctgtcaaggaatcattggaataagctttggcgagagcgtaatggaggtgctcagacctcagctgatcagaatcgatggccgaaattatcgaaaaaatccagttcaagagcagacctatcaacatgaggaagatgaagaagacttttaccagggatccatggagtgtgctgatgagccatgcgacgcttacgaggtggagcagacaccgcaaggttttcgttccaccttgagagctccctcgcttctttacaagcacattgttggcaagcgtggggacacccggaaaaagattgagatggagaccaaaacatccatctctatccccaagccagggcaggatggggagatagtgatcaccggacagcatcgaaacggggtgatctcagcaagaacacggattgatgtgctgctagatacgtttcggcgtaaacagccattcacgcactttctggccttcttcctaaatgaagtggaagtccaggaagggtttctcaggtttcaggaggaggtgctggccaaatgctctatggaccatggagtggacagctccattttccagaacccaaagaaacttcacctgaccatcgggatgttagttctgctgtctgaggaggaaatccagcagacttgcgaaatgctccagcaatgcaaagaagaatttattaatgacatttcgggagggaaaccactggaggtagagatggccggaattgagtacatgaacgacgatcctggaatggtcgacgtcttatatgcaaaagttcatatgaaagacggctccaacaggctgcaggagctggtggaccgggtgctggaaagatttcaggcctcgggactcatcgtcaaggagtggaactcagtcaaactacacgcaacggtgatgaacacacttttcaggaaggatcctaacgcagaaggtcgatataatctttacactgccgaaggcaagtacatatttaaggagcgagagtctttcgacggacggaacatcctgaagctgtttgaaaacttctactttggcagtctgaaacttaactcaatccatattagtcagcggttcaccgtggattccttcgggaattacgcctcctgcggccaaattgactttagctag

SEQ ID NO: 76141 - DNA, 1501 bp, Artificial Sequence
  derived and/or modified sequence
ctttctaccctcaatgccgagcacagaacctggggcagtgtttccactgtgcttccagtcccgagcatttcggatgaatgaatgatgaacaaacgacagaacgcagggcgagcagctcagcaaaggtcatgcaggagatagagaagcgctgtgtcatgagtattggatcattatggatttttttctttctcattgtgcagatctattcgcacaactctatcttcaaccagtttgccaggcccaccggaggtgcccagtaaaattttgtcaaacaaatactgatgatgaagtatcctgggacttggccctgtcagggcataattggaatatcatttggagaaagtgtcatggaagttctgcgtccacagcttataagaattgatggccggaattacaggaagaatccagtccaagaacagacctatcaacatgaagaagatgaagaggacttctatcaaggctccatggagtgtgctgatgagccctgtgatgcctacgaggtggagcagaccccacaaggattccggtctactttgagggcccccagcttgctctataagcatatagttggaaagagaggggacactaggaagaaaatagaaatggagaccaaaacttctattagcattcctaaacctggacaagacggggaaattgtaatcactggccagcatcgaaatggtgtaatttcagcccgaacacggattgatgttcttttggacacttttcgaagaaagcagcccttcactcacttccttgcctttttcctcaatgaagttgaggttcaggaaggattcctgagattccaggaggaagtactggcgaagtgctccatggatcatggggttgacagcagcattttccagaatcctaaaaagcttcatctaactattgggatgttggtgcttttgagtgaggaagagatccagcagacatgtgagatgctacagcagtgtaaagaggaattcattaatgatatttctgggggtaaacccctagaagtggagatggcagggatagaatacatgaatgatgatcctggcatggtggatgttctttacgccaaagtccatatgaaagatggctccaacaggctacaagaattagttgatcgagtgctggaacgttttcaggcatctggactaatagtgaaagagtggaatagtgtgaaactgcatgctacagttatgaatacactattcaggaaagaccccaatgctgaaggcaggtacaatctctacacagcggaaggcaaatatatcttcaaggaaagagaatcatttgatggccgaaatattttaaagttgtttgagaacttctactttggctccctaaagctgaattcaattcacatctctcagaggttcaccgtagacagctttggaaactacgcttcctgtggacaaattgacttctcctgaggtggatcttggaaagcactagaaactaaacatcttcaccaggtgctgaagaaaagtgtcttcgttttaattgccaagca

SEQ ID NO: 76142 - DNA, 2002 bp, Artificial Sequence
  derived and/or modified sequence
ctggggaaatttcctatcgcacgtctgctgcagcagtctcctgtttctcctcctaccttctccatttttctagtccctgcagggcataattggaatatcatttggagaaagtgtcatggaagttctgcgtccacagcttataagaattgatggccggaattacaggaagaatccagtccaagaacagacctatcaacatgaagaagatgaagaggacttctatcaaggctccatggagtgtgctgatgagccctgtgatgcctacgaggtggagcagaccccacaaggattccggtctactttgagggcccccagcttgctctataagcatatagttggaaagagaggggacactaggaagaaaatagaaatggagaccaaaacttctattagcattcctaaacctggacaagacggggaaattgtaatcactggccagcatcgaaatggtgtaatttcagcccgaacacggattgatgttcttttggacacttttcgaagaaagcagcccttcactcacttccttgcctttttcctcaatgaagttgaggttcaggaaggattcctgagattccaggaggaagtactggcgaagtgctccatggatcatggggttgacagcagcattttccagaatcctaaaaagcttcatctaactattgggatgttggtgcttttgagtgaggaagagatccagcagacatgtgagatgctacagcagtgtaaagaggaattcattaatgatatttctgggggtaaacccctagaagtggagatggcagggatagaatacatgaatgatgatcctggcatggtggatgttctttacgccaaagtccatatgaaagatggctccaacaggctacaagaattagttgatcgagtgctggaacgttttcaggcatctggactaatagtgaaagagtggaatagtgtgaaactgcatgctacagttatgaatacactattcaggaaagaccccaatgctgaaggcaggtacaatctctacacagcggaaggcaaatatatcttcaaggaaagagaatcatttgatggccgaaatattttaaagttgtttgagaacttctactttggctccctaaagctgaattcaattcacatctctcagaggttcaccgtagacagctttggaaactacgcttcctgtggacaaattgacttctcctgaggtggatcttggaaagcactagaaactaaacatcttcaccaggtgctgaagaaaagtgtcttcgttttaattgccaagcagggatgtggacatttggatggtgactttcctgggtggttccccatagattcaccattgcctctaatggtgtctacacccgtcatactaccagctgagatggtggtgggcataaggagaatttgtgcctataacccttagtgtgttctggttttttttcttttaatttttaaattgtcgtaaaatactcataaaacatactgtcttcaccatttttaagtgcacagttcagtaacgttaactgttaatacattcataatgctgtgtggccgtcaccgccgtccatctccataggcttctcagcttgtaaaatggaaactgtacccattaaacagtaattcccactcctcccagcccccgcagccaccattctgctttctgtctctctggttttgactattctcagtatctcatataagtggaatcatacagtgacttgtctttttgtgactggcttatttcacttagcataatgtcctcaaggttcatccatgttgtgtcaggtgacaggatttccttcctgtattatacatataatggaatgttccgttacatgtgcgtaccacactctgttcctccatcagtgaacacttggcttgcttcctcttgactattgggagtagtgctaatacagacacgggggtgcaaatatctctttgagactctgcctttaattcctttaccacccagagttttatctttagcaaaataaccattaaagttgtttgcctttta

SEQ ID NO: 76143 - DNA, 2308 bp, Artificial Sequence
  derived and/or modified sequence
gagacggagtttccctcttgttgcccaggctggaaatggcgcgatctcggctcacagcaacctctgcctcccggatttaagcgattctcctgcttcagcctcccgagtagctgggattacaggcatgcaccaccatgcctggctaattttgtatttctagtagagatggggtttctccatgttggtcaggctggtcttgaactcccgacctcaggtgatccacctgccttggcctcccaaagtgctgggattacaggcgtgagccactgcacctgcagccgcctagtcctcttctccttctctttgatgattcagggcctcggcttccctcacgatattgcagaaagacacagctttcctcttcctctccaaaccacctcgaagcaggggcataattggaatatcatttggagaaagtgtcatggaagttctgcgtccacagcttataagaattgatggccggaattacaggaagaatccagtccaagaacagacctatcaacatgaagaagatgaagaggacttctatcaaggctccatggagtgtgctgatgagccctgtgatgcctacgaggtggagcagaccccacaaggattccggtctactttgagggcccccagcttgctctataagcatatagttggaaagagaggggacactaggaagaaaatagaaatggagaccaaaacttctattagcattcctaaacctggacaagacggggaaattgtaatcactggccagcatcgaaatggtgtaatttcagcccgaacacggattgatgttcttttggacacttttcgaagaaagcagcccttcactcacttccttgcctttttcctcaatgaagttgaggttcaggaaggattcctgagattccaggaggaagtactggcgaagtgctccatggatcatggggttgacagcagcattttccagaatcctaaaaagcttcatctaactattgggatgttggtgcttttgagtgaggaagagatccagcagacatgtgagatgctacagcagtgtaaagaggaattcattaatgatatttctgggggtaaacccctagaagtggagatggcagggatagaatacatgaatgatgatcctggcatggtggatgttctttacgccaaagtccatatgaaagatggctccaacaggctacaagaattagttgatcgagtgctggaacgttttcaggcatctggactaatagtgaaagagtggaatagtgtgaaactgcatgctacagttatgaatacactattcaggaaagaccccaatgctgaaggcaggtacaatctctacacagcggaaggcaaatatatcttcaaggaaagagaatcatttgatggccgaaatattttaaagttgtttgagaacttctactttggctccctaaagctgaattcaattcacatctctcagaggttcaccgtagacagctttggaaactacgcttcctgtggacaaattgacttctcctgaggtggatcttggaaagcactagaaactaaacatcttcaccaggtgctgaagaaaagtgtcttcgttttaattgccaagcagggatgtggacatttggatggtgactttcctgggtggttccccatagattcaccattgcctctaatggtgtctacacccgtcatactaccagctgagatggtggtgggcataaggagaatttgtgcctataacccttagtgtgttctggttttttttcttttaatttttaaattgtcgtaaaatactcataaaacatactgtcttcaccatttttaagtgcacagttcagtaacgttaactgttaatacattcataatgctgtgtggccgtcaccgccgtccatctccataggcttctcagcttgtaaaatggaaactgtacccattaaacagtaattcccactcctcccagcccccgcagccaccattctgctttctgtctctctggttttgactattctcagtatctcatataagtggaatcatacagtgacttgtctttttgtgactggcttatttcacttagcataatgtcctcaaggttcatccatgttgtgtcaggtgacaggatttccttcctgtattatacatataatggaatgttccgttacatgtgcgtaccacactctgttcctccatcagtgaacacttggcttgcttcctcttgactattgggagtagtgctaatacagacacgggggtgcaaatatctctttgagactctgcctttaattcctttaccacccagagttttatctttagcaaaataaccattaaagttgtttgcctttta

SEQ ID NO: 76144 - DNA, 2076 bp, Artificial Sequence
  derived and/or modified sequence
ggaattccgggtcctcctcctcgccctaccttggtttacctgcagccgcctagtcctcttctccttctctttgatgattcagggcctcggcttccctcacgatattgcagaaagacacagctttcctcttcctctccaaaccacctcgaagcaggggcataattggaatatcatttggagaaagtgtcatggaagttctgcgtccacagcttataagaattgatggccggaattacaggaagaatccagtccaagaacagacctatcaacatgaagaagatgaagaggacttctatcaaggctccatggagtgtgctgatgagccctgtgatgcctacgaggtggagcagaccccacaaggattccggtctactttgagggcccccagcttgctctataagcatatagttggaaagagaggggacactaggaagaaaatagaaatggagaccaaaacttctattagcattcctaaacctggacaagacggggaaattgtaatcactggccagcatcgaaatggtgtaatttcagcccgaacacggattgatgttcttttggacacttttcgaagaaagcagcccttcactcacttccttgcctttttcctcaatgaagttgaggttcaggaaggattcctgagattccaggaggaagtactggcgaagtgctccatggatcatggggttgacagcagcattttccagaatcctaaaaagcttcatctaactattgggatgttggtgcttttgagtgaggaagagatccagcagacatgtgagatgctacagcagtgtaaagaggaattcattaatgatatttctgggggtaaacccctagaagtggagatggcagggatagaatacatgaatgatgatcctggcatggtggatgttctttacgccaaagtccatatgaaagatggctccaacaggctacaagaattagttgatcgagtgctggaacgttttcaggcatctggactaatagtgaaagagtggaatagtgtgaaactgcatgctacagttatgaatacactattcaggaaagaccccaatgctgaaggcaggtacaatctctacacagcggaaggcaaatatatcttcaaggaaagagaatcatttgatggccgaaatattttaaagttgtttgagaacttctactttggctccctaaagctgaattcaattcacatctctcagaggttcaccgtagacagctttggaaactacgcttcctgtggacaaattgacttctcctgaggtggatcttggaaagcactagaaactaaacatcttcaccaggtgctgaagaaaagtgtcttcgttttaattgccaagcagggatgtggacatttggatggtgactttcctgggtggttccccatagattcaccattgcctctaatggtgtctacacccgtcatactaccagctgagatggtggtgggcataaggagaatttgtgcctataacccttagtgtgttctggttttttttcttttaatttttaaattgtcgtaaaatactcataaaacatactgtcttcaccatttttaagtgcacagttcagtaacgttaactgttaatacattcataatgctgtgtggccgtcaccgccgtccatctccataggcttctcagcttgtaaaatggaaactgtacccattaaacagtaattcccactcctcccagcccccgcagccaccattctgctttctgtctctctggttttgactattctcagtatctcatataagtggaatcatacagtgacttgtctttttgtgactggcttatttcacttagcataatgtcctcaaggttcatccatgttgtgtcaggtgacaggatttccttcctgtattatacatataatggaatgttccgttacatgtgcgtaccacactctgttcctccatcagtgaacacttggcttgcttcctcttgactattgggagtagtgctaatacagacacgggggtgcaaatatctctttgagactctgcctttaattcctttaccacccagagttttatctttagcaaaataaccattaaagttgtttgccttttac

SEQ ID NO: 76145 - DNA, 1074 bp, Artificial Sequence
  derived and/or modified sequence
atggaggtgctgagaccccagctgatcagaatcgacggcagaaactacagaaagaaccccgtgcaggagcagacctaccagcacgaggaggacgaggaggacttctaccagggcagcatggagtgcgccgacgagccctgcgacgcctacgaggtggagcagaccccccagggcttcagaagcaccctgagagcccccagcctgctgtacaagcacatcgtgggcaagagaggcgacaccagaaagaagatcgagatggagaccaagaccagcatcagcatccccaagcccggccaggacggcgagatcgtgatcaccggccagcacagaaacggcgtgatcagcgccagaaccagaatcgacgtgctgctggacaccttcagaagaaagcagcccttcacccacttcctggccttcttcctgaacgaggtggaggtgcaggagggcttcctgagattccaggaggaggtgctggccaagtgcagcatggaccacggcgtggacagcagcatcttccagaaccccaagaagctgcacctgaccatcggcatgctggtgctgctgagcgaggaggagatccagcagacctgcgagatgctgcagcagtgcaaggaggagttcatcaacgacatcagcggcggcaagcccctggaggtggagatggccggcatcgagtacatgaacgacgaccccggcatggtggacgtgctgtacgccaaggtgcacatgaaggacggcagcaacagactgcaggagctggtggacagagtgctggagagattccaggccagcggcctgatcgtgaaggagtggaacagcgtgaagctgcacgccaccgtgatgaacaccctgttcagaaaggaccccaacgccgagggcagatacaacctgtacaccgccgagggcaagtacatcttcaaggagagagagagcttcgacggcagaaacatcctgaagctgttcgagaacttctacttcggcagcctgaagctgaacagcatccacatcagccagagattcaccgtggacagcttcggcaactacgccagctgcggccagatcgacttcagctag

SEQ ID NO: 76146 - DNA, 1140 bp, Artificial Sequence
  derived and/or modified sequence
atgatgaagtaccccggcacctggccctgccagggcatcatcggcatcagcttcggcgagagcgtgatggaggtgctgagaccccagctgatcagaatcgacggcagaaactacagaaagaaccccgtgcaggagcagacctaccagcacgaggaggacgaggaggacttctaccagggcagcatggagtgcgccgacgagccctgcgacgcctacgaggtggagcagaccccccagggcttcagaagcaccctgagagcccccagcctgctgtacaagcacatcgtgggcaagagaggcgacaccagaaagaagatcgagatggagaccaagaccagcatcagcatccccaagcccggccaggacggcgagatcgtgatcaccggccagcacagaaacggcgtgatcagcgccagaaccagaatcgacgtgctgctggacaccttcagaagaaagcagcccttcacccacttcctggccttcttcctgaacgaggtggaggtgcaggagggcttcctgagattccaggaggaggtgctggccaagtgcagcatggaccacggcgtggacagcagcatcttccagaaccccaagaagctgcacctgaccatcggcatgctggtgctgctgagcgaggaggagatccagcagacctgcgagatgctgcagcagtgcaaggaggagttcatcaacgacatcagcggcggcaagcccctggaggtggagatggccggcatcgagtacatgaacgacgaccccggcatggtggacgtgctgtacgccaaggtgcacatgaaggacggcagcaacagactgcaggagctggtggacagagtgctggagagattccaggccagcggcctgatcgtgaaggagtggaacagcgtgaagctgcacgccaccgtgatgaacaccctgttcagaaaggaccccaacgccgagggcagatacaacctgtacaccgccgagggcaagtacatcttcaaggagagagagagcttcgacggcagaaacatcctgaagctgttcgagaacttctacttcggcagcctgaagctgaacagcatccacatcagccagagattcaccgtggacagcttcggcaactacgccagctgcggccagatcgacttcagctag

SEQ ID NO: 76147 - protein, 400 aa, Artificial Sequence
  derived and/or modified sequence
MEVLRPQLIRIDGRNYRKNPVQEQTYQHEEDEEDFYQGSMECADEPCDAYEVEQTPQGFRSTLRAPSLLYNLIHLNTSNDCGFQKITLDCQNIYTWKSRHIVGKRGDTRKKIEMETKTSISIPKPGQDGEIVITGQHRNGVISARTRIDVLLDTFRRKQPFTHFLAFFLNEVEVQEGFLRFQEEVLAKCSMDHGVDSSIFQNPKKLHLTIGMLVLLSEEEIQQTCEMLQQCKEEFINDISGGKPLEVEMAGIEYMNDDPGMVDVLYAKVHMKDGSNRLQELVDRVLERFQASGLIVKEWNSVKLHATVMNTLFRKDPNAEGRYNLYTAEGKYIFKERESFDGRNILKSFALLPRLEYNDAISAHCNLCLPGSSDSPASASQVAGITGVSDAYSQSLPGKS

SEQ ID NO: 76148 - DNA, 1203 bp, Artificial Sequence
  derived and/or modified sequence
atggaggtgctgagaccacagttgatacgtatcgatggtcgaaactacaggaaaaatccagttcaggagcagacctatcagcatgaggaggatgaggaggacttttaccaagggagcatggaatgcgccgacgagccctgtgacgcctacgaggtcgaacagaccccccagggcttccgatccaccctgcgagccccatcacttctgtacaacttgatccatttgaacacttcaaatgattgtggattccaaaagataactttggactgtcagaacatctacacctggaagagcagacatatcgtgggcaaacgaggggatacccgaaagaagattgagatggaaactaagacctccattagtattcctaaacccggacaagatggcgaaatagttatcaccgggcagcaccgtaatggcgtgatatcagctaggacaagaattgacgtgcttctggatacgttcagaaggaaacagccatttactcattttctggccttttttctgaacgaggtcgaggtgcaggaggggttcttacgcttccaggaggaagtgctcgccaagtgctcaatggaccacggagtggattcctccatttttcagaatccaaagaaattgcatctgacaattggcatgctggtcctgctgagcgaggaagaaatacaacagacttgtgaaatgttacaacagtgtaaggaagaatttattaacgatataagcggggggaagcccttggaagtcgagatggccggcattgagtacatgaacgatgatcctgggatggtagacgtcctttacgcaaaagtgcatatgaaggatggtagtaacagattgcaggaacttgtcgatagagttctcgagcgctttcaagccagtggacttattgtgaaagagtggaatagtgttaaactccacgctacagtgatgaacaccttattccggaaagatccaaacgcagaaggccgctacaacctttatacagccgagggtaagtacatattcaaggaaagggaatcattcgacgggaggaacatcctgaagtcattcgctctcctccctcgcctcgaatataacgatgccatctcagctcattgcaatttatgcctccccggttcctccgatagtccagccagcgcatcgcaagtagcaggcattacgggggtctcagacgcttactcccagtcgctgcccgggaaatcgtag

SEQ ID NO: 76149 - DNA, 1203 bp, Artificial Sequence
  derived and/or modified sequence
atggaggtgttacggccacaactcatccggattgatgggaggaattaccgaaaaaacccggttcaggagcagacatatcagcatgaggaagacgaggaggacttctatcaggggtcgatggagtgcgccgacgagccctgtgacgcttacgaagtggaacaaaccccacagggctttcgtagtactttacgcgctccctcgttgctctataacctcatccatctgaacactagcaatgactgcggctttcagaaaatcactcttgactgtcaaaacatctatacatggaagagtcgacatatagtgggaaaaaggggcgatacccgtaagaagattgagatggagactaagacttcgatttctataccaaagcctggccaggacggggagatcgtgatcactgggcaacatcggaacggcgttatctccgccaggactaggatcgatgtgctgctcgacacattccgtcgtaaacagccctttacacattttctggccttcttcttgaatgaggttgaggttcaggaagggtttttacggtttcaggaggaagtgttggccaagtgcagtatggatcatggggtggacagctctatctttcaaaaccccaaaaagctgcacctgaccatcggcatgctggtgctgctaagcgaggaagagatccaacagacctgcgagatgctgcagcaatgtaaggaggagtttattaatgatatttctggtggtaagccgctagaggtcgaaatggccggtatagaatacatgaacgacgaccccgggatggtagacgtgctgtacgccaaggtgcacatgaaagatggctctaacaggctacaggaactcgttgatcgtgtgcttgaacgtttccaggctagtggcctgatcgtaaaagagtggaactcagtgaagctgcacgccaccgtgatgaatactctttttaggaaggaccctaacgccgagggcagatataatctttacacggccgaaggaaaatacatctttaaggaacgcgagagctttgatggtagaaacattcttaaatcattcgcactattgccaagactggagtataatgacgccatctctgcacactgcaatctgtgcttgcccggcagtagcgactcccctgcctcagcatcgcaggtggctggcattaccggtgtgagtgacgcatatagtcagtctctccccggtaagagctag

SEQ ID NO: 76150 - DNA, 1203 bp, Artificial Sequence
  derived and/or modified sequence
atggaggtgctgcggccccagctgatcagaattgatggcaggaactacaggaagaaccctgtgcaggagcagacctaccagcacgaggaggatgaggaggacttctaccagggctccatggagtgtgctgatgagccctgtgatgcctatgaggtggagcagaccccccagggcttccgcagcaccctgcgggcccccagcctgctgtacaacctgatccacctgaacaccagcaatgactgtggcttccagaagatcaccctggactgccagaacatctacacctggaagagccgccacatcgtgggcaagagaggagacaccaggaagaagattgagatggagaccaagaccagcatcagcatccccaagccaggccaggatggagaaattgtcatcaccggccagcacagaaatggagtcatcagcgcccggaccagaattgatgtgctgctggacaccttccggaggaagcagcccttcacccacttcctggccttcttcctgaatgaggtggaggtgcaggagggcttcctgcgcttccaggaggaggtgctggccaagtgcagcatggaccatggagtggacagcagcatcttccagaaccccaagaagctgcacctgaccatcggcatgctggtgctgctgtctgaggaggagatccagcagacctgtgagatgctgcagcagtgcaaggaggagttcatcaatgacatcagcggcggcaagcccctggaggtggagatggccggcatcgagtacatgaatgatgatcctggcatggtggatgtgctgtatgccaaggtgcacatgaaggatggcagcaaccggctgcaggagctggtggacagagtgctggagcgcttccaggccagcggcctgattgtgaaggagtggaacagcgtgaagctgcacgccaccgtgatgaacaccctcttcaggaaggaccccaatgctgagggccgctacaacctgtacacagctgagggcaagtacatcttcaaggagcgggagagctttgatggaagaaacatcctgaagagctttgccctgctgccccggctggagtacaatgatgccatcagcgcccactgcaacctgtgcctgcccggcagcagtgacagccctgccagcgccagccaggtggccggcatcaccggggtgtctgatgcctacagccagagcctgcccgggaagagctag

SEQ ID NO: 76151 - DNA, 1203 bp, Artificial Sequence
  derived and/or modified sequence
atggaggtgctgcggccccagctgatccggatcgacggccggaactatcgcaagaatcccgtccaggagcagacttatcagcacgaggaagatgaagaagacttctatcaaggatccatggaatgtgccgacgagccttgcgatgcttacgaagttgagcagaccccccagggcttccggtctaccctacgggccccaagcctcctatacaatctgattcacctgaatactagcaacgattgcggatttcagaagatcacactcgactgccagaatatctacacctggaaatcacgccatattgtgggcaagaggggtgatacccgcaaaaagatagaaatggagaccaaaacaagtatcagtattcccaaaccaggccaggacggagagatcgtgatcaccgggcagcaccgcaacggtgtgatcagcgccagaaccaggatcgacgtattgcttgacaccttccggagaaaacagccctttactcatttccttgcattcttcctgaatgaggtcgaggtgcaggaggggtttctgagatttcaggaggaggtcctcgccaagtgttcaatggaccatggagtcgactccagcatcttccagaatcccaagaaactgcacctcactattggaatgttggttttactgagtgaagaggagattcaacagacctgtgagatgctccagcagtgtaaagaggagttcattaacgatatcagcggagggaagcctctggaggtagagatggccggaatcgagtacatgaacgatgacccggggatggtggacgtgctgtacgccaaagtgcacatgaaggatggcagcaacaggctccaggaactggtcgaccgggtgctggagaggtttcaggcttcagggctaatcgtgaaagagtggaatagtgtgaagctgcacgccacagtgatgaatactttgttcaggaaggaccccaatgccgagggacgctataatctctacaccgccgagggaaagtatatcttcaaagagcgcgagtcttttgacggtcgtaacattctaaaatccttcgctctgctaccaaggctagaatacaacgatgcaatctcggctcattgcaatctgtgcctgcctggctcatccgactccccagccagcgcatcccaggtagcaggcatcacgggagtcagcgacgcatactcccagtccctacccggtaagtcgtag

SEQ ID NO: 76152 - DNA, 1203 bp, Artificial Sequence
  derived and/or modified sequence
atggaggtgctgcggccccagctgatccggatcgacggccggaactaccggaaaaatcctgtgcaggaacagacatatcagcatgaggaggatgaggaggacttttaccaagggtctatggagtgtgctgacgagccctgtgatgcgtatgaagtggagcagacccctcagggattcaggtctactctgcgagctccttctctcctatacaatctgattcatctgaacacatccaatgattgtggattccagaagatcacactcgactgtcagaatatctacacctggaaatcaagacatattgtcggcaaacggggggacacacgcaaaaagatagagatggaaacaaagacttcgatctccatccctaagcccggacaggatggggaaatcgttattactggccaacatcgcaacggagttattagcgctcggacccggatcgatgtgctgcttgacacgttcagacggaagcaaccattcacccactttctcgcctttttcctgaacgaagtcgaagtccaggaaggatttttgcgcttccaggaggaagtactggccaaatgctcaatggaccacggagtggattcctcaatcttccagaaccctaaaaaactccacctgaccattggaatgctggtgctactcagcgaggaggaaatccaacagacctgtgagatgctgcagcagtgtaaggaggagttcatcaatgacatctctgggggcaaaccattagaggttgagatggccggcatcgagtacatgaacgacgatcctggtatggtagatgtcctgtatgcaaaagtacacatgaaagacgggagtaatcgcttgcaggagcttgtggatcgcgtacttgaaaggtttcaggccagcggtctcatcgtgaaagaatggaatagcgtgaagctgcacgccaccgtgatgaatacgctgtttaggaaagacccaaatgccgagggtagatataatctgtacaccgccgagggcaaatatatcttcaaagagcgggagagcttcgatggaagaaatattctgaagagctttgcgctgctcccccggctggagtacaatgatgccatttccgcacactgcaacctgtgcctaccaggaagtagcgacagcccagccagcgccagccaagtcgctggaataacgggtgtctccgatgcatatagccagagtttgcctgggaaatcctag

SEQ ID NO: 76153 - DNA, 1203 bp, Artificial Sequence
  derived and/or modified sequence
atggaggtcctgcggcctcagttgataaggattgacggtcgcaactatcggaagaaccccgtgcaggagcagacataccaacacgaggaggacgaggaggatttttaccaggggagcatggaatgtgctgatgagccgtgcgacgcgtatgaggttgagcagacaccccaggggttccgaagcacactgcgagcgccaagtctgttatacaacttaattcatcttaatacttccaatgattgtggattccaaaaaattacccttgattgccagaatatctacacttggaagtcgcgtcatattgtcggaaagaggggggacacccgaaagaagatcgagatggaaaccaagaccagtattagcattccaaagcccggtcaggatggtgagattgtcataactggccagcatcgcaacggcgttatctctgccagaacacgaatagacgttttacttgacacttttagaagaaagcagccttttacccacttcctagctttcttcttaaatgaggtagaggtgcaggaggggtttttgcggtttcaagaagaagtcttggcgaaatgcagcatggatcacggagttgatagtagtatttttcagaatcctaagaaattacacctgacgatcggcatgttggtgctcctgtccgaagaggagattcagcagacatgtgaaatgctccagcagtgtaaagaggagtttatcaatgacatcagcgggggtaagcccctggaggtggagatggcaggtatagagtacatgaacgacgatccaggaatggtagatgtgctctacgctaaggtacatatgaaggacggatctaaccggctgcaggagctcgtagacagggtgctcgagcggttccaggcgagcggcttgatcgtgaaggaatggaattccgtgaagcttcacgccaccgtcatgaacaccctgttccggaaagaccccaatgctgagggtagatacaacctttacactgccgaggggaagtacatattcaaggagagggagagctttgacggtcgaaatatcttgaagtctttcgcactacttcccaggctcgaatacaatgatgcgataagtgcccactgtaacctgtgcttgcccggtagtagcgatagcccggcttccgcttcccaggttgccggaataacaggggtttctgacgcctactcccaaagcttaccagggaaaagttag

SEQ ID NO: 76154 - DNA, 1203 bp, Artificial Sequence
  derived and/or modified sequence
atggaagtgcttagacctcagttgatcaggatcgatggaaggaactataggaagaacccagtccaggaacaaacgtatcagcacgaggaagacgaggaagacttttatcagggctccatggagtgtgcagatgaaccatgcgacgcctacgaagtagagcaaacaccacagggctttaggtcgaccctgagggccccaagcctcctatataatctcatccacctgaatacatccaacgactgcggctttcagaaaatcaccctcgactgtcagaatatatatacctggaagtctcgccacattgtaggcaagaggggcgataccagaaagaagattgaaatggagaccaaaacatccatctcaatcccaaagcccggtcaggacggggaaattgtgataacaggccagcacagaaacggggtcatttcggcccgaactagaatagacgtcctgctcgataccttccggagaaagcagccgtttacgcattttctcgcgttctttctcaatgaggttgaggtccaggagggttttctgaggttccaggaagaggtccttgccaagtgttctatggaccatggcgtggatagcagtatctttcagaatccgaaaaaactgcatctaacgatcggcatgttagtcctactgagcgaagaggaaattcaacagacatgtgaaatgttgcagcagtgtaaggaagagttcatcaatgatatctcaggtggaaaacccctggaggtggaaatggccggtatcgagtacatgaatgacgatccagggatggtcgacgtgttgtacgccaaagtccatatgaaagatggatccaatcgcttgcaggagcttgtagatagagtattggagcgctttcaggctagcgggctgatagtgaaggaatggaatagcgtgaaattacatgccaccgtgatgaacacgctcttcaggaaggacccgaacgccgaggggagatacaatctctacacagccgagggtaagtatattttcaaggagcgcgagagcttcgatggtagaaacatcctgaaatctttcgccctgctgccaaggcttgagtacaatgacgctatttctgcacattgcaacctctgcttgcccggttcatcagactcccctgcttctgcctcacaggtggctggaattacaggagtgagcgacgcttactctcaaagtctgccgggaaagtcatag

SEQ ID NO: 76155 - DNA, 2270 bp, Artificial Sequence
  derived and/or modified sequence
ctatcgcacgtctgctgcagcagtctcctgtttctcctcctaccttctccatttttctagtccctgcagggcataattggaatatcatttggagaaagtgtcatggaagttctgcgtccacagcttataagaattgatggccggaattacaggaagaatccagtccaagaacagacctatcaacatgaagaagatgaagaggacttctatcaaggctccatggagtgtgctgatgagccctgtgatgcctacgaggtggagcagaccccacaaggattccggtctactttgagggcccccagcttgctctataatctcattcacttgaacacatcaaacgactgtgggttccagaagataactttggattgtcagaatatttatacttggaagtccaggcatatagttggaaagagaggggacactaggaagaaaatagaaatggagaccaaaacttctattagcattcctaaacctggacaagacggggaaattgtaatcactggccagcatcgaaatggtgtaatttcagcccgaacacggattgatgttcttttggacacttttcgaagaaagcagcccttcactcacttccttgcctttttcctcaatgaagttgaggttcaggaaggattcctgagattccaggaggaagtactggcgaagtgctccatggatcatggggttgacagcagcattttccagaatcctaaaaagcttcatctaactattgggatgttggtgcttttgagtgaggaagagatccagcagacatgtgagatgctacagcagtgtaaagaggaattcattaatgatatttctgggggtaaacccctagaagtggagatggcagggatagaatacatgaatgatgatcctggcatggtggatgttctttacgccaaagtccatatgaaagatggctccaacaggctacaagaattagttgatcgagtgctggaacgttttcaggcatctggactaatagtgaaagagtggaatagtgtgaaactgcatgctacagttatgaatacactattcaggaaagaccccaatgctgaaggcaggtacaatctctacacagcggaaggcaaatatatcttcaaggaaagagaatcatttgatggccgaaatattttaaagagctttgccttgttgcccaggctggagtacaatgatgcaatctccgctcactgcaacctgtgcctcccgggttcaagtgattctcctgcctcagcctcccaagtagctgggattacaggtgtctctgatgcatattctcagagcctaccaggaaaatcctagaatcgagaagggcttgggacacagagagctagtggttgtttgagaacttctactttggctccctaaagctgaattcaattcacatctctcagaggttcaccgtagacagctttggaaactacgcttcctgtggacaaattgacttctcctgaggtggatcttggaaagcactagaaactaaacatcttcaccaggtgctgaagaaaagtgtcttcgttttaattgccaagcagggatgtggacatttggatggtgactttcctgggtggttccccatagattcaccattgcctctaatggtgtctacacccgtcatactaccagctgagatggtggtgggcataaggagaatttgtgcctataacccttagtgtgttctggttttttttcttttaatttttaaattgtcgtaaaatactcataaaacatactgtcttcaccatttttaagtgcacagttcagtaacgttaactgttaatacattcataatgctgtgtggccgtcaccgccgtccatctccataggcttctcagcttgtaaaatggaaactgtacccattaaacagtaattcccactcctcccagcccccgcagccaccattctgctttctgtctctctggttttgactattctcagtatctcatataagtggaatcatacagtgacttgtctttttgtgactggcttatttcacttagcataatgtcctcaaggttcatccatgttgtgtcaggtgacaggatttccttcctgtattatacatataatggaatgttccgttacatgtgcgtaccacactctgttcctccatcagtgaacacttggcttgcttcctcttgactattgggagtagtgctaatacagacacgggggtgcaaatatctctttgagactctgcctttaattcctttaccacccagagttttatctttagcaaaataaccattaaagttgtttgcctttta

SEQ ID NO: 76156 - DNA, 1311 bp, Artificial Sequence
  derived and/or modified sequence
aatttcctatcgcacgtctgctgcagcagtctcctgtttctcctcctaccttctccatttttctagtccctgcagggcataattggaatatcatttggagaaagtgtcatggaagttctgcgtccacagcttataagaattgatggccggaattacaggaagaatccagtccaagaacagacctatcaacatgaagaagatgaagaggacttctatcaaggctccatggagtgtgctgatgagccctgtgatgcctacgaggtggagcagaccccacaaggattccggtctactttgagggcccccagcttgctctataatctcattcacttgaacacatcaaacgactgtgggttccagaagataactttggattgtcagaatatttatacttggaagtccaggcatatagttggaaagagaggggacactaggaagaaaatagaaatggagaccaaaacttctattagcattcctaaacctggacaagacggggaaattgtaatcactggccagcatcgaaatggtgtaatttcagcccgaacacggattgatgttcttttggacacttttcgaagaaagcagcccttcactcacttccttgcctttttcctcaatgaagttgaggttcaggaaggattcctgagattccaggaggaagtactggcgaagtgctccatggatcatggggttgacagcagcattttccagaatcctaaaaagcttcatctaactattgggatgttggtgcttttgagtgaggaagagatccagcagacatgtgagatgctacagcagtgtaaagaggaattcattaatgatatttctgggggtaaacccctagaagtggagatggcagggatagaatacatgaatgatgatcctggcatggtggatgttctttacgccaaagtccatatgaaagatggctccaacaggctacaagaattagttgatcgagtgctggaacgttttcaggcatctggactaatagtgaaagagtggaatagtgtgaaactgcatgctacagttatgaatacactattcaggaaagaccccaatgctgaaggcaggtacaatctctacacagcggaaggcaaatatatcttcaaggaaagagaatcatttgatggccgaaatattttaaagagctttgccttgttgcccaggctggagtacaatgatgcaatctccgctcactgcaacctgtgcctcccgggttcaagtgattctcctgcctcagcctcccaagtagctgggattacaggtgtctctgatgcatattctcagagcctaccaggaaaatcctag

SEQ ID NO: 76157 - DNA, 1203 bp, Artificial Sequence
  derived and/or modified sequence
atggaggtgctgagaccccagctgatcagaatcgacggcagaaactacagaaagaaccccgtgcaggagcagacctaccagcacgaggaggacgaggaggacttctaccagggcagcatggagtgcgccgacgagccctgcgacgcctacgaggtggagcagaccccccagggcttcagaagcaccctgagagcccccagcctgctgtacaacctgatccacctgaacaccagcaacgactgcggcttccagaagatcaccctggactgccagaacatctacacctggaagagcagacacatcgtgggcaagagaggcgacaccagaaagaagatcgagatggagaccaagaccagcatcagcatccccaagcccggccaggacggcgagatcgtgatcaccggccagcacagaaacggcgtgatcagcgccagaaccagaatcgacgtgctgctggacaccttcagaagaaagcagcccttcacccacttcctggccttcttcctgaacgaggtggaggtgcaggagggcttcctgagattccaggaggaggtgctggccaagtgcagcatggaccacggcgtggacagcagcatcttccagaaccccaagaagctgcacctgaccatcggcatgctggtgctgctgagcgaggaggagatccagcagacctgcgagatgctgcagcagtgcaaggaggagttcatcaacgacatcagcggcggcaagcccctggaggtggagatggccggcatcgagtacatgaacgacgaccccggcatggtggacgtgctgtacgccaaggtgcacatgaaggacggcagcaacagactgcaggagctggtggacagagtgctggagagattccaggccagcggcctgatcgtgaaggagtggaacagcgtgaagctgcacgccaccgtgatgaacaccctgttcagaaaggaccccaacgccgagggcagatacaacctgtacaccgccgagggcaagtacatcttcaaggagagagagagcttcgacggcagaaacatcctgaagagcttcgccctgctgcccagactggagtacaacgacgccatcagcgcccactgcaacctgtgcctgcccggcagcagcgacagccccgccagcgccagccaggtggccggcatcaccggcgtgagcgacgcctacagccagagcctgcccggcaagagctag

SEQ ID NO: 76158 - protein, 559 aa, Artificial Sequence
  derived and/or modified sequence
MAPTLQQAYRRRWWMACTAVLENLFFSAVLLGWGSLLIILKNEGFYSSTCPAESSTNTTQDEQRRWPGCDQQDEMLNLGFTIGSFVLSATTLPLGILMDRFGPRPVRLVGSACFTASCTLMALASRDVEALSPLIFLALSLNGFGGICLTFTSLTLPNMFGNLRSTLMALMIGSYASSAITFPGIKLIYDAGVAFVVIMFTWSGLACLIFLNCTLNWPIEAFPAPEEVNYTKKIKLSGLALDHKVTGDLFYTHVTTMGQRLSQKAPSLEDGSDAFMSPQDVRGTSENLPERSVPLRKSLCSPTFLWSLLTMGMTQLRIIFYMAAVNKMLEYLVTGGQEHETNEQQQKVAETVGFYSSVFGAMQLLCLLTCPLIGYIMDWRIKDCVDAPTQGTVLGDARDGVATKSIRPRYCKIQKLTNAISAFTLTNLLLVGFGITCLINNLHLQFVTFVLHTIVRGFFHSACGSLYAAVFPSNHFGTLTGLQSLISAVFALLQQPLFMAMVGPLKGEPFWVNLGLLLFSLLGFLLPSYLFYYRARLQQEYAANGMGPLKVLSGSEVTA

SEQ ID NO: 76159 - protein, 110 aa, Artificial Sequence
  derived and/or modified sequence
MAPTLQQAYRRRWWMACTAVLENLFFSAVLLGWGSLLIILKNEGFYSSTCPAESSTNTTQDEQRRWPGCDQQDEMLNLGFTIGSFVLSATTLPLGILMDRFGPRPVRLVG

SEQ ID NO: 76160 - protein, 341 aa, Artificial Sequence
  derived and/or modified sequence
MLPEQLYFLQSPPEEEPEYHPDASAQELNVRESDVRVCDESSCKYGGVCKEDGDGLKCACQFQCHTNYIPVCGSNGDTYQNECFLRRAACKHQKEITVIARGPCYSDNGSGSGEGEEEGSGAEVHRKHSKCGPCKYKAECDEDAENVGCVCNIDCSGYSFNPVCASDGSSYNNPCFVREASCIKQEQIDIRHLGHCTDTDDTSLLGKKDDGLQYRPDVKDASDQREDVYIGNHMPCPENLNGYCIHGKCEFIYSTQKASCRCESGYTGQHCEKTDFSILYVVPSRQKLTHVLIAAIIGAVQIAIIVAIVMCITRKCPKNNRGRRQKQNLGHFTSDTSSRMV

SEQ ID NO: 76161 - protein, 134 aa, Artificial Sequence
  derived and/or modified sequence
MQNNEIIKPAKYFSELEKSILLALVEKYKYVLECKKSDARTIALKQRTWQALAHEYNSQPSVSLRDFKQLKKCWENIKARTKKIMAHERREKVKRSVSPLLSTHVLGKEKIASMLPEQLYFLQSPPEEEPEYHP

SEQ ID NO: 76162 - protein, 344 aa, Artificial Sequence
  derived and/or modified sequence
  misc_feature (1)..(1): Xaa can be any naturally occurring amino acid
XASMLPEQLYFLQSPPEEEPEYHPDASAQELNVRESDVRVCDESSCKYGGVCKEDGDGLKCACQFQCHTNYIPVCGSNGDTYQNECFLRRAACKHQKEITVIARGPCYSDNGSGSGEGEEEGSGAEVHRKHSKCGPCKYKAECDEDAENVGCVCNIDCSGYSFNPVCASDGSSYNNPCFVREASCIKQEQIDIRHLGHCTDTDDTSLLGKKDDGLQYRPDVKDASDQREDVYIGNHMPCPENLNGYCIHGKCEFIYSTQKASCRCESGYTGQHCEKTDFSILYVVPSRQKLTHVLIAAIIGAVQIAIIVAIVMCITRKCPKNNRGRRQKQNLGHFTSDTSSRMV

SEQ ID NO: 76163 - DNA, 1026 bp, Artificial Sequence
  derived and/or modified sequence
atgctgcccgagcagctgtacttcctgcagagcccccccgaggaggagcccgagtaccaccccgacgccagcgcccaggagctgaacgtgagagagagcgacgtgagagtgtgcgacgagagcagctgcaagtacggcggcgtgtgcaaggaggacggcgacggcctgaagtgcgcctgccagttccagtgccacaccaactacatccccgtgtgcggcagcaacggcgacacctaccagaacgagtgcttcctgagaagagccgcctgcaagcaccagaaggagatcaccgtgatcgccagaggcccctgctacagcgacaacggcagcggcagcggcgagggcgaggaggagggcagcggcgccgaggtgcacagaaagcacagcaagtgcggcccctgcaagtacaaggccgagtgcgacgaggacgccgagaacgtgggctgcgtgtgcaacatcgactgcagcggctacagcttcaaccccgtgtgcgccagcgacggcagcagctacaacaacccctgcttcgtgagagaggccagctgcatcaagcaggagcagatcgacatcagacacctgggccactgcaccgacaccgacgacaccagcctgctgggcaagaaggacgacggcctgcagtacagacccgacgtgaaggacgccagcgaccagagagaggacgtgtacatcggcaaccacatgccctgccccgagaacctgaacggctactgcatccacggcaagtgcgagttcatctacagcacccagaaggccagctgcagatgcgagagcggctacaccggccagcactgcgagaagaccgacttcagcatcctgtacgtggtgcccagcagacagaagctgacccacgtgctgatcgccgccatcatcggcgccgtgcagatcgccatcatcgtggccatcgtgatgtgcatcaccagaaagtgccccaagaacaacagaggcagaagacagaagcagaacctgggccacttcaccagcgacaccagcagcagaatggtgtag

SEQ ID NO: 76164 - DNA, 1026 bp, Artificial Sequence
  derived and/or modified sequence
atgctgccggaacagctctacttccttcagtctcctcccgaggaggagcccgagtatcacccagacgcatctgcccaggaattgaatgtgcgagagtctgatgtgcgggtctgcgatgaatcgtcatgtaagtacggcggtgtctgtaaggaggatggagacggcctgaagtgcgcatgtcagttccagtgccatactaactacattccggtatgtggtagtaacggcgatacataccagaatgagtgctttttgaggcgcgccgcttgtaagcatcagaaagagattaccgttattgccagagggccctgttattcagataacggatccggtagcggtgagggtgaagaagaagggtctggtgcagaggttcaccgcaaacactctaagtgcggcccctgtaagtataaggccgaatgcgacgaggacgcggagaacgttggttgtgtgtgcaacatcgactgctccgggtattccttcaatccagtgtgtgcgtccgacggcagcagctataacaacccatgcttcgtgcgtgaagcatcctgtatcaagcaagagcagatcgacatccgtcacctgggacattgcactgataccgatgatacatctctgttgggtaaaaaagatgacgggctgcagtatcgacctgatgtgaaggacgcgagcgatcagagggaggacgtgtacatcggcaatcatatgccttgcccagagaacctgaacggttactgcatccatgggaaatgcgagtttatctattccacccagaaggcgtcatgtagatgcgaaagtggatacacaggacagcattgtgaaaagaccgacttctcaattctgtatgtcgtgccttcccgccagaagctgactcacgtgctgattgcggccattatcggcgcagttcagatcgcaataattgtggcaattgttatgtgcatcacccgtaagtgtcccaagaacaaccgaggcagacgccagaaacagaacttaggacactttacctccgataccagctctaggatggtttag

SEQ ID NO: 76165 - DNA, 1026 bp, Artificial Sequence
  derived and/or modified sequence
atgctgcctgagcagctgtacttcctgcagagccccccagaggaggagcctgagtaccacccagatgccagcgcccaggagctgaatgtgcgggagagtgatgtgcgggtgtgtgatgagagcagctgcaagtatggaggagtgtgcaaggaggatggagatggcctgaagtgtgcctgccagttccagtgccacaccaactacatccctgtgtgtggcagcaatggagacacctaccagaatgaatgcttcctgcggcgggccgcctgcaagcaccagaaggagatcaccgtgattgcccggggcccctgctacagcgacaatggcagcggcagcggggagggggaggaggagggcagcggggctgaggtgcacaggaagcacagcaaatgtggcccctgcaagtacaaggcagaatgtgatgaagatgctgaaaatgtgggctgtgtgtgcaacatcgactgcagcggctacagcttcaaccctgtgtgtgccagtgatggcagcagctacaacaacccctgctttgtgcgggaggccagctgcatcaagcaggagcagattgacatccgccacctgggccactgcacagacacagatgacaccagcctgctgggcaagaaggatgatggcctgcagtacagaccagatgtgaaggatgccagtgaccagcgggaggatgtgtacatcggcaaccacatgccctgcccagagaacctgaatggctactgcatccacggcaaatgtgagttcatctacagcacccagaaggccagctgccgctgtgagagcggctacacaggccagcactgtgagaagacagacttcagcatcctgtatgtggtgcccagccggcagaagctgacccacgtgctgattgctgccatcattggagctgtgcagatcgccatcatcgtggccatcgtgatgtgcatcaccaggaaatgtcccaagaacaacagaggaagacggcagaagcagaacctgggccacttcaccagtgacaccagcagcaggatggtgtag

SEQ ID NO: 76166 - DNA, 1026 bp, Artificial Sequence
  derived and/or modified sequence
atgctgcccgagcagctgtacttcctgcagagcccccccgaggaggaaccagagtatcaccccgatgccagcgctcaggagctgaatgtccgcgagtcggacgtccgcgtgtgtgacgagtcgagctgtaaatatggcggggtctgtaaagaagatggggatggcctcaagtgcgcctgccagttccaatgccacacaaattacattcctgtgtgcggttctaatggcgatacctatcagaacgagtgttttctgcgccgtgccgcctgcaagcatcagaaggagataacagtgattgcaagagggccatgttatagcgacaatggcagcggatccggcgagggagaagaagagggctctggcgcggaggtccataggaagcactcaaagtgcggtccttgtaagtacaaagccgaatgtgatgaagatgccgagaatgtcggctgtgtgtgcaacatcgactgcagcggctattcatttaatcctgtgtgcgcaagtgacgggagctcttataacaacccatgttttgtgcgagaggcctcctgcattaaacaggagcagatcgatatcagacatcttgggcattgtactgatactgacgatacttctcttctgggcaagaaggatgatgggctgcaatacagaccagacgttaaggacgcttcggaccagcgggaagacgtgtatattggcaatcacatgccatgtccagagaatctgaatggatactgtatccacgggaagtgcgagttcatctactcaacccagaaggcttcttgtaggtgtgagtccggctacactggacagcattgcgagaaaaccgacttctccattctgtatgtggtccccagccgccagaagttaactcacgtgctgattgccgcgattattggtgcagtgcagatcgctattatcgtcgctatcgtaatgtgcataaccaggaagtgtcccaaaaataaccgaggccgccgacagaaacagaatctggggcactttacctctgacaccagtagccgaatggtgtag

SEQ ID NO: 76167 - DNA, 1026 bp, Artificial Sequence
  derived and/or modified sequence
atgctccctgagcagctctactttttacagtctccccctgaggaagagcctgagtaccacccagatgccagcgcacaggagctaaatgtacgggagtccgatgtgcgagtttgtgacgaatcgtcttgtaagtatggcggtgtgtgtaaggaggatggagatggactcaaatgcgcttgccagttccagtgccacactaattatattcccgtgtgcggttccaacggagatacataccaaaacgagtgcttcttacggagagccgcttgtaaacatcagaaagaaatcactgttatcgctcgcggtccgtgttactccgataatggctctggaagtggcgaaggcgaggaggaaggttcaggcgcagaggtgcatcgcaaacacagtaaatgtggcccttgcaaatacaaagcggagtgtgacgaagatgccgagaatgtgggctgcgtatgcaatatcgattgttccggatactcattcaaccctgtctgcgcttcggacggctcctcttataataatccctgcttcgttagggaggcctcgtgcattaaacaggaacaaatagacatccgtcatcttggacattgcactgacaccgatgatacctctttactgggaaaaaaggatgatggacttcagtatcgacctgacgtcaaagacgcatcagatcagagagaagatgtctacataggcaatcatatgccttgcccagagaacctgaatggttattgcattcatgggaaatgtgagttcatctacagtactcaaaaggcatcttgcagatgcgagagcggttataccggccagcattgtgagaaaaccgatttttccatcctctatgtcgtgcccagccgacagaaactgacccacgttcttattgccgcaatcatcggcgcagttcaaattgccatcatcgtcgcgatcgttatgtgtattactcggaagtgccccaaaaacaacagagggcgtaggcaaaaacagaacctcggtcatttcacttctgacacatcttctcgaatggtgtag

SEQ ID NO: 76168 - DNA, 2058 bp, Artificial Sequence
  derived and/or modified sequence
atgctgccggagcagctctacttcctgcagagccccccggaggaggagcccgaataccaccccgacgcctcagcccaagaattaaatgtgagggagtctgacgtaagagtttgtgatgagtcatcatgtaaatatggaggagtctgtaaagaagatggagatggtttgaaatgtgcatgccaatttcagtgccatacaaattatattcctgtctgtggatcaaatggggacacttatcaaaatgaatgctttctcagaagggctgcttgtaagcaccagaaagagataacagtaatagcaagaggaccatgctactctgataatggatctggatctggagaaggagaagaggaagggtcaggggcagaagttcacagaaaacactccaagtgtggaccctgcaaatataaagctgagtgtgatgaagatgcagaaaatgttgggtgtgtatgtaatatagattgcagtggatacagttttaatcctgtgtgtgcttctgatgggagttcctataacaatccctgttttgttcgagaagcatcttgtataaagcaagaacaaattgatataaggcatcttggtcattgcacagatacagatgacactagtttgttgggaaagaaagatgatggactacaatatcgaccagatgtgaaagatgctagtgatcaaagagaagatgtttatattggaaaccacatgccttgccctgaaaacctcaatggttactgcatccatggaaaatgtgaattcatctattctactcagaaggcttcttgtagatgtgaatctggctacactggacagcactgtgaaaagacagactttagtattctctatgtagtgccaagtaggcaaaagctcactcatgttcttattgcagcaattattggagctgtacagattgccatcatagtagcaattgtaatgtgcataacaagaaaatgccccaaaaacaatagaggacgtcgacagaagcaaaacctaggtcattttacttcagatacgtcatccagaatggtttaaactgatgacttttatatgtacactgaccatgtgatgtacatttattatgtctttttttaaagaatggaaatatttatttcagaggccttatttttggacatttttagtgtagtactgttggctcgtatttagaatattcagctacgacagttttggactgtttagtagtctttgttttatgtttttaaatacagaaattgctttcacaaatttgtaccacatggtaattctaagacttgttctttacccatggaatgtaatatttttgcaaagatggactacttcacaaatggttataaagtcatatccacttcttccacaatgaccacagcaaatgaccaagcatgaactaaaggtaaagatgtttacagattacttttcttacaaaaaaaatctagaagacactgtgtttaaatagatatttaaatgtttttgagatttagtaactgattttttagacactgcctatcgcatgaactgtaaagctgtgtgtattaggtgtaaaatatttataagatatatggactggggaatttgattattcctccctttgaaaaaatagtcctaataatttgaacaaatatgttagtaatgatggaacagatcaatgaaaagtagatatagatattgtgaaaataggctgtttaacaaacagattggaataaagcctattctaccagttaaactactttaatacacattcatttttaaagaaaatgtttgttttaacataaataaacaaatcgtatcagtgtttgtgaataaaatacaaaaatgattgttaatgattggtgctcttaaagtgagcttaaaatttatccaagacgtatatccaaatttgtcctgtagtaatagattaatattcatagattgttggtgtttaaagatctgaagtgtgagtagaatgtattcagctgtttaacatgtagtttagatattcaaaagtatgcatgtagaatttaaagaatatgttaaaaattattaattttaatattttgtttggaaaagcatgttataatataatgttttcac

SEQ ID NO: 76169 - DNA, 1035 bp, Artificial Sequence
  derived and/or modified sequence
tgagccagcatgctgcccgagcagctgtacttcctgcagagcccccccgaggaggagcccgagtaccaccccgacgccagcgcccaggagctgaacgtgagagagagcgacgtgagagtgtgcgacgagagcagctgcaagtacggcggcgtgtgcaaggaggacggcgacggcctgaagtgcgcctgccagttccagtgccacaccaactacatccccgtgtgcggcagcaacggcgacacctaccagaacgagtgcttcctgagaagagccgcctgcaagcaccagaaggagatcaccgtgatcgccagaggcccctgctacagcgacaacggcagcggcagcggcgagggcgaggaggagggcagcggcgccgaggtgcacagaaagcacagcaagtgcggcccctgcaagtacaaggccgagtgcgacgaggacgccgagaacgtgggctgcgtgtgcaacatcgactgcagcggctacagcttcaaccccgtgtgcgccagcgacggcagcagctacaacaacccctgcttcgtgagagaggccagctgcatcaagcaggagcagatcgacatcagacacctgggccactgcaccgacaccgacgacaccagcctgctgggcaagaaggacgacggcctgcagtacagacccgacgtgaaggacgccagcgaccagagagaggacgtgtacatcggcaaccacatgccctgccccgagaacctgaacggctactgcatccacggcaagtgcgagttcatctacagcacccagaaggccagctgcagatgcgagagcggctacaccggccagcactgcgagaagaccgacttcagcatcctgtacgtggtgcccagcagacagaagctgacccacgtgctgatcgccgccatcatcggcgccgtgcagatcgccatcatcgtggccatcgtgatgtgcatcaccagaaagtgccccaagaacaacagaggcagaagacagaagcagaacctgggccacttcaccagcgacaccagcagcagaatggtgtag

SEQ ID NO: 76170 - DNA, 1035 bp, Artificial Sequence
  derived and/or modified sequence
taagccagtatgctgcccgagcagctctacttcttgcagtcccctcccgaagaggaaccagaataccaccccgatgctagcgcccaggaacttaacgtgcgagaatcggacgtcagagtgtgcgatgaatccagctgcaaatatggaggggtgtgcaaagaagatggtgatggcctcaagtgcgcatgccagttccagtgtcacactaattacatccctgtgtgcggctctaacggggacacttatcaaaatgagtgcttcctgagacgggctgcctgcaaacatcaaaaggagataaccgtgatagctagagggccttgttatagtgacaacgggtccggatccggagagggggaagaagagggcagcggagcggaggttcatagaaaacacagcaaatgcggaccctgtaaatataaagcagaatgtgatgaagatgcagagaacgtcggatgtgtgtgtaatatcgattgcagtggttactcgtttaatcccgtgtgcgcttcagatgggtcctcttacaacaatccttgtttcgtcagggaggcctcatgtataaaacaggagcagatcgatatcaggcacctaggccactgcacagacacggacgacaccagtctgcttggaaagaaggatgatggactccagtacaggcccgatgtcaaggatgccagcgatcaacgtgaggatgtctatataggtaatcacatgccatgcccagagaacctaaacggatactgtatccacggtaagtgcgagttcatttattccacacagaaagcgtcatgtagatgtgagtctgggtacactgggcaacattgtgagaagacggattttagtattctctacgtcgtcccatcaaggcagaagctgactcacgtgttgatagcagccatcattggagctgtgcagatagccattatcgtagcgatcgtgatgtgtattactcggaaatgccccaaaaataatcgcgggcgacggcagaagcaaaacttgggacacttcactagtgacacctcgtcacggatggtgtag

SEQ ID NO: 76171 - DNA, 1035 bp, Artificial Sequence
  derived and/or modified sequence
tgagcctccatgctgcctgagcagctgtacttcctgcagagccccccagaggaggagcctgagtaccacccagatgccagcgcccaggagctgaatgtgcgggagagtgatgtgcgggtgtgtgatgagagcagctgcaagtatggaggagtgtgcaaggaggatggagatggcctgaagtgtgcctgccagttccagtgccacaccaactacatccctgtgtgtggcagcaatggagacacctaccagaatgaatgcttcctgcggcgggccgcctgcaagcaccagaaggagatcaccgtcatcgcccggggcccctgctacagcgacaatggaagtggcagcggggagggggaggaggagggcagcggggctgaggtgcacaggaagcacagcaaatgtggcccctgcaagtacaaggccgagtgtgatgaagatgctgaaaatgtgggctgtgtgtgcaacatcgactgcagcggctacagcttcaaccctgtgtgtgccagtgatggcagcagctacaacaacccctgctttgtgcgggaggccagctgcatcaagcaggagcagattgacatccgccacctgggccactgcacagacacagatgacaccagcctgctgggcaagaaggatgatggcctgcagtacagaccagatgtgaaggatgccagtgaccagagagaagatgtgtacatcggcaaccacatgccctgcccagagaacctgaatggctactgcatccatggaaaatgtgagttcatctacagcacccagaaggccagctgccgctgtgagagcggctacacaggccagcactgtgagaagacagacttcagcatcctgtatgtggtgcccagccggcagaagctgacccacgtgctgattgctgccatcatcggggctgtgcagatcgccatcatcgtggccatcgtgatgtgcatcaccaggaagtgccccaagaacaacagaggccggcggcagaagcagaacctgggccacttcaccagtgacaccagcagcaggatggtgtag

SEQ ID NO: 76172 - DNA, 1035 bp, Artificial Sequence
  derived and/or modified sequence
tgagccagcatgctgcccgagcagctgtacttcctgcagagcccccccgaagaagagccagagtatcaccccgacgcatctgcacaagagctgaacgtcagggaaagtgacgttcgggtttgcgatgagagcagttgtaaatatggcggggtatgcaaagaggacggcgacggcctgaaatgcgcgtgtcaattccagtgccataccaactatatccccgtttgtggtagcaatggcgatacataccaaaacgaatgcttcctcagaagagccgcttgcaaacatcagaaggaaataaccgtgattgcacgcgggccctgctactctgacaacggctcaggctccggcgaaggcgaggaggaaggcagcggagcagaggtccacaggaagcactccaagtgcggtccctgtaaatacaaggctgaatgcgatgaggatgcagagaatgtgggctgcgtttgcaatattgattgcagcggctactcctttaaccctgtgtgcgcgtccgacgggtcttcatataataatccctgtttcgtgcgggaggcatcctgtatcaagcaggaacagattgatatccggcacttgggccactgcaccgacactgatgatacaagcctgcttggtaaaaaagatgatggtttacagtaccggcctgatgtcaaggatgcaagtgatcagagggaggacgtctacatcggcaaccatatgccttgtcccgagaacttaaatggatactgcatccatggaaagtgtgagttcatctattcaacacagaaggctagttgtcgttgcgagagtggatataccggccagcactgtgagaagacagatttctctatcctatatgtagtaccctcccgccagaagctgacccatgtgctgatcgcggcaattatcggtgcagtccagatagccattatcgtggctatagtgatgtgcatcacccgtaaatgcccgaagaacaacagaggtagacgccagaagcagaaccttgggcattttacctcggacacttcctctaggatggtgtag

SEQ ID NO: 76173 - DNA, 2069 bp, Artificial Sequence
  derived and/or modified sequence
cgccagcatgctgccggagcagctctacttcctgcagagccccccggaggaggagcccgaataccaccccgacgcctcagcccaagaattaaatgtgagggagtctgacgtaagagtttgtgatgagtcatcatgtaaatatggaggagtctgtaaagaagatggagatggtttgaaatgtgcatgccaatttcagtgccatacaaattatattcctgtctgtggatcaaatggggacacttatcaaaatgaatgctttctcagaagggctgcttgtaagcaccagaaagagataacagtaatagcaagaggaccatgctactctgataatggatctggatctggagaaggagaagaggaagggtcaggggcagaagttcacagaaaacactccaagtgtggaccctgcaaatataaagctgagtgtgatgaagatgcagaaaatgttgggtgtgtatgtaatatagattgcagtggatacagttttaatcctgtgtgtgcttctgatgggagttcctataacaatccctgttttgttcgagaagcatcttgtataaagcaagaacaaattgatataaggcatcttggtcattgcacagatacagatgacactagtttgttgggaaagaaagatgatggactacaatatcgaccagatgtgaaagatgctagtgatcaaagagaagatgtttatattggaaaccacatgccttgccctgaaaacctcaatggttactgcatccatggaaaatgtgaattcatctattctactcagaaggcttcttgtagatgtgaatctggctacactggacagcactgtgaaaagacagactttagtattctctatgtagtgccaagtaggcaaaagctcactcatgttcttattgcagcaattattggagctgtacagattgccatcatagtagcaattgtaatgtgcataacaagaaaatgccccaaaaacaatagaggacgtcgacagaagcaaaacctaggtcattttacttcagatacgtcatccagaatggtttaaactgatgacttttatatgtacactgaccatgtgatgtacatttattatgtctttttttaaagaatggaaatatttatttcagaggccttatttttggacatttttagtgtagtactgttggctcgtatttagaatattcagctacgacagttttggactgtttagtagtctttgttttatgtttttaaatacagaaattgctttcacaaatttgtaccacatggtaattctaagacttgttctttacccatggaatgtaatatttttgcaaagatggactacttcacaaatggttataaagtcatatccacttcttccacaatgaccacagcaaatgaccaagcatgaactaaaggtaaagatgtttacagattacttttcttacaaaaaaaatctagaagacactgtgtttaaatagatatttaaatgtttttgagatttagtaactgattttttagacactgcctatcgcatgaactgtaaagctgtgtgtattaggtgtaaaatatttataagatatatggactggggaatttgattattcctccctttgaaaaaatagtcctaataatttgaacaaatatgttagtaatgatggaacagatcaatgaaaagtagatatagatattgtgaaaataggctgtttaacaaacagattggaataaagcctattctaccagttaaactactttaatacacattcatttttaaagaaaatgtttgttttaacataaataaacaaatcgtatcagtgtttgtgaataaaatacaaaaatgattgttaatgattggtgctcttaaagtgagcttaaaatttatccaagacgtatatccaaatttgtcctgtagtaatagattaatattcatagattgttggtgtttaaagatctgaagtgtgagtagaatgtattcagctgtttaacatgtagtttagatattcaaaagtatgcatgtagaatttaaagaatatgttaaaaattattaattttaatattttgtttggaaaagcatgttataatataatgttttcactata

SEQ ID NO: 76174 - DNA, 1035 bp, Artificial Sequence
  derived and/or modified sequence
taggcttcaatgctgcccgaacagctctatttcctgcagtcacctccagaggaagagcctgagtaccaccctgatgcgagcgcacaggagctcaacgtgcgcgaaagcgatgtccgggtgtgcgatgagagcagctgcaaatatggaggtgtttgcaaggaggacggggatgggcttaagtgtgcctgtcagtttcagtgtcacaccaattacattcctgtctgcggctcgaatggagacacctaccagaatgagtgctttctgaggcgggcagcttgtaagcatcagaaagagataactgtgatagcacgaggaccctgttattccgacaacggatctggtagtggggaaggagaggaagaggggtcaggcgctgaagtccaccgcaaacatagcaagtgcggtccatgcaagtataaagcggaatgtgacgaggacgccgagaacgtcggatgtgtgtgtaatatcgattgctccgggtattcttttaacccagtttgcgcgagcgacggcagttcatacaacaatccgtgcttcgtgcgggaagcttcctgtattaagcaggaacagatagatatcagacacttggggcactgtactgacacagacgacaccagcctgctcggaaagaaagatgacggtctgcagtatcgccctgatgtgaaagatgcctcagatcagcgagaggatgtgtacattggtaaccatatgccatgtcctgagaacctgaacggttattgcatccatgggaaatgtgagttcatctactctacccagaaagccagctgtaggtgtgagtcaggctatacggggcagcattgcgagaagaccgacttctccattctttacgtcgtgccgtctagacagaagctcacccatgttcttatcgcggctataatcggcgctgtacaaatcgcaattattgtagcaattgtgatgtgcataacgaggaaatgtcctaaaaacaatagaggtcgccgacaaaaacagaacttaggtcacttcacatcagatacaagttccagaatggtttag

SEQ ID NO: 76175 - protein, 1773 aa, Artificial Sequence
  derived and/or modified sequence
MRRGNISPAFWFLWLLLFGLLGPSSENTTAFTKGSDTTTASITGSETTMASTMASTSALTTGSKITTDSTTGSETTSASTMASTAAFTTGSETNTASTTDSGTTIASTRTFTTGSDTTTGSTAGSETIVASTTVSGTTTTFTIASTTVPETTMASSTTSTAGSEKTMASSIISETTMASTTGSETATVSTTGSETTTTSTASSEATKVSTTGSETTTASTAGSETTTTSTSMAGSEATTTSTADSKVITASSMSSETTVAPAAGSNTTTASTTGSETTTILIKASETTTASTAGSETTTPSPTGSQTTIVSISGSEITTTSTAGSENTTVSSAGSGTTTASMAGSETTVSTAGSETTTVSITGTETTMVSAMGSETTTNSTTSSETTVTSTAGSETTTVSTVGSETTTAYTADSETTAASTTGSEMTTVFTAGSETITPSTAGSETTTVSTAGSETTTVSTTGSETTTASTAHSETTAASTMGSETTKVSTAGSETTVSTAGSETTAASTEDSETNTAFTEDSKTTTASTTGFETTAASTTGSEPTMASTMGSETTMASTIGPETTKVSTASSEVTTVFAAGSETIRASTVGSETTTVSTTGSETTTASIMGSETSTDSTTGSETTTASTEGSETTTASTEGSEATTVSTTGSETTTVSITDSETTTTCTEGSEMTAVSTTVFETTTASTEGSEITIASTSDSETTTASTEGSETTTVTTAGSETKTAYTTGSETTTASNTGLETTTVFTIGSDTTTASTEGSETTAVSATGSEMTTVSTEGSENTTVSTTGSETTTVSTTGLETTTTSTEGSEMTTVSTTGAETTTDSTEGSGTTAASTAGSETTTVSTADSENTTASTADSETTSASTTGSETTTASTTSSETTTASTEGSETTTVSTTDSETTMVSTTGSERTITSTEGSETTTVSATGSETTVSTEGSGTTTVSITGSETTKVSTTGSETTTTSTEGSEITTASITGSETTTASTEGSETTTASTEGSETTSASTTGSETTTASTTSSETTMASIMGSETTMASTIGSETTKVSTASSKMTTVFTENSETTIASTTASETTTVSTAGSETIPASTAGSETTTTTSTEGSETTTASTEGSETTTASTESSETTTATTIGSETTTASTEGSETTTTSTEGSETTTASTEGSEITTVSTTGSETTTASTEGSETTTASTEGSELTTVSTTGSETITVSAEGSETTTVTTMGSETTTASTAGSETTTVSTAGSETTTASIEGSETTTVSSTGSETTTVSTTGTETTITSTEGSETTTVTTAGSETTAVYTTGSETTTTSTEGSETTTVSTTGSETTTASTADLETTTVSTSGSGTTTASTAGSETTTVYITGSKTTTASTEGSEATTVSTTSSETTTASTTGSEMTTVFTTVSETTTVSTIGSEATTSSAAGSEATTTSTEGSETTTASTAGSETTTASTAGSETTTASTSGSETNTACTTGSETSTPSSAGSETNTAFIIGSESTIASTASLEPTATSLTGSETTTVSITASGATAASTTVSSTTFVLTKATDVSIQPITNTPMSGTRTTGTRLTASSSVTMAPGMDFTASAASHTVPGIVLNTSGLGTSTMGASSTTSAHGVRTTTGSTREPTSSTFQETGPVSMGTNTVSMSHTPTNVIKPSGYLQPWAIILISLAAVVAAVGLSVGLSFCLRNLFFPLRYCGIYYPHGHSHSLGLDLNLGLGSGTFHSLGNALVHGGELEMGHGGTHGFGYGVGHGLSHIHGDGYGVNHGGHYGHGGGH

SEQ ID NO: 76176 - DNA, 1183 bp, Artificial Sequence
  derived and/or modified sequence
ctacctgctccaccctcaacccaccagaaccatgggctgctgtggctgctctggaggctgtggctccggctgtgggggctgcggctctggctgtgggggatgtggctctagctgctgtgtgcccatctgctgctgcaagcccgtgtgctgctgtgtgccagcctgttcctgctccagctgtggctcctgtgggggctccaaggggggccgtggctcctgtgggggctccaagggggactgtggctcctgtgggggctccaagggaggctgtggttcttgtggctgctcccagtgcagctgctataagccctgctgttgctcctcaggctgtgggtcatcctgctgccagtccagctgctgcaaaccctgctgttcccagtccagctgttgtaagccctgcagctgctcttcaggctgtgggtcatcctgctgccagtccagctgctgcaagccctgctgttcccagtccagctgctgtaagccctgctgctgctcttcaggctgtgggtcatcctgctgccagtccagctgctgcaagccctgctgttcccagtccagctgctgtgtcccaatttgctgccagtgcaagatctgaggctctgcctacaaatctcagctggtcccacagatctgggctctccaggaatgactgtagctgtgtcctgaattcctgaagcacatctctgagtctgtcctcctctggactaaggcagcctagcgtccagggctcagtactcagctgctcagcctctgaggtcatgagggcttctggcatgctgggtgctgcccatcaaccctcccagaatcccctcttcctttcctgacctcatcacttcaaccttctcagggcttcaagatcccacatccctgggcccctcctgtgagcctgctggaaacacactgaaactggaatcctccgacctgctgccgcctctccccggtccctgcaacctcctggctcctccacccttcatcttcatcctgcctgagctgccacagctccgattgtttttggagttgacctagaggactcagaattattagagaccccaggatcctctcctgaggaggaggggcgcccagtctcctcttctacctctgacctggccttgtttctttccccagggcttcgccttgtaagtgcctaggctgaatcttctaaataaatacgatccacacctcc

SEQ ID NO: 76177 - DNA, 5322 bp, Artificial Sequence
  derived and/or modified sequence
atgagaagaggcaacatcagccccgccttctggttcctgtggctgctgctgttcggcctgctgggccccagcagcgagaacaccaccgccttcaccaagggcagcgacaccaccaccgccagcatcaccggcagcgagaccaccatggccagcaccatggccagcaccagcgccctgaccaccggcagcaagatcaccaccgacagcaccaccggcagcgagaccaccagcgccagcaccatggccagcaccgccgccttcaccaccggcagcgagaccaacaccgccagcaccaccgacagcggcaccaccatcgccagcaccagaaccttcaccaccggcagcgacaccaccaccggcagcaccgccggcagcgagaccatcgtggccagcaccaccgtgagcggcaccaccaccaccttcaccatcgccagcaccaccgtgcccgagaccaccatggccagcagcaccaccagcaccgccggcagcgagaagaccatggccagcagcatcatcagcgagaccaccatggccagcaccaccggcagcgagaccgccaccgtgagcaccaccggcagcgagaccaccaccaccagcaccgccagcagcgaggccaccaaggtgagcaccaccggcagcgagaccaccaccgccagcaccgccggcagcgagaccaccaccaccagcaccagcatggccggcagcgaggccaccaccaccagcaccgccgacagcaaggtgatcaccgccagcagcatgagcagcgagaccaccgtggcccccgccgccggcagcaacaccaccaccgccagcaccaccggcagcgagaccaccaccatcctgatcaaggccagcgagaccaccaccgccagcaccgccggcagcgagaccaccacccccagccccaccggcagccagaccaccatcgtgagcatcagcggcagcgagatcaccaccaccagcaccgccggcagcgagaacaccaccgtgagcagcgccggcagcggcaccaccaccgccagcatggccggcagcgagaccaccgtgagcaccgccggcagcgagaccaccaccgtgagcatcaccggcaccgagaccaccatggtgagcgccatgggcagcgagaccaccaccaacagcaccaccagcagcgagaccaccgtgaccagcaccgccggcagcgagaccaccaccgtgagcaccgtgggcagcgagaccaccaccgcctacaccgccgacagcgagaccaccgccgccagcaccaccggcagcgagatgaccaccgtgttcaccgccggcagcgagaccatcacccccagcaccgccggcagcgagaccaccaccgtgagcaccgccggcagcgagaccaccaccgtgagcaccaccggcagcgagaccaccaccgccagcaccgcccacagcgagaccaccgccgccagcaccatgggcagcgagaccaccaaggtgagcaccgccggcagcgagaccaccgtgagcaccgccggcagcgagaccaccgccgccagcaccgaggacagcgagaccaacaccgccttcaccgaggacagcaagaccaccaccgccagcaccaccggcttcgagaccaccgccgccagcaccaccggcagcgagcccaccatggccagcaccatgggcagcgagaccaccatggccagcaccatcggccccgagaccaccaaggtgagcaccgccagcagcgaggtgaccaccgtgttcgccgccggcagcgagaccatcagagccagcaccgtgggcagcgagaccaccaccgtgagcaccaccggcagcgagaccaccaccgccagcatcatgggcagcgagaccagcaccgacagcaccaccggcagcgagaccaccaccgccagcaccgagggcagcgagaccaccaccgccagcaccgagggcagcgaggccaccaccgtgagcaccaccggcagcgagaccaccaccgtgagcatcaccgacagcgagaccaccaccacctgcaccgagggcagcgagatgaccgccgtgagcaccaccgtgttcgagaccaccaccgccagcaccgagggcagcgagatcaccatcgccagcaccagcgacagcgagaccaccaccgccagcaccgagggcagcgagaccaccaccgtgaccaccgccggcagcgagaccaagaccgcctacaccaccggcagcgagaccaccaccgccagcaacaccggcctggagaccaccaccgtgttcaccatcggcagcgacaccaccaccgccagcaccgagggcagcgagaccaccgccgtgagcgccaccggcagcgagatgaccaccgtgagcaccgagggcagcgagaacaccaccgtgagcaccaccggcagcgagaccaccaccgtgagcaccaccggcctggagaccaccaccaccagcaccgagggcagcgagatgaccaccgtgagcaccaccggcgccgagaccaccaccgacagcaccgagggcagcggcaccaccgccgccagcaccgccggcagcgagaccaccaccgtgagcaccgccgacagcgagaacaccaccgccagcaccgccgacagcgagaccaccagcgccagcaccaccggcagcgagaccaccaccgccagcaccaccagcagcgagaccaccaccgccagcaccgagggcagcgagaccaccaccgtgagcaccaccgacagcgagaccaccatggtgagcaccaccggcagcgagagaaccatcaccagcaccgagggcagcgagaccaccaccgtgagcgccaccggcagcgagaccaccgtgagcaccgagggcagcggcaccaccaccgtgagcatcaccggcagcgagaccaccaaggtgagcaccaccggcagcgagaccaccaccaccagcaccgagggcagcgagatcaccaccgccagcatcaccggcagcgagaccaccaccgccagcaccgagggcagcgagaccaccaccgccagcaccgagggcagcgagaccaccagcgccagcaccaccggcagcgagaccaccaccgccagcaccaccagcagcgagaccaccatggccagcatcatgggcagcgagaccaccatggccagcaccatcggcagcgagaccaccaaggtgagcaccgccagcagcaagatgaccaccgtgttcaccgagaacagcgagaccaccatcgccagcaccaccgccagcgagaccaccaccgtgagcaccgccggcagcgagaccatccccgccagcaccgccggcagcgagaccaccaccaccaccagcaccgagggcagcgagaccaccaccgccagcaccgagggcagcgagaccaccaccgccagcaccgagagcagcgagaccaccaccgccaccaccatcggcagcgagaccaccaccgccagcaccgagggcagcgagaccaccaccaccagcaccgagggcagcgagaccaccaccgccagcaccgagggcagcgagatcaccaccgtgagcaccaccggcagcgagaccaccaccgccagcaccgagggcagcgagaccaccaccgccagcaccgagggcagcgagctgaccaccgtgagcaccaccggcagcgagaccatcaccgtgagcgccgagggcagcgagaccaccaccgtgaccaccatgggcagcgagaccaccaccgccagcaccgccggcagcgagaccaccaccgtgagcaccgccggcagcgagaccaccaccgccagcatcgagggcagcgagaccaccaccgtgagcagcaccggcagcgagaccaccaccgtgagcaccaccggcaccgagaccaccatcaccagcaccgagggcagcgagaccaccaccgtgaccaccgccggcagcgagaccaccgccgtgtacaccaccggcagcgagaccaccaccaccagcaccgagggcagcgagaccaccaccgtgagcaccaccggcagcgagaccaccaccgccagcaccgccgacctggagaccaccaccgtgagcaccagcggcagcggcaccaccaccgccagcaccgccggcagcgagaccaccaccgtgtacatcaccggcagcaagaccaccaccgccagcaccgagggcagcgaggccaccaccgtgagcaccaccagcagcgagaccaccaccgccagcaccaccggcagcgagatgaccaccgtgttcaccaccgtgagcgagaccaccaccgtgagcaccatcggcagcgaggccaccaccagcagcgccgccggcagcgaggccaccaccaccagcaccgagggcagcgagaccaccaccgccagcaccgccggcagcgagaccaccaccgccagcaccgccggcagcgagaccaccaccgccagcaccagcggcagcgagaccaacaccgcctgcaccaccggcagcgagaccagcacccccagcagcgccggcagcgagaccaacaccgccttcatcatcggcagcgagagcaccatcgccagcaccgccagcctggagcccaccgccaccagcctgaccggcagcgagaccaccaccgtgagcatcaccgccagcggcgccaccgccgccagcaccaccgtgagcagcaccaccttcgtgctgaccaaggccaccgacgtgagcatccagcccatcaccaacacccccatgagcggcaccagaaccaccggcaccagactgaccgccagcagcagcgtgaccatggcccccggcatggacttcaccgccagcgccgccagccacaccgtgcccggcatcgtgctgaacaccagcggcctgggcaccagcaccatgggcgccagcagcaccaccagcgcccacggcgtgagaaccaccaccggcagcaccagagagcccaccagcagcaccttccaggagaccggccccgtgagcatgggcaccaacaccgtgagcatgagccacacccccaccaacgtgatcaagcccagcggctacctgcagccctgggccatcatcctgatcagcctggccgccgtggtggccgccgtgggcctgagcgtgggcctgagcttctgcctgagaaacctgttcttccccctgagatactgcggcatctactacccccacggccacagccacagcctgggcctggacctgaacctgggcctgggcagcggcaccttccacagcctgggcaacgccctggtgcacggcggcgagctggagatgggccacggcggcacccacggcttcggctacggcgtgggccacggcctgagccacatccacggcgacggctacggcgtgaaccacggcggccactacggccacggcggcggccactag

SEQ ID NO: 76178 - DNA, 5322 bp, Artificial Sequence
  derived and/or modified sequence
atgcggaggggcaacatatcccctgccttctggtttctgtggctgttactattcggactactgggaccatcttccgaaaacacaaccgccttcacaaagggatccgacacgactaccgcatccataacagggtcagagactacaatggcctccaccatggcctccacatcagccctgacaactgggtctaagataacgacagactctaccacgggttctgaaaccacgagtgctagtactatggcgagcacagccgcctttactaccgggtcagagaccaatacagcctctaccaccgactcaggcacaaccatcgcaagtactcgtactttcacaacgggatccgataccacgacaggctcaactgccgggtccgagactatcgtcgcttcaaccactgtgagcggcacaaccacgaccttcacaattgcttccacaacagtcccagagactacaatggcctcctctaccaccagcacagcaggttccgagaagaccatggcatcatccattatctcagagacaaccatggcctccaccaccgggtccgagacggcgacagtgtctaccacagggagtgaaactacgaccaccagcactgcctccagcgaagctacaaaagtctcgactacgggtagtgagactacaaccgccagcacagccggatcagagactacaaccacatcaacttcaatggcaggtagcgaagccaccaccacatccaccgctgattccaaggtgatcacggcaagttctatgtctagtgaaaccacggttgcgcccgcagcagggtctaacactaccacagcctcaacaaccgggtcagaaacaacaaccatccttatcaaggctagtgaaacgacaaccgcttccacagcaggaagcgagaccaccaccccttccccgaccggatctcagactacaatcgtttcaatcagtggctctgaaataaccacaacaagcacggcaggctctgaaaacactacagtctcctcagccgggtccggaaccacgactgcctcaatggcagggtctgagaccacagtgtccaccgctggttcagagacaacgacagtgtcgatcactggaacagaaacaaccatggtgagtgcaatggggtctgaaacgaccacaaacagtaccacgtcctcagaaacgaccgttacttccaccgccgggtctgagaccactaccgttagcactgtcggatccgaaactacgactgcatataccgcggatagcgaaacaactgctgcttctacaacaggctcagaaatgacaaccgtgttcaccgccggttctgaaactataacaccttccacagccggaagcgagaccacaactgtgtctactgccggctcggagaccacgacggtcagtacaaccggaagcgagacaaccaccgcttcgacggcccattctgaaaccacggctgccagtacaatgggaagtgagaccactaaggtctccaccgccggctcggagactacagtgtctactgcggggagcgaaacaaccgctgcttcaacagaggacagcgaaacaaacaccgcttttacggaagactctaagaccaccacagccagcaccaccggctttgagactacggccgcaagtactaccggcagcgagcccaccatggcatctaccatgggtagtgaaactacaatggcatccactataggacctgagacgaccaaggtgtcaacagcctcctctgaggttacaacagtctttgccgccgggtcagaaaccatcagagcttcgactgtcgggtctgagacgaccactgtctccacaacaggaagtgagactactactgcatccatcatgggctctgagacctcaactgatagcacaaccggtagcgagactaccactgcttcgacagagggctcagaaaccaccacagcttcgaccgaggggtctgaagcgacaaccgtcagcaccacagggagcgagacaaccacagtttctatcactgactccgagaccaccactacttgcactgaagggagtgaaatgaccgccgtgagtacaacagtattcgagacaaccacagcctctaccgaaggcagcgaaattactatcgcctctacgagcgactctgaaacaacaaccgcttccactgaaggcagtgaaactaccaccgtcacgaccgccggttctgaaaccaagacagcttacactacaggatctgaaacaaccactgcgagtaatactgggctggaaacaaccactgtgttcacgattggcagcgacactactacggcctccacagaggggtctgagaccaccgccgtctcagctacgggctctgagatgactaccgtgagcactgagggatctgaaaatacaacagtgtctacaaccggttccgagacaaccaccgtgtccacaaccgggctagagacaactactacatctaccgaaggttccgaaatgaccacagtatctacaacaggcgccgagacgacgacagattctactgaaggttccggaacgaccgctgcctccactgccggctccgagacaacgactgtctcgaccgctgacagtgaaaacaccactgccagcaccgccgactccgagactacaagtgctagcacaaccggaagcgagactacaacggcctccaccacaagttctgagactacaacggcatctacagagggatccgagactaccactgtgtccaccaccgatagcgagaccaccatggtgagcaccacggggtccgaaaggacaattacttctacagaaggcagcgagacgaccacagtgagcgcgacgggcagcgaaactacggtgagcaccgaaggctctggcaccaccaccgtgtcgataacgggttcggagacgacaaaggtgtcgacaaccggatctgaaaccaccacaacttctaccgagggttccgaaattacaacagcttctattacggggtcagagaccacaacggcctcgactgaaggatccgaaaccactacagccagtacagagggctcagagacaacatcagccagcacaacagggagcgagaccacaactgcatccacgacaagctctgagactactatggcgtcaatcatgggatcggaaactacaatggcttctaccataggatccgaaactactaaagtctctacagcgtcctccaaaatgacaacggtgtttactgaaaattctgagactacgatcgcttcaacgaccgccagcgaaacgacaactgtgagcacggctgggtccgagacaatcccggcttctactgccggatcagagacgaccactaccactagtaccgaaggatcagagactaccacagctagtacagagggttcagaaacgactaccgcatcgacagagtcatccgaaaccaccactgccaccaccatagggtctgagactacaactgcatccactgaaggctccgagacgactacgacatccacagaggggtccgaaaccaccactgcttccaccgaaggctccgaaataaccaccgtgagcaccacaggatcggagactaccacagcatcgacagaaggatccgagaccactacggcctctactgagggcagcgagcttaccaccgtctctacgacgggcagcgagaccatcactgtgtcagcagaaggaagtgagaccaccaccgtcaccacaatgggctcggagacgaccaccgcttccacggccggcagtgagaccactaccgtctcaactgccggatcagagaccacgactgcctccattgaaggaagtgagaccaccaccgttagcagtaccggatctgagaccactaccgtttctactaccggcacagaaacaaccatcactagcactgagggatccgagacaacaacagtcaccactgctggcagcgagacaaccgccgtctacaccactgggagtgagacgaccactactagcaccgagggaagcgagactacgaccgtcagcacaaccggcagcgaaacaacaactgcatccaccgcggatctcgaaaccacgacagtgagtacgagcgggtctgggaccacgaccgcttctaccgccggtagtgaaactacaactgtttacattacagggagtaagactaccacggcatcaacagagggatcagaggccacaactgtttcaactacctcttctgagacaaccaccgcgtcaactactggaagcgagatgacgactgtgttcacaaccgtgtccgaaactaccactgtgtctactataggctcagaagctacaacatctagcgcagctggctccgaggccacaacgacatcgactgaagggagcgaaactacgactgccagcaccgcaggatctgagaccacgacagccagcaccgcgggctccgagactaccaccgcctctacatcgggatccgagaccaacacggcttgtaccacaggaagtgagacatctactccatcgtcagccggctctgagacaaacaccgcgtttatcatcggcagcgaatccacaattgcaagcactgcaagcctggaacctacagcaacgagtcttactggaagcgaaaccactaccgtatccattactgcgagcggcgccaccgctgcgtctaccaccgtcagctcaactaccttcgtgctcactaaggctaccgacgtgagtatccagccgatcactaacacccccatgagcggaacaagaacaacaggtactcgactgactgcctcctcctcagtaacaatggccccaggtatggactttacggcgtcagctgcatcccataccgtgccaggtatcgtcctcaatacctctggactcggaacaagcactatgggggcctcaagcaccaccagcgctcacggtgtgagaaccaccactgggtccacgcgtgaacctacttcttcaacatttcaggaaaccgggcctgtaagcatggggactaataccgtttcaatgtctcacaccccaacaaatgtcatcaaacccagtggctacctccagccatgggctatcattctcatctctctggcggccgtcgtcgcggcagtgggactgagcgtcgggttgagtttctgtctgcgcaatctgtttttcccattaagatattgcggaatatattatccacatggacactcccacagcctggggttggacctgaacctcggactcgggtcgggcactttccactctttggggaacgctctcgtccacgggggggaactggagatggggcatggcggcacccatggcttcggttacggggtgggccacgggctgtctcatatacacggagacggttatggcgtgaatcatggaggtcactacggccacggagggggtcactag

SEQ ID NO: 76179 - DNA, 5322 bp, Artificial Sequence
  derived and/or modified sequence
atgaggcggggcaacatcagccctgccttctggttcctgtggctgctgctgtttggcctgctgggccccagcagcgagaacaccacagccttcaccaagggcagtgacaccaccacagccagcatcactggaagtgagaccaccatggccagcaccatggccagcaccagcgccctgaccaccggcagcaagatcaccacagacagcaccactggaagtgagaccaccagcgccagcaccatggccagcacagctgccttcaccactggaagtgagaccaacacagccagcaccacagattctggcaccaccatcgccagcaccaggaccttcaccactggaagtgacaccaccaccggcagcacagctggcagcgagaccatcgtggccagcaccaccgtgtctggcaccaccaccaccttcaccatcgccagcaccaccgtgcctgagaccaccatggccagcagcaccaccagcacagctggcagcgagaagaccatggccagcagcatcatcagcgagaccaccatggccagcaccactggaagtgaaacagccaccgtgtccaccactggaagtgagaccaccaccaccagcacagccagcagcgaggccaccaaggtgtccaccactggaagtgagaccaccacagccagcacagctggcagcgagaccaccaccaccagcacctccatggccggcagcgaggccaccaccaccagcacagctgacagcaaggtgatcacagccagctccatgagcagcgagaccaccgtggccccagctgctggcagcaacaccaccacagccagcaccactggaagtgagaccaccaccatcctgatcaaggccagcgagaccaccacagccagcacagctggcagcgagaccaccacccccagccccaccggcagccagaccaccatcgtgtccatcagcggcagcgagatcaccaccaccagcacagctggcagcgagaacaccaccgtgagcagcgctggcagcggcaccaccacagcctccatggccggcagcgagaccaccgtgtccacagctggcagcgagaccaccaccgtgtccatcaccggcacagagaccaccatggtgtctgccatgggcagcgagaccaccaccaacagcaccaccagcagcgagaccaccgtgaccagcacagctggcagcgagaccaccaccgtgtccacagtgggcagcgagaccaccacagcctacacagctgacagcgagaccacagctgccagcaccaccggcagcgagatgaccaccgtcttcaccgctggcagcgagaccatcacccccagcacagctggcagcgagaccaccaccgtgtccacagctggcagcgagaccaccaccgtgtccaccaccggcagcgagaccaccacagccagcacagcccacagcgagaccacagctgccagcaccatgggcagcgagaccaccaaggtgtccacagctggcagcgagaccaccgtgtccacagctggcagcgagaccacagctgccagcacagaagattctgagaccaacacagccttcacagaggacagcaagaccaccacagccagcaccactggatttgagaccacagctgccagcaccactggaagtgagcccaccatggccagcaccatgggcagcgagaccaccatggccagcaccatcggccctgagaccaccaaggtgtccacagccagcagcgaggtgaccaccgtgtttgctgctggcagcgagaccatccgggccagcacagtgggcagcgagaccaccaccgtgtccaccactggaagtgagaccaccacagccagcatcatgggcagcgagaccagcacagacagcaccactggaagtgagaccaccacagccagcacagagggcagcgagaccaccacagccagcacagagggcagcgaggccaccaccgtgtccaccactggaagtgagaccaccaccgtgtccatcacagattctgagaccaccaccacctgcacagagggcagcgagatgacagctgtgtccaccaccgtgtttgagaccaccacagccagcacagagggcagcgagatcaccatcgccagcaccagtgacagcgagaccaccacagccagcacagagggcagcgagaccaccaccgtgaccacagctggcagcgagaccaagacagcctacaccactggaagtgagaccaccacagccagcaacacaggcctggagaccaccaccgtcttcaccatcggcagtgacaccaccacagccagcacagagggcagcgagaccacagctgtgtctgccactggaagtgagatgaccaccgtgtccacagagggcagcgagaacaccaccgtgtccaccactggaagtgagaccaccaccgtgtccaccaccggcctggagaccaccaccaccagcacagagggcagcgagatgaccaccgtgtccaccactggagctgagaccaccacagacagcacagagggcagcggcaccacagctgccagcacagctggcagcgagaccaccaccgtgtccacagctgacagcgagaacaccacagccagcacagctgacagcgagaccaccagcgccagcaccactggaagtgagaccaccacagccagcaccaccagcagcgagaccaccacagccagcacagagggcagcgagaccaccaccgtgtccaccacagattctgagaccaccatggtgtccaccactggaagtgagaggaccatcaccagcacagagggcagcgagaccaccaccgtgtctgccactggaagtgagaccaccgtgtccacagagggcagcggcaccaccaccgtgtccatcaccggcagcgagaccaccaaggtgtccaccaccggcagcgagaccaccaccaccagcacagagggcagcgagatcaccacagccagcatcaccggcagcgagaccaccacagccagcacagagggcagcgagaccaccacagccagcacagagggcagcgagaccaccagcgccagcaccaccggcagcgagaccaccacagccagcaccaccagcagcgagaccaccatggccagcatcatgggcagcgagaccaccatggccagcaccatcggcagcgagaccaccaaggtgtccacagccagcagcaagatgaccaccgtcttcacagagaacagcgagaccaccatcgccagcaccacagccagcgagaccaccaccgtgtccacagctggcagcgagaccatcccagccagcacagctggcagcgagaccaccaccaccaccagcacagagggcagcgagaccaccacagccagcacagagggcagcgagaccaccacagccagcacagagagcagcgagaccaccacagccaccaccatcggcagcgagaccaccacagccagcacagagggcagcgagaccaccaccaccagcacagagggcagcgagaccaccacagccagcacagagggcagcgagatcaccaccgtgtccaccactggaagtgagaccaccacagccagcacagagggcagcgagaccaccacagccagcacagagggcagcgagctgaccaccgtgtccaccactggaagtgagaccatcaccgtgtctgctgagggcagcgagaccaccaccgtgaccaccatgggcagcgagaccaccacagccagcacagctggcagcgagaccaccaccgtgtccacagctggcagcgagaccaccacagccagcattgagggcagcgagaccaccaccgtgagcagcactggaagtgagaccaccaccgtgtccaccactggaacagagaccaccatcaccagcacagagggcagcgagaccaccaccgtgaccacagctggcagcgagaccacagctgtgtacaccactggaagtgagaccaccaccaccagcacagagggcagcgagaccaccaccgtgtccaccactggaagtgagaccaccacagccagcacagctgacctggagaccaccaccgtgtccaccagcggcagcggcaccaccacagccagcacagctggcagcgagaccaccaccgtgtacatcaccggcagcaagaccaccacagccagcacagagggcagcgaggccaccaccgtgtccaccaccagcagcgagaccaccacagccagcaccactggaagtgagatgaccaccgtcttcaccaccgtgtctgagaccaccaccgtgtccaccatcggcagcgaggccaccaccagcagcgctgctggcagcgaggccaccaccaccagcacagagggcagcgagaccaccacagccagcacagctggcagcgagaccaccacagccagcacagctggcagcgagaccaccacagccagcaccagcggcagcgagaccaacacagcctgcaccactggaagtgagaccagcacccccagcagcgctggcagcgagaccaacacagccttcatcatcggcagcgagagcaccatcgccagcacagccagcctggagcccacagccaccagcctgactggaagtgagaccaccaccgtgtccatcacagccagcggggccacagctgccagcaccaccgtgagcagcaccacctttgtgctgaccaaggccacagatgtgtccatccagcccatcaccaacacccccatgagcggcaccaggaccaccggcacccggctgacagccagcagctctgtgaccatggcccctggcatggacttcaccgccagcgctgccagccacacagtgcccggcatcgtgctgaacaccagcggcctgggcaccagcaccatgggcgccagcagcaccaccagcgcccacggcgtgaggaccaccaccggcagcacccgggagcccaccagcagcaccttccaggagaccggccctgtgtccatgggcaccaacacagtgtccatgagccacacccccaccaacgtcatcaagcccagcggctacctgcagccctgggccatcatcctgatcagcctggccgctgtggtggccgctgtgggcctgtctgtgggcctgtccttctgcctgaggaacctcttcttccccctgcgctactgcggcatctactacccccacggccacagccacagcctgggcctggacctgaacctgggcctgggcagcggcaccttccacagcctgggcaatgccctggtgcatggaggagagctggagatgggccatggaggcacccacggcttcggctatggagtgggccacggcctgagccacatccatggagatggctatggagtgaaccacggcggccactacggccatggaggcggccactag

SEQ ID NO: 76180 - DNA, 5322 bp, Artificial Sequence
  derived and/or modified sequence
atgcggcggggcaacatcagccccgccttctggttcctgtggctgctgctattcggactcctgggcccttccagtgagaatactaccgcctttaccaaagggagtgataccaccacagcgtcgataacaggatctgagactaccatggctagtacaatggcttccacaagcgccctgacaactgggtctaagatcacaacagactctaccactggctccgaaaccacctccgcaagcacaatggcatcgaccgccgcatttaccacggggtccgagactaacacagcttctaccaccgatagtggcactaccattgcctcgactcggacgtttacgacaggttccgacacaacaacgggttcgacagctggctccgagacaatcgtcgcatccaccaccgtgtctgggaccacaaccaccttcactatcgcctcaaccactgttcctgagacaaccatggccagttccaccacctccaccgccggctcagagaagacaatggctagctcgattatctccgagacgacaatggcttcaacgaccggttctgagaccgccacggtgtcaaccacaggaagcgagacaacaaccacttcaaccgcctcctccgaggcaaccaaagtgtctactactgggagcgagaccaccactgcatctactgccggatccgagacgaccacaacaagtaccagcatggctgggtcagaagcaacgacaacgtcaactgccgatagcaaagtaattacagctagcagcatgagctcagagactactgttgcgcccgccgcaggttctaacacaaccacagcgagcacgacagggagcgaaaccacaacaatcctgattaaggcaagtgaaacaactaccgctagcactgctggctcagagaccacaactccaagcccaacgggtagccagacaaccatcgtttcaatttccggctcggagattactaccaccagcaccgccggaagtgaaaataccacagtgtcaagcgcaggctctggcacgacaactgcatcgatggccgggagtgagacgaccgtgtcaaccgctggctcggaaaccacaacggtgagtattaccggaaccgagacaacaatggtgagcgcaatgggttctgaaacaacaacaaattctacgacctcatccgaaactaccgtcacctcgacagctgggtcggagactaccactgtgtcaactgtggggtccgaaactacaactgcatatacagccgatagcgaaactaccgccgctagcacgactggatctgagatgacgacagtgttcacagctggctcagaaactataacaccttccaccgccggaagtgagacaactaccgtgtcaaccgcagggagtgagactaccacagtgtctacaaccggatcagagacaaccacagctagcaccgcccacagcgagacaacggccgcctcgactatgggctcagaaacaactaaggtctctactgccggaagtgaaactacagtgtcaactgctggcagcgaaaccaccgccgccagtaccgaggactccgaaacaaataccgcattcacggaagatagtaagacaaccacagcttccactacaggcttcgaaacaacagctgcaagcaccactggctcagaacctacgatggctagtaccatggggtctgaaacaaccatggcctcaacaattggccctgaaacgacgaaagtgtcaaccgcctcatctgaggtgacgaccgtgtttgctgcaggctcagagacaatccgggcatctaccgtcggctccgaaacaacaacagtctctactacaggctctgaaactaccacggcaagtatcatgggcagcgagaccagcaccgacagcacaaccgggagcgaaactaccaccgcatcaaccgaaggctctgaaacaacaacagcgtccacagagggtagtgaggctactaccgtgtcaactaccgggtcagagaccactacagttagtattacagacagcgaaactactactacttgcactgagggctctgaaatgacagcagtgtctaccacagtattcgagacaaccactgcttccacagaagggtcagagataactatcgcaagtacgtctgacagcgagactacaaccgcctcaacagaggggagcgaaacaaccacagttactaccgctggatccgaaactaaaactgcgtatacgacaggcagcgagacaacaaccgcctccaatactggactggaaacgactacagtttttactatcggaagtgataccacgaccgctagcacagagggttccgaaaccactgccgtttctgccaccgggtccgagatgacaaccgtttccaccgaaggctccgaaaatacaacagtatctaccacagggtctgagacaactacagtgtccactacaggcctggagaccaccactacatcgaccgaaggcagtgaaatgaccaccgtgagcactactggggctgaaaccactacagatagtacagagggaagcggaacgactgccgcttccaccgcagggagcgaaaccaccaccgtgtcaacggccgattcagaaaatacaactgcgtcaactgccgacagcgagaccacatccgccagtaccaccggctccgagacgacaactgctagtacaacatcgagcgagactaccacggctagcactgaaggaagcgaaactactaccgtcagtaccacagattcagaaacaacaatggtgagtacgacaggtagcgagagaacaataacgtcaacagagggatcggagaccaccaccgttagcgccacgggcagcgagacgactgtgtctacggaaggcagcggaactaccaccgtatctatcacgggatcagaaacgaccaaggtgagcacaaccggatccgaaactacaaccacatccaccgaagggtctgagattacaacagcgtcaattactggttcagaaactacaaccgcatcaaccgagggatcagaaaccaccaccgcatctaccgagggatcggaaaccacttccgccagcacaacagggagcgagactaccactgcgagtaccacaagcagtgagacaaccatggcgtcgattatgggatctgagaccactatggcttctacaattgggtccgagaccacaaaagttagtacggcatctagtaagatgactacagtgtttaccgagaactctgagactacaatcgcgagtacgacagccagtgaaaccaccaccgtctccaccgcaggaagcgaaactattccagctagcacagcaggtagcgagaccaccactacaacgagcactgaaggatccgaaaccaccaccgcctcaacagaggggtccgagaccactactgctagcaccgagagttcagaaacgactaccgccaccaccatcggctccgagactaccaccgcttctaccgaaggcagcgagacaacaacgacatccactgagggctccgagaccacaaccgcctcaacagaggggtccgagataactaccgtctcaactaccggctcggaaacaacaacagccagcaccgagggatccgagacaacaaccgcaagtactgagggaagcgagttaaccacagtttcgacaacaggttcagaaaccattaccgtgtccgccgaaggtagcgagaccaccacggtaactaccatgggcagtgagacgaccaccgcctccactgccggcagcgagacgacaaccgtgagcaccgcagggtctgagaccactacagccagtattgagggaagcgaaacaaccacagtctcctctacaggttctgaaaccacaacggtcagcacgaccggaacagagaccaccatcaccagtacagagggaagtgagactaccactgtcacaactgccggcagcgagaccaccgccgtttatacgactggctcggagacaacaaccacttcgacagaagggtctgaaacaactacagtctctaccacaggaagcgagacaaccacggcttccaccgccgacctggagactacaactgtgagcacttccgggtcaggaacaacgacggcgagcacagcgggttccgagaccactacggtttatatcacagggagcaagacaaccaccgcgagcacggagggctctgaagccactaccgtgagcaccacctcctcagagactaccacagcctccaccacaggttctgagatgactactgtcttcacaaccgtcagcgagacaacaaccgttagcacaataggatcagaagctaccacatctagtgccgctggctcagaggcgacgacaacttctactgagggtagtgaaacaactactgcctctacagcaggctcggaaaccactacagcttcgaccgccggctcagaaacgactaccgcctctacaagcggctccgagacaaacaccgcatgtactaccggttcggaaacttcgacaccgagttcagccggctccgagacaaatacggctttcattattgggtcagaaagcactatagcatctaccgcctccttggagcccacggccacctcccttactggttcagaaaccacaacagtcagcatcacagcatctggagcaactgccgcatctacaacagttagttcaactacattcgtcctgaccaaagccactgacgtgtctatccagccaatcacaaataccccgatgagcggaactagaacaacaggcaccagacttaccgcatcaagcagtgtgacgatggccccaggcatggattttacagcatcagcagctagccacaccgtccccggcattgtgctgaacactagcggcctgggaacaagtacaatgggggcctcgtctaccacttccgcccatggcgttcggaccacgactggatccacaagagagcctaccagcagtacttttcaggaaacaggacccgtcagtatgggtaccaataccgtgtctatgtctcacactcctacaaacgtgattaaaccttcaggctacctgcaaccgtgggctattatcctgataagtctcgcggccgtcgtggccgcagtgggcctgtcagtgggactctctttttgcctgcggaatctgttcttccctttacgctattgcggtatctactacccacacgggcactcccatagccttggcctcgacttgaacttaggtttggggagtgggaccttccacagcctgggtaacgctcttgtgcacggaggcgagttggagatgggacatggagggacacacggcttcggctacggcgtgggccatggcctcagtcatattcacggtgacggttacggagtgaaccatggcggacattacggccatgggggcgggcactag

SEQ ID NO: 76181 - DNA, 6019 bp, Artificial Sequence
  derived and/or modified sequence
aaaaaagaagaaaaataagaagccaaactgtggagcaatttgggggctccccccaaccatgccatctgcctacaaggcttaccctggcactggctggcctttgggtctttttgtgcaactttattttctatcaaggcccagggggtttgccccttgtctctctgcctctttgacctatccttcctttggaacccaggcatctaaatgacaacttctatgtgcatcatttagagatgagaagaggaaatatctctcctgctttctggttcctgtggctgcttctctttggacttctgggacccagctctgagaataccacagccttcacaaaaggctccgacaccaccacagcctccatcacaggctctgagaccaccatggcctccaccatggcctctacttcggccttaactacaggctctaagatcaccacagactctaccacaggctctgagacaacctcagcctccaccatggcttctactgcagccttcaccacaggctctgagaccaacacggcctccaccacagactcagggactactatagcctccactaggaccttcaccacaggctctgacacaaccacaggctccactgcaggctctgaaactatcgtggcctccaccacagtctctgggaccacaacaacctttactatagcctccactacagtccctgagactaccatggcctccagcacaacctccactgcaggctctgagaaaacgatggcctcctccataatttctgagaccaccatggcctccaccacaggctctgagactgccacagtctctaccacaggctctgagaccaccaccacctccactgcaagctctgaggccactaaagtctctaccacaggctctgaaaccaccacagcatctactgcaggttctgagaccaccactacctccacctccatggcaggctctgaggccaccacaacctcaactgcagactccaaggtgatcacggcatccagcatgagctctgagaccactgtggcccccgctgcaggctctaacaccaccacagcctctaccacaggctctgagaccactacaatcctgattaaagcctctgagaccaccacagcctctacagcaggttctgagaccaccaccccctcccccacaggctctcagaccaccatagtctctatttcaggttctgagatcaccaccacctctacggcaggatccgagaacaccacagtctctagtgcaggctctgggaccaccacagcttctatggcaggctctgagaccaccgtctccactgcaggctctgagaccactacagtctctatcacaggcactgagaccaccatggtctctgccatgggctcagagaccaccacaaactctactacaagctctgagaccaccgtcacctctactgcaggctctgagaccaccacagtctccaccgtgggctctgagaccaccacagcctatactgcagattctgagaccactgcagcctctaccacaggctctgagatgaccacagtcttcactgcaggctcggaaaccatcacaccctctactgcaggctcagagaccaccacagtctctactgcaggctctgagaccactacagtctccaccacaggctctgagaccacaacagcctctactgcacattctgagacgactgcagcctccaccatgggctctgagaccaccaaagtctcaactgcaggctctgagaccacagtctccactgcaggctctgagaccactgcagcctctactgaagattctgaaaccaacacagcatttactgaagattctaagactaccacagcctctactacagggtttgagacaaccgcagcctctactacaggctctgagcctaccatggcatccaccatgggctctgagaccactatggcctctaccataggccctgagaccaccaaggtctccactgcaagctctgaggtgaccacagtctttgctgcaggctctgagacaatcagagcctctaccgtaggctctgagaccaccacagtctctaccacaggctctgagaccaccacagcctccatcatgggctctgagaccagcacagattctaccacaggctctgagaccaccacagcctctactgaaggctctgagaccaccacagcttccactgaaggctctgaggccactacagtctccaccacaggctctgagaccactacagtttctatcacagactcagagaccaccaccacctgtactgaaggctctgagatgactgcagtctccaccacagtctttgagaccactacagcctctactgaaggctctgagatcacaatagcctctacttcagactctgagaccaccacagcttctactgaaggttctgagaccactacagtcactaccgcaggctctgagaccaaaacagcctatactacaggctctgagaccaccacagcctctaatacaggcttggagaccaccacagtctttaccataggctctgacaccaccacagcctctactgaaggctctgagaccactgcagtctctgccacaggctctgagatgaccacagtctctactgaaggctctgagaacactacagtctccaccacaggctctgagaccactacagtttccaccacaggcttggagaccaccaccacttccactgaaggctctgagatgactacagtctccaccacaggtgctgagaccaccacagactctactgaaggctctgggaccactgcagcctccactgcaggctctgagaccaccacagtctctactgcagattctgagaacaccacagcatctactgcagattctgagaccacctcagcctctactacaggctctgagaccaccacagcctctactacaagctctgagaccaccacagcctctactgaaggctctgagaccactacagtctccaccacagactctgagaccaccatggtctctaccacaggctctgagaggaccatcacctctactgaaggctctgagaccactacagtatctgccacaggctctgagaccacagtctctactgaaggctctgggaccactacagtctccatcacaggctctgagaccactaaagtttctaccacaggttcagagaccaccaccacttctactgaaggctctgagattactacagcctccatcacaggctctgagaccaccacagcctctactgaaggctccgagaccaccacagcctctactgaaggctccgagaccacctcagcctctactacaggctctgagaccaccacagcctctactacaagctctgagaccaccatggcatccatcatgggctctgagaccactatggcctctaccataggctctgagaccaccaaggtctccactgcaagctctaaaatgaccacagtcttcactgaaaactctgagaccaccatagcctctaccacagcctctgagaccaccacagtctccactgcaggctctgagaccatcccagcctctacagcaggctctgagaccaccaccaccacctctactgaaggctctgagaccactacagcctctactgaaggctctgagaccaccacagcctctactgaaagctctgagaccactacagccactaccataggctctgagaccaccacagcctctactgaaggctctgagactaccaccacctctactgaaggctctgagaccaccacagcctctactgaaggctctgagatcactacagtttctaccacaggctctgagaccaccacagcctctactgaaggctctgagaccaccacagcctctactgaaggctctgagctcactacagtttctaccacaggctctgagaccatcacagtctctgctgaaggctctgagaccactacagtcactactatgggctctgagaccaccacggcctctactgcaggctcagagaccaccacagtctctactgcaggctctgagaccaccacagcctctattgaaggctctgagaccactacagtctcctccacaggctctgagaccaccacagtctctaccacaggcactgagactaccatcacctctactgaaggttcagagaccactacagtcactactgcaggttctgagaccacagcagtctataccacaggctctgagactaccaccacctctactgaaggctctgagacaaccacagtctctaccacgggctctgagaccaccacagcctctaccgcagatttggagaccaccacagtctccacctcaggctctgggaccaccacagcctctaccgcaggctctgagaccacaacagtctatatcacaggctctaagactaccaccgcctctactgaaggctctgaggccactacagtttctaccactagctctgagaccaccacagcctctaccacaggctctgagatgactacagtctttaccacagtctctgagaccaccacagtctctaccataggctctgaggccaccacatcctctgctgcaggctctgaggccaccaccacctctactgaaggctctgagaccaccacagcctccactgcaggctctgagaccaccacagcctccactgcaggctctgagaccaccacagcctccacttcaggctctgagaccaacacagcctgtaccacaggttctgagacctccacaccctccagtgcaggctctgagaccaacactgccttcatcataggctctgagagcaccatagcttccactgcaagcttggagcccactgcaacttccctcacaggctctgagaccaccacagtctctatcacagcttctggggccactgcagcctccaccactgtctcttccaccacgtttgtactcaccaaggccactgacgtttctatccagcccatcaccaacacacctatgtcaggcaccagaaccactggaaccagactcactgcctccagctctgtcaccatggcccctggaatggacttcacggcctctgctgccagccatactgtgccaggaatagtcttaaacacctctggcctgggtacatccactatgggagcatcatctaccacctcagcccacggcgtcaggaccaccacaggatccacccgtgagccaaccagcagcaccttccaggaaacaggcccggtgtccatgggcacaaacacagttagcatgagccacacacccacaaacgtgatcaaaccaagtggatatttacagccctgggctatcatcctcatttccctggctgcagttgtggctgctgttggattgtcagtaggactgagtttttgtctgagaaaccttttcttccccctgagatattgtggtatttattacccccatggccacagccacagccttggtctggacctgaacttgggcctgggctctgggacattccacagcctgggaaatgcactggttcatggaggagaacttgaaatgggacatggaggaacacacggctttggatatggagtgggccatggactgagccacatccatggagatggctacggagtgaatcatggcgggcattatggacatggaggaggccactgaggacaccatggagtggatcacagagggagccaccaaggaggccacggcaggacaagatggctgtggccatagattgggtatcaaaacatattatgggtgggagggggtcatggaggagaaaaaaataatgatcatgaaataattaaaatggagcataggaagcttcccaggatgtgatccatggagatggacatggactaggtcaagaaaagaaccagcaaaaggacctcagagactttgactggcttggaggggacttcaagtcaaagcttctgtgagtttttcctgagtctcagcctctgttgtggggagtcacgacaaccaccctcaggacatcttctctcccatttcccgccacatcagggtcaacgtttctcatccctgtgtttcctcatggtgctataaatattaccaagacatgtctaagaaacaaaagcacataatgaatgtattatcagggccac

SEQ ID NO: 76182 - DNA, 5321 bp, Artificial Sequence
  derived and/or modified sequence
atgcgacgcggtaacatctcccccgctttctggtttctctggctgctgctttttggcttgttggggccttctagtgagaacacgacagcctttaccaaaggttccgacacgaccactgcttcaattacagggagtgaaacaaccatggcctccaccatggccagtactagcgccctcacaaccggatccaagatcacaaccgattcaacaacaggatcagaaaccacttctgccagtacaatggcgagtacagctgcatttacaactggatcggagacaaatacggcctcgactacagacagtggcaccacaatcgcctccacgcgaaccttcacgaccggtagcgatactactacaggctctactgctggatcggaaaccatcgtcgctagtacgactgtctctgggactactacgaccttcaccatagcctccactacagtgccagaaactacgatggctagcagcactacgtctaccgccggatccgagaaaactatggctagctctattatttccgagacaacaatggcaagcaccactggcagtgaaaccgccactgtcagcactactggttctgaaacgaccactaccagcaccgcctcatccgaggccactaaggtgtccacaaccggctctgaaacaactactgcttccaccgcaggatcagaaaccaccacaacatctacctccatggctggaagtgaggcgaccacaactagtaccgccgactctaaagtcataacagcaagcagtatgagttctgagacaactgtggctccagcagccggtagcaacacaacaacagcatctactacagggagcgaaacaactaccattttaatcaaagcttcggaaactacaacagcttcaacagctggcagtgagaccaccactccaagtcccaccggaagccaaaccactattgtctccatctccggttcagaaatcactaccacaagtaccgcgggatccgaaaacaccacggtgtccagcgccggatccggcaccacaactgctagtatggccggatctgagacaacagtgagtactgctggctccgagactaccaccgtctccattaccggtaccgagacaacgatggttagcgccatgggctcagagacaaccaccaattcaacgaccagctccgagacgactgtgacatccaccgctgggtccgaaactaccaccgtgtccaccgtaggcagtgaaacaactacagcctataccgcagattctgaaacaaccgcagcatccacaaccgggagcgagatgacaactgtctttactgccggatcagagacaatcacccccagcacggccggtagcgaaaccactaccgtgtctacagcgggatctgagaccactacggtgtccaccacaggatctgagaccacgaccgcatcaaccgctcattctgaaaccaccgcggcttcaacgatgggcagtgaaacgactaaagtgagcaccgccggtagtgagaccacagtgtccacagctggctccgaaacaactgccgcatccacggaggattctgaaaccaacacagctttcactgaagacagcaaaacaacaacagcctctacaacaggtttcgagacaactgccgcttccactactggatctgagcccaccatggctagcacaatggggagtgagacaacaatggcctcaactatagggccagaaacaaccaaggtttccaccgcaagttcagaggtcacgactgtattcgcggcaggatctgaaacaatacgtgcgagtaccgtcggctcggaaacaacaactgtctccacaacaggctctgagaccaccaccgccagcatcatgggctctgagacaagtacagactctacaaccggaagcgagaccactaccgcaagcacagagggttcagagacaacaacagcgtctactgaggggagtgaagcaacaactgtgtctacaacaggatctgaaaccactacagtgtccattaccgattccgagacgaccacaacctgcaccgaaggatcagagatgacagccgtttccacgaccgtcttcgagactacaactgcatcaactgaggggagcgaaattaccatagcctctacaagcgacagcgagactactacggcctcgacagagggatcagagacaaccacggtgacgaccgccggatctgagacaaagactgcttacactaccggatcggagacaactaccgcctctaatacaggtctggagacgaccaccgtcttcacgatcggaagcgatacaaccaccgctagtacggagggcagcgaaaccaccgcagtgtcagcaaccggttccgaaatgaccaccgtttcaaccgaagggtccgagaatacaactgtgagtactactggatcagagactacaactgtgtccacaaccggactggaaactacaactacttccaccgaaggatctgagatgactaccgtgtccaccactggggcagaaaccacgactgactcaactgaaggttctggaactactgccgcttccactgcgggtagtgagaccacaaccgttagcactgccgacagcgaaaacacaacagccagcaccgccgacagcgaaacgacatcagccagcaccaccggctcggaaactactaccgcctcaaccacgtcctcagagacgacaaccgcgagcaccgagggtagcgagaccaccaccgtatccaccacagacagtgaaactactatggtgagcactaccggatccgagaggacgattaccagcaccgaggggtcggaaaccacaacagtcagcgccaccggatccgaaacaactgtgtcgacagagggctccgggacgactactgtgagcattacgggctcagaaaccaccaaggtatccaccacaggaagcgagactacaaccacctcaactgagggttcagagatcacaacagcaagcatcaccggctctgaaacaaccacagcctccaccgaaggatctgagaccaccaccgcatctaccgagggcagtgaaaccacctctgctagtactacaggttcggagacgacaacggcatcgacgacttcttcggagacaactatggcctccatcatgggctccgaaaccaccatggcttccaccattggctcagagactacaaaagtgtcaactgctagttctaagatgaccaccgtcttcacggagaattctgaaaccaccatcgctagcaccacagcctctgagacgactacagtgtctacggctggatcagagacaataccggcttcgacagcaggaagcgaaacgacaaccactacaagcactgaggggtctgagaccaccaccgcctccaccgaagggtccgagactactactgcctctaccgaatcctctgaaaccaccacggccaccaccattggatctgagacaaccacagcttcaaccgagggaagcgaaactactacgacaagcacagagggaagtgagacaaccacggcctccactgagggctccgagatcaccaccgtgtcgaccacaggctcagaaaccacgacggcttcgactgaaggtagtgagactacaacagcctccacagagggcagtgagctcaccactgtctccaccactggatccgagaccatcaccgtgtcagccgagggcagcgagacgaccacagtaacaaccatgggctccgagaccaccacagcaagtacagccggatctgagactacgacagtcagtacggcaggatctgagaccactaccgcgtctatcgagggcagcgaaaccactaccgtgtccagcaccggctcggaaaccacaacagtcagcacaaccgggaccgagacaaccatcacatcgaccgaaggatcagaaacaacaactgttaccaccgctgggagcgagaccactgcagtctatacaactgggtcggaaacaaccaccacatctactgaagggtccgaaactacgaccgtctcaactacggggtcggaaaccacgactgctagcacagcagacttagagaccactacagtctctacttcagggtccggcaccaccactgcgtcaaccgctggctcagagacaacaaccgtttatatcactggttcaaagacaacgactgccagtactgagggcagcgaagcaaccacagtgtcgaccacatcttctgaaaccacaactgctagtactacaggatcggagatgacaacagtcttcacgactgtgtctgaaactacaactgttagcacaatcggatccgaggcaactaccagttccgccgctggaagcgaggcgactaccaccagcacggaaggctcggagaccactacagcttccacagccggttctgaaaccactactgccagcactgctggatctgagaccactacagctagtacttctggatctgagactaacaccgcttgtaccacaggcagcgagaccagcactccatcctccgccggtagtgagaccaataccgcgttcattatcggatcagaatccacaatcgcctcgactgcttctttagagccaacagcgacttctttaacaggcagcgagacaactacggtctccattacagctagcggagccacagcagccagcactacagtcagctccaccacattcgttctaacaaaagcaacagacgtttctatccagcctattacaaacactcccatgtccggaacccgaaccacaggaacgcgccttaccgccagttcgtcagttaccatggctcctggcatggacttcaccgcctctgctgcctcccataccgttcccggaattgtcctgaataccagtggcttgggcacttctacaatgggagcaagctccactaccagtgctcatggcgtgagaacaaccaccgggagcactcgagagccaacctcctcgaccttccaggaaaccggacccgtgtccatggggactaacacggtctccatgagccacactcctaccaacgtgatcaaaccaagcggctacctccagccatgggccattatcctcatctctcttgcagccgtcgtcgctgccgtcgggttatctgtcggacttagcttttgtctccggaatctgtttttccccctgaggtactgtggaatttactacccacatggccattcacatagcctgggattggatctcaacctggggctggggagcggcacgtttcacagcctgggaaacgcactggttcacggaggagaactcgaaatgggacacggagggacccacggcttcgggtatggcgtgggtcacggactttcccatatccatggggatggatacggcgtgaatcacggaggtcactacggccacggcggtggccatta

SEQ ID NO: 76183 - protein, 586 aa, Artificial Sequence
  derived and/or modified sequence
MESNHKSGDGLSGTQKEAALRALVQRTGYSLVQENGQRKYGGPPPGWDAAPPERGCEIFIGKLPRDLFEDELIPLCEKIGKIYEMRMMMDFNGNNRGYAFVTFSNKVEAKNAIKQLNNYEIRNGRLLGVCASVDNCRLFVGGIPKTKKREEILSEMKKVTEGVVDVIVYPSAADKTKNRGFAFVEYESHRAAAMARRKLLPGRIQLWGHGIAVDWAEPEVEVDEDTMSSVKILYVRNLMLSTSEEMIEKEFNNIKPGAVERVKKIRDYAFVHFSNREDAVEAMKALNGKVLDGSPIEVTLAKPVDKDSYVRYTRGTGGRGTMLQGEYTYSLGQVYDPTTTYLGAPVFYAPQTYAAIPSLHFPATKGHLSNRAIIRAPSVRGAAGVRGLGGRGYLAYTGLGRGYQVKGDKREDKLYDILPGMELTPMNPVTLKPQGIKLAPQILEEICQKNNWGQPVYQLHSAIGQDQRQLFLYKITIPALASQNPAIHPFTPPKLSAFVDEAKTYAAEYTLQTLGIPTDGGDGTMATAAAAATAFPGYAVPNATAPVSAAQLKQAVTLGQDLAAYTTYEVYPTFAVTARGDGYGTF

SEQ ID NO: 76184 - DNA, 1761 bp, Artificial Sequence
  derived and/or modified sequence
atggagagcaaccacaagagcggcgacggcctgagcggcacccagaaggaggccgccctgagagccctggtgcagagaaccggctacagcctggtgcaggagaacggccagagaaagtacggcggccccccccccggctgggacgccgccccccccgagagaggctgcgagatcttcatcggcaagctgcccagagacctgttcgaggacgagctgatccccctgtgcgagaagatcggcaagatctacgagatgagaatgatgatggacttcaacggcaacaacagaggctacgccttcgtgaccttcagcaacaaggtggaggccaagaacgccatcaagcagctgaacaactacgagatcagaaacggcagactgctgggcgtgtgcgccagcgtggacaactgcagactgttcgtgggcggcatccccaagaccaagaagagagaggagatcctgagcgagatgaagaaggtgaccgagggcgtggtggacgtgatcgtgtaccccagcgccgccgacaagaccaagaacagaggcttcgccttcgtggagtacgagagccacagagccgccgccatggccagaagaaagctgctgcccggcagaatccagctgtggggccacggcatcgccgtggactgggccgagcccgaggtggaggtggacgaggacaccatgagcagcgtgaagatcctgtacgtgagaaacctgatgctgagcaccagcgaggagatgatcgagaaggagttcaacaacatcaagcccggcgccgtggagagagtgaagaagatcagagactacgccttcgtgcacttcagcaacagagaggacgccgtggaggccatgaaggccctgaacggcaaggtgctggacggcagccccatcgaggtgaccctggccaagcccgtggacaaggacagctacgtgagatacaccagaggcaccggcggcagaggcaccatgctgcagggcgagtacacctacagcctgggccaggtgtacgaccccaccaccacctacctgggcgcccccgtgttctacgccccccagacctacgccgccatccccagcctgcacttccccgccaccaagggccacctgagcaacagagccatcatcagagcccccagcgtgagaggcgccgccggcgtgagaggcctgggcggcagaggctacctggcctacaccggcctgggcagaggctaccaggtgaagggcgacaagagagaggacaagctgtacgacatcctgcccggcatggagctgacccccatgaaccccgtgaccctgaagccccagggcatcaagctggccccccagatcctggaggagatctgccagaagaacaactggggccagcccgtgtaccagctgcacagcgccatcggccaggaccagagacagctgttcctgtacaagatcaccatccccgccctggccagccagaaccccgccatccaccccttcaccccccccaagctgagcgccttcgtggacgaggccaagacctacgccgccgagtacaccctgcagaccctgggcatccccaccgacggcggcgacggcaccatggccaccgccgccgccgccgccaccgccttccccggctacgccgtgcccaacgccaccgcccccgtgagcgccgcccagctgaagcaggccgtgaccctgggccaggacctggccgcctacaccacctacgaggtgtaccccaccttcgccgtgaccgccagaggcgacggctacggcaccttctag

SEQ ID NO: 76185 - DNA, 606 bp, Artificial Sequence
  derived and/or modified sequence
atggagagcaaccacaagagcggcgacggcctgagcggcacccagaaggaggccgccctgagagccctggtgcagagaaccggctacagcctggtgcaggagaacggccagagaaagtacggcggccccccccccggctgggacgccgccccccccgagagaggctgcgagatcttcatcggcaagctgcccagagacctgttcgaggacgagctgatccccctgtgcgagaagatcggcaagatctacgagatgagaatgatgatggacttcaacggcaacaacagaggctacgccttcgtgaccttcagcaacaaggtggaggccaagaacgccatcaagcagctgaacaactacgagatcagaaacggcagactgctgggcgtgtgcgccagcgtggacaactgcagactgttcgtgggcggcatccccaagaccaagaagagagaggagatcctgagcgagatgaagaaggtgaccgagggcgtggtggacgtgatcgtgtaccccagcgccgccgacaagaccaagaacagaggcttcgccttcgtggagtacgagagccacagagccgccgccatggccagaagaaagctgctgccctag

SEQ ID NO: 76186 - DNA, 1761 bp, Artificial Sequence
  derived and/or modified sequence
atggaaagtaaccataagtctggggacgggttgagcggcactcagaaggaggccgcgctgagagcgttggtgcagcggacaggatattcgctggtccaggaaaatggccagcggaagtacgggggacccccgcccggctgggacgcggcacccccggaacggggttgtgagatcttcatcgggaaactaccgagagatctgttcgaagacgagctgatccctctttgcgagaagataggcaaaatttacgaaatgcgaatgatgatggattttaatggcaacaacagggggtatgccttcgtcaccttctccaataaggtcgaggcaaagaacgccattaagcagctcaataactacgagattaggaatggtaggctacttggggtctgcgcaagcgtggacaactgtagactgttcgttggcggcatacccaagacaaagaaaagagaagaaattctgtccgagatgaaaaaagtaaccgagggagtggtggacgtgatcgtatatccctccgcagcagacaaaacaaagaataggggtttcgcatttgtcgagtacgaaagccaccgtgccgccgccatggccagaaggaagctcttgccagggcggattcagctgtggggccacggcattgcggtagattgggccgaacccgaagtcgaggtggatgaggataccatgtcctctgtgaagatcctctatgtccgaaaccttatgctcagcacttccgaggaaatgattgaaaaggaattcaacaacatcaagccaggcgctgtggaaagggtcaaaaagatccgagattacgctttcgtccacttctccaaccgcgaggatgcagtcgaggctatgaaagcactaaacggtaaggtgctggacggttcacccatcgaggtgactctcgccaagccagtagacaaagactcatatgtgcgatatacaaggggcacaggcggccgtgggactatgttgcagggggaatatacgtacagtctgggtcaggtgtatgatcctactactacctacttgggtgcacctgtgttttacgctccacagacatacgccgctatcccgtcattgcacttccccgctaccaagggacacctctcaaacagggccatcatccgggccccttcggtgcgcggagctgccggagtgcgcgggttaggcggccgcggatatctggcttacacagggctgggcagagggtaccaggtcaaaggagacaaacgggaagataaactgtatgatattcttcccggaatggagcttacaccaatgaatcccgttacacttaagccgcaaggaataaagttggccccccagatcctggaagaaatctgccagaaaaataactggggtcagccagtgtatcagttgcattcggccattggtcaggaccaacggcagctctttctatataaaattacaatccctgcacttgctagtcaaaatcctgcaatacatccttttacgccaccaaagctgtcggcgtttgtggacgaggctaagacttacgcagctgagtacacgctgcagaccctaggaatccctaccgatggtggcgatggcaccatggccactgctgcagcagctgcaacagcctttcctggatacgccgtgccaaatgctactgcccctgtcagtgccgcacagctgaagcaggccgtaacactggggcaggacctggctgcctatacaacatacgaggtctacccaaccttcgccgtcactgcacgtggagacggctacggcacattctag

SEQ ID NO: 76187 - DNA, 1761 bp, Artificial Sequence
  derived and/or modified sequence
atggagtcaaaccacaaaagcggagatggcctgagcggtactcagaaagaggccgccctgagggccttagtgcagcgcacaggctattcactggtccaagagaatggacagcgcaagtacggcggacccccccccggatgggatgcggcaccacccgaacgcggctgtgaaatttttatcggaaaactccctcgggaccttttcgaggacgagttaattcccctgtgtgagaagattgggaagatttacgaaatgcggatgatgatggacttcaacggaaacaatcgagggtacgcattcgttactttctctaacaaggtggaggccaaaaatgcaattaaacagcttaacaattacgaaatccgaaatgggcgcctactaggcgtttgcgccagcgtggacaactgccgcctctttgtcggggggattcctaagacaaagaaacgcgaagagatcctcagcgagatgaagaaagtaaccgaaggcgtggtggacgttatcgtctaccctagcgcagctgataagactaaaaacagggggtttgcatttgttgagtacgagtcacatcgcgccgctgcgatggccagacgcaaactgctgcccggccgaatccagctctgggggcatgggatcgcagttgattgggcagaacctgaggtggaggtagatgaggataccatgtcaagtgtgaaaatcctgtacgtgcgtaacctcatgctgtccacctctgaagaaatgattgagaaggaattcaacaacattaagcccggagcggtagagagagttaaaaagatcagagactatgcctttgtgcacttttctaatagggaagatgccgtcgaggcaatgaaggccctcaatggcaaggttctggatgggtctccaatcgaagtgacactggctaagcccgtcgataaggactcatacgtccggtacacgcgggggacgggtggtagagggactatgctgcaaggcgagtatacttacagccttggacaggtgtatgatcccacaacaacctacttgggggcccctgtgttctacgcacctcagacctatgcggccattcctagcctacattttcccgccacgaaaggacatttgtcaaaccgggccattatcagggccccatctgtgagaggcgctgcaggagtgcgcggtctaggtgggcgcgggtatctggcttacactggtctcgggaggggatatcaggtcaagggtgacaagcgggaggacaaactttacgacattctcccgggcatggaactcactcctatgaatcctgtgacactaaagccccaagggatcaaactcgcacctcagatactggaagagatatgccagaaaaacaattgggggcagccggtttaccagttacattcggcgatcggacaagatcaaaggcagctgttcctgtataagataaccatccctgccctggcaagccagaatccagcgatacacccgttcacaccacctaaactgagtgcattcgtggatgaagcaaagacgtatgctgccgagtataccctccaaaccctggggattcctacagacggaggcgatggtaccatggccactgcggccgcagctgcgactgccttccctggttacgcggtgcccaacgccaccgcacctgtatccgcagctcaactgaaacaggccgtcaccttgggacaggatttggctgcctatacgacttacgaagtgtaccctaccttcgccgtcaccgcaaggggtgacgggtatggtaccttctag

SEQ ID NO: 76188 - DNA, 606 bp, Artificial Sequence
  derived and/or modified sequence
atggaaagtaaccacaagagtggggacggtctgagcggtacccaaaaggaggccgctctgcgagccctcgtgcagcggaccggttattctttggtccaggagaatggccagcgtaaatatgggggacctccacccgggtgggatgccgcaccccctgaacgcggatgtgagatctttataggtaagttgcctagagaccttttcgaggacgagttaatcccattgtgcgaaaaaatagggaagatatacgagatgaggatgatgatggactttaatggaaacaatagaggctatgccttcgttacattctctaacaaagttgaagccaagaatgccataaaacagctaaacaactacgagatccgcaatggccgacttctgggggtttgtgctagtgttgacaactgcagactgttcgttggaggcatacctaaaacaaagaaacgggaagagatcctgtctgaaatgaagaaagtcaccgagggcgttgtggacgttattgtgtatccgtccgcagccgacaagaccaagaaccggggctttgccttcgttgaatatgagtctcacagagccgcggctatggccagacggaaacttctgccatag

SEQ ID NO: 76189 - DNA, 2116 bp, Artificial Sequence
  derived and/or modified sequence
tttgatatgacgattagagcataacccgagtgacacgttgaattcgccataatcaaggaaaccttttccgggtggggatctctgaaattactcagataacagtgctgtgccaaaaacctgtggattttctctacaaaaattattgagcaaccctaattaacctgattttttgctgataatcactctcaatggaatcaaatcacaaatccggggatggattgagcggcactcagaaggaagcagccctccgcgcactggtccagcgcacaggatatagcttggtccaggaaaatggacaaagaaaatatggtggccctccacctggttgggatgctgcaccccctgaaaggggctgtgaaatttttattggaaaacttccccgagacctttttgaggatgagcttataccattatgtgaaaaaatcggtaaaatttatgaaatgagaatgatgatggattttaatggcaacaatagaggatatgcatttgtaacattttcaaataaagtggaagccaagaatgcaatcaagcaacttaataattatgaaattagaaatgggcgcctcttaggggtttgtgccagtgtggacaactgccgattatttgttgggggcatcccaaaaaccaaaaagagagaagaaatcttatcggagatgaaaaaggttactgaaggtgttgtcgatgtcatcgtctacccaagcgctgcagataaaaccaaaaaccgaggctttgccttcgtggagtatgagagtcatcgagcagctgccatggcgaggaggaaactgctaccaggaagaattcagttatggggacatggtattgcagtagactgggcagagccagaagtagaagttgatgaagatacaatgtcttcagtgaaaatcctatatgtaagaaatcttatgctgtctacctctgaagagatgattgaaaaggaattcaacaatatcaaaccaggtgctgtggagagggtgaagaaaattcgagactatgcttttgtgcacttcagtaaccgagaagatgcagttgaggctatgaaagctttaaatggcaaggtgctggatggttcccccattgaagtcaccctagcaaaaccagtggacaaggacagttatgttaggtatacccgaggcacaggtggaaggggcaccatgctgcaaggagagtatacctactctttgggccaagtttatgatcccaccacaacctaccttggagctcctgtcttctatgccccccagacctatgcagcaattcccagtcttcatttcccagccaccaaaggacatctcagcaacagagccattatccgagccccttctgttagaggggctgcgggagtgagaggactgggcggccgtggctatttggcatacacaggcctgggtcgaggataccaggtcaaaggagacaaaagagaagacaaactctatgacattttacctgggatggagctcaccccaatgaatcctgtcacattaaaaccccaaggaattaaactcgctccccagatattagaagagatttgtcagaaaaataactggggacagccagtgtaccagctgcactctgctattggacaagaccaaagacagctattcttgtacaaaataactattcctgctctagccagccagaatcctgcaatccaccctttcacacctccaaagctgagtgcctttgtggatgaagcaaagacgtatgcagccgaatacaccctgcagaccctgggcatccccactgatggaggcgatggcaccatggctactgctgctgctgctgctactgctttcccaggatatgctgtccctaatgcaactgcacccgtgtctgcagcccagctcaagcaagcggtaacccttggacaagacttagcagcatatacaacctatgaggtctacccaacttttgcagtgactgcccgaggggatggatatggcaccttctgaagatgcttttttaaatttaagaataagacacacaaaactctattaaaaaaaaaaaagaaataaacctctaactcggtccccaatgatcataaataatatgtttcctaaagaaatgcctttccagagactgtatagcttataccaattatagaatcatgaagtaagaa

SEQ ID NO: 76190 - DNA, 2068 bp, Artificial Sequence
  derived and/or modified sequence
tttgatatgacgattagagcataacccgagtgacacgttgaattcgccataatcaaggaaaccttttccgggtggggatctctgaaattactcagtgagcaaccctaattaacctgattttttgctgataatcactctcaatggaatcaaatcacaaatccggggatggattgagcggcactcagaaggaagcagccctccgcgcactggtccagcgcacaggatatagcttggtccaggaaaatggacaaagaaaatatggtggccctccacctggttgggatgctgcaccccctgaaaggggctgtgaaatttttattggaaaacttccccgagacctttttgaggatgagcttataccattatgtgaaaaaatcggtaaaatttatgaaatgagaatgatgatggattttaatggcaacaatagaggatatgcatttgtaacattttcaaataaagtggaagccaagaatgcaatcaagcaacttaataattatgaaattagaaatgggcgcctcttaggggtttgtgccagtgtggacaactgccgattatttgttgggggcatcccaaaaaccaaaaagagagaagaaatcttatcggagatgaaaaaggttactgaaggtgttgtcgatgtcatcgtctacccaagcgctgcagataaaaccaaaaaccgaggctttgccttcgtggagtatgagagtcatcgagcagctgccatggcgaggaggaaactgctaccaggaagaattcagttatggggacatggtattgcagtagactgggcagagccagaagtagaagttgatgaagatacaatgtcttcagtgaaaatcctatatgtaagaaatcttatgctgtctacctctgaagagatgattgaaaaggaattcaacaatatcaaaccaggtgctgtggagagggtgaagaaaattcgagactatgcttttgtgcacttcagtaaccgagaagatgcagttgaggctatgaaagctttaaatggcaaggtgctggatggttcccccattgaagtcaccctagcaaaaccagtggacaaggacagttatgttaggtatacccgaggcacaggtggaaggggcaccatgctgcaaggagagtatacctactctttgggccaagtttatgatcccaccacaacctaccttggagctcctgtcttctatgccccccagacctatgcagcaattcccagtcttcatttcccagccaccaaaggacatctcagcaacagagccattatccgagccccttctgttagaggggctgcgggagtgagaggactgggcggccgtggctatttggcatacacaggcctgggtcgaggataccaggtcaaaggagacaaaagagaagacaaactctatgacattttacctgggatggagctcaccccaatgaatcctgtcacattaaaaccccaaggaattaaactcgctccccagatattagaagagatttgtcagaaaaataactggggacagccagtgtaccagctgcactctgctattggacaagaccaaagacagctattcttgtacaaaataactattcctgctctagccagccagaatcctgcaatccaccctttcacacctccaaagctgagtgcctttgtggatgaagcaaagacgtatgcagccgaatacaccctgcagaccctgggcatccccactgatggaggcgatggcaccatggctactgctgctgctgctgctactgctttcccaggatatgctgtccctaatgcaactgcacccgtgtctgcagcccagctcaagcaagcggtaacccttggacaagacttagcagcatatacaacctatgaggtctacccaacttttgcagtgactgcccgaggggatggatatggcaccttctgaagatgcttttttaaatttaagaataagacacacaaaactctattaaaaaaaaaaaagaaataaacctctaactcggtccccaatgatcataaataatatgtttcctaaagaaatgcctttccagagactgtatagcttataccaattatagaatcatgaagtaagaa

SEQ ID NO: 76191 - DNA, 1761 bp, Artificial Sequence
  derived and/or modified sequence
atggagagcaaccacaagtctggagatggcctgagcggcacccagaaggaggccgccctgcgggccctggtgcagaggacaggctacagcctggtgcaggagaatggccagaggaaatatggaggccccccacctggctgggatgctgcccctcctgagcggggctgtgagatcttcatcggcaagctgccccgggacctgtttgaagatgagctgatccccctgtgtgagaagattggcaagatctatgagatgaggatgatgatggacttcaacggcaacaacagaggctacgcctttgtgaccttcagcaacaaggtggaggccaagaatgccatcaagcagctgaacaactatgagatcagaaatggccgcctgctgggcgtgtgtgcctctgtggacaactgccgcctgtttgtgggcggcatccccaagaccaagaagcgggaggagatcctgtctgagatgaagaaggtgacagagggcgtggtggatgtgattgtgtaccccagcgctgctgacaagaccaagaacagaggatttgcctttgtggagtatgagagccacagagctgctgccatggcccggaggaagctgctgcccggccgcatccagctgtggggccatggaattgctgtggactgggccgagcctgaggtggaggtggatgaggacaccatgagctctgtgaagatcctgtatgtgaggaacctgatgctgagcaccagcgaggagatgattgagaaggagttcaacaacatcaagccaggagctgtggagcgggtgaagaagatccgggactatgcctttgtgcacttcagcaacagagaagatgctgtggaggccatgaaggccctgaatggcaaggtgctggatggcagccccatcgaggtgaccctggccaagcctgtggacaaggacagctatgtgcgctacacccggggcaccggcggccggggcaccatgctgcagggcgagtacacctacagcctgggccaggtgtatgaccccaccaccacctacctgggcgcccctgtgttctacgccccccagacctacgccgccatccccagcctgcacttccctgccaccaagggccacctgagcaacagagccatcatccgggcccccagcgtgagaggagctgctggggtgcggggcctgggcggccggggctacctggcctacacaggcctgggccggggctaccaggtgaagggggacaagcgggaggacaagctgtatgacatcctgcccggcatggagctgacccccatgaaccctgtgaccctgaagccccagggcatcaagctggccccccagatcctggaggagatctgccagaagaacaactggggccagcctgtgtaccagctgcacagcgccatcggccaggaccagaggcagctgttcctgtacaagatcaccatcccagccctggccagccagaacccagccatccaccccttcaccccacccaagctgagcgcctttgtggatgaggccaagacctacgccgctgagtacaccctgcagaccctgggcatccccacagatggaggagatggcaccatggccacagctgctgctgctgccacagccttccctggctatgctgtgcccaatgccacagcccctgtgtctgctgcccagctgaagcaggccgtgaccctgggccaggacctggccgcctacaccacctatgaggtgtaccccacctttgctgtgacagcccggggagatggctacggcaccttctag

SEQ ID NO: 76192 - DNA, 606 bp, Artificial Sequence
  derived and/or modified sequence
atggagagcaaccacaagtctggagatggcctgagcggcacccagaaggaggccgccctgcgggccctggtgcagaggacaggctacagcctggtgcaggagaatggccagaggaaatatggaggccccccacctggctgggatgctgcccctcctgagcggggctgtgagatcttcatcggcaagctgccccgggacctgtttgaagatgagctgatccccctgtgtgagaagattggcaagatctatgagatgaggatgatgatggacttcaacggcaacaacagaggctacgcctttgtgaccttcagcaacaaggtggaggccaagaatgccatcaagcagctgaacaactatgagatcagaaatggccgcctgctgggcgtgtgtgcctctgtggacaactgccgcctgtttgtgggcggcatccccaagaccaagaagcgggaggagatcctgtctgagatgaagaaggtgacagagggcgtggtggatgtgattgtgtaccccagcgctgctgacaagaccaagaacagaggatttgcctttgtggagtatgagagccacagagctgctgccatggcccggaggaagctgctgccctag

SEQ ID NO: 76193 - DNA, 1761 bp, Artificial Sequence
  derived and/or modified sequence
atggagagcaaccacaagagcggcgacggcctgagcggcacccagaaagaagctgctctgcgtgcgctggtgcagcgtacaggttattcactggtgcaagagaatggccagcggaagtatggaggcccaccccccgggtgggacgctgctcctcctgagagaggatgcgagatttttatcgggaaactccctcgtgatctgttcgaggacgaactaatccccctgtgtgaaaagatcggtaagatctatgagatgagaatgatgatggacttcaacggaaacaataggggatatgcatttgtcacattctccaataaggtggaggccaaaaacgccattaaacagctgaacaattatgagataagaaacggtagactcctgggagtttgcgctagtgtggacaactgtcgcctgttcgtcggtgggattcccaagacaaaaaaacgcgaagaaatcctctccgagatgaagaaggtgactgaaggagtagtggatgtgatagtgtacccttcggcggcagacaagacaaagaatagagggtttgccttcgtagaatacgagtcccacagggctgccgcaatggcacgaaggaagctactccctggcaggattcagctgtggggacacgggattgcagtggattgggcagagccagaagtggaagtggatgaggacaccatgtcttcggtcaaaattctctatgtgcgaaatctcatgctttccacttccgaggagatgatcgagaaggagttcaataatattaagcccggagcagtcgagagagtgaagaaaattcgggactatgcttttgtgcacttctctaaccgagaggacgcagtggaggctatgaaggcgctgaacgggaaggtactcgatgggagccccatcgaagttacgctcgctaagccagtggataaagattcctacgtcaggtacacgagaggcaccgggggacgaggcacaatgctgcagggggagtacacctacagcctgggtcaggtgtatgatccaactaccacctatctgggcgcccccgtcttctatgccccccaaacctacgccgctattccatctctgcacttccccgctactaaagggcacctgagcaatagggccattattagagcaccgagcgttagaggcgcagctggagtccggggacttgggggacgtgggtatcttgcctacacagggttagggaggggctatcaggtgaagggcgacaagcgggaagacaaactgtatgacatcctgcctgggatggagttgacaccgatgaatccagtcaccctgaaacctcaggggataaagctggcgccacagatcctggaagaaatttgccagaagaacaactggggtcagcctgtctaccagctgcactccgctattgggcaggatcaacggcaattattcctgtacaaaattaccatccctgctctggcttctcaaaaccctgccatccaccccttcacccccccaaaacttagcgcattcgtcgacgaggccaaaacctacgcagctgaatacaccctacagaccttagggattccaacggacggaggagatggtactatggctaccgcagccgctgctgctactgcgtttcctgggtatgcagtgcccaatgctactgcacccgtctcagccgcccagctgaagcaggctgtgaccctgggccaagatctggcagcatatacaacttacgaggtgtatccaactttcgccgtgaccgcccgcggtgatggctatggtacattttag

SEQ ID NO: 76194 - DNA, 1761 bp, Artificial Sequence
  derived and/or modified sequence
atggagagcaaccacaagagcggcgacggcctgagcggcacccagaaagaggctgctctgagagcccttgtccagcgtaccgggtatagtctggtgcaggaaaatggacagagaaagtacggcggccccccccccggctgggatgctgcacccccagaacgggggtgcgaaatcttcattgggaagctgccgcgtgatctttttgaggatgagctgatacctctgtgcgagaagataggtaagatctatgaaatgcggatgatgatggatttcaacggcaataatcgcggctacgcattcgtgaccttctctaacaaagttgaagctaagaatgctatcaagcagctgaacaactacgaaatccggaatggccggctgctgggggtgtgcgcatcagtggacaattgcaggctttttgtcggggggattcccaaaaccaaaaagcgcgaggagattctgagcgagatgaaaaaggtgaccgaaggagttgtggatgtgattgtttatccttcggctgccgacaaaaccaagaatagagggtttgcattcgtcgagtacgagtcccacagggccgcggccatggcccgccggaaattactgccaggtcggatacagctgtggggccacggtattgcagtggattgggcagagccagaggttgaagttgatgaagacacaatgtcatctgttaagattctgtatgttcggaacctgatgttgagtacaagtgaggagatgatcgagaaagagtttaacaacattaagccaggtgccgttgaaagggtgaagaagattcgcgattacgccttcgtgcatttctccaaccgggaggatgccgtcgaggcaatgaaggcactgaacgggaaggtactggacggctcacctattgaggtgaccctagccaagcctgtcgacaaggacagttacgttcgctacacccggggcactggtggccgcggaaccatgctgcagggcgagtacacatactctctagggcaggtctatgaccctactacaacgtacctgggggcacctgtattttacgcccctcagacatacgcggcaataccatcactgcactttcccgctactaagggacacctcagtaatcgggccattattcgcgctccctcagtgcggggagcggccggggtccgcgggctgggcgggcgggggtaccttgcctataccgggctggggcgtggttaccaagtaaagggcgataagagagaggacaaactatacgacattctgcctggcatggagctcacaccgatgaatcccgtcaccctgaaaccccaaggcatcaagctggccccccagatcttagaggagatctgccagaagaacaactgggggcagcccgtgtatcagttacactctgccattggtcaggatcagagacagctcttcctttataaaatcaccatcccagccctggcttctcaaaatccagctattcatcctttcacacccccaaaattgagcgcattcgtggacgaggccaaaacttatgctgccgagtacactctgcagacacttgggattccaactgatggtggcgatggcacgatggccacagcagcagccgcagctaccgcgttccccggctacgctgtcccaaacgccacagcccctgtttcagccgcccagctgaagcaagccgtgactctgggccaggacttagctgcctacactacatatgaagtgtatcctacctttgcagtcactgctcgcggcgatgggtacggaacattctag

SEQ ID NO: 76195 - DNA, 606 bp, Artificial Sequence
  derived and/or modified sequence
atggagagcaaccacaagagcggcgacggcctgagcggcacccagaaagaggctgctctccgggctttggtgcagcgcacggggtattctctggtgcaagaaaacggccagcgtaagtacggcgggccaccccccggttgggacgcagccccaccggagcgcggctgcgagatatttattgggaagcttcctagggacctttttgaagatgagttgatcccactgtgcgaaaaaatcgggaaaatctacgagatgagaatgatgatggattttaatggtaacaaccgagggtatgcctttgtgacattttccaataaagtggaagcaaaaaatgctattaagcagctcaacaactacgaaattcgaaatggccgcttgctcggggtctgcgccagcgtcgacaattgtcgactgttcgtgggggggatccccaagaccaagaaaagggaggagattctcagtgagatgaagaaagtcacagagggtgtggtggacgttatcgtttatccgagcgcagccgacaagacgaagaaccgaggttttgccttcgtggagtacgagagtcacagggctgctgccatggctcggcgcaagctcctgccctag

SEQ ID NO: 76196 - DNA, 885 bp, Artificial Sequence
  derived and/or modified sequence
tttgatatgacgattagagcataacccgagtgacacgttgaattcgccataatcaaggaaaccttttccgggtggggatctctgaaattactcagataacagtgctgtgccaaaaacctgtggattttctctacaaaaattatcatgactgttatctttttgatggaaaagatgaagttcagcgaagaacaaatctacaacttggccagaagactgtagactttgccttcaaagagtgagcaaccctaattaacctgattttttgctgataatcactctcaatggaatcaaatcacaaatccggggatggattgagcggcactcagaaggaagcagccctccgcgcactggtccagcgcacaggatatagcttggtccaggaaaatggacaaagaaaatatggtggccctccacctggttgggatgctgcaccccctgaaaggggctgtgaaatttttattggaaaacttccccgagacctttttgaggatgagcttataccattatgtgaaaaaatcggtaaaatttatgaaatgagaatgatgatggattttaatggcaacaatagaggatatgcatttgtaacattttcaaataaagtggaagccaagaatgcaatcaagcaacttaataattatgaaattagaaatgggcgcctcttaggggtttgtgccagtgtggacaactgccgattatttgttgggggcatcccaaaaaccaaaaagagagaagaaatcttatcggagatgaaaaaggttactgaaggtgttgtcgatgtcatcgtctacccaagcgctgcagataaaaccaaaaaccgaggctttgccttcgtggagtatgagagtcatcgagcagctgccatggcgaggaggaaactgctaccag

SEQ ID NO: 76197 - DNA, 1761 bp, Artificial Sequence
  derived and/or modified sequence
atggaaagcaatcataaatctggggatggtctgtccgggacccagaaagaggctgcattacgagctttggtgcagaggactggctacagcttggtgcaagaaaatggacaaagaaagtacggcggacccccacccggatgggatgcagccccaccagaaaggggctgtgaaatctttattggcaagctgccccgtgacttgttcgaggatgaactgattcctctttgcgaaaaaatcggaaaaatctacgaaatgaggatgatgatggactttaacggcaataaccggggttatgccttcgtaacatttagcaataaggtggaagccaagaacgccatcaagcagctgaacaattacgagattcgcaacggtcgcctcctcggtgtctgtgccagcgtcgacaactgccgcctttttgttggcggaatccccaaaaccaagaaacgtgaagaaatcctgtccgaaatgaagaaagtgacagaaggcgtggttgacgtgattgtgtaccctagtgccgcagacaagacaaaaaatagagggttcgcctttgtcgagtacgagtcacaccgggctgcagcaatggcaagaagaaaactacttcccggtagaattcagctgtggggtcacgggatcgctgtagattgggcagaacctgaagtggaggtcgatgaagataccatgtcatcagtgaagattctgtacgtaagaaatctaatgttgagcacctcagaggaaatgatagaaaaagagtttaataatataaagccaggagccgtggagcgggtgaagaaaatcagggattacgcctttgttcacttctcaaaccgagaagatgctgttgaagcaatgaaggctctcaatgggaaagtgcttgacggcagccccatcgaggtgacattagcaaagcctgttgacaaggactcatacgtgagatacacccggggtactggcggtaggggaaccatgcttcagggagaatacacttactccctgggccaggtgtacgaccccaccaccacgtacctcggagcaccagttttttatgcccctcagacatatgccgcaatccccagccttcacttccccgcaaccaaaggccatctgtccaatagagctattataagggccccatccgtgaggggtgctgccggagtcagagggctgggcggtagagggtacctcgcatataccggccttgggcgagggtaccaggttaagggcgacaagcgggaagacaagctttacgacatactccctggtatggaactgacccccatgaacccagtcacgctgaaaccccaaggcattaaactggccccacagatcctcgaggagatttgccagaagaacaactggggtcaaccagtgtatcagctgcacagtgcaatcgggcaggaccaaaggcagcttttcttatacaagatcactatacctgcgcttgctagccagaatccagccattcacccgttcacgccacctaagctgtcggcatttgtcgacgaggccaaaacatacgcagcggaatacactctccagacactgggaatacctacagacgggggagacggaaccatggcaacagcggcagcggcagcaaccgctttccccggatacgccgtcccaaacgctaccgcgcctgtctcggctgcccagctaaaacaagcagtcaccctcggtcaagacctggccgcatatacgacctacgaggtctaccctaccttcgctgtgacagctaggggcgatggctacggcactttttag

SEQ ID NO: 76198 - DNA, 1761 bp, Artificial Sequence
  derived and/or modified sequence
atggaaagtaaccacaaaagtggtgatgggctgagtggcacgcagaaagaagctgcactgagagcccttgtgcagcgcacgggctattccttggtacaggaaaatggacagagaaaatacggagggcctccacctgggtgggatgccgctccacctgagagaggttgcgaaatcttcattggcaaactgcctcgtgacctcttcgaggacgagctgatcccattatgcgagaaaatcgggaagatatacgagatgaggatgatgatggacttcaacggcaataacaggggttatgcgtttgtcacattctccaacaaggttgaagcaaagaatgccattaagcagcttaataactacgagattcgtaacggtcgtctgctaggcgtgtgtgcctctgtcgataattgtcgtctgttcgtgggcggaatccccaaaactaaaaagcgtgaggagatactgtcggaaatgaagaaagtgactgaaggggtggtcgatgtaatagtctatcccagtgccgctgacaaaactaaaaacagaggcttcgcctttgtggagtacgaatcacatagggcagccgctatggctagacgcaagttgctccctgggagaattcagctgtggggccacggcatcgctgtggactgggctgagcccgaagttgaggtcgacgaggacacaatgtcctcagtgaagatcctgtatgtaagaaacctgatgctgagcacgagcgaagaaatgatcgagaaggagttcaataatatcaagcccggtgcggttgagcgggttaaaaagatccgggattatgcctttgtacacttctctaatcgtgaagatgctgtggaagctatgaaggcgctgaatggcaaggttctcgatggttcccctatagaagtaactttagcgaagccagtggacaaggatagctatgtgcgctacactcgaggcacggggggacgtggcacaatgctgcagggagagtacacatactcgctgggccaggtgtacgatccaaccacgacctacctgggggcacctgtgttctatgcaccccagacctacgctgcaatcccaagtctgcattttccagctacgaaaggacacctttccaatagggccatcatccgcgcacccagtgtgaggggcgctgctggtgtccgaggccttggcggtcgcggatatttggcctacaccggactggggcgtggctatcaggtaaagggggataaacgggaagacaaactgtatgatattttgcccggaatggaactgactccaatgaatccggtcactctcaaacctcaggggataaagctggccccacagatcctcgaggagatttgtcagaagaataattggggccagcccgtgtaccagcttcactccgctatcggacaggatcaaagacaactgttcttgtacaagatcactattcccgcactggcttcccagaatccagctatccaccctttcacccccccaaagctttccgctttcgtcgacgaagcaaaaacatatgctgctgaatatacactgcagaccctgggtattccaacagatggaggggatggaactatggccactgcagccgctgcagcaacagctttccccggttatgccgtccccaatgcaacggccccagtgtctgctgcacagttgaaacaggccgtcactcttggtcaggatctggctgcctacacgacttatgaagtctacccaactttcgccgttaccgccaggggggacggctacggcacattttag

SEQ ID NO: 76199 - DNA, 606 bp, Artificial Sequence
  derived and/or modified sequence
atggaatcgaatcataagagcggggacggtctcagcgggacccagaaggaagccgcactgcgcgcattagtgcagcgcactggatattctctggtccaagagaatgggcagcgcaagtacggaggcccaccacctggatgggacgccgctcccccagagagagggtgcgagatctttataggtaaactgccccgagacctgtttgaagatgagcttattcctctatgcgagaaaatcggcaaaatctacgagatgagaatgatgatggatttcaacgggaataatcgcggatacgcctttgtgaccttttcgaataaagtagaagccaagaatgccatcaagcagcttaataattacgaaattagaaacggtcggttgctgggcgtgtgcgcgagcgtggacaattgcaggcttttcgtggggggaatccccaagacgaaaaaacgggaggagatcctgtccgaaatgaagaaggtcaccgagggggtggtggacgtgatcgtgtacccaagtgctgcggataaaacaaaaaaccggggattcgcctttgtcgagtacgagtctcaccgcgctgcggctatggccaggagaaagcttcttccatag

SEQ ID NO: 76200 - protein, 594 aa, Artificial Sequence
  derived and/or modified sequence
MEAVCLGTCPEPEASMSTAIPGLKKGNNALQSIILQTLLEKENGQRKYGGPPPGWDAAPPERGCEIFIGKLPRDLFEDELIPLCEKIGKIYEMRMMMDFNGNNRGYAFVTFSNKVEAKNAIKQLNNYEIRNGRLLGVCASVDNCRLFVGGIPKTKKREEILSEMKKVTEGVVDVIVYPSAADKTKNRGFAFVEYESHRAAAMARRKLLPGRIQLWGHGIAVDWAEPEVEVDEDTMSSVKILYVRNLMLSTSEEMIEKEFNNIKPGAVERVKKIRDYAFVHFSNREDAVEAMKALNGKVLDGSPIEVTLAKPVDKDSYVRYTRGTGGRGTMLQGEYTYSLGQVYDPTTTYLGAPVFYAPQTYAAIPSLHFPATKGHLSNRAIIRAPSVRGAAGVRGLGGRGYLAYTGLGRGYQVKGDKREDKLYDILPGMELTPMNPVTLKPQGIKLAPQILEEICQKNNWGQPVYQLHSAIGQDQRQLFLYKITIPALASQNPAIHPFTPPKLSAFVDEAKTYAAEYTLQTLGIPTDGGDGTMATAAAAATAFPGYAVPNATAPVSAAQLKQAVTLGQDLAAYTTYEVYPTFAVTARGDGYGTF

SEQ ID NO: 76201 - protein, 569 aa, Artificial Sequence
  derived and/or modified sequence
MLCSPSFCKLCWKRQRENGQRKYGGPPPGWDAAPPERGCEIFIGKLPRDLFEDELIPLCEKIGKIYEMRMMMDFNGNNRGYAFVTFSNKVEAKNAIKQLNNYEIRNGRLLGVCASVDNCRLFVGGIPKTKKREEILSEMKKVTEGVVDVIVYPSAADKTKNRGFAFVEYESHRAAAMARRKLLPGRIQLWGHGIAVDWAEPEVEVDEDTMSSVKILYVRNLMLSTSEEMIEKEFNNIKPGAVERVKKIRDYAFVHFSNREDAVEAMKALNGKVLDGSPIEVTLAKPVDKDSYVRYTRGTGGRGTMLQGEYTYSLGQVYDPTTTYLGAPVFYAPQTYAAIPSLHFPATKGHLSNRAIIRAPSVRGAAGVRGLGGRGYLAYTGLGRGYQVKGDKREDKLYDILPGMELTPMNPVTLKPQGIKLAPQILEEICQKNNWGQPVYQLHSAIGQDQRQLFLYKITIPALASQNPAIHPFTPPKLSAFVDEAKTYAAEYTLQTLGIPTDGGDGTMATAAAAATAFPGYAVPNATAPVSAAQLKQAVTLGQDLAAYTTYEVYPTFAVTARGDGYGTF

SEQ ID NO: 76202 - DNA, 1785 bp, Artificial Sequence
  derived and/or modified sequence
atggaggccgtgtgcctgggcacctgccccgagcccgaggccagcatgagcaccgccatccccggcctgaagaagggcaacaacgccctgcagagcatcatcctgcagaccctgctggagaaggagaacggccagagaaagtacggcggccccccccccggctgggacgccgccccccccgagagaggctgcgagatcttcatcggcaagctgcccagagacctgttcgaggacgagctgatccccctgtgcgagaagatcggcaagatctacgagatgagaatgatgatggacttcaacggcaacaacagaggctacgccttcgtgaccttcagcaacaaggtggaggccaagaacgccatcaagcagctgaacaactacgagatcagaaacggcagactgctgggcgtgtgcgccagcgtggacaactgcagactgttcgtgggcggcatccccaagaccaagaagagagaggagatcctgagcgagatgaagaaggtgaccgagggcgtggtggacgtgatcgtgtaccccagcgccgccgacaagaccaagaacagaggcttcgccttcgtggagtacgagagccacagagccgccgccatggccagaagaaagctgctgcccggcagaatccagctgtggggccacggcatcgccgtggactgggccgagcccgaggtggaggtggacgaggacaccatgagcagcgtgaagatcctgtacgtgagaaacctgatgctgagcaccagcgaggagatgatcgagaaggagttcaacaacatcaagcccggcgccgtggagagagtgaagaagatcagagactacgccttcgtgcacttcagcaacagagaggacgccgtggaggccatgaaggccctgaacggcaaggtgctggacggcagccccatcgaggtgaccctggccaagcccgtggacaaggacagctacgtgagatacaccagaggcaccggcggcagaggcaccatgctgcagggcgagtacacctacagcctgggccaggtgtacgaccccaccaccacctacctgggcgcccccgtgttctacgccccccagacctacgccgccatccccagcctgcacttccccgccaccaagggccacctgagcaacagagccatcatcagagcccccagcgtgagaggcgccgccggcgtgagaggcctgggcggcagaggctacctggcctacaccggcctgggcagaggctaccaggtgaagggcgacaagagagaggacaagctgtacgacatcctgcccggcatggagctgacccccatgaaccccgtgaccctgaagccccagggcatcaagctggccccccagatcctggaggagatctgccagaagaacaactggggccagcccgtgtaccagctgcacagcgccatcggccaggaccagagacagctgttcctgtacaagatcaccatccccgccctggccagccagaaccccgccatccaccccttcaccccccccaagctgagcgccttcgtggacgaggccaagacctacgccgccgagtacaccctgcagaccctgggcatccccaccgacggcggcgacggcaccatggccaccgccgccgccgccgccaccgccttccccggctacgccgtgcccaacgccaccgcccccgtgagcgccgcccagctgaagcaggccgtgaccctgggccaggacctggccgcctacaccacctacgaggtgtaccccaccttcgccgtgaccgccagaggcgacggctacggcaccttctag

SEQ ID NO: 76203 - DNA, 1710 bp, Artificial Sequence
  derived and/or modified sequence
atgctgtgcagccccagcttctgcaagctgtgctggaagagacagagagagaacggccagagaaagtacggcggccccccccccggctgggacgccgccccccccgagagaggctgcgagatcttcatcggcaagctgcccagagacctgttcgaggacgagctgatccccctgtgcgagaagatcggcaagatctacgagatgagaatgatgatggacttcaacggcaacaacagaggctacgccttcgtgaccttcagcaacaaggtggaggccaagaacgccatcaagcagctgaacaactacgagatcagaaacggcagactgctgggcgtgtgcgccagcgtggacaactgcagactgttcgtgggcggcatccccaagaccaagaagagagaggagatcctgagcgagatgaagaaggtgaccgagggcgtggtggacgtgatcgtgtaccccagcgccgccgacaagaccaagaacagaggcttcgccttcgtggagtacgagagccacagagccgccgccatggccagaagaaagctgctgcccggcagaatccagctgtggggccacggcatcgccgtggactgggccgagcccgaggtggaggtggacgaggacaccatgagcagcgtgaagatcctgtacgtgagaaacctgatgctgagcaccagcgaggagatgatcgagaaggagttcaacaacatcaagcccggcgccgtggagagagtgaagaagatcagagactacgccttcgtgcacttcagcaacagagaggacgccgtggaggccatgaaggccctgaacggcaaggtgctggacggcagccccatcgaggtgaccctggccaagcccgtggacaaggacagctacgtgagatacaccagaggcaccggcggcagaggcaccatgctgcagggcgagtacacctacagcctgggccaggtgtacgaccccaccaccacctacctgggcgcccccgtgttctacgccccccagacctacgccgccatccccagcctgcacttccccgccaccaagggccacctgagcaacagagccatcatcagagcccccagcgtgagaggcgccgccggcgtgagaggcctgggcggcagaggctacctggcctacaccggcctgggcagaggctaccaggtgaagggcgacaagagagaggacaagctgtacgacatcctgcccggcatggagctgacccccatgaaccccgtgaccctgaagccccagggcatcaagctggccccccagatcctggaggagatctgccagaagaacaactggggccagcccgtgtaccagctgcacagcgccatcggccaggaccagagacagctgttcctgtacaagatcaccatccccgccctggccagccagaaccccgccatccaccccttcaccccccccaagctgagcgccttcgtggacgaggccaagacctacgccgccgagtacaccctgcagaccctgggcatccccaccgacggcggcgacggcaccatggccaccgccgccgccgccgccaccgccttccccggctacgccgtgcccaacgccaccgcccccgtgagcgccgcccagctgaagcaggccgtgaccctgggccaggacctggccgcctacaccacctacgaggtgtaccccaccttcgccgtgaccgccagaggcgacggctacggcaccttctag

SEQ ID NO: 76204 - DNA, 1785 bp, Artificial Sequence
  derived and/or modified sequence
atggaagcagtctgcttgggcacatgtccagaacccgaggccagcatgagtaccgctattccaggactgaaaaagggcaacaatgccctacagtctattatccttcagactctcttagaaaaagagaacggacaaagaaaatacgggggacctcctccaggatgggacgcagcacctccagaaaggggatgtgagatctttattggcaagctgccccgcgatctgtttgaggatgagttaataccgctgtgtgaaaagatcggcaaaatctatgagatgcgcatgatgatggactttaacggaaataaccgcggttacgcctttgtgacattctctaacaaagtggaggccaagaatgccattaagcagctaaataattacgaaatccggaacgggcgactgctgggtgtatgtgcttctgtggataactgccggctctttgtgggaggaatcccaaagacaaagaagagggaagaaattttgagcgaaatgaagaaggtgacagagggtgtggtggacgtgatcgtgtacccctctgccgcagacaagaccaaaaaccgaggcttcgcttttgtggaatacgaaagtcatcgagccgcagctatggccagacgcaagcttctcccgggcagaattcagttatggggtcacggcatagccgtggactgggcagagccagaggtcgaggtggatgaagacactatgagttccgtcaagatcttgtatgttcgtaacctgatgctatccactagtgaggagatgatcgagaaggaattcaataacattaaacccggtgctgtcgagagagtgaaaaagatccgggattacgctttcgtgcacttctcaaaccgggaagacgctgttgaggcgatgaaagctctgaacggtaaggttttagatggttctcccatcgaggttaccctggctaagcccgtggataaggactcatatgtgagatatacccgtggcacaggtggccgcggtacgatgttgcagggggagtacacctactcattgggccaggtttacgatcccacgaccacctacctcggagctccagtcttctacgcaccccagacctacgcggctattccatccttacactttcccgctacaaagggacacctgtccaaccgggccataatccgggccccgagtgtgcgtggcgctgccggcgtgcggggtctggggggacgcggatatctggcgtacaccggacttggccgcggctaccaggtaaaaggcgataagcgcgaagataaattatacgacattctgcccggaatggagcttaccccgatgaatcccgtcacgctaaagccccaaggcatcaaattggctcctcaaattctggaggagatttgtcaaaaaaataattggggccagcctgtgtaccaactgcacagtgccatcggtcaagatcagcgccagcttttcctgtataaaatcacgattccagctctcgcatcccagaaccctgcaatccatccattcacacccccgaagttaagtgcattcgtggacgaggcaaaaacatacgcggctgagtacacattacaaactctcggcattccaacagacggcggcgacggcaccatggccaccgccgctgccgctgccaccgcctttcccggctatgcagttcccaacgcaactgcgccagtgtccgcagcccagctaaaacaggcggtgacactgggacaggatctagctgcatacactacctacgaggtttaccccacattcgccgttactgcaagaggagatggttatggcaccttttag

SEQ ID NO: 76205 - DNA, 1710 bp, Artificial Sequence
  derived and/or modified sequence
atgttgtgctcgccctcgttctgcaaattgtgctggaagcggcagagagaaaacgggcagagaaagtacggcgggccccccccagggtgggacgctgccccacccgagcgcggttgtgaaatcttcattgggaaattgccaagagatctgtttgaagacgaacttatcccgctttgtgaaaaaattggaaagatctatgagatgcggatgatgatggatttcaacggaaacaatcgcggctacgccttcgttaccttctcgaacaaggttgaagccaaaaatgccataaaacagctgaataactatgagattaggaatggtagactgctgggggtgtgcgccagtgtggataactgtcgtctgttcgtcggcggcatcccgaagactaagaaacgcgaagagatcctcagcgagatgaagaaagtgacagagggagtggttgatgtgatcgtttatccgtctgcagcggataagacgaaaaacagaggttttgcctttgtcgaatatgaatcgcacagagcggctgcaatggctcgccggaagctcctgcctggccggatccagctgtgggggcatggtatcgcggtggactgggccgagccagaagtcgaagttgacgaggacactatgtcctctgtaaaaatactgtatgtgcgtaatcttatgctaagcaccagtgaagagatgatcgagaaggaatttaacaacatcaaaccgggtgccgtggagagggtaaagaaaattagggactacgcttttgtgcatttcagtaaccgagaggatgccgtggaagctatgaaggccttaaatggaaaggtgctggacggctcacccattgaggtaacactggccaagcctgtggataaggactcatatgtgaggtacaccaggggaactggcggacggggaaccatgctgcagggcgaatacacctacagcctcggccaggtctacgatccgactacaacctatttgggcgcccccgtgttttacgcacctcagacctacgctgcaatccctagcttgcactttccagccacgaagggtcacctgagtaatcgggcaatcatccgggccccatcggttaggggggccgccggcgtgcgcggtctgggaggacgcggttacctggcatatactggtctcggccgaggctaccaggtgaaaggggacaaacgagaagacaagctctatgacattctgcctggcatggaactgacacctatgaaccccgtcacactcaagccccagggcattaagctggcacctcaaatacttgaggaaatctgtcagaaaaataactgggggcaacccgtataccaattgcattccgctatagggcaagaccagcgacaacttttcctgtacaagatcaccattccagctctcgctagtcagaatcctgcaatccacccctttacacctcctaagctcagcgccttcgtggacgaggctaagacctacgccgccgagtacacacttcagaccttgggcataccaactgatggaggggatggcaccatggccacggccgctgctgccgctacagcctttcctggatacgccgttccgaacgcaacagcccctgtgagcgcagctcagctgaaacaggccgtaactttaggccaggacctcgctgcctataccacctatgaagtttatcccacattcgccgtgaccgcccgtggagacgggtacggcaccttctag

SEQ ID NO: 76206 - DNA, 2211 bp, Artificial Sequence
  derived and/or modified sequence
tttgatatgacgattagagcataacccgagtgacacgttgaattcgccataatcaaggaaaccttttccgggtggggatctctgaaattactcagtgagcaaccctaattaacctgattttttgctgataatcactctcaatggaatcaaatcacaaatccggggatggattgagcggcactcagaaggaagcagccctccgcgcactggtccagcgcacaggatatagcttggtccaggaatttagaggttcctatagatggaagcagtgtgtctgggcacatgcccagagccagaagcgagcatgagcacagcaattcctggcctcaaaaaaggaaataatgctttgcagtccatcattttgcaaactttgctggaaaaggaaaatggacaaagaaaatatggtggccctccacctggttgggatgctgcaccccctgaaaggggctgtgaaatttttattggaaaacttccccgagacctttttgaggatgagcttataccattatgtgaaaaaatcggtaaaatttatgaaatgagaatgatgatggattttaatggcaacaatagaggatatgcatttgtaacattttcaaataaagtggaagccaagaatgcaatcaagcaacttaataattatgaaattagaaatgggcgcctcttaggggtttgtgccagtgtggacaactgccgattatttgttgggggcatcccaaaaaccaaaaagagagaagaaatcttatcggagatgaaaaaggttactgaaggtgttgtcgatgtcatcgtctacccaagcgctgcagataaaaccaaaaaccgaggctttgccttcgtggagtatgagagtcatcgagcagctgccatggcgaggaggaaactgctaccaggaagaattcagttatggggacatggtattgcagtagactgggcagagccagaagtagaagttgatgaagatacaatgtcttcagtgaaaatcctatatgtaagaaatcttatgctgtctacctctgaagagatgattgaaaaggaattcaacaatatcaaaccaggtgctgtggagagggtgaagaaaattcgagactatgcttttgtgcacttcagtaaccgagaagatgcagttgaggctatgaaagctttaaatggcaaggtgctggatggttcccccattgaagtcaccctagcaaaaccagtggacaaggacagttatgttaggtatacccgaggcacaggtggaaggggcaccatgctgcaaggagagtatacctactctttgggccaagtttatgatcccaccacaacctaccttggagctcctgtcttctatgccccccagacctatgcagcaattcccagtcttcatttcccagccaccaaaggacatctcagcaacagagccattatccgagccccttctgttagaggggctgcgggagtgagaggactgggcggccgtggctatttggcatacacaggcctgggtcgaggataccaggtcaaaggagacaaaagagaagacaaactctatgacattttacctgggatggagctcaccccaatgaatcctgtcacattaaaaccccaaggaattaaactcgctccccagatattagaagagatttgtcagaaaaataactggggacagccagtgtaccagctgcactctgctattggacaagaccaaagacagctattcttgtacaaaataactattcctgctctagccagccagaatcctgcaatccaccctttcacacctccaaagctgagtgcctttgtggatgaagcaaagacgtatgcagccgaatacaccctgcagaccctgggcatccccactgatggaggcgatggcaccatggctactgctgctgctgctgctactgctttcccaggatatgctgtccctaatgcaactgcacccgtgtctgcagcccagctcaagcaagcggtaacccttggacaagacttagcagcatatacaacctatgaggtctacccaacttttgcagtgactgcccgaggggatggatatggcaccttctgaagatgcttttttaaatttaagaataagacacacaaaactctattaaaaaaaaaaaagaaataaacctctaactcggtccccaatgatcataaataatatgtttcctaaagaaatgcctttccagagactgtatagcttataccaattatagaatcatgaagtaagaa

SEQ ID NO: 76207 - DNA, 1785 bp, Artificial Sequence
  derived and/or modified sequence
atggaggccgtgtgcctgggcacctgcccagagcctgaggcctccatgagcacagccatccctggcctgaagaagggcaacaatgccctgcagagcatcatcctgcagaccctgctggagaaggaaaatggccagaggaaatatggaggccccccacctggctgggatgctgcccctcctgagcggggctgtgagatcttcatcggcaagctgccccgggacctgtttgaagatgagctgatccccctgtgtgagaagattggcaagatctatgagatgaggatgatgatggacttcaacggcaacaacagaggctacgcctttgtgaccttcagcaacaaggtggaggccaagaatgccatcaagcagctgaacaactatgagatcagaaatggccgcctgctgggcgtgtgtgcctctgtggacaactgccgcctgtttgtgggcggcatccccaagaccaagaagcgggaggagatcctgtctgagatgaagaaggtgacagagggcgtggtggatgtgattgtgtaccccagcgctgctgacaagaccaagaacagaggatttgcctttgtggagtatgagagccacagagctgctgccatggcccggaggaagctgctgcccggccgcatccagctgtggggccatggaattgctgtggactgggccgagcctgaggtggaggtggatgaggacaccatgagctctgtgaagatcctgtatgtgaggaacctgatgctgagcaccagcgaggagatgattgagaaggagttcaacaacatcaagccaggagctgtggagcgggtgaagaagatccgggactatgcctttgtgcacttcagcaacagagaagatgctgtggaggccatgaaggccctgaatggcaaggtgctggatggcagccccatcgaggtgaccctggccaagcctgtggacaaggacagctatgtgcgctacacccggggcaccggcggccggggcaccatgctgcagggcgagtacacctacagcctgggccaggtgtatgaccccaccaccacctacctgggcgcccctgtgttctacgccccccagacctacgccgccatccccagcctgcacttccctgccaccaagggccacctgagcaacagagccatcatccgggcccccagcgtgagaggagctgctggggtgcggggcctgggcggccggggctacctggcctacacaggcctgggccggggctaccaggtgaagggggacaagcgggaggacaagctgtatgacatcctgcccggcatggagctgacccccatgaaccctgtgaccctgaagccccagggcatcaagctggccccccagatcctggaggagatctgccagaagaacaactggggccagcctgtgtaccagctgcacagcgccatcggccaggaccagaggcagctgttcctgtacaagatcaccatcccagccctggccagccagaacccagccatccaccccttcaccccacccaagctgagcgcctttgtggatgaggccaagacctacgccgctgagtacaccctgcagaccctgggcatccccacagatggaggagatggcaccatggccacagctgctgctgctgccacagccttccctggctatgctgtgcccaatgccacagcccctgtgtctgctgcccagctgaagcaggccgtgaccctgggccaggacctggccgcctacaccacctatgaggtgtaccccacctttgctgtgacagcccggggagatggctacggcaccttctag

SEQ ID NO: 76208 - DNA, 1710 bp, Artificial Sequence
  derived and/or modified sequence
atgctgtgcagccccagcttctgcaagctgtgctggaagaggcagagagaaaatggccagaggaaatatggaggccccccacctggctgggatgctgcccctcctgagcggggctgtgagatcttcatcggcaagctgccccgggacctgtttgaagatgagctgatccccctgtgtgagaagattggcaagatctatgagatgaggatgatgatggacttcaatggaaacaacagaggctacgcctttgtgaccttcagcaacaaggtggaggccaagaatgccatcaagcagctgaacaactatgagatcagaaatggccgcctgctgggcgtgtgtgcctctgtggacaactgccgcctgtttgtgggcggcatccccaagaccaagaagcgggaggagatcctgtctgagatgaagaaggtgacagaaggagtggtggatgtgattgtgtaccccagcgctgctgacaagaccaagaacagaggatttgcctttgtggagtatgagagccacagagctgctgccatggcccggaggaagctgctgcccggccgcatccagctgtggggccacggcattgctgtggactgggccgagcctgaggtggaggtggatgaggacaccatgagctctgtgaagatcctgtatgtgaggaacctgatgctgagcaccagcgaggagatgattgagaaggagttcaacaacatcaagccaggagctgtggagcgggtgaagaagatccgggactatgcctttgtgcacttcagcaaccgggaggatgctgtggaggccatgaaggccctgaatggcaaggtgctggatggcagccccatcgaggtgaccctggccaagcctgtggacaaggacagctatgtgcgctacacccggggcactggaggccggggcaccatgctgcagggcgagtacacctacagcctgggccaggtgtatgaccccaccaccacctacctgggcgcccctgtgttctacgccccccagacctatgctgccatccccagcctgcacttccctgccaccaagggccacctgagcaacagagccatcatccgggcccccagcgtgagaggagctgctggggtgcggggcctgggcggccggggctacctggcctacacaggcctgggccggggctaccaggtgaagggggacaagcgggaggacaagctgtatgacatcctgcccggcatggagctgacccccatgaaccctgtgaccctgaagccccagggcatcaagctggccccccagatcctggaggagatctgccagaagaacaactggggccagcctgtgtaccagctgcacagcgccatcggccaggaccagaggcagctgttcctgtacaagatcaccatcccagccctggccagccagaacccagccatccaccccttcaccccacccaagctgagcgcctttgtggatgaggccaagacctatgctgctgagtacaccctgcagaccctgggcatccccacagatggaggagatggcaccatggccacagctgctgctgctgccacagccttccctggctatgctgtgcccaatgccacagcccctgtgtctgctgcccagctgaagcaggccgtgaccctgggccaggacctggccgcctacaccacctatgaggtgtaccccacctttgctgtgacagcccggggagatggctacggcaccttctag

SEQ ID NO: 76209 - DNA, 1872 bp, Artificial Sequence
  derived and/or modified sequence
atgctttgcagtccatcattttgcaaactttgctggaaaaggcagagggaaaatggacaaagaaaatatggtggccctccacctggttgggatgctgcaccccctgaaaggggctgtgaaatttttattggaaaacttccccgagacctttttgaggatgagcttataccattatgtgaaaaaatcggtaaaatttatgaaatgagaatgatgatggattttaatggcaacaatagaggatatgcatttgtaacattttcaaataaagtggaagccaagaatgcaatcaagcaacttaataattatgaaattagaaatgggcgcctcttaggggtttgtgccagtgtggacaactgccgattatttgttgggggcatcccaaaaaccaaaaagagagaagaaatcttatcggagatgaaaaaggttactgaaggtgttgtcgatgtcatcgtctacccaagcgctgcagataaaaccaaaaaccgaggctttgccttcgtggagtatgagagtcatcgagcagctgccatggcgaggaggaaactgctaccaggaagaattcagttatggggacatggtattgcagtagactgggcagagccagaagtagaagttgatgaagatacaatgtcttcagtgaaaatcctatatgtaagaaatcttatgctgtctacctctgaagagatgattgaaaaggaattcaacaatatcaaaccaggtgctgtggagagggtgaagaaaattcgagactatgcttttgtgcacttcagtaaccgagaagatgcagttgaggctatgaaagctttaaatggcaaggtgctggatggttcccccattgaagtcaccctagcaaaaccagtggacaaggacagttatgttaggtatacccgaggcacaggtggaaggggcaccatgctgcaaggagagtatacctactctttgggccaagtttatgatcccaccacaacctaccttggagctcctgtcttctatgccccccagacctatgcagcaattcccagtcttcatttcccagccaccaaaggacatctcagcaacagagccattatccgagccccttctgttagaggggctgcgggagtgagaggactgggcggccgtggctatttggcatacacaggcctgggtcgaggataccaggtcaaaggagacaaaagagaagacaaactctatgacattttacctgggatggagctcaccccaatgaatcctgtcacattaaaaccccaaggaattaaactcgctccccagatattagaagagatttgtcagaaaaataactggggacagccagtgtaccagctgcactctgctattggacaagaccaaagacagctattcttgtacaaaataactattcctgctctagccagccagaatcctgcaatccaccctttcacacctccaaagctgagtgcctttgtggatgaagcaaagacgtatgcagccgaatacaccctgcagaccctgggcatccccactgatggaggcgatggcaccatggctactgctgctgctgctgctactgctttcccaggatatgctgtccctaatgcaactgcacccgtgtctgcagcccagctcaagcaagcggtaacccttggacaagacttagcagcatatacaacctatgaggtctacccaacttttgcagtgactgcccgaggggatggatatggcaccttctgaagatgcttttttaaatttaagaataagacacacaaaactctattaaaaaaaaaaaagaaataaacctctaactcggtccccaatgatcataaataatatgtttcctaaagaaatgcctttccagagactgtatagcttataccaattatagaatcatgaagt

SEQ ID NO: 76210 - DNA, 1785 bp, Artificial Sequence
  derived and/or modified sequence
atggaggccgtgtgcctgggcacctgccccgagcccgaggccagcatgtccacggctatccccggcctgaagaaaggcaacaacgccctacagtcaataattctgcagacacttcttgagaaagagaatggacaacgcaagtatgggggaccgcccccaggctgggacgccgctccacctgaacgcggctgcgaaatcttcatcggaaagctgccgagagatttgttcgaggacgagcttatacctctgtgcgagaagatcggcaaaatctatgagatgcggatgatgatggatttcaatggaaataacaggggatatgcctttgttacattcagcaataaggtcgaggcgaaaaacgctattaagcagttaaacaattacgaaatccggaacggtaggctgttgggtgtgtgcgcatctgttgacaattgcagactgtttgtggggggaattcccaaaaccaagaaacgcgaggagattctgagtgagatgaaaaaagttaccgagggggttgtggatgtgatagtgtacccgagcgccgctgacaagacaaagaacagagggtttgcttttgtagaatatgagagccaccgtgcagctgccatggcgaggaggaagctgctccccggccgtatccagttgtggggacacggcatagccgttgattgggcagaacccgaagtggaagtggatgaagataccatgtcatcggttaaaatcctgtacgtgcggaatctaatgctgtccacatccgaggaaatgatcgaaaaggagtttaacaacattaaacctggagcggtcgaacgtgtgaaaaagattcgggactatgcctttgtacacttttccaaccgcgaagacgcggttgaagctatgaaggccctcaatggtaaggtcctcgacggtagccctatcgaggtcactcttgcaaaaccagtggataaagactcttacgttcgttatacacgaggtactggcggccggggtaccatgcttcagggggagtatacttatagcttagggcaggtatacgaccctacaaccacttacctgggcgcccccgtgttctacgctccacaaacctacgctgctattcctagcctgcacttccctgctactaagggtcacctctctaacagagcaataattagagctccctccgtcagaggcgctgcgggcgtgagaggactaggagggcgtggctacctggcttacacaggactcgggaggggctaccaggtcaaaggcgacaagcgggaagataaactgtacgatatcttgcctggcatggagttaacccccatgaacccagtgaccctaaaaccccagggaataaagctggctccgcagatccttgaggaaatatgtcaaaagaataattggggtcaacctgtgtatcagctccactctgcaatcgggcaggaccaacgtcagctctttctatataagatcacaatcccagcactggcctcacagaatcccgctatacacccctttaccccacccaagctctccgcttttgtggatgaagccaaaacatatgcggccgaatatacattgcaaacactcggaatccccactgatgggggtgacgggactatggcgacagccgccgccgccgcaaccgcctttcctggttacgccgtgcctaacgcgactgctccagtgtcagcggcccagctgaagcaggcggtcactttagggcaagatctggccgcatatacaacatacgaggtgtacccaaccttcgctgttaccgctcggggagacgggtacggcaccttttag

SEQ ID NO: 76211 - DNA, 1710 bp, Artificial Sequence
  derived and/or modified sequence
atgctgtgcagccccagcttctgcaagctgtgctggaagcggcagcgggaaaacggacaaaggaagtacggtggaccaccccccggatgggatgctgctcctccggagcgggggtgtgagatcttcatagggaagctgccgcgggacctgtttgaagatgagctgattccactctgtgaaaaaattgggaagatttacgagatgaggatgatgatggattttaacgggaataaccgcggctatgcattcgtcactttctcgaataaggtggaggcaaaaaacgctatcaagcagctgaataactatgagatccggaatggccgactgctgggcgtctgcgcaagtgtggacaattgtaggcttttcgtgggtggcattccaaagaccaaaaaacgcgaggagatcttaagcgaaatgaagaaagtgactgaaggagtcgtggacgtgatagtctatcctagtgccgcagacaaaacaaaaaacagaggcttcgcctttgtagaatatgagagtcaccgtgccgccgctatggctcgccggaagcttctcccagggcggatccagctgtggggacacgggattgccgtggattgggctgagccagaagtggaagtggacgaggacaccatgtccagcgtgaagatattatacgtcaggaatcttatgctctccacctcagaagagatgatagagaaggaattcaacaacatcaaaccaggggccgtcgaaagggtgaagaagatccgggactacgcatttgtgcatttctctaacagggaggacgctgtggaagccatgaaagctctcaatggaaaagtactggacgggtctcctatcgaagttactctggctaagccagtcgataaggactcctatgtgagatacacgcgagggacaggcggcaggggaaccatgctccagggagagtacacgtattctctgggtcaggtgtatgacccaacgaccacttatctcggggcaccagtcttctatgcacctcaaacatatgcagctattccgtctctgcacttccccgcgacaaaaggccaccttagcaacagggccatcatccgggccccatccgtgcggggggcagcaggggtccgcgggctgggaggccgcggctacctcgcgtacactggactgggacgaggctaccaggtgaagggcgataagcgtgaggacaagctgtacgacatccttccaggcatggagctcacacccatgaacccggtcactttgaagcctcaaggaattaaacttgccccgcagattctggaggagatatgtcagaagaataattggggtcagcccgtgtaccaactgcacagtgcaatcggccaggatcaacgtcagttgttcctctataagatcactattccggcactggcttcccagaaccctgcgatacacccttttacacctccaaagctgtccgccttcgtggatgaagccaaaacttacgcggccgagtacactctgcaaaccctaggtattcccactgacggcggagatggaactatggcaaccgcagccgccgccgccaccgccttcccgggttacgcagtcccaaacgccacagcaccagtatccgctgcccagctaaagcaggcagtgaccctcggccaggacctggcggcctacacgacctacgaagtctacccaacatttgctgtgacggctcggggcgacgggtatggcaccttttag

SEQ ID NO: 76212 - DNA, 1785 bp, Artificial Sequence
  derived and/or modified sequence
atggaagcggtgtgtctgggaacatgtcccgagccagaggcaagtatgtctacagctataccaggcctcaagaaagggaacaatgctctgcaatcaattatcctccaaactcttcttgagaaggagaatggtcagcgcaaatatggcggaccccctccaggatgggatgcggctccaccagaacggggttgcgaaatctttattggtaaactcccgcgagatttgttcgaagatgagcttatccctctgtgtgagaagattggcaagatttacgaaatgcggatgatgatggattttaatggcaataaccggggatacgccttcgtaaccttttccaataaagtggaggctaaaaacgcgataaagcagctgaacaattatgagatccggaacggacgcctcttgggggtgtgcgccagcgttgacaattgccgactgtttgtgggagggatccccaagacaaagaaacgcgaggaaattcttagcgaaatgaaaaaggttaccgagggcgtggttgatgtgattgtctatccaagcgcggcagataagacgaaaaaccggggtttcgcctttgtggaatatgaatcccacagagcggctgcgatggccagacgcaaactgctgccaggtcggattcagctctggggtcatggaatcgccgtagactgggctgagccagaggtagaggtggatgaagataccatgagctccgtgaaaatattatacgttcgtaatttaatgttgagtactagcgaggagatgatcgagaaggaatttaacaatatcaaaccaggagccgtcgaacgcgtaaaaaaaatcagagattatgcctttgtccacttttccaacagagaagatgcggtggaggcaatgaaggccttaaacgggaaggtcctcgatggatcccccatcgaagtcactctggctaaaccggtggacaaagacagttatgtgagatatactaggggcaccgggggtcggggtactatgctccagggcgagtacacttactctctggggcaagtttacgaccctactaccacctatctgggtgcaccagtattttacgcccctcagacgtatgccgctattccttcccttcactttccggctactaaaggccatctgagcaatagagccatcatccgcgcaccctccgtgagaggagcagctggagtacgcggattaggaggcagaggatacttggcatataccggactcggacggggatatcaggttaaaggcgataagagggaagataagttgtacgatatcttgcccggaatggagcttactcccatgaaccctgtgacgctgaagcctcaagggattaagcttgccccacagatcctggaggaaatatgccaaaagaacaattggggccaacctgtgtatcagcttcacagcgctattggccaagaccagagacagctgtttctgtacaagattactataccagccctcgcttcccagaatcccgcaatccatccgtttaccccacctaaactcagtgcattcgtggatgaagcgaaaacctatgcagccgagtacacactgcagaccctcggaattccgaccgacggcggtgacgggacaatggcaactgcagccgcagctgcgaccgcatttccaggatacgcagtccccaacgctactgcgccagtgagtgcggctcagctgaagcaggcagttacgctcggacaagatctggccgcatataccacttacgaagtatatcctactttcgccgtgacagcaagaggtgatgggtacggtacattctag

SEQ ID NO: 76213 - DNA, 1710 bp, Artificial Sequence
  derived and/or modified sequence
atgttgtgtagcccttctttctgtaagctgtgttggaaacggcagcgggagaacggtcagcgcaaatatggaggtcccccaccgggatgggacgccgctccacccgaacggggatgcgaaattttcattggcaagctgcctcgtgacctattcgaagacgaactcattccactgtgcgagaagattgggaagatctacgagatgaggatgatgatggacttcaatggaaacaacaggggatacgctttcgtaacattctctaataaggttgaagccaagaacgcgataaagcagctgaacaattacgagattcgtaacggaaggttactcggggtgtgcgccagtgtggataactgtcgactgttcgtggggggtattccaaaaactaagaaaagggaggagatattgtccgagatgaagaaggtgaccgagggggtagtggatgtgatcgtgtatccttccgccgctgacaaaacaaagaacagaggctttgcattcgttgagtacgagagtcaccgtgctgccgctatggctcgcagaaagctgctgccgggaagaattcagctttggggacatggaatcgcagtggattgggcagaacctgaagtggaagtggatgaagacactatgagcagtgtcaagatactctatgtacgtaacttgatgttatccacatcagaggaaatgattgagaaggaattcaacaatataaagccgggagccgttgaacgcgtaaagaaaatcagagattacgcattcgtacatttcagcaatcgagaagatgctgtagaggctatgaaagcacttaacggtaaggtgcttgacggcagcccgatagaggtcacactcgcaaaacctgtggacaaggacagctacgtgcgctataccaggggcaccggcggaagaggaacaatgttgcagggtgagtatacctactcgctgggccaggtgtacgaccccacgacgacctacctaggggctcccgtgttctacgcccctcagacatatgccgctattcccagcctccatttccccgctacaaagggtcacctatcgaatcgggcaatcattcgcgctccaagcgtgcgcggagccgcaggcgtgagaggactggggggtaggggctatttagcctatacggggcttggtcgcggatatcaggtcaagggagataaacgagaggataagctctatgatattttacctggcatggagctgacgcctatgaatccagtgacactcaagccacaggggatcaagctggctcctcagattcttgaggagatctgccaaaaaaacaattggggacagccagtttaccagcttcactcagcgatcggacaggatcagagacagctatttctctataagatcaccattccagcattggcctctcagaatcccgctatccacccatttacacctccaaaattaagtgcttttgtcgacgaagccaagacgtacgctgccgagtatacattacagacactcggtattcctaccgatggaggcgatggcacgatggctactgctgcagcagcagccaccgctttcccaggttacgccgtgcctaacgcaacggcaccggtgagcgccgcacaactgaagcaggccgtcaccctcgggcaggatttggccgcatatacgacttacgaagtgtatcctaccttcgctgtcactgcacgaggcgacggttatggtaccttctag

SEQ ID NO: 76214 - DNA, 1098 bp, Artificial Sequence
  derived and/or modified sequence
atgtggttgcttctcacgatggcctcgcttatcagtgtgctggggacaacacacggtctgtttgggaaacttcacccaggatccccggaggtgaccatgaacatctcacaaatgatcacttactggggctatccaaacgaggaatacgaagtggttaccgaggacggttatattttagaggttaaccgcatcccatacgggaagaagaatagcgggaataccgatgcaggatatgacgtgtggttgggcaactctcgcggtaatacctgggcgcgacggaacctttattacagcccagatagcgtggagttttgggctttcagctttgacgagatggccaaatacgacctgccggctaccattgacttcattgtcaagaaaacaggtcagaaacagctgcattacgtgggccactcccagggcacaaccatcggcttcattgcatttagcacaaacccatctctggctaaaaggatcaagaccttctatgctcttgccccagtcgcaacagttaagtatacaaagtcccttatcaataaactgaggtttgtaccgcaaagcctctttaagtttatttttggagacaaaattttctacccccataatttctttgatcagttcttggcgacagaggtgtgctccagagagatgctgaacctgctttgctccaacgcgttgtttattatctgtggcttcgattcgaagaacttcaacacatcacggctcgacgtataccttagccacaaccccgcagggacaagcgtgcagaacatgtttcactggacacaggcggtgaaaagcggaaagttccaggcatacgactggggctcgcctgtacagaataggatgcattatgatcagtcccagcccccatactacaacgttaccgccatgaatgtccctatcgccgtgtggaatggtgggaaggatctgctcgctgatccacaagacgtgggactcctgttacccaaacttcctaacctgatttaccacaaggagatccccttttacaaccacctggatttcatatgggcaatggatgctccacaagaggtgtacaacgatatcgtgtccatgatctctgaggataagaaatag

SEQ ID NO: 76215 - DNA, 1098 bp, Artificial Sequence
  derived and/or modified sequence
atgtggttgctactgactatggcatccctcatctctgttctcggtacaactcacgggttatttggaaagttacatcccggcagccccgaagtgaccatgaacatctcacagatgatcacctactgggggtacccaaatgaagagtatgaagtcgtgacagaagatggatatattctggaggtcaatagaattccatacggcaaaaagaattcaggcaataccgatgccggttatgacgtctggctgggcaactccagaggtaatacctgggcacggcggaatctgtattatagtccagatagcgtcgagttttgggcttttagtttcgatgagatggcaaagtacgatttgcccgcaactattgattttatagtcaagaagacgggccagaagcagttacattatgtaggccattcacaggggactacaattggattcatcgctttcagcactaacccaagccttgccaaacggatcaagactttctatgccctcgctccagtggctactgtaaaatacacaaaatccttaataaacaaactgcgctttgtaccccaatctttatttaagtttatatttggagacaaaatattctatcctcacaatttctttgatcaattcttggcaacagaagtctgctctcgtgagatgctcaatctgctctgtagtaacgccctgttcatcatatgtggctttgattctaagaattttaatacctctaggttagatgtttacctgtctcacaatccagcagggacatctgttcagaatatgtttcattggacacaggctgttaagtcaggaaaatttcaagcctatgattggggaagccccgtgcagaacagaatgcactacgatcaatcacagccaccttattacaatgttaccgccatgaacgttccgatcgcggtgtggaatggggggaaggacctactggccgatcctcaggatgttggactgctgctgcccaaactcccaaacctgatctaccataaggaaatacctttttataatcatctggattttatctgggcaatggacgctcctcaggaggtttacaatgatattgtgagtatgataagtgaagacaagaaatag

SEQ ID NO: 76216 - DNA, 1098 bp, Artificial Sequence
  derived and/or modified sequence
atgtggctgctcctaacaatggcctccttgatctccgtgttgggaactactcatggcttgttcggaaaattgcacccaggctcacccgaggtcaccatgaacattagtcagatgatcacttactggggttatcccaacgaagaatatgaggtggtgacggaggatgggtatattttagaagtgaatagaatcccttatggcaagaaaaatagtgggaataccgatgccggatatgatgtgtggctgggcaacagcagagggaacacatgggcacgacgaaatctgtactactcgcctgactcagtggaattttgggcttttagtttcgacgaaatggctaaatacgatctccccgcaaccatcgacttcattgttaaaaagacgggccagaagcagcttcattacgtcggccattcccagggcaccaccatcggattcatagcatttagcactaatccgtctctggcaaaaagaatcaaaacattttacgcattggcacccgtggccacagtcaagtacactaaatcattgataaacaaactcagattcgttccgcaatccctgttcaagttcatttttggtgacaaaatcttctatccacataatttttttgaccaattcctagctaccgaggtgtgcagccgtgaaatgctaaaccttctctgctcgaatgccctcttcatcatttgtggattcgattctaaaaactttaatacctccaggctggacgtgtatttgtcacataatcccgctggaacttccgtgcagaatatgttccactggacccaggctgtcaagtccggtaaattccaggcctatgattgggggtctcccgttcagaataggatgcattacgatcagagccaacctccctattataatgtgactgcaatgaatgtgccaattgccgtttggaatgggggaaaggatttacttgccgaccctcaagatgttgggctactcttacctaaactgccaaatcttatttaccacaaggagatacccttctacaaccacttagactttatctgggctatggatgctccacaggaggtgtacaatgacattgtcagcatgatcagtgaagataagaagtag

SEQ ID NO: 76217 - DNA, 1098 bp, Artificial Sequence
  derived and/or modified sequence
atgtggctgctgctgaccatggccagcctgatcagcgtgctgggcaccacccacggcctgttcggcaagctgcaccccggcagccccgaggtgaccatgaacatcagccagatgatcacctactggggctaccccaacgaggagtacgaggtggtgaccgaggacggctacatcctggaggtgaacagaatcccctacggcaagaagaacagcggcaacaccgacgccggctacgacgtgtggctgggcaacagcagaggcaacacctgggccagaagaaacctgtactacagccccgacagcgtggagttctgggccttcagcttcgacgagatggccaagtacgacctgcccgccaccatcgacttcatcgtgaagaagaccggccagaagcagctgcactacgtgggccacagccagggcaccaccatcggcttcatcgccttcagcaccaaccccagcctggccaagagaatcaagaccttctacgccctggcccccgtggccaccgtgaagtacaccaagagcctgatcaacaagctgagattcgtgccccagagcctgttcaagttcatcttcggcgacaagatcttctacccccacaacttcttcgaccagttcctggccaccgaggtgtgcagcagagagatgctgaacctgctgtgcagcaacgccctgttcatcatctgcggcttcgacagcaagaacttcaacaccagcagactggacgtgtacctgagccacaaccccgccggcaccagcgtgcagaacatgttccactggacccaggccgtgaagagcggcaagttccaggcctacgactggggcagccccgtgcagaacagaatgcactacgaccagagccagcccccctactacaacgtgaccgccatgaacgtgcccatcgccgtgtggaacggcggcaaggacctgctggccgacccccaggacgtgggcctgctgctgcccaagctgcccaacctgatctaccacaaggagatccccttctacaaccacctggacttcatctgggccatggacgccccccaggaggtgtacaacgacatcgtgagcatgatcagcgaggacaagaagtag

SEQ ID NO: 76218 - DNA, 1098 bp, Artificial Sequence
  derived and/or modified sequence
atgtggctattgttaacaatggcctccctgatctcagtcctggggaccactcacggtttattcggtaaactgcacccaggcagcccagaggtcaccatgaacatcagtcaaatgatcacctactggggctaccccaacgaggagtacgaagtggtgaccgaagacggctacatcctggaagtgaatcgcatcccatacggtaaaaagaacagcggtaatacggacgctggttatgatgtttggctaggcaactccagagggaatacctgggctcgacggaatctgtactacagccccgactctgttgagttttgggctttctctttcgacgagatggccaaatatgaccttccagccactatagactttatagtgaagaagaccggacagaagcagttgcactacgtcggtcattcgcagggtactaccattggttttatagcctttagcaccaacccttcactggccaaaaggatcaagactttctacgctctggcccccgtggccacagtgaagtatactaagtctctgattaataaactaaggtttgtcccacagtcactctttaagttcattttcggcgacaaaatcttttacccacacaatttcttcgaccaatttctggcaacagaggtgtgtagcagggaaatgttaaatctgttgtgcagcaacgccttatttatcatctgcggtttcgacagcaaaaactttaatacatcgcggctagatgtgtacctgtctcacaatccggccggaactagtgtgcagaacatgttccattggacacaggccgtgaaatcaggaaaatttcaggcatacgactgggggtccccagttcagaaccgaatgcattatgaccaaagtcagccaccctattacaacgttaccgctatgaacgttccaatcgctgtatggaacggcggaaaagaccttctggcagatcctcaagacgtcgggttgttgctgcctaagctgccaaatctgatctaccacaaagagattcccttctataatcacttggacttcatatgggcaatggatgccccgcaagaagtgtataatgacatcgtgtcaatgatttccgaagacaagaaatag

SEQ ID NO: 76219 - DNA, 1098 bp, Artificial Sequence
  derived and/or modified sequence
atgtggctgctgctgaccatggccagcctcatctctgtgctgggcaccacccacggcctgtttgggaagctgcaccctggcagccctgaggtgaccatgaacatcagccagatgatcacctactggggctacccaaatgaggagtatgaggtggtgacagaagatggctacatcctggaggtgaaccgcatcccctacggcaagaagaacagcggcaacacagatgctggctatgatgtgtggctgggcaacagccggggcaacacctgggcccggaggaacctgtactacagcccagattctgtggagttctgggccttctcctttgatgagatggccaagtatgacctgcctgccaccatcgacttcatcgtgaagaagacaggccagaagcagctgcactacgtgggccacagccagggcaccaccatcggcttcatcgccttcagcaccaaccccagcctggccaagaggatcaagaccttctacgccctggcccctgtggccaccgtgaagtacaccaagagcctcatcaacaagctgcgctttgtgccccagagcctcttcaagttcatctttggagacaagatcttctacccccacaacttctttgaccagttcctggccacagaggtgtgcagccgggagatgctgaacctgctgtgcagcaatgccctcttcatcatctgtggctttgacagcaagaacttcaacaccagccggctggatgtgtacctgagccacaacccagctggcacctctgtgcagaacatgttccactggacccaggccgtgaagagcggcaagttccaggcctatgactggggcagccctgtgcagaacaggatgcactatgaccagagccagcccccctactacaacgtgacagccatgaatgtgcccatcgctgtgtggaatggaggcaaggacctgctggccgacccccaggatgtgggcctgctgctgcccaagctgcccaacctgatctaccacaaggagatccccttctacaaccacctggacttcatctgggccatggatgccccccaggaggtgtacaatgacatcgtgtccatgatcagcgaggacaagaagtag

SEQ ID NO: 76220 - DNA, 1098 bp, Artificial Sequence
  derived and/or modified sequence
atgtggctgctgctgaccatggccagcctgatcagcgtgctgggcacaactcacggtttatttgggaagttacatcccggatcccccgaggttacgatgaatatatcacagatgattacatattggggctaccctaacgaggaatacgaggtggtcactgaggacgggtacatactggaggttaatagaattccttatggtaaaaaaaatagtggaaatactgatgcaggctacgatgtgtggttgggtaactccagaggaaacacgtgggcgcgtaggaacctatactattccccagattccgtggaattctgggctttctccttcgacgaaatggctaaatacgacctgccagcgacaatagatttcatcgtcaagaaaaccggccagaagcaactgcattacgtcggtcacagccaggggacaaccattgggtttattgcatttagtaccaatccatctttagctaaaaggatcaagactttctatgctttagcacccgtagcaaccgtgaaatatacaaaaagcctgattaacaagctgcgttttgttcctcagagtttgtttaagttcatattcggcgacaaaattttctatccacataacttctttgatcagtttctggccacagaagtttgcagtcgagagatgctgaatctactgtgttccaacgcattgtttattatttgcggctttgatagtaagaacttcaacactagtcggctagacgtgtacctgtcccacaaccccgccggaaccagtgtgcagaatatgtttcactggacccaggcagtcaaatctggaaagtttcaggcctacgactgggggagtcctgtgcagaatcgcatgcactatgaccagagtcagcctccctactataatgtgacagccatgaacgttccaatcgccgtgtggaacggcgggaaggatttactggccgatccacaggacgtgggtctcttgttaccaaagctccccaatctcatctaccataaggagatccccttttataatcatctggattttatctgggccatggatgccccgcaggaggtgtataacgatattgtcagcatgattagcgaggacaaaaaatag

SEQ ID NO: 76221 - RNA, 1098 nt, Artificial Sequence
  derived and/or modified sequence
augugguugcuacugacuauggcaucccucaucucuguucucgguacaacucacggguuauuuggaaaguuacaucccggcagccccgaagugaccaugaacaucucacagaugaucaccuacuggggguacccaaaugaagaguaugaagucgugacagaagauggauauauucuggaggucaauagaauuccauacggcaaaaagaauucaggcaauaccgaugccgguuaugacgucuggcugggcaacuccagagguaauaccugggcacggcggaaucuguauuauaguccagauagcgucgaguuuugggcuuuuaguuucgaugagauggcaaaguacgauuugcccgcaacuauugauuuuauagucaagaagacgggccagaagcaguuacauuauguaggccauucacaggggacuacaauuggauucaucgcuuucagcacuaacccaagccuugccaaacggaucaagacuuucuaugcccucgcuccaguggcuacuguaaaauacacaaaauccuuaauaaacaaacugcgcuuuguaccccaaucuuuauuuaaguuuauauuuggagacaaaauauucuauccucacaauuucuuugaucaauucuuggcaacagaagucugcucucgugagaugcucaaucugcucuguaguaacgcccuguucaucauauguggcuuugauucuaagaauuuuaauaccucuagguuagauguuuaccugucucacaauccagcagggacaucuguucagaauauguuucauuggacacaggcuguuaagucaggaaaauuucaagccuaugauuggggaagccccgugcagaacagaaugcacuacgaucaaucacagccaccuuauuacaauguuaccgccaugaacguuccgaucgcgguguggaauggggggaaggaccuacuggccgauccucaggauguuggacugcugcugcccaaacucccaaaccugaucuaccauaaggaaauaccuuuuuauaaucaucuggauuuuaucugggcaauggacgcuccucaggagguuuacaaugauauugugaguaugauaagugaagacaagaaauag

SEQ ID NO: 76222 - RNA, 1098 nt, Artificial Sequence
  derived and/or modified sequence
auguggcugcuccuaacaauggccuccuugaucuccguguugggaacuacucauggcuuguucggaaaauugcacccaggcucacccgaggucaccaugaacauuagucagaugaucacuuacugggguuaucccaacgaagaauaugagguggugacggaggauggguauauuuuagaagugaauagaaucccuuauggcaagaaaaauagugggaauaccgaugccggauaugauguguggcugggcaacagcagagggaacacaugggcacgacgaaaucuguacuacucgccugacucaguggaauuuugggcuuuuaguuucgacgaaauggcuaaauacgaucuccccgcaaccaucgacuucauuguuaaaaagacgggccagaagcagcuucauuacgucggccauucccagggcaccaccaucggauucauagcauuuagcacuaauccgucucuggcaaaaagaaucaaaacauuuuacgcauuggcacccguggccacagucaaguacacuaaaucauugauaaacaaacucagauucguuccgcaaucccuguucaaguucauuuuuggugacaaaaucuucuauccacauaauuuuuuugaccaauuccuagcuaccgaggugugcagccgugaaaugcuaaaccuucucugcucgaaugcccucuucaucauuuguggauucgauucuaaaaacuuuaauaccuccaggcuggacguguauuugucacauaaucccgcuggaacuuccgugcagaauauguuccacuggacccaggcugucaaguccgguaaauuccaggccuaugauugggggucucccguucagaauaggaugcauuacgaucagagccaaccucccuauuauaaugugacugcaaugaaugugccaauugccguuuggaaugggggaaaggauuuacuugccgacccucaagauguugggcuacucuuaccuaaacugccaaaucuuauuuaccacaaggagauacccuucuacaaccacuuagacuuuaucugggcuauggaugcuccacaggagguguacaaugacauugucagcaugaucagugaagauaagaaguag

SEQ ID NO: 76223 - protein, 398 aa, Artificial Sequence
  derived and/or modified sequence
MWLLLTMASLISVLGTTHGLFGKLHPGSPEVTMNISQMITYWGYPNEEYEVVTEDGYILEVNRIPYGKKNSGNTGQRPVVFLQHGLLASATNWISNLPNNSLAFILADAGYDVWLGNSRGNTWARRNLYYSPDSVEFWAFSFDEMAKYDLPATIDFIVKKTGQKQLHYVGHSQGTTIGFIAFSTNPSLAKRIKTFYALAPVATVKYTKSLINKLRFVPQSLFKFIFGDKIFYPHNFFDQFLATEVCSREMLNLLCSNALFIICGFDSKNFNTSRLDVYLSHNPAGTSVQNMFHWTQAVKSGKFQAYDWGSPVQNRMHYDQSQPPYYNVTAMNVPIAVWNGGKDLLADPQDVGLLLPKLPNLIYHKEIPFYNHLDFIWAMDAPQEVYNDIVSMISEDKK

SEQ ID NO: 76224 - protein, 408 aa, Artificial Sequence
  derived and/or modified sequence
MFSNANSRSKMWLLLTMASLISVLGTTHGLFGKLHPGSPEVTMNISQMITYWGYPNEEYEVVTEDGYILEVNRIPYGKKNSGNTGQRPVVFLQHGLLASATNWISNLPNNSLAFILADAGYDVWLGNSRGNTWARRNLYYSPDSVEFWAFSFDEMAKYDLPATIDFIVKKTGQKQLHYVGHSQGTTIGFIAFSTNPSLAKRIKTFYALAPVATVKYTKSLINKLRFVPQSLFKFIFGDKIFYPHNFFDQFLATEVCSREMLNLLCSNALFIICGFDSKNFNTSRLDVYLSHNPAGTSVQNMFHWTQAVKSGKFQAYDWGSPVQNRMHYDQSQPPYYNVTAMNVPIAVWNGGKDLLADPQDVGLLLPKLPNLIYHKEIPFYNHLDFIWAMDAPQEVYNDIVSMISEDKK

SEQ ID NO: 76225 - DNA, 1227 bp, Artificial Sequence
  derived and/or modified sequence
atgttctccaatgcaaacagtagaagcaaaatgtggctgctgctgacaatggcctccttgatcagcgtcctggggactacccatggcctgttcggaaagttgcaccctggaagcccagaagtgactatgaatatctctcaaatgattacctattggggataccctaacgaggagtacgaagtggttacagaggacgggtatatcctggaggtaaatagaattccatacggcaagaagaactctggcaatactggacagcgccctgtggtgttcttacagcacggtttacttgctagcgcgaccaattggatttccaacctgcccaacaactcgttagcttttatccttgcagatgctggctatgacgtctggttggggaactcaaggggcaatacatgggcgagaaggaatttgtactattcccctgattccgttgaattttgggctttcagctttgatgagatggctaagtacgatcttccagcaactatcgattttatcgtaaaaaaaaccggccaaaaacagctccactacgtgggacactctcagggaaccaccatagggtttatcgccttctcaaccaacccatcactggccaagaggatcaaaactttctacgcattagcacctgtggccaccgttaaatacactaaaagcctgattaacaaactgcggtttgtcccacagagcctgtttaagtttatttttggcgacaagatcttttatccccataatttctttgaccagtttttagcaacggaggtgtgctcgagagagatgttaaatctgctgtgttcaaatgcactcttcatcatctgtggctttgacagtaagaatttcaatacaagtagactggacgtatatcttagtcataatcccgctggcacaagcgttcagaacatgtttcattggacgcaggctgtgaaaagcggtaaatttcaagcctacgattgggggtcgcccgtccagaacaggatgcactatgaccagagccagccaccttactacaacgtcaccgccatgaacgtacccattgccgtatggaatggcggaaaagatttgctggcagatccacaggatgttgggctgctgctgcccaagctccctaaccttatttatcataaagaaattcccttctacaaccatttggacttcatctgggccatggatgcaccccaggaagtctataatgacattgtgagcatgatatcagaagataagaagtag

SEQ ID NO: 76226 - DNA, 1227 bp, Artificial Sequence
  derived and/or modified sequence
atgttctcaaatgcaaactctagatcaaagatgtggctactactgacaatggcatcccttatttcggtgttggggacgactcacgggctttttggaaagctgcacccaggttcaccagaggtgacgatgaacatcagccagatgatcacctactggggatatcctaacgaagaatacgaagtcgtcaccgaggacggatatattttggaagttaacagaattccgtatggcaagaaaaacagcggtaacacagggcagagacctgtggtgttccttcagcacgggcttctagcgtcggcaacaaattggataagcaacttgcctaacaattctttggcattcattctggcggatgctggatacgacgtgtggctgggcaactccagaggcaacacctgggccaggcggaacctgtattactcccctgattcggtagagttctgggcattcagtttcgacgagatggccaaatacgatctgcccgcaaccatagattttatcgtgaaaaaaacaggccaaaagcagttacattacgtgggtcatagtcagggtacaactatcggatttatcgcatttagcaccaatcctagccttgctaaaagaattaaaactttctatgcgctggcccctgtcgcaactgttaagtataccaagtccctgatcaacaagctaaggttcgttccgcaatctctcttcaaatttattttcggagacaaaatcttctaccctcataacttttttgaccaattcctggcaactgaggtgtgtagccgcgagatgctaaaccttctctgttctaatgccttattcataatatgcggttttgatagcaagaactttaacaccagtagactagatgtgtatctgtctcataaccctgccgggactagcgtgcaaaatatgttccattggacacaggcagttaaatcaggaaaatttcaggcatatgactggggttccccagtgcagaaccgaatgcattacgatcaatcacagccaccctactataatgtcacagcgatgaacgtccctatcgctgtgtggaacggcggaaaggatctgttggctgacccgcaagatgtgggccttctcctgcccaaacttcctaatttaatttaccataaagaaattcctttctacaatcatcttgactttatctgggctatggacgctccacaagaagtgtataatgacattgttagcatgattagcgaggacaagaaatag

SEQ ID NO: 76227 - DNA, 1227 bp, Artificial Sequence
  derived and/or modified sequence
atgttctccaatgctaattcgaggagcaaaatgtggcttttactgactatggcgtctttgatcagcgtcttaggtaccactcatggactttttggcaaactgcaccctgggagtcctgaagttactatgaacatctcccagatgataacatattggggttatcctaacgaagagtacgaagttgtgacggaggacgggtacattcttgaagtcaacagaattccctacggcaaaaaaaacagcggtaatacagggcaacggccggtggtgttcttgcagcacggtttgctcgctagcgccacgaactggatttctaatttacccaataattccctggcattcattctggccgatgccggctacgacgtttggctcggaaactctcgcggcaatacttgggccagacggaatttatattacagccccgatagtgttgaattctgggcgttcagctttgatgaaatggctaagtacgatttgcccgcaacgatcgacttcattgtgaaaaagaccgggcaaaaacaacttcactacgtcggacattcacaaggcaccacaattggattcatcgctttcagtaccaatccttccctagccaagcgaatcaaaaccttctatgccctcgctcccgttgcaactgttaagtataccaaaagcctaattaacaagctacgattcgtaccacaaagtctgttcaaattcatttttggtgataagatcttttatccccacaactttttcgaccagttcctcgccactgaagtttgtagccgggagatgttgaatctgctttgctctaacgctctcttcattatctgcggcttcgattcaaaaaacttcaacacctcgcgcctagacgtatacctgtcccataatcctgccggtacaagcgttcaaaatatgtttcactggacccaggctgtcaaatcagggaagtttcaagcatacgactggggttcccctgtccagaatcgaatgcattatgaccagtcacagcctccttactataacgttaccgccatgaacgttcccattgctgtttggaatggtggaaaggacctactagcagacccccaggacgtgggccttctcttacctaagcttccgaacctcatttaccacaaagaaatccctttctacaatcacctggattttatctgggccatggacgccccacaggaagtgtataatgatatagtttctatgataagcgaggacaagaagtag

SEQ ID NO: 76228 - DNA, 1376 bp, Artificial Sequence
  derived and/or modified sequence
agagaaacagaatcctaactatttctgaggaaactgcaggtccaaaatgtggctgcttttaacaatggcaagtttgatatctgtactggggactacacatggtttgtttggaaaattacatcctggaagccctgaagtgactatgaacattagtcagatgattacttattggggatacccaaatgaagaatatgaagttgtgactgaagatggttatattcttgaagtcaatagaattccttatgggaagaaaaattcagggaatacaggccagagacctgttgtgtttttgcagcatggtttgcttgcatcagccacaaactggatttccaacctgccgaacaacagccttgccttcattctggcagatgctggttatgatgtgtggctgggcaacagcagaggaaacacctgggccagaagaaacttgtactattcaccagattcagttgaattctgggctttcagctttgatgaaatggctaaatatgaccttccagccacaatcgacttcattgtaaagaaaactggacagaagcagctacactatgttggccattcccagggcaccaccattggttttattgccttttccaccaatcccagcctggctaaaagaatcaaaaccttctatgctctagctcctgttgccactgtgaagtatacaaaaagccttataaacaaacttagatttgttcctcaatccctcttcaagtttatatttggtgacaaaatattctacccacacaacttctttgatcaatttcttgctactgaagtgtgctcccgtgagatgctgaatctcctttgcagcaatgccttatttataatttgtggatttgacagtaagaactttaacacgagtcgcttggatgtgtatctatcacataatccagcaggaacttctgttcaaaacatgttccattggacccaggctgttaagtctgggaaattccaagcttatgactggggaagcccagttcagaataggatgcactatgatcagtcccaacctccctactacaatgtgacagccatgaatgtaccaattgcagtgtggaacggtggcaaggacctgttggctgacccccaagatgttggccttttgcttccaaaactccccaatcttatttaccacaaggagattcctttttacaatcacttggactttatctgggcaatggatgcccctcaagaagtttacaatgacattgtttctatgatatcagaagataaaaagtagttctggatttaaagaattatccgtttgtttttccaaaatactttattctctcatacatagtattttcataatgtttgacatgcagtgcttctttctgtaattttgactttagaaatatattggcatcaacaaa

SEQ ID NO: 76229 - DNA, 1227 bp, Artificial Sequence
  derived and/or modified sequence
atgttcagcaacgccaacagcagaagcaagatgtggctgctgctgaccatggccagcctgatcagcgtgctgggcaccacccacggcctgttcggcaagctgcaccccggcagccccgaggtgaccatgaacatcagccagatgatcacctactggggctaccccaacgaggagtacgaggtggtgaccgaggacggctacatcctggaggtgaacagaatcccctacggcaagaagaacagcggcaacaccggccagagacccgtggtgttcctgcagcacggcctgctggccagcgccaccaactggatcagcaacctgcccaacaacagcctggccttcatcctggccgacgccggctacgacgtgtggctgggcaacagcagaggcaacacctgggccagaagaaacctgtactacagccccgacagcgtggagttctgggccttcagcttcgacgagatggccaagtacgacctgcccgccaccatcgacttcatcgtgaagaagaccggccagaagcagctgcactacgtgggccacagccagggcaccaccatcggcttcatcgccttcagcaccaaccccagcctggccaagagaatcaagaccttctacgccctggcccccgtggccaccgtgaagtacaccaagagcctgatcaacaagctgagattcgtgccccagagcctgttcaagttcatcttcggcgacaagatcttctacccccacaacttcttcgaccagttcctggccaccgaggtgtgcagcagagagatgctgaacctgctgtgcagcaacgccctgttcatcatctgcggcttcgacagcaagaacttcaacaccagcagactggacgtgtacctgagccacaaccccgccggcaccagcgtgcagaacatgttccactggacccaggccgtgaagagcggcaagttccaggcctacgactggggcagccccgtgcagaacagaatgcactacgaccagagccagcccccctactacaacgtgaccgccatgaacgtgcccatcgccgtgtggaacggcggcaaggacctgctggccgacccccaggacgtgggcctgctgctgcccaagctgcccaacctgatctaccacaaggagatccccttctacaaccacctggacttcatctgggccatggacgccccccaggaggtgtacaacgacatcgtgagcatgatcagcgaggacaagaagtag

SEQ ID NO: 76230 - DNA, 1227 bp, Artificial Sequence
  derived and/or modified sequence
atgttcagtaacgcaaacagccggagcaagatgtggctgttgcttactatggcaagcctaatctctgttctcgggaccacacatggactctttggcaaactgcatcccgggagccccgaagtgaccatgaatattagccagatgatcacttactggggttaccctaatgaggaatatgaagtggttaccgaggatggatacattcttgaagttaataggatcccgtacggaaagaagaattccggcaataccgggcaaaggcccgtggtgtttctgcagcatgggctgctagcttcagctaccaattggatctccaacctgcctaacaactccctcgccttcatactggccgacgcaggatatgatgtctggctggggaactctagggggaacacatgggctagaaggaacctgtattatagccctgactccgtcgaattctgggccttctcatttgatgaaatggccaagtatgacttgccggcaactatcgattttatcgtaaagaaaactggacagaagcagctgcattacgtggggcacagccagggcaccaccataggctttattgccttcagtaccaacccgagcttggctaaacgaattaagaccttctatgctttagcacccgtggctaccgtgaaatatacaaagtctctgattaataaactcagattcgtgccccagtcactgtttaagtttatcttcggggataagatcttttatccccacaactttttcgatcagttcttagcgaccgaggtatgtagtagagaaatgctgaacctgctgtgttccaatgccctgtttataatatgtggctttgactccaagaacttcaatacgtcaaggcttgacgtttatctctcccacaatcctgctggcactagcgtgcaaaacatgtttcactggacgcaggctgttaaatctggtaagtttcaggcatacgattgggggtctcctgtgcaaaataggatgcattacgaccagagtcaaccaccatactacaacgtgacagcaatgaatgtgccaatcgcagtatggaacggcggtaaggatctcctggctgacccacaggacgttgggcttctgctgccgaaactgcccaacctcatataccacaaggagattccattctataaccacctcgacttcatctgggcgatggatgcgccacaggaggtctataacgatatcgtgtctatgatcagcgaggataaaaaatag

SEQ ID NO: 76231 - DNA, 1227 bp, Artificial Sequence
  derived and/or modified sequence
atgttcagcaatgccaacagccgcagcaagatgtggctgctgctgaccatggccagcctcatctctgtgctgggcaccacccacggcctgtttgggaagctgcaccctggcagccctgaggtgaccatgaacatcagccagatgatcacctactggggctacccaaatgaggagtatgaggtggtgacagaagatggctacatcctggaggtgaaccgcatcccctacggcaagaagaacagcggcaacacaggccagaggcctgtggtgttcctgcagcacggcctgctggccagcgccaccaactggatcagcaacctgcccaacaacagcctggccttcatcctggctgatgctggctatgatgtgtggctgggcaacagccggggcaacacctgggcccggaggaacctgtactacagcccagacagcgtggagttctgggccttctcctttgatgagatggccaagtatgacctgcctgccaccatcgacttcatcgtgaagaagacaggccagaagcagctgcactacgtgggccacagccagggcaccaccatcggcttcatcgccttcagcaccaaccccagcctggccaagaggatcaagaccttctacgccctggcccctgtggccaccgtgaagtacaccaagagcctcatcaacaagctgcgctttgtgccccagagcctcttcaagttcatctttggagacaagatcttctacccccacaacttctttgaccagttcctggccacagaggtgtgcagccgggagatgctgaacctgctgtgcagcaatgccctcttcatcatctgtggctttgacagcaagaacttcaacaccagccggctggatgtgtacctgagccacaacccagctggcacctctgtgcagaacatgttccactggacccaggccgtgaagagcggcaagttccaggcctatgactggggcagccctgtgcagaacaggatgcactatgaccagagccagcccccctactacaacgtgacagccatgaatgtgcccatcgctgtgtggaatggaggcaaggacctgctggccgacccccaggatgtgggcctgctgctgcccaagctgcccaacctgatctaccacaaggagatccccttctacaaccacctggacttcatctgggccatggatgccccccaggaggtgtacaatgacatcgtgtccatgatcagcgaggacaagaagtag

SEQ ID NO: 76232 - DNA, 1227 bp, Artificial Sequence
  derived and/or modified sequence
atgttcagcaacgccaacagccggagcaagatgtggctgctgctgacgatggcatctttgatctccgttctcggtacaacccatggcctttttggtaaattacatcctggctcaccagaagtgacaatgaatatctcacagatgataacatactgggggtatcccaatgaggagtacgaggtcgtgaccgaggacggctatattcttgaggtgaatcgaattccttatggcaagaagaacagtgggaatactggacagagacccgtggtctttttacaacacgggttactcgccagcgctacaaactggatctccaacctgcccaataattccctcgcctttattctcgccgacgcagggtatgatgtctggcttggcaactctaggggcaacacttgggctagacggaacttgtattacagccccgactctgtggaattttgggccttctcttttgatgaaatggcaaagtacgatttacccgccaccatcgatttcatcgtgaaaaagactggccagaagcagcttcactatgtggggcattcccaaggaaccactatcgggtttattgccttcagtacaaacccaagcttagccaaaagaatcaaaacgttctatgctctcgctcctgtggcaaccgtcaagtataccaaatccctcattaataagctgcgatttgttcctcaaagcttgtttaaattcatcttcggggacaagattttttacccacataacttcttcgatcagtttctcgccacagaagtatgtagtagggaaatgctcaatctgctctgttctaatgccctgttcatcatctgcggttttgattcaaagaacttcaatacaagccggctagacgtgtacttgtctcacaatccagccgggaccagcgtgcagaatatgttccactggactcaggctgttaagagcggcaagtttcaggcttacgactgggggtcccctgtacagaacagaatgcactacgatcagagtcagccgccatactacaacgtcaccgctatgaatgtccctatcgccgtctggaatggtggtaaagacctgcttgcggacccacaagacgtgggtcttcttctgcctaaattacctaatttaatctaccataaggaaattcctttctacaaccatctcgacttcatttgggccatggacgctccccaggaggtgtacaacgacattgtctctatgatctccgaggacaaaaagtag

SEQ ID NO: 76233 - DNA, 1470 bp, Artificial Sequence
  derived and/or modified sequence
aaaatactaaccagccagagaaacagaatcctaactatttctgaggaaactgacttggcaacaagcattttgagaaatttattctgcccttgaacatctttgagcccattgagatgttctccaacgcaaacagcaggtccaaaatgtggctgcttttaacaatggcaagtttgatatctgtactggggactacacatggtttgtttggaaaattacatcctggaagccctgaagtgactatgaacattagtcagatgattacttattggggatacccaaatgaagaatatgaagttgtgactgaagatggttatattcttgaagtcaatagaattccttatgggaagaaaaattcagggaatacaggccagagacctgttgtgtttttgcagcatggtttgcttgcatcagccacaaactggatttccaacctgccgaacaacagccttgccttcattctggcagatgctggttatgatgtgtggctgggcaacagcagaggaaacacctgggccagaagaaacttgtactattcaccagattcagttgaattctgggctttcagctttgatgaaatggctaaatatgaccttccagccacaatcgacttcattgtaaagaaaactggacagaagcagctacactatgttggccattcccagggcaccaccattggttttattgccttttccaccaatcccagcctggctaaaagaatcaaaaccttctatgctctagctcctgttgccactgtgaagtatacaaaaagccttataaacaaacttagatttgttcctcaatccctcttcaagtttatatttggtgacaaaatattctacccacacaacttctttgatcaatttcttgctactgaagtgtgctcccgtgagatgctgaatctcctttgcagcaatgccttatttataatttgtggatttgacagtaagaactttaacacgagtcgcttggatgtgtatctatcacataatccagcaggaacttctgttcaaaacatgttccattggacccaggctgttaagtctgggaaattccaagcttatgactggggaagcccagttcagaataggatgcactatgatcagtcccaacctccctactacaatgtgacagccatgaatgtaccaattgcagtgtggaacggtggcaaggacctgttggctgacccccaagatgttggccttttgcttccaaaactccccaatcttatttaccacaaggagattcctttttacaatcacttggactttatctgggcaatggatgcccctcaagaagtttacaatgacattgtttctatgatatcagaagataaaaagtagttctggatttaaagaattatccgtttgtttttccaaaatactttattctctcatacatagtattttcataatgtttgacatgcagtgcttctttctgtaattttgactttagaaatatattggcatcaac

SEQ ID NO: 76234 - RNA, 1227 nt, Artificial Sequence
  derived and/or modified sequence
auguucucaaaugcaaacucuagaucaaagauguggcuacuacugacaauggcaucccuuauuucgguguuggggacgacucacgggcuuuuuggaaagcugcacccagguucaccagaggugacgaugaacaucagccagaugaucaccuacuggggauauccuaacgaagaauacgaagucgucaccgaggacggauauauuuuggaaguuaacagaauuccguauggcaagaaaaacagcgguaacacagggcagagaccugugguguuccuucagcacgggcuucuagcgucggcaacaaauuggauaagcaacuugccuaacaauucuuuggcauucauucuggcggaugcuggauacgacguguggcugggcaacuccagaggcaacaccugggccaggcggaaccuguauuacuccccugauucgguagaguucugggcauucaguuucgacgagauggccaaauacgaucugcccgcaaccauagauuuuaucgugaaaaaaacaggccaaaagcaguuacauuacgugggucauagucaggguacaacuaucggauuuaucgcauuuagcaccaauccuagccuugcuaaaagaauuaaaacuuucuaugcgcuggccccugucgcaacuguuaaguauaccaagucccugaucaacaagcuaagguucguuccgcaaucucucuucaaauuuauuuucggagacaaaaucuucuacccucauaacuuuuuugaccaauuccuggcaacugagguguguagccgcgagaugcuaaaccuucucuguucuaaugccuuauucauaauaugcgguuuugauagcaagaacuuuaacaccaguagacuagauguguaucugucucauaacccugccgggacuagcgugcaaaauauguuccauuggacacaggcaguuaaaucaggaaaauuucaggcauaugacugggguuccccagugcagaaccgaaugcauuacgaucaaucacagccacccuacuauaaugucacagcgaugaacgucccuaucgcuguguggaacggcggaaaggaucuguuggcugacccgcaagaugugggccuucuccugcccaaacuuccuaauuuaauuuaccauaaagaaauuccuuucuacaaucaucuugacuuuaucugggcuauggacgcuccacaagaaguguauaaugacauuguuagcaugauuagcgaggacaagaaauag

SEQ ID NO: 76235 - RNA, 1227 nt, Artificial Sequence
  derived and/or modified sequence
auguucuccaaugcuaauucgaggagcaaaauguggcuuuuacugacuauggcgucuuugaucagcgucuuagguaccacucauggacuuuuuggcaaacugcacccugggaguccugaaguuacuaugaacaucucccagaugauaacauauugggguuauccuaacgaagaguacgaaguugugacggaggacggguacauucuugaagucaacagaauucccuacggcaaaaaaaacagcgguaauacagggcaacggccggugguguucuugcagcacgguuugcucgcuagcgccacgaacuggauuucuaauuuacccaauaauucccuggcauucauucuggccgaugccggcuacgacguuuggcucggaaacucucgcggcaauacuugggccagacggaauuuauauuacagccccgauaguguugaauucugggcguucagcuuugaugaaauggcuaaguacgauuugcccgcaacgaucgacuucauugugaaaaagaccgggcaaaaacaacuucacuacgucggacauucacaaggcaccacaauuggauucaucgcuuucaguaccaauccuucccuagccaagcgaaucaaaaccuucuaugcccucgcucccguugcaacuguuaaguauaccaaaagccuaauuaacaagcuacgauucguaccacaaagucuguucaaauucauuuuuggugauaagaucuuuuauccccacaacuuuuucgaccaguuccucgccacugaaguuuguagccgggagauguugaaucugcuuugcucuaacgcucucuucauuaucugcggcuucgauucaaaaaacuucaacaccucgcgccuagacguauaccugucccauaauccugccgguacaagcguucaaaauauguuucacuggacccaggcugucaaaucagggaaguuucaagcauacgacugggguuccccuguccagaaucgaaugcauuaugaccagucacagccuccuuacuauaacguuaccgccaugaacguucccauugcuguuuggaaugguggaaaggaccuacuagcagacccccaggacgugggccuucucuuaccuaagcuuccgaaccucauuuaccacaaagaaaucccuuucuacaaucaccuggauuuuaucugggccauggacgccccacaggaaguguauaaugauauaguuucuaugauaagcgaggacaagaaguag

SEQ ID NO: 76236 - protein, 365 aa, Artificial Sequence
  derived and/or modified sequence
MWLLLTMASLISVLGTTHGLFGKLHPGSPEVTMNISQMITYWGYPNEEYEVVTEDGYILEVNRIPYGKKNSGNTDAGYDVWLGNSRGNTWARRNLYYSPDSVEFWAFSFDEMAKYDLPATIDFIVKKTGQKQLHYVGHSQGTTIGFIAFSTNPSLAKRIKTFYALAPVATVKYTKSLINKLRFVPQSLFKFIFGDKIFYPHNFFDQFLATEVCSREMLNLLCSNALFIICGFDSKNFNTSRLDVYLSHNPAGTSVQNMFHWTQAVKSGKFQAYDWGSPVQNRMHYDQSQPPYYNVTAMNVPIAVWNGGKDLLADPQDVGLLLPKLPNLIYHKEIPFYNHLDFIWAMDAPQEVYNDIVSMISEDKK

SEQ ID NO: 76237 - DNA, 1357 bp, Artificial Sequence
  derived and/or modified sequence
gagaaacagaatcctaactatttctgaggaaactgacttggcaacaagcattttgagaaatttattctgcccttgaacatctttgagcccattgagatgttctccaacgcaaacagcaggtccaaaatgtggctgcttttaacaatggcaagtttgatatctgtactggggactacacatggtttgtttggaaaattacatcctggaagccctgaagtgactatgaacattagtcagatgattacttattggggatacccaaatgaagaatatgaagttgtgactgaagatggttatattcttgaagtcaatagaattccttatgggaagaaaaattcagggaatacagatgctggttatgatgtgtggctgggcaacagcagaggaaacacctgggccagaagaaacttgtactattcaccagattcagttgaattctgggctttcagctttgatgaaatggctaaatatgaccttccagccacaatcgacttcattgtaaagaaaactggacagaagcagctacactatgttggccattcccagggcaccaccattggttttattgccttttccaccaatcccagcctggctaaaagaatcaaaaccttctatgctctagctcctgttgccactgtgaagtatacaaaaagccttataaacaaacttagatttgttcctcaatccctcttcaagtttatatttggtgacaaaatattctacccacacaacttctttgatcaatttcttgctactgaagtgtgctcccgtgagatgctgaatctcctttgcagcaatgccttatttataatttgtggatttgacagtaagaactttaacacgagtcgcttggatgtgtatctatcacataatccagcaggaacttctgttcaaaacatgttccattggacccaggctgttaagtctgggaaattccaagcttatgactggggaagcccagttcagaataggatgcactatgatcagtcccaacctccctactacaatgtgacagccatgaatgtaccaattgcagtgtggaacggtggcaaggacctgttggctgacccccaagatgttggccttttgcttccaaaactccccaatcttatttaccacaaggagattcctttttacaatcacttggactttatctgggcaatggatgcccctcaagaagtttacaatgacattgtttctatgatatcagaagataaaaagtagttctggatttaaagaattatccgtttgtttttccaaaatactttattctctcatacatagtattttcataatgtttgacatgcagtgcttctttctgtaattttgactttagaaatatattggcatcaacaaa

SEQ ID NO: 76238 - protein, 156 aa, Artificial Sequence
  derived and/or modified sequence
MKIFVGNVDGADTTPEELAALFAPYGTVMSCAVMKQFAFVHMRENAGALRAIEALHGHELRPGRALVVEMSRPRPLNTWKIFVGNVSAACTSQELRSLFERRGRVIECDVVKDYAFVHMEKEADAKAAIAQLNGKEVKGKRINVELSTKGMVPTGV

SEQ ID NO: 76239 - DNA, 471 bp, Artificial Sequence
  derived and/or modified sequence
atgaaaatctttgttggcaacgtagatggagccgacaccaccccagaggaactcgctgcattattcgcgccatacggcacggtgatgtcgtgtgccgtgatgaagcagttcgcgtttgtccacatgcgagagaacgccggagctcttcgtgccatagaagcactccacgggcacgagctgaggcccgggcgggccctggtcgttgagatgagccggccacgccccctcaacacctggaaaatattcgtcggcaacgttagcgcagcctgtacaagccaggaactccgcagcctgttcgagaggcggggcagggtgatcgagtgcgatgtcgtgaaggattatgcctttgtgcacatggagaaagaggctgacgccaaggctgccattgcacaactgaacggcaaagaggtgaaggggaagcgcatcaacgtagagctgagcactaagggcatggttcccacgggggtatag

SEQ ID NO: 76240 - DNA, 471 bp, Artificial Sequence
  derived and/or modified sequence
atgaagatctttgtgggcaatgtggatggagctgacaccaccccagaggagctggccgccctgtttgccccctatggaacagtgatgagctgtgctgtgatgaagcagtttgcctttgtgcacatgagagaaaatgctggggccctgcgggccatcgaggccctgcacggccacgagctgcggcccggccgggccctggtggtggagatgagccggccccggcccctgaacacctggaagatctttgtgggcaatgtgtctgctgcctgcaccagccaggagctgcggagcctgtttgaaagaagaggccgggtgattgaatgtgatgtggtgaaggactatgcctttgtgcacatggagaaggaggctgatgccaaggccgccatcgcccagctgaatggcaaggaggtgaagggcaagaggatcaacgtggagctgagcaccaagggcatggtgcccaccggggtgtag

SEQ ID NO: 76241 - DNA, 471 bp, Artificial Sequence
  derived and/or modified sequence
atgaagatcttcgtgggcaacgtggacggcgccgacaccacccccgaggagttggccgccttgttcgccccctacgggacagtgatgtcctgtgctgtaatgaaacaattcgcctttgtccacatgagagagaatgctggggccctgagagccattgaggcacttcatggccacgagctccgacctggcagagcccttgttgttgaaatgtccaggccaagaccactgaatacatggaaaattttcgtgggcaacgtatccgccgcctgcacatcccaggagctgcgcagcctatttgagcgtagggggagagtgatcgagtgtgacgtcgtcaaggattacgcctttgtgcacatggaaaaggaagcagatgccaaagctgctatagcacagctgaacggaaaggaggtgaagggaaaaagaatcaacgtcgaattgagtacaaagggaatggtcccgacaggggtttag

SEQ ID NO: 76242 - DNA, 471 bp, Artificial Sequence
  derived and/or modified sequence
atgaaaatcttcgttggcaatgtggacggagccgacacgacccctgaggagctggccgctttattcgcgccttatggtaccgtcatgagctgcgcagtaatgaaacaattcgcatttgtgcatatgagggaaaatgcaggcgcactgcgcgctatagaggcccttcacggccacgagttgcgacctggcagggccctggtggtggaaatgtcccgacccagaccactgaacacttggaagatttttgttggcaacgttagcgcagcgtgcacatcccaggagctgcggtcgctgtttgaaagacgtgggagggtcatcgagtgcgatgttgtgaaggactatgcctttgtgcatatggaaaaggaggcagacgctaaggcagccatcgcccagttaaacgggaaagaagtaaaggggaagagaatcaacgtagagttaagtacgaagggaatggtgcctacaggcgtgtag

SEQ ID NO: 76243 - DNA, 1426 bp, Artificial Sequence
  derived and/or modified sequence
agccattcctgaggaggactgccggtcgttcggacgtcttgcctgtcgctggaggagaggtccgggctctccaggaaggtggctgcggcgacaaaatgaagatattcgtgggcaacgtcgacggggcggatacgactccggaggagctggcagccctctttgcgccctacggcacggtcatgagctgcgccgtcatgaaacagttcgccttcgtgcacatgcgcgagaacgcgggcgcgctgcgcgccatcgaagccctgcacggccacgagctgcggccggggcgcgcgctcgtggtggagatgtcgcgcccaaggcctcttaatacttggaagattttcgtgggcaatgtgtcggctgcatgcacgagccaggaactgcgcagcctcttcgagcgccgcggacgcgtcatcgagtgtgacgtggtgaaagactacgcgtttgttcacatggagaaggaagcagatgccaaagccgcaatcgcgcagctcaacggcaaagaagtgaagggcaagcgcatcaacgtggaactctccaccaagggtatggttccgaccggcgtttagccgagctctctgattaccgccgtttatcagagtcgcagctttcgttccgccgctcgccgacaaagtcctcgctggattaccgtcgcctgcccgatgcccattccgattacgcacgctattcgggctcctataatgattacctgcgggcggctcagatgcactctggctaccagcgccgcatgtagggccatcctgggatggggcaccacagggagggagggagaaaagaggtgggtagggttacagatccaggttataactactctggcccatacctttcctggttgtggtttttcatgccctctaccatgtgggccttccccaggagatgatcctgttaagtgttcggcagtaacctactttgttccttcgcctcagcagcaaatcttgctactggctctagatctgcggtttcccctctaccctgcctcccgtctccccagaatgggaatttcttttatgtttttatttttttcctggctcccttttatttttgtgcgcgatatttaaggtcgtctggatggggaagcaacctgcagctgaggtcgccggcgcctttttctttttagatgggaaggaggccaggaaagggtcagcttaaccatttcctatgtgccaagctgtgccagcagtccagggtaccctgactgtccctctgtagactgttgagactgagttcctgttgggacagtcagttggtatgtatccaagtccctgctgaccactaatgttctagctgatggtgagcggcacagtcccacttccccatctccccaagtaggtggtgttagaaaaccttaattttttttcccttttgtatggactacaaataaaacttggggcaatttgcagtttggaaa

SEQ ID NO: 76244 - DNA, 471 bp, Artificial Sequence
  derived and/or modified sequence
atgaagatcttcgtgggcaacgtggacggcgccgacaccacccccgaggagctggccgccctgttcgccccctacggcaccgtgatgagctgcgccgtgatgaagcagttcgccttcgtgcacatgagagagaacgccggcgccctgagagccatcgaggccctgcacggccacgagctgagacccggcagagccctggtggtggagatgagcagacccagacccctgaacacctggaagatcttcgtgggcaacgtgagcgccgcctgcaccagccaggagctgagaagcctgttcgagagaagaggcagagtgatcgagtgcgacgtggtgaaggactacgccttcgtgcacatggagaaggaggccgacgccaaggccgccatcgcccagctgaacggcaaggaggtgaagggcaagagaatcaacgtggagctgagcaccaagggcatggtgcccaccggcgtgtag

SEQ ID NO: 76245 - protein, 119 aa, Artificial Sequence
  derived and/or modified sequence
MKIFVGNVDGADTTPEELAALFAPYGTVMSCAVMKQFAFVHMRENAGALRAIEALHGHELRPGRALVVEMSRPRPLNTWKIFVGNVSAACTSQELRSLFERRGRVIECDVVKGMVPTGV

SEQ ID NO: 76246 - DNA, 360 bp, Artificial Sequence
  derived and/or modified sequence
atgaaaatctttgtcggaaatgtggatggcgcagacacaacaccagaggaactggcggcattgttcgctccatacgggacagtcatgtcatgcgccgtaatgaagcaattcgccttcgtgcacatgcgcgagaacgccggggcactcagggccatcgaggcgcttcacgggcatgagcttcgccccggccgggccctggttgtggaaatgagccgccccagaccactgaacacatggaagatctttgtgggcaacgtgagtgcagcctgcacaagccaggaacttagaagcctgttcgagcgccgtggaagagttatcgagtgtgatgtcgtgaagggtatggtgcccacaggagtgtag

SEQ ID NO: 76247 - DNA, 360 bp, Artificial Sequence
  derived and/or modified sequence
atgaagatctttgtgggcaatgtggatggagctgacaccaccccagaggagctggccgccctgtttgccccctatggaacagtgatgagctgtgctgtgatgaagcagtttgcctttgtgcacatgagagaaaatgctggggccctgcgggccatcgaggccctgcacggccacgagctgcggcccggccgggccctggtggtggagatgagccggccccggcccctgaacacctggaagatctttgtgggcaatgtgtctgctgcctgcaccagccaggagctgcggagcctgtttgaaagaagaggccgggtgattgaatgtgatgtggtgaagggcatggtgcccactggagtgtag

SEQ ID NO: 76248 - DNA, 360 bp, Artificial Sequence
  derived and/or modified sequence
atgaagatcttcgtgggcaacgtggacggcgccgacaccacccccgaagaactagctgcccttttcgccccgtacggcaccgttatgagttgcgcagtgatgaaacagttcgcctttgtgcacatgcgcgagaatgcgggtgctctccgagctatcgaagcgctgcacggtcatgaacttcggcccggcagagccctggtcgtggagatgtctcgccctcgacctctgaatacatggaagatattcgtcggcaatgtgagcgctgcctgcacgtcgcaggaactacggagcctcttcgagcgtcgcggtcgggtcatagagtgcgacgtcgttaagggaatggtcccgaccggggtgtag

SEQ ID NO: 76249 - DNA, 360 bp, Artificial Sequence
  derived and/or modified sequence
atgaagatcttcgtggggaatgtcgacggagccgacaccacccctgaggagctcgctgccctgttcgcgccttacggaactgtaatgtcgtgcgccgtgatgaaacaatttgccttcgtgcacatgcgggagaacgcaggagcactgcgagccatcgaagctctccacgggcatgaactaagaccgggacgagcgctcgttgtggaaatgagcaggcccagacccctgaatacatggaagatctttgttggcaacgtctcagctgcctgtacaagtcaggagctccgtagcctttttgaaagacggggtcgggtcattgagtgcgatgtggtgaagggcatggtaccaaccggagtgtag

SEQ ID NO: 76250 - DNA, 372 bp, Artificial Sequence
  derived and/or modified sequence
gacaaaatgaagatattcgtgggcaacgtcgacggggcggatacgactccggaggagctggcagccctctttgcgccctacggcacggtcatgagctgcgccgtcatgaaacagttcgccttcgtgcacatgcgcgagaacgcgggcgcgctgcgcgccatcgaagccctgcacggccacgagctgcggccggggcgcgcgctcgtggtggagatgtcgcgcccaaggcctcttaatacttggaagattttcgtgggcaatgtgtcggctgcatgcacgagccaggaactgcgcagcctcttcgagcgccgcggacgcgtcatcgagtgtgacgtggtgaaaggtatggttccgaccggcgtttagccgagc

SEQ ID NO: 76251 - DNA, 360 bp, Artificial Sequence
  derived and/or modified sequence
atgaagatcttcgtgggcaacgtggacggcgccgacaccacccccgaggagctggccgccctgttcgccccctacggcaccgtgatgagctgcgccgtgatgaagcagttcgccttcgtgcacatgagagagaacgccggcgccctgagagccatcgaggccctgcacggccacgagctgagacccggcagagccctggtggtggagatgagcagacccagacccctgaacacctggaagatcttcgtgggcaacgtgagcgccgcctgcaccagccaggagctgagaagcctgttcgagagaagaggcagagtgatcgagtgcgacgtggtgaagggcatggtgcccaccggcgtgtag

SEQ ID NO: 76252 - protein, 932 aa, Artificial Sequence
  derived and/or modified sequence
MAVVIRLQGLPIVAGTMDIRHFFSGLTIPDGGVHIVGGELGEAFIVFATDEDARLGMMRTGGTIKGSKVTLLLSSKTEMQNMIELSRRRFETANLDIPPANASRSGPPPSSGMSSRVNLPTTVSNFNNPSPSVVTATTSVHESNKNIQTFSTASVGTAPPNMGASFGSPTFSSTVPSTASPMNTVPPPPIPPIPAMPSLPPMPSIPPIPVPPPVPTLPPVPPVPPIPPVPSVPPMTPLPPMSGMPPLNPPPVAPLPAGMNGSGAPMNLNNNLNPMFLGPLNPVNPIQMNSQSSVKPLPINPDDLYVSVHGMPFSAMENDVRDFFHGLRVDAVHLLKDHVGRNNGNGLVKFLSPQDTFEALKRNRMLMIQRYVEVSPATERQWVAAGGHITFKQNMGPSGQTHPPPQTLPRSKSPSGQKRSRSRSPHEAGFCVYLKGLPFEAENKHVIDFFKKLDIVEDSIYIAYGPNGKATGEGFVEFRNEADYKAALCRHKQYMGNRFIQVHPITKKGMLEKIDMIRKRLQNFSYDQREMILNPEGDVNSAKVCAHITNIPFSITKMDVLQFLEGIPVDENAVHVLVDNNGQGLGQALVQFKNEDDARKSERLHRKKLNGREAFVHVVTLEDMREIEKNPPAQGKKGLKMPVPGNPAVPGMPNAGLPGVGLPSAGLPGAGLPSTGLPGSAITSAGLPGAGMPSAGIPSAGGEEHAFLTVGSKEANNGPPFNFPGNFGGSNAFGPPIPPPGLGGGAFGDARPGMPSVGNSGLPGLGLDVPGFGGGPNNLSGPSGFGGGPQNFGNGPGSLGGPPGFGSGPPGLGSAPGHLGGPPAFGPGPGPGPGPGPIHIGGPPGFASSSGKPGPTVIKVQNMPFTVSIDEILDFFYGYQVIPGSVCLKYNEKGMPTGEAMVAFESRDEATAAVIDLNDRPIGSRKVKLVLG

SEQ ID NO: 76253 - protein, 143 aa, Artificial Sequence
  derived and/or modified sequence
MAVVIRLQGLPIVAGTMDIRHFFSGLTIPDGGVHIVGGELGEAFIVFATDEDARLGMMRTGGTIKGSKVTLLLSSKTEMQNMIELSRRRFETANLDIPPANASRSGPPPSSGMSSRVNLPTTVSNFNNPSPSVVTATTSVHES

SEQ ID NO: 76254 - protein, 291 aa, Artificial Sequence
  derived and/or modified sequence
MAVVIRLQGLPIVAGTMDIRHFFSGLTIPDGGVHIVGGELGEAFIVFATDEDARLGMMRTGGTIKGSKVTLLLSSKTEMQNMIELSRRRFETANLDIPPANASRSGPPPSSGMSSRVNLPTTVSNFNNPSPSVVTATTSVHESNKNIQTFSTASVGTAPPNMGASFGSPTFSSTVPSTASPMNTVPPPPIPPIPAMPSLPPMPSIPPIPVPPPVPTLPPVPPVPPIPPVPSVPPMTPLPPMSGMPPLNPPPVAPLPAGMNGSGAPMNLNNNLNPMFLGPLNPVNPIQMNSQ

SEQ ID NO: 76255 - protein, 134 aa, Artificial Sequence
  derived and/or modified sequence
MAVVIRLQGLPIVAGTMDIRHFFSGLTIPDGGVHIVGGELGEAFIVFATDEDARLGMMRTGGTIKGSKVTLLLSSKTEMQNMIELSRRRFETANLDIPPANASRSGPPPSSGMSSRVNLPTTVSNFNNPSPSVV

SEQ ID NO: 76256 - protein, 731 aa, Artificial Sequence
  derived and/or modified sequence
MPSIPPIPVPPPVPTLPPVPPVPPIPPVPSVPPMTPLPPMSGMPPLNPPPVAPLPAGMNGSGAPMNLNNNLNPMFLGPLNPVNPIQMNSQSSVKPLPINPDDLYVSVHGMPFSAMENDVRDFFHGLRVDAVHLLKDHVGRNNGNGLVKFLSPQDTFEALKRNRMLMIQRYVEVSPATERQWVAAGGHITFKQNMGPSGQTHPPPQTLPRSKSPSGQKRSRSRSPHEAGFCVYLKGLPFEAENKHVIDFFKKLDIVEDSIYIAYGPNGKATGEGFVEFRNEADYKAALCRHKQYMGNRFIQVHPITKKGMLEKIDMIRKRLQNFSYDQREMILNPEGDVNSAKVCAHITNIPFSITKMDVLQFLEGIPVDENAVHVLVDNNGQGLGQALVQFKNEDDARKSERLHRKKLNGREAFVHVVTLEDMREIEKNPPAQGKKGLKMPVPGNPAVPGMPNAGLPGVGLPSAGLPGAGLPSTGLPGSAITSAGLPGAGMPSAGIPSAGGEEHAFLTVGSKEANNGPPFNFPGNFGGSNAFGPPIPPPGLGGGAFGDARPGMPSVGNSGLPGLGLDVPGFGGGPNNLSGPSGFGGGPQNFGNGPGSLGGPPGFGSGPPGLGSAPGHLGGPPAFGPGPGPGPGPGPIHIGGPPGFASSSGKPGPTVIKVQNMPFTVSIDEILDFFYGYQVIPGSVCLKYNEKGMPTGEAMVAFESRDEATAAVIDLNDRPIGSRKVKLVLG

SEQ ID NO: 76257 - DNA, 5332 bp, Artificial Sequence
  derived and/or modified sequence
ggcgaaggaggtggtggctgcgttgggctccgggaagccgttcgggctggggctgtcggccgcggggcggaggcactcgcgcggggggtaattcggggtctgggttctggtgccgcgcagctttccccggtgtgtgtggtttcagcgcagcatggctgtggtcatccgtttgcaaggtctcccaattgtggcggggaccatggacattcgccacttcttctctggattgaccattcctgatgggggcgtgcatattgtagggggtgaactgggtgaggctttcatcgtttttgccactgatgaagatgcaaggcttggtatgatgcgcacaggtggtacaattaaagggtcaaaagtaacactattgttgagtagtaagacggaaatgcagaatatgattgaactgagtcgtaggcgttttgaaactgccaacttagatataccaccagcaaatgccagtagatcaggaccaccacctagctcaggaatgagtagcagggtaaacttgcccacaacagtatccaactttaataatccatcacccagtgtagttactgccaccacttctgttcatgaaagcaacaaaaacatacagacattttccacagccagcgtaggaacagctcctccaaatatgggggcttcctttgggagcccaacgtttagctcaactgttccaagcacagcctctccaatgaacacagtcccgccgccaccaattcctccaattccagcgatgccatctctgccaccaatgccatccattcccccaattccagttcctcctccagtacctacattgcctcctgtgcctcctgtgcccccgattcccccagttccttctgtgccacccatgaccccactgccacccatgtcgggcatgccgcccttgaatccgccacctgtggcacctctacctgctggaatgaatggctctggagcacctatgaatttgaacaataatctgaatcctatgtttcttggtccgttgaatcctgttaaccctatccagatgaactctcagagcagtgtgaagccactccccatcaaccctgatgatctgtatgtcagtgtgcatggaatgcccttttctgcaatggaaaatgatgtcagagatttttttcatgggctccgtgttgatgcagtgcatttgttgaaagatcatgtaggtcgaaataatgggaatggattggttaagtttctctcccctcaagatacatttgaagctttgaaacgaaacagaatgctgatgattcaacgctatgtggaagttagccctgccacagaaagacagtgggtagctgctggaggccatatcacttttaagcaaaatatgggaccttctggacaaactcatccccctcctcagacacttcccaggtcaaaatcgcccagtgggcagaaaagatcaaggtcaagatcaccacatgaggctggtttttgtgtttacttgaaagggctaccatttgaagcagaaaacaaacatgtcattgatttttttaaaaagctggatattgtggaagatagtatttatatagcttatggacccaatgggaaagcaactggcgaaggctttgtagagttcagaaatgaggctgactataaggctgctctgtgtcgtcataaacagtacatgggcaatcgctttattcaagttcatccaattactaagaaaggtatgctagaaaagatagatatgattcgaaaaagactgcagaacttcagctatgaccagagggaaatgatactaaatccagagggggatgtcaactctgccaaagtctgtgcccacataacaaatattccattcagcattacaaagatggatgttcttcagttcctagaaggaatcccagtggatgaaaatgctgtacatgttcttgttgataacaatgggcaaggtctaggacaggcattggttcagtttaaaaatgaagatgatgcacgtaagtctgaacgcttacaccgtaaaaaacttaatgggagagaagcttttgttcatgtagttaccctagaagatatgagagagattgagaaaaatccccctgcccaaggaaaaaagggattaaagatgcctgtgccaggtaatcctgcagttccaggaatgcccaatgcgggactgcccggtgtgggactgcccagtgcaggacttcccggtgcaggcctgcccagcacaggactgcctggttcagcaataaccagtgcaggactgcctggtgcgggaatgcccagtgcaggaatacctagtgcaggaggtgaagagcatgccttcctgactgtaggatcaaaggaagccaataatgggcctccatttaactttcctggtaattttggtggatcaaatgcctttgggccaccaatccctcctccaggattaggaggcggggcctttggtgatgctaggcctggtatgccttcagttggaaacagtggtttgcctggtctaggactggatgttccgggttttggaggtggaccaaacaatttaagtgggccatcgggatttggagggggccctcagaattttggaaatggccctggtagcttaggcggtcccccggggtttggaagtggccctcctggtcttggaagtgcccctgggcatttgggtgggccaccagcttttgggcctggccccggccccggccccggccctggcccaatccatattggtggtccccctggctttgcatctagttctggaaaaccaggaccgacagtaattaaagtgcaaaacatgccctttactgtgtctattgatgagattttagatttcttttatggctatcaagtaatcccaggctcagtgtgtttaaaatacaatgaaaaaggtatgcccacaggtgaagccatggtggcctttgagtctcgggatgaagccacagctgctgtcattgacttaaatgacaggcctataggttcaagaaaagtaaaacttgtattagggtagccattcacatcattttttatagggtagatcttcatattgctgtgattaatgcatccagattgttttcctagtatttccaggttagaacctgtggattgtttcaattgcatatagcttggtttccataacatagagcattggttgactgtttacagaagactcactcaccaggataaacattgctgtatgttacagtaaagctatctggagagaacacataaatgattttggcataccattagagaaaccatttgtaaaactcaaatgaccacataaagcttatcaaggagtctagattggttttgttttataccatatgggatgaagaaaatagaaatgtcagtagaactcattgagggtgctcttgccagctgctgaaaatagaagttggctactctcagaatttggtttaaagctggacagatttgctttgttatagggtaaagctttgtctaaagtcctcattttcttttaaaattgaataaaatttctgtatacagattcattgtatgtacctttattgcttcttaagggtccttgctgtatagacagtcctgcttcagaagttgctgctttgtttgtctaattgactcatttgtaaatgagcagaactgttttgttggtttttttccctaaatataaaagtccacacttcgtttgtgctataacctcaaactttgatttctaatgtcacacttaaaactgtgtggaataagacttttgccataaaaataaactatggagtcctttatctaccagagcctttttggtttgaccgccacgatttaggttagtcagtttaaaaattgttcatgttgtttggatggtatcgaaaaccagaaaccacttttaataatgtgtttaagatacttgatttgaagtccttttcatatggactaattgtagtatcaatttcctcctgtcccgattatgtgaaattttggcctttaaacaaagaggggcccattcataagaaagtgttatatctaggtttttaaaactgaagttgaaattatctttgttagcagtagtagtatagaataaaagatccgtatgctggttcgtagattgatacgtgttagtcctgttatttggaggctttttggcatagttgttcgatcaggagcctgtttactaaaagtcttcatacagagtacaagtgcagccgccagaggagaaaattgagattcttgaccctttcatactcttttctttggtattcaggacactaaggcaggaggaccacatgagttctggttggtaagtgtccttgtcatgaaaacacttgccttacaaggctctaattatgatttccctagtcagtgctctgaagatgtgtcacattatattataaacaatacggaaggggagataggtgagatgatatgaaaaacaaattttctcactgtcataaaaggctctaattatggttactttccttgtgatgaaaaacttggccttacagggctctagttatggttactttccctagtcaatgctctgaaaatgtgtcacattataaacaatacagaaggagagatagatgagagatcatgaaaaccaaattttatcttttacatggcccctttgtcttcgtttgaaacatccccaacatttcctacaaatcagcgtagttacaaaggggtcagtcttttaaaataagtatttcctattaaactatatatatatacagtgcctttttggtgttgtgagtcagtggaacactgaaatacagcggttgtgtaatttaagagtggcaacagtttcatttgataagatttgaaaaggctttttatcactacaatcttagaggattgacagtacaggatttttgtttaagagaaggattgtttagactcaagaggtgactatgttgtgggtcttttgataattcatgaatacagatttgctttgaccgatcactagatactgcctcctcaatttcaaaagcaatataacgtttgtatatgctgtttaatttaagttaatgttaagtaatcatttctcattccaaagacaatgcaaaaaacttcagcactgcttgagagttgtatttcagccacagatattttctccattggaaagctattttcattttagaaaaatgggttgtttgaagatgaaagtcttttatcttttttcacaatttattttggttatatgttcgtacattcttattaaatatttcatacactttattgcaactactttgttatttctacatcttagataaatgctgaaaaggaaaacgatttcattgttcatctaattaaataaattaaaagagcggtttgtgtagaaattggagagaactatgttttatatgaatcacaacagtgctcgttgtggactgtaattaaatgctttgccctctggaacttg

SEQ ID NO: 76258 - DNA, 5213 bp, Artificial Sequence
  derived and/or modified sequence
attttgtgaagcggcgaaggaggtggtggctgcgttgggctccgggaagccgttcgggctggggctgtcggccgcggggcggaggcactcgcgcggggggtaattcggggtctgggttctggtgccgcgcagctttccccggattgacttggcctctacttcttgttaaggaaattcatctcttgttttatcaggtgtgtgtggtttcagcgcagcatggctgtggtcatccgtttgcaaggtctcccaattgtggcggggaccatggacattcgccacttcttctctggattgaccattcctgatgggggcgtgcatattgtagggggtgaactgggtgaggctttcatcgtttttgccactgatgaagatgcaaggcttggtatgatgcgcacaggtggtacaattaaagggtcaaaagtaacactattgttgagtagtaagacggaaatgcagaatatgattgaactgagtcgtaggcgttttgaaactgccaacttagatataccaccagcaaatgccagtagatcaggaccaccacctagctcaggaatgagtagcagggtaaacttgcccacaacagtatccaactttaataatccatcacccagtgtagttactgccaccacttctgttcatgaaagcaacaaaaacatacagacattttccacagccagcgtaggaacagctcctccaaatatgggggcttcctttgggagcccaacgtttagctcaactgttccaagcacagcctctccaatgaacacagtcccgccgccaccaattcctccaattccagcgatgccatctctgccaccaatgccatccattcccccaattccagttcctcctccagtacctacattgcctcctgtgcctcctgtgcccccgattcccccagttccttctgtgccacccatgaccccactgccacccatgtcgggcatgccgcccttgaatccgccacctgtggcacctctacctgctggaatgaatggctctggagcacctatgaatttgaacaataatctgaatcctatgtttcttggtccgttgaatcctgttaaccctatccagatgaactctcagagcagtgtgaagccactccccatcaaccctgatgatctgtatgtcagtgtgcatggaatgcccttttctgcaatggaaaatgatgtcagagatttttttcatgggctccgtgttgatgcagtgcatttgttgaaagatcatgtaggtcgaaataatgggaatggattggttaagtttctctcccctcaagatacatttgaagctttgaaacgaaacagaatgctgatgattcaacgctatgtggaagttagccctgccacagaaagacagtgggtagctgctggaggccatatcacttttaagcaaaatatgggaccttctggacaaactcatccccctcctcagacacttcccaggtcaaaatcgcccagtgggcagaaaagatcaaggtcaagatcaccacatgaggctggtttttgtgtttacttgaaagggctaccatttgaagcagaaaacaaacatgtcattgatttttttaaaaagctggatattgtggaagatagtatttatatagcttatggacccaatgggaaagcaactggcgaaggctttgtagagttcagaaatgaggctgactataaggctgctctgtgtcgtcataaacagtacatgggcaatcgctttattcaagttcatccaattactaagaaaggtatgctagaaaagatagatatgattcgaaaaagactgcagaacttcagctatgaccagagggaaatgatactaaatccagagggggatgtcaactctgccaaagtctgtgcccacataacaaatattccattcagcattacaaagatggatgttcttcagttcctagaaggaatcccagtggatgaaaatgctgtacatgttcttgttgataacaatgggcaaggtctaggacaggcattggttcagtttaaaaatgaagatgatgcacgtaagtctgaacgcttacaccgtaaaaaacttaatgggagagaagcttttgttcatgtagttaccctagaagatatgagagagattgagaaaaatccccctgcccaaggaaaaaagggattaaagatgcctgtgccaggtaatcctgcagttccaggaatgcccaatgcgggactgcccggtgtgggactgcccagtgcaggacttcccggtgcaggcctgcccagcacaggactgcctggttcagcaataaccagtgcaggactgcctggtgcgggaatgcccagtgcaggaatacctagtgcaggaggtgaagagcatgccttcctgactgtaggatcaaaggaagccaataatgggcctccatttaactttcctggtaattttggtggatcaaatgcctttgggccaccaatccctcctccaggattaggaggcggggcctttggtgatgctaggcctggtatgccttcagttggaaacagtggtttgcctggtctaggactggatgttccgggttttggaggtggaccaaacaatttaagtgggccatcgggatttggagggggccctcagaattttggaaatggccctggtagcttaggcggtcccccggggtttggaagtggccctcctggtcttggaagtgcccctgggcatttgggtgggccaccagcttttgggcctggccccggccccggccccggccctggcccaatccatattggtggtccccctggctttgcatctagttctggaaaaccaggaccgacagtaattaaagtgcaaaacatgccctttactgtgtctattgatgagattttagatttcttttatggctatcaagtaatcccaggctcagtgtgtttaaaatacaatgaaaaaggtatgcccacaggtgaagccatggtggcctttgagtctcgggatgaagccacagctgctgtcattgacttaaatgacaggcctataggttcaagaaaagtaaaacttgtattagggtagccattcacatcattttttatagggtagatcttcatattgctgtgattaatgcatccagattgttttcctagtatttccaggttagaacctgtggattgtttcaattgcatatagcttggtttccataacatagagcattggttgactgtttacagaagactcactcaccaggataaacattgctgtatgttacagtaaagctatctggagagaacacataaatgattttggcataccattagagaaaccatttgtaaaactcaaatgaccacataaagcttatcaaggagtctagattggttttgttttataccatatgggatgaagaaaatagaaatgtcagtagaactcattgagggtgctcttgccagctgctgaaaatagaagttggctactctcagaatttggtttaaagctggacagatttgctttgttatagggtaaagctttgtctaaagtcctcattttcttttaaaattgaataaaatttctgtatacagattcattgtatgtacctttattgcttcttaagggtccttgctgtatagacagtcctgcttcagaagttgctgctttgtttgtctaattgactcatttgtaaatgagcagaactgttttgttggtttttttccctaaatataaaagtccacacttcgtttgtgctataacctcaaactttgatttctaatgtcacacttaaaactgtgtggaataagacttttgccataaaaataaactatggagtcctttatctaccagagcctttttggtttgaccgccacgatttaggttagtcagtttaaaaattgttcatgttgtttggatggtatcgaaaaccagaaaccacttttaataatgtgtttaagatacttgatttgaagtccttttcatatggactaattgtagtatcaatttcctcctgtcccgattatgtgaaattttggcctttaaacaaagaggggcccattcataagaaagtgttatatctaggtttttaaaactgaagttgaaattatctttgttagcagtagtagtatagaataaaagatccgtatgctggttcgtagattgatacgtgttagtcctgttatttggaggctttttggcatagttgttcgatcaggagcctgtttactaaaagtcttcatacagagtacaagtgcagccgccagaggagaaaattgagattcttgaccctttcatactcttttctttggtattcaggacactaaggcaggaggaccacatgagttctggttggtaagtgtccttgtcatgaaaacacttgccttacaaggctctaattatgatttccctagtcagtgctctgaagatgtgtcacattatattataaacaatacggaaggggagataggtgagatgatatgaaaaacaaattttctcactgtcataaaaggctctaattatggttactttccttgtgatgaaaaacttggccttacagggctctagttatggttactttccctagtcaatgctctgaaaatgtgtcacattataaacaatacagaaggagagatagatgagagatcatgaaaaccaaattttatcttttacatggcccctttgtcttcgtttgaaacatccccaacatttcctacaaatcagcgtagttacaaaggggtcagtcttttaaaataagtatttcctattaaactatatatatatacagtgcctttttggtgttgtgagtcagtggaacactgaaatacagcggttgtgtaatttaagagtggcaacagtttcatttgataagatttgaaaaggctttttatcactacaatcttagaggattgacagtacaggatttttgtttaagagaaggattgtttagactcaagaggtgactatgttgtgggtcttttgataattcatgaatacagatttgctttgaccgatcactagatactgcctcctcaatttcaaaagcaatataacgtttgtatatgctgtttaatttaagttaatgttaagtaatcatttctcattccaaagacaatgcaaaaaacttcagcactgcttgagagttgtatttcagccacagatattttctccattggaaagctattttcattttagaaaaatgggttgtttgaagatgaaagtcttttatcttttttcacaatttattttggttatatgttcgtacattcttattaaatatttcatacacttta

SEQ ID NO: 76259 - DNA, 6662 bp, Artificial Sequence
  derived and/or modified sequence
gagcgggccgacggccattttgtgaagcggcgaaggaggtggtggctgcgttgggctccgggaagccgttcgggctggggctgtcggccgcggggcggaggcactcgcgcggggggtaattcggggtctgggttctggtgccgcgcagctttccccgtctaaaagttggttttaattggttgcccacaggattgacttggcctctacttcttgttaaggaaattcatctcttgttttatcaggtgtgtgtggtttcagcgcagcatggctgtggtcatccgtttgcaaggtctcccaattgtggcggggaccatggacattcgccacttcttctctggattgaccattcctgatgggggcgtgcatattgtagggggtgaactgggtgaggctttcatcgtttttgccactgatgaagatgcaaggcttggtatgatgcgcacaggtggtacaattaaagggtcaaaagtaacactattgttgagtagtaagacggaaatgcagaatatgattgaactgagtcgtaggcgttttgaaactgccaacttagatataccaccagcaaatgccagtagatcaggaccaccacctagctcaggaatgagtagcagggtaaacttgcccacaacagtatccaactttaataatccatcacccagtgtagttactgccaccacttctgttcatgaaagcaacaaaaacatacagacattttccacagccagcgtaggaacagctcctccaaatatgggggcttcctttgggagcccaacgtttagctcaactgttccaagcacagcctctccaatgaacacagtcccgccgccaccaattcctccaattccagcgatgccatctctgccaccaatgccatccattcccccaattccagttcctcctccagtacctacattgcctcctgtgcctcctgtgcccccgattcccccagttccttctgtgccacccatgaccccactgccacccatgtcgggcatgccgcccttgaatccgccacctgtggcacctctacctgctggaatgaatggctctggagcacctatgaatttgaacaataatctgaatcctatgtttcttggtccgttgaatcctgttaaccctatccagatgaactctcagagcagtgtgaagccactccccatcaaccctgatgatctgtatgtcagtgtgcatggaatgcccttttctgcaatggaaaatgatgtcagagatttttttcatgggctccgtgttgatgcagtgcatttgttgaaagatcatgtaggtcgaaataatgggaatggattggttaagtttctctcccctcaagatacatttgaagctttgaaacgaaacagaatgctgatgattcaacgctatgtggaagttagccctgccacagaaagacagtgggtagctgctggaggccatatcacttttaagcaaaatatgggaccttctggacaaactcatccccctcctcagacacttcccaggtcaaaatcgcccagtgggcagaaaagatcaaggtcaagatcaccacatgaggctggtttttgtgtttacttgaaagggctaccatttgaagcagaaaacaaacatgtcattgatttttttaaaaagctggatattgtggaagatagtatttatatagcttatggacccaatgggaaagcaactggcgaaggctttgtagagttcagaaatgaggctgactataaggctgctctgtgtcgtcataaacagtacatgggcaatcgctttattcaagttcatccaattactaagaaaggtatgctagaaaagatagatatgattcgaaaaagactgcagaacttcagctatgaccagagggaaatgatactaaatccagagggggatgtcaactctgccaaagtctgtgcccacataacaaatattccattcagcattacaaagatggatgttcttcagttcctagaaggaatcccagtggatgaaaatgctgtacatgttcttgttgataacaatgggcaaggtctaggacaggcattggttcagtttaaaaatgaagatgatgcacgtaagtctgaacgcttacaccgtaaaaaacttaatgggagagaagcttttgttcatgtagttaccctagaagatatgagagagattgagaaaaatccccctgcccaaggaaaaaagggattaaagatgcctgtgccaggtaatcctgcagttccaggaatgcccaatgcgggactgcccggtgtgggactgcccagtgcaggacttcccggtgcaggcctgcccagcacaggactgcctggttcagcaataaccagtgcaggactgcctggtgcgggaatgcccagtgcaggaatacctagtgcaggaggtgaagagcatgccttcctgactgtaggatcaaaggaagccaataatgggcctccatttaactttcctggtaattttggtggatcaaatgcctttgggccaccaatccctcctccaggattaggaggcggggcctttggtgatgctaggcctggtatgccttcagttggaaacagtggtttgcctggtctaggactggatgttccgggttttggaggtggaccaaacaatttaagtgggccatcgggatttggagggggccctcagaattttggaaatggccctggtagcttaggcggtcccccggggtttggaagtggccctcctggtcttggaagtgcccctgggcatttgggtgggccaccagcttttgggcctggccccggccccggccccggccctggcccaatccatattggtggtccccctggctttgcatctagttctggaaaaccaggaccgacagtaattaaagtgcaaaacatgccctttactgtgtctattgatgagattttagatttcttttatggctatcaagtaatcccaggctcagtgtgtttaaaatacaatgaaaaaggtatgcccacaggtgaagccatggtggcctttgagtctcgggatgaagccacagctgctgtcattgacttaaatgacaggcctataggttcaagaaaagtaaaacttgtattagggtagccattcacatcattttttatagggtagatcttcatattgctgtgattaatgcatccagattgttttcctagtatttccaggttagaacctgtggattgtttcaattgcatatagcttggtttccataacatagagcattggttgactgtttacagaagactcactcaccaggataaacattgctgtatgttacagtaaagctatctggagagaacacataaatgattttggcataccattagagaaaccatttgtaaaactcaaatgaccacataaagcttatcaaggagtctagattggttttgttttataccatatgggatgaagaaaatagaaatgtcagtagaactcattgagggtgctcttgccagctgctgaaaatagaagttggctactctcagaatttggtttaaagctggacagatttgctttgttatagggtaaagctttgtctaaagtcctcattttcttttaaaattgaataaaatttctgtatacagattcattgtatgtacctttattgcttcttaagggtccttgctgtatagacagtcctgcttcagaagttgctgctttgtttgtctaattgactcatttgtaaatgagcagaactgttttgttggtttttttccctaaatataaaagtccacacttcgtttgtgctataacctcaaactttgatttctaatgtcacacttaaaactgtgtggaataagacttttgccataaaaataaactatggagtcctttatctaccagagcctttttggtttgaccgccacgatttaggttagtcagtttaaaaattgttcatgttgtttggatggtatcgaaaaccagaaaccacttttaataatgtgtttaagatacttgatttgaagtccttttcatatggactaattgtagtatcaatttcctcctgtcccgattatgtgaaattttggcctttaaacaaagaggggcccattcataagaaagtgttatatctaggtttttaaaactgaagttgaaattatctttgttagcagtagtagtatagaataaaagatccgtatgctggttcgtagattgatacgtgttagtcctgttatttggaggctttttggcatagttgttcgatcaggagcctgtttactaaaagtcttcatacagagtacaagtgcagccgccagaggagaaaattgagattcttgaccctttcatactcttttctttggtattcaggacactaaggcaggaggaccacatgagttctggttggtaagtgtccttgtcatgaaaacacttgccttacaaggctctaattatgatttccctagtcagtgctctgaagatgtgtcacattatattataaacaatacggaaggggagataggtgagatgatatgaaaaacaaattttctcactgtcataaaaggctctaattatggttactttccttgtgatgaaaaacttggccttacagggctctagttatggttactttccctagtcaatgctctgaaaatgtgtcacattataaacaatacagaaggagagatagatgagagatcatgaaaaccaaattttatcttttacatggcccctttgtcttcgtttgaaacatccccaacatttcctacaaatcagcgtagttacaaaggggtcagtcttttaaaataagtatttcctattaaactatatatatatacagtgcctttttggtgttgtgagtcagtggaacactgaaatacagcggttgtgtaatttaagagtggcaacagtttcatttgataagatttgaaaaggctttttatcactacaatcttagaggattgacagtacaggatttttgtttaagagaaggattgtttagactcaagaggtgactatgttgtgggtcttttgataattcatgaatacagatttgctttgaccgatcactagatactgcctcctcaatttcaaaagcaatataacgtttgtatatgctgtttaatttaagttaatgttaagtaatcatttctcattccaaagacaatgcaaaaaacttcagcactgcttgagagttgtatttcagccacagatattttctccattggaaagctattttcattttagaaaaatgggttgtttgaagatgaaagtcttttatcttttttcacaatttattttggttatatgttcgtacattcttattaaatatttcatacactttattgcaactactttgttatttctacatcttagataaatgctgaaaaggaaaacgatttcattgttcatctaattaaataaattaaaagagcggtttgtgtagaaattggagagaactatgttttatatgaatcacaacagtgctcgttgtggactgtaattaaatgctttgccctctggaacttgatttttgtgtatctgagatttattaacagtgctaactgctaaggatactgtttatcttgttctgggcattggagtttcagtttttaaaaaattcttgaaaatgtattctgtgaaactactcatacctctcttcctgcgaattttctcctaagaactaggtttggggtagaaatgaattgacattattttctcatttgctttgtatggtatgaaggatttgtaaagctttgctcaaagttgtgtgcatttgtaaacactatcatgatattttcaattttatgtgtaaattttattgtctgtttttggtgactctgacattaatggaagagaatattttccattagatttaattttttttcctctcccttctgattttttttttattggtgttcatttttcttttgatttaaaggattagagaaatctacaaatgtatgtcataaataagcaaatttgtaaacttttctgaactttagtgaaacatttagttcacaagcataatttggaggtgtgttctgtgtttacacagtagtttggatgtacaattattattagtggctttttaaaaaatgaaacagtgttaagtgaaatgtagttcctagctttgtactccaagttgtcaaagcatcaacaatgaaaattcgattaggaaactttatttaaaatttcaggtagtaatattcagtgtagttaaggccagtcttaacccactggatgaaaatctaggactgtatggaagtaagcaaacattacatttttaggtggaaatagtcagccttgcataaaaacaaggatgcgtgaaagccttaaattccagctcccttttactggagtctgtggttgtgtacaggtatgggccaagtgtaaaatctcatcaattttaagaacactcgggaaatgagtaaagaaaatgtaaaattgctgctagtcaaatcttttggaaagaatttctggaagtggtcactttaaaaattattttccacccttgcaaaattgccacatttaaattgttttactggcagttctatagtagtccagactttagaaaccaaacacaacaaaatggcttgttgccaatatggccacaacattgccagcaaatactgccttggcatcactcagcagaggtttttgtttataaagatgaagtcttgaatactgttcaataaacttgtcaaaaaataaaacaggctgatgcttttaatgctttaactgca

SEQ ID NO: 76260 - DNA, 583 bp, Artificial Sequence
  derived and/or modified sequence
aaccacgccgttcctcccccttctggaacgcggagccgctgagcgggccgacggccattttgtgaagcggcgaaggaggattgacttggcctctacttcttgttaaggaaattcatctcttgttttatcaggtgtgtgtggtttcagcgcagcatggctgtggtcatccgtttgcaaggtctcccaattgtggcggggaccatggacattcgccacttcttctctggattgaccattcctgatgggggcgtgcatattgtagggggtgaactgggtgaggctttcatcgtttttgccactgatgaagatgcaaggcttggtatgatgcgcacaggtggtacaattaaagggtcaaaagtaacactattgttgagtagtaagacggaaatgcagaatatgattgaactgagtcgtaggcgttttgaaactgccaacttagatataccaccagcaaatgccagtagatcaggaccaccacctagctcaggaatgagtagcagggtaaacttgcccacaacagtatccaactttaataatccatcacccagtgtagttactgccaccacttctgttcatgaaagca

SEQ ID NO: 76261 - DNA, 1068 bp, Artificial Sequence
  derived and/or modified sequence
cggcgaaggaggtggtggctgcgttgggctccgggaagccgttcgggctggggctgtcggccgcggggcggaggcactcgcgcgggggtctaaaagttggttttaattggttgcccacaggattgacttggcctctacttcttgttaaggaaattcatctcttgttttatcaggtgtgtgtggtttcagcgcagcatggctgtggtcatccgtttgcaaggtctcccaattgtggcggggaccatggacattcgccacttcttctctggattgaccattcctgatgggggcgtgcatattgtagggggtgaactgggtgaggctttcatcgtttttgccactgatgaagatgcaaggcttggtatgatgcgcacaggtggtacaattaaagggtcaaaagtaacactattgttgagtagtaagacggaaatgcagaatatgattgaactgagtcgtaggcgttttgaaactgccaacttagatataccaccagcaaatgccagtagatcaggaccaccacctagctcaggaatgagtagcagggtaaacttgcccacaacagtatccaactttaataatccatcacccagtgtagttactgccaccacttctgttcatgaaagcaacaaaaacatacagacattttccacagccagcgtaggaacagctcctccaaatatgggggcttcctttgggagcccaacgtttagctcaactgttccaagcacagcctctccaatgaacacagtcccgccgccaccaattcctccaattccagcgatgccatctctgccaccaatgccatccattcccccaattccagttcctcctccagtacctacattgcctcctgtgcctcctgtgcccccgattcccccagttccttctgtgccacccatgaccccactgccacccatgtcgggcatgccgcccttgaatccgccacctgtggcacctctacctgctggaatgaatggctctggagcacctatgaatttgaacaataatctgaatcctatgtttcttggtccgttgaatcctgttaaccctatccagatgaactctcag

SEQ ID NO: 76262 - DNA, 565 bp, Artificial Sequence
  derived and/or modified sequence
ctggaacgcggagccgctgagcgggccgacggccattttgtgaagcggcgaaggagtctaaaagttggttttaattggttgcccacaggattgacttggcctctacttcttgttaaggaaattcatctcttgttttatcaggtgtgtgtggtttcagcgcagcatggctgtggtcatccgtttgcaaggtctcccaattgtggcggggaccatggacattcgccacttcttctctggattgaccattcctgatgggggcgtgcatattgtagggggtgaactgggtgaggctttcatcgtttttgccactgatgaagatgcaaggcttggtatgatgcgcacaggtggtacaattaaagggtcaaaagtaacactattgttgagtagtaagacggaaatgcagaatatgattgaactgagtcgtaggcgttttgaaactgccaacttagatataccaccagcaaatgccagtagatcaggaccaccacctagctcaggaatgagtagcagggtaaacttgcccacaacagtatccaactttaataatccatcacccagtgtagtt

SEQ ID NO: 76263 - DNA, 2716 bp, Artificial Sequence
  derived and/or modified sequence
attttgtgaagcggcgaaggaggtggtggctgcgttgggctccgggaagccgttcgggctggggctgtcggccgcggggcggaggcactcgcgcggggggtaattcggggtctgggttctggtgccgcgcagctttccccgtctaaaagttggttttaattggttgcccacaggattgacttggcctctacttcttgttaaggaaattcatctcttgttttatcaggtgtgtgtggtttcagcgcagcatggctgtggtcatccgtttgcaaggtctcccaattgtggcggggaccatggacattcgccacttcttctctggattgaccattcctgatgggggcgtgcatattgtagggggtgaactgggtgaggctttcatcgtttttgccatctctgccaccaatgccatccattcccccaattccagttcctcctccagtacctacattgcctcctgtgcctcctgtgcccccgattcccccagttccttctgtgccacccatgaccccactgccacccatgtcgggcatgccgcccttgaatccgccacctgtggcacctctacctgctggaatgaatggctctggagcacctatgaatttgaacaataatctgaatcctatgtttcttggtccgttgaatcctgttaaccctatccagatgaactctcagagcagtgtgaagccactccccatcaaccctgatgatctgtatgtcagtgtgcatggaatgcccttttctgcaatggaaaatgatgtcagagatttttttcatgggctccgtgttgatgcagtgcatttgttgaaagatcatgtaggtcgaaataatgggaatggattggttaagtttctctcccctcaagatacatttgaagctttgaaacgaaacagaatgctgatgattcaacgctatgtggaagttagccctgccacagaaagacagtgggtagctgctggaggccatatcacttttaagcaaaatatgggaccttctggacaaactcatccccctcctcagacacttcccaggtcaaaatcgcccagtgggcagaaaagatcaaggtcaagatcaccacatgaggctggtttttgtgtttacttgaaagggctaccatttgaagcagaaaacaaacatgtcattgatttttttaaaaagctggatattgtggaagatagtatttatatagcttatggacccaatgggaaagcaactggcgaaggctttgtagagttcagaaatgaggctgactataaggctgctctgtgtcgtcataaacagtacatgggcaatcgctttattcaagttcatccaattactaagaaaggtatgctagaaaagatagatatgattcgaaaaagactgcagaacttcagctatgaccagagggaaatgatactaaatccagagggggatgtcaactctgccaaagtctgtgcccacataacaaatattccattcagcattacaaagatggatgttcttcagttcctagaaggaatcccagtggatgaaaatgctgtacatgttcttgttgataacaatgggcaaggtctaggacaggcattggttcagtttaaaaatgaagatgatgcacgtaagtctgaacgcttacaccgtaaaaaacttaatgggagagaagcttttgttcatgtagttaccctagaagatatgagagagattgagaaaaatccccctgcccaaggaaaaaagggattaaagatgcctgtgccaggtaatcctgcagttccaggaatgcccaatgcgggactgcccggtgtgggactgcccagtgcaggacttcccggtgcaggcctgcccagcacaggactgcctggttcagcaataaccagtgcaggactgcctggtgcgggaatgcccagtgcaggaatacctagtgcaggaggtgaagagcatgccttcctgactgtaggatcaaaggaagccaataatgggcctccatttaactttcctggtaattttggtggatcaaatgcctttgggccaccaatccctcctccaggattaggaggcggggcctttggtgatgctaggcctggtatgccttcagttggaaacagtggtttgcctggtctaggactggatgttccgggttttggaggtggaccaaacaatttaagtgggccatcgggatttggagggggccctcagaattttggaaatggccctggtagcttaggcggtcccccggggtttggaagtggccctcctggtcttggaagtgcccctgggcatttgggtgggccaccagcttttgggcctggccccggccccggccccggccctggcccaatccatattggtggtccccctggctttgcatctagttctggaaaaccaggaccgacagtaattaaagtgcaaaacatgccctttactgtgtctattgatgagattttagatttcttttatggctatcaagtaatcccaggctcagtgtgtttaaaatacaatgaaaaaggtatgcccacaggtgaagccatggtggcctttgagtctcgggatgaagccacagctgctgtcattgacttaaatgacaggcctataggttcaagaaaagtaaaacttgtattagggtagccattcacatcattttttatagggtagatcttcatattgctgtgattaatgcatccagattgttttcctagtatttccaggttagaacctgtggattgtttcaattgcatatagc

SEQ ID NO: 76264 - DNA, 2196 bp, Artificial Sequence
  derived and/or modified sequence
atgccaagcatacctccaatccctgttccgcctcctgtgcctactctcccacccgtaccccctgtcccgcccatccccccagtgccatctgtccctccaatgacaccgctacctcccatgagcggtatgccccccctgaatcccccgccagtagccccgctccccgcagggatgaacggaagcggagcaccaatgaatctgaacaataatctcaatcccatgtttctgggacctctgaacccagttaacccaattcagatgaattcccagagttctgtgaagcccctgcctatcaaccctgacgatctgtatgtgtccgttcacgggatgccctttagtgcgatggaaaacgacgtcagagatttttttcatggattgagggttgacgcagtgcacctgctgaaggaccacgtgggcagaaacaacggcaacggtttggtcaaattcctttcacctcaggatacatttgaggccttgaagcggaaccgtatgcttatgatccagcgctatgttgaggttagcccggcaaccgaacgccagtgggtggcggcaggtggtcacataacgttcaaacagaatatggggccgtccggacaaacccaccctccgccacagacgctgcctaggagtaaaagtcctagtggacagaagaggtccaggagccgcagcccacatgaagctgggttctgtgtgtacttgaaaggactgccctttgaggcggagaacaagcatgtgatcgatttctttaagaaacttgatatcgttgaagattcaatctacatagcctacggacccaatgggaaagccaccggagagggttttgtggaattccgcaacgaggcggactacaaagctgctttgtgccgccataagcagtacatgggcaatcggttcattcaagtccacccgatcactaagaagggcatgctcgaaaagatcgatatgatcagaaagcgcctacaaaacttttcctatgatcaaagagaaatgatcttaaatccagaaggagatgtgaactcagctaaagtctgtgcacatatcactaacatcccgttttcaattacaaagatggacgtactgcagttcctagaggggattcctgttgacgagaatgctgtgcacgtgctggtggacaacaatggtcagggacttgggcaggccctggtacagttcaagaatgaggacgatgcaagaaaatccgagaggcttcacagaaagaaattaaatgggcgggaggcctttgtacacgtggtgaccctggaggatatgcgtgaaatcgaaaagaatcctcctgcacagggcaagaaagggctgaagatgccagtgcctggaaacccagccgtgccaggcatgccaaatgccggactgcctggcgtcggactaccatcagccggcctgcctggtgccggcctaccctccactggtctgcccgggtctgctatcacctctgcaggtctgcccggcgctggcatgcccagtgctggcattccctcagcgggtggagaggagcatgcctttttgactgtcggctcaaaagaggcaaacaatggccctcccttcaactttccagggaatttcggcggttccaatgcatttggacccccgattccgcctccagggttaggaggaggcgctttcggcgatgcacggcctggcatgccttctgtcggcaattctggactcccggggctgggccttgacgtgccaggcttcggagggggccctaataacctgagcggccccagtggatttggcggaggacctcagaatttcgggaatggccctgggagtctagggggcccccctggctttggaagcggcccccccggactgggcagtgcacccggtcatttaggcgggcctccagcttttggccccggacctgggcctggccctggtcctgggccaattcacattggtggtcctccggggtttgcttcttcctctggcaaacccgggcctaccgtgattaaagtccagaatatgcccttcactgtgtctattgacgaaatactggactttttttacggctatcaagtgattcctgggagcgtgtgtctgaagtataacgagaaaggcatgccaactggcgaggccatggtggcgttcgagagccgcgatgaggccaccgccgccgtgatcgatcttaatgatcggccaatcggatcccgcaaggtgaaactcgttctcgggtag

SEQ ID NO: 76265 - DNA, 2799 bp, Artificial Sequence
  derived and/or modified sequence
atggccgtcgtgatccgcctgcagggcctgccaatcgtcgccggcaccatggatatcaggcactttttcagcgggcttaccattcccgatgggggggtgcacatcgtcggaggagagctgggagaagcctttatcgtgttcgccacagatgaagacgccagacttggcatgatgcgtaccgggggaacgattaagggaagcaaggtgacactgctgttgagcagcaaaacagaaatgcagaatatgattgaactgtctcggagacggttcgaaaccgcgaatttagacatacccccagccaacgccagtagaagcggccctccaccctctagtggcatgtcttctagggtgaacctgcctacaactgtgtccaattttaacaatccctccccttccgtggtgactgccacaacgtccgtgcatgaatctaacaagaatattcaaaccttctcaaccgcatccgtggggacggctcctccaaatatgggcgcatcgtttggcagcccaactttttcttcaaccgtgccaagcactgcaagccctatgaacaccgtgccccccccacctataccccccatcccagccatgccgtctttacccccgatgccgagtattccccctattcccgtaccacctccggtacccaccttgcccccagtacctccagtgccacctatccctccggtcccctctgttcccccgatgacgcccctcccccccatgagcggtatgcctccattgaatcctccaccggtcgctccccttcctgcagggatgaatggctccggcgctcctatgaatcttaacaataacctgaacccaatgttcctcggtcccctgaacccagtgaatccaattcagatgaattctcaatccagtgtgaagcctctgccaatcaaccctgacgatttgtatgtttctgtgcacgggatgcccttcagcgctatggagaacgatgtgagggacttctttcacgggctgcgggtggacgcagtgcaccttctgaaggatcacgttggtcgaaataacgggaatgggcttgttaaattcctatctccacaggacacgttcgaagctctcaaaagaaaccgcatgcttatgatacagcggtacgtagaggtgagcccggctaccgagcgccagtgggtggctgccgggggtcatatcactttcaagcagaacatgggaccgagcggacagacacatcctcccccccagacgctgccacggtctaaatctccctcagggcaaaagaggtcaagaagcagatccccacacgaggccggtttctgtgtgtacctgaaggggcttccattcgaggcagagaataagcacgtgatcgatttcttcaagaaactggatatcgtcgaggattccatttacattgcatatgggcctaatggtaaagcgactggggaaggattcgtggagttccgtaatgaagcagattacaaagccgcgttgtgtcggcataaacagtatatggggaacaggtttatacaagtgcatcccataaccaaaaaagggatgttggagaaaattgacatgatccgcaagcgcctgcagaatttttcttatgaccaacgcgaaatgatccttaatccagagggggatgtgaatagcgccaaggtctgcgcacacatcacaaacattccctttagcatcacaaagatggatgtgctccaattcctcgaaggaattcctgtggatgaaaacgcggtccatgtcctggtggataataacggccaggggctgggacaggcgctggtgcagttcaagaatgaggacgacgctcgtaagagcgagcgacttcatcgtaaaaagctcaatggtagggaagccttcgtgcacgtggttactctggaggacatgagagagatcgagaagaacccacccgcccaggggaaaaaaggactgaaaatgcctgttccgggtaatccggctgttcctgggatgcctaacgccggtctccctggagtcggcctgcccagcgcaggactacccggagctggactgccaagcaccggtctgcctggttccgccatcaccagcgcgggacttcccggggccggtatgcccagcgccggcattccgagcgcagggggagaggaacatgcattcctcacagtcggttccaaggaagcaaacaatggcccacctttcaattttcccggcaacttcgggggttctaacgctttcggcccgcctatccccccccctggccttgggggcggagcgtttggcgacgccaggccaggaatgcctagcgtcggcaacagtgggctgcctggtctggggctcgatgtgccaggattcggtgggggcccaaataacctgtccggacccagtggattcggcggcggcccccaaaatttcggcaacggcccaggttcactaggaggcccacctggcttcggatcgggcccacccggtttgggctcagcccctggccatctgggtgggccaccagccttcggccccggaccaggacccggccccggcccagggcctattcacatcggaggaccacctggattcgcttcttctagcggtaaaccggggcctacagttattaaggtgcagaatatgcctttcacagtgtcgatcgacgaaatactggattttttttatggataccaggtaatccctgggtctgtttgtctgaagtacaacgagaagggaatgcccacaggggaggccatggtggctttcgagagcagagatgaggcgacagcagctgtgatagacttgaatgacagaccgatcggctcacgtaaagtgaagctcgttctcggttag

SEQ ID NO: 76266 - DNA, 2799 bp, Artificial Sequence
  derived and/or modified sequence
atggccgtggtgattagactccaagggctgcctatcgtggccggcaccatggacatcagacacttcttcagcgggttgacgatccccgacggtggggtgcacatcgtgggcggggagctcggggaggcatttatcgtcttcgcaaccgacgaagacgcccggttaggaatgatgcgaaccggcggaacaattaaaggctcgaaagttaccctgctgcttagttctaagactgaaatgcagaacatgattgagttgagtcgtcggaggttcgaaacggccaacttagatattccccccgccaacgccagccgctcgggtccacccccgtctagcggcatgtcatctcgcgtcaacttgcccaccacagtcagtaatttcaataacccgagcccctctgttgtgacggccactacaagtgtccacgagtctaataagaacatccagacgttttccacagcttcggtgggtacagcccctcctaatatgggagcctcttttggcagtcccaccttctcgagcaccgtgccttcaaccgcatcaccaatgaatactgtgccaccaccccctatccccccaattcccgctatgccttcactccccccaatgccctcgatcccacccattccagtccctcctcctgtccccaccctgccaccggtgccacccgtgcctccaatccctccagtgccatccgttccacctatgacaccattaccgcctatgagtggaatgcccccactaaatcctccccccgtcgccccactacccgcgggcatgaacggctctggggccccaatgaatctgaacaacaatctgaaccccatgtttctcggtccccttaatccagtaaacccgatccagatgaacagtcagtcctctgtgaagcccctgccgatcaaccccgacgatctgtatgtgagtgtgcatgggatgccattttccgcaatggaaaacgatgtaagagactttttccacgggctacgcgttgacgccgttcacctccttaaggatcatgttgggaggaataatggcaatggattggtgaagtttctgtcccctcaggatactttcgaggcactaaaacggaatcgcatgctgatgattcaacgttacgtggaagtatccccagccaccgagcggcagtgggtggcggcggggggacacattacgtttaagcagaacatggggcctagtggccagacccacccacctccccagacactgccacgctcaaagagcccctcgggacagaagagaagccgatcccggtcaccacatgaggctggcttctgcgtgtacctgaaagggcttccttttgaagcagagaacaagcatgtcatcgatttctttaagaaattggacatcgtggaggatagcatttacattgcttacggaccaaacgggaaagccacaggggaaggctttgttgagtttaggaatgaggctgattacaaggctgctctctgtcgacataagcagtacatgggcaataggtttatccaggtgcaccccatcacgaaaaaggggatgctcgagaagattgacatgattcggaagaggcttcagaattttagctacgaccaacgcgagatgattcttaaccccgaaggagacgtcaactctgccaaggtttgtgctcatataactaatattccattcagtatcaccaaaatggacgttctgcagttcttagaaggcatacctgttgacgaaaacgccgtgcatgtgctggtcgacaacaacgggcaggggctaggacaggccctggtgcagtttaagaatgaggacgacgcacgcaaatccgaacgcctgcaccggaagaaactcaacggtcgcgaagcattcgtgcacgtggtgacgctggaggacatgcgggaaatcgagaaaaatccacctgctcaaggcaaaaagggcctgaagatgcccgtgcctggcaaccctgctgtgccgggaatgcccaatgccgggctgcctggggtgggactgcccagcgccggacttccaggggcaggactcccctcgacaggcctgcccggatctgcgataactagcgccggactaccaggcgctgggatgccatctgctggcatcccgtcagctgggggtgaggagcacgcatttctgactgtgggctctaaggaagcgaacaacggaccacccttcaacttcccaggtaactttggtgggtctaacgcgtttggcccacctattccaccccccggcctcggtggaggtgctttcggagacgctcgaccaggcatgccttctgtcggaaactcaggccttccaggcctgggccttgacgttcctgggtttggaggcgggcctaataacctgagtggacccagtgggttcggtgggggtccccagaattttgggaacggccccgggtctctgggaggacctcccggatttggatctggcccaccaggcctagggagcgctcctggtcatctgggtggccctcccgcctttgggcctggcccgggacccggcccagggccagggcctattcatataggtggtcccccagggtttgcttccagttcagggaaaccaggtcctacagtcattaaagttcagaacatgcctttcacagtctccatcgacgagatactggacttcttttacggctaccaggtgattccggggagcgtgtgcctgaagtacaatgagaagggcatgccaactggcgaggcaatggtcgcttttgagtcaagggacgaggctacggccgccgtgatcgacctcaatgaccgccctatcgggtctcgaaaagttaagctagtcctgggctag

SEQ ID NO: 76267 - DNA, 2799 bp, Artificial Sequence
  derived and/or modified sequence
atggcagtagttattagactacagggccttcctatagtcgcagggactatggacatccgccatttctttagcggtcttacaatcccggacgggggtgtccatatcgtgggcggagaactgggggaggctttcattgttttcgctacggatgaggacgccagactaggtatgatgaggaccggaggcaccatcaagggatctaaggtaacgctgcttcttagcagcaagacggaaatgcaaaacatgatcgagcttagtcgaaggagattcgagacagctaatttagatattccgccagcgaacgcaagccggtccgggcccccaccttcaagcggcatgagtagtcgcgtcaacttgcccaccacggtctccaattttaataatcccagcccttccgtcgtgacagcgacaacctccgtgcacgaaagtaacaaaaatatccagacgtttagcacagctagcgtgggcaccgcccctcctaatatgggagcgtctttcggatctcctactttttcgtctacagtgccatcaacggccagtcctatgaatacagtgccacccccaccgatacctcccattcccgccatgccctctctgccccccatgccttctatccctcctataccagtcccccctcctgttcccacgcttccccctgtgcctcccgtgccgcccatacctcccgtcccttccgttccacccatgactccactgcctcccatgagcggcatgcctcctctcaatccacctcccgtggccccactgccggccggcatgaatggctccggggcccctatgaatttaaataataacctgaacccgatgtttctgggccccctgaaccccgtgaacccaatccaaatgaactcccagtcctctgtgaagccattgccgatcaatcccgatgacttatacgtttctgtccacgggatgccattctccgctatggaaaatgacgtcagggacttctttcacgggttgagggtcgatgccgtacaccttctgaaggatcacgtcggccggaataacggtaatggacttgtaaaatttctctcccctcaggacaccttcgaggctctgaagcgaaaccgcatgctgatgatccaaagatacgtcgaggtttcgccagccaccgagaggcagtgggtggctgcagggggccacatcacgttcaaacagaatatgggcccatcaggtcagactcatccacctccgcagacccttcccaggtccaaaagcccgagcggccaaaaaagaagccgttcccgcagcccccacgaagccggtttttgtgtgtatttaaaaggtttacccttcgaagccgaaaataagcacgtgatcgatttctttaagaaactcgatattgtggaggattccatttacatcgcttacggccctaacgggaaggccacaggtgaaggattcgtggagtttcgtaacgaggctgattacaaggcagccttgtgccggcacaaacagtacatgggcaaccgctttattcaggtgcaccctatcacaaagaaagggatgttagagaaaatagatatgatacgtaaaaggcttcagaacttcagttacgaccaaagggaaatgatcttgaaccctgagggcgacgtgaattccgctaaggtttgcgcacatataactaatatacccttcagcatcaccaaaatggacgtacttcagttcctggaggggatccccgtggacgagaacgctgtccacgtcttggtggataacaacggtcagggactgggccaggctctggttcagtttaagaatgaagatgatgcgagaaaaagtgaaagactacacagaaaaaagctcaatgggagggaagcttttgtccatgttgttactttggaggacatgagggagatcgaaaagaacccgcccgcacaaggcaagaagggcctgaaaatgcctgttccggggaacccagccgtaccaggaatgcctaacgcagggctgcccggcgtgggcctgccttctgcaggccttcctggcgcagggctcccttccaccggcctgcctggaagcgctatcacatctgccggactccccggtgctgggatgccatccgcggggatccctagcgccggtggggaagaacatgctttcctgaccgtggggtccaaggaagccaataatggccccccatttaactttcctgggaactttgggggatctaatgctttcggcccgcccatccccccccctgggctgggtggcggcgcatttggcgatgccaggccggggatgccatcagtgggcaactctggacttccggggctaggcctcgacgtccccggattcgggggagggcccaacaatttgagtggtcctagcgggttcggtggagggccgcagaatttcggcaacggacctggaagccttggcggacccccgggcttcggtagtgggccaccaggtttgggatccgctccaggtcacctgggtggccctccagcatttgggccagggccaggtcccgggccagggccaggcccaatccacattgggggcccacctgggtttgcctcctcaagcgggaaaccaggaccaacagtaatcaaggtacagaatatgccttttacagtatcaatcgacgaaatcttggactttttctacggctaccaggtgatccccgggagcgtttgtctgaaatacaatgaaaagggcatgccgaccggagaagctatggtagccttcgaaagtcgggacgaggccactgccgcagtgatagacctcaatgacaggcctattggatctcggaaagtgaagttggtcttagggtag

SEQ ID NO: 76268 - DNA, 876 bp, Artificial Sequence
  derived and/or modified sequence
atggccgtcgtcattcgtttgcaaggcctccctatcgtcgccgggacgatggacattagacacttcttctcaggtcttaccatccccgacggaggagtgcatatcgtggggggggaactcggggaagcatttatcgtttttgccacagatgaagatgccaggctgggcatgatgagaacgggggggacgataaaaggctctaaggtcacactgttactgtcctctaagacagagatgcagaatatgattgagctctcacggcggcgcttcgaaacagcaaacctcgacatcccgcctgctaacgcttcaagatctggtcctccccctagttccggtatgtcatcccgagtcaatttacctacaacagtttcaaacttcaataatccttcgccaagtgtggtgacagcgaccacatcagtgcacgagtctaataaaaatatacagaccttctccacggcatccgtggggacagccccccctaatatgggagcgtcttttggaagccccaccttcagcagtactgtgcctagtacggcctctcctatgaacaccgtgcctccccctcctattcctcctatccccgcaatgccgagcctccctcccatgcccagtattcccccaattcctgtgcctccccctgtgcctacgttacctccagtgcccccagtcccgcctattccgcctgtccccagtgtcccacctatgactcccctccctcccatgtcgggcatgcccccattgaatccccctcctgtggctcctttgcccgctggtatgaatggctcaggcgcaccaatgaatctcaacaacaacctgaacccaatgttcctcggcccacttaatccagtaaatccgatccagatgaactctcaatag

SEQ ID NO: 76269 - DNA, 432 bp, Artificial Sequence
  derived and/or modified sequence
atggcggttgtgatcagactccagggtctgcctattgtggctggcacaatggacatccggcacttcttttctggccttaccattcctgatggcggtgtgcacattgtgggcggtgagctgggcgaggcttttatcgtctttgcaaccgatgaagatgctcggctcggaatgatgcgcacaggcggtaccattaagggatcgaaagtgaccctactacttagctcgaaaacagaaatgcagaacatgatcgagctcagccggcggcggttcgagaccgcaaatctcgatatcccccctgccaatgcttccagatccggcccccctccctcatcaggaatgtcatcccgagtgaatctgcccactacggttagcaacttcaacaatccttctccaagtgtcgtcacggcgactacaagcgtgcatgagagttag

SEQ ID NO: 76270 - DNA, 405 bp, Artificial Sequence
  derived and/or modified sequence
atggcggtggtcatccgcttgcaaggtctgcccattgtcgctggtactatggatattaggcacttcttcagtgggctcaccatacctgatggcggcgtacatattgtcggtggagaattaggcgaagccttcatagtcttcgccaccgatgaggatgcccgactagggatgatgcgcacgggaggaactatcaagggctccaaggtgacgctcttgctttccagcaagaccgagatgcagaacatgattgaactgtctcggcggcgatttgaaaccgccaacctggatattcctccggcaaacgccagccgatcagggcctccaccatcaagcggcatgagctcccgcgtgaatctgcctactactgtgtccaactttaacaacccgtctccgtccgtggtgtag

SEQ ID NO: 76271 - DNA, 2196 bp, Artificial Sequence
  derived and/or modified sequence
atgcccagcatcccccccatccctgtgcccccacctgtgcccaccctgccccctgtgccccctgtgccccccatcccccctgtgcccagcgtgccccccatgacccccctgccccccatgagcggcatgccacccctgaaccccccacctgtggcccccctgcctgctggcatgaatggaagtggggcccccatgaacctgaacaacaacctgaaccccatgttcctgggccccctgaaccctgtgaaccccatccagatgaacagccagagctctgtgaagcccctgcccatcaacccagatgacctgtatgtgtctgtgcacggcatgcccttcagcgccatggagaatgatgtgcgggacttcttccacggcctgcgggtggatgctgtgcacctgctgaaggaccacgtgggcaggaacaatggaaatggcctggtgaagttcctgagcccccaggacacctttgaggccctgaagaggaacaggatgctgatgatccagcgctacgtggaggtgtccccagccacagagcggcagtgggtggccgccggcggccacatcaccttcaagcagaacatgggccccagcggccagacccaccccccaccccagaccctgcccaggagcaagagccccagcggccagaagaggagccgcagccgcagcccccatgaagctggcttctgtgtgtacctgaagggcctgccctttgaagctgagaacaagcacgtgattgacttcttcaagaagctggacatcgtggaggacagcatctacatcgcctacggccccaacgggaaggccaccggggagggctttgtggagttcagaaatgaagctgactacaaggccgccctgtgccgccacaagcagtacatgggcaaccgcttcatccaggtgcaccccatcaccaagaagggcatgctggagaagattgacatgatcaggaagaggctgcagaacttctcctatgaccagcgggagatgatcctgaacccagaaggagatgtgaacagcgccaaggtgtgtgcccacatcaccaacatccccttcagcatcaccaagatggatgtgctgcagttcctggagggcatccctgtggatgaaaatgctgtgcacgtgctggtggacaacaacggccagggcctgggccaggccctggtgcagttcaagaatgaagatgatgccaggaagtctgagcggctgcacaggaagaagctgaatggccgggaggcctttgtgcacgtggtgaccctggaggacatgagagaaattgagaagaaccccccagcccagggcaagaagggcctgaagatgcctgtgcccggcaacccagctgtgcccggcatgcccaatgccggcctgcccggggtgggcctgcccagcgctggcctgcctggagctggcctgcccagcacaggcctgcccggcagcgccatcaccagcgctggcctgcctggagctggcatgcccagcgctggcatccccagcgctggaggagaggagcacgccttcctgactgtgggcagcaaggaggccaacaacggcccccccttcaacttccctggcaactttggaggcagcaatgccttcggcccccccatccccccacctggcctgggcggcggggcctttggagatgcccggcccggcatgcccagcgtgggcaacagcggcctgcccggcctgggcctggatgtgcccggctttggaggcggccccaacaacctgagcggccccagcggctttggaggcggcccccagaactttggaaatggacctggcagcctgggcggccccccaggcttcggcagcggccccccaggcctgggcagcgcccctggccacctgggcggccccccagccttcggccctggccctggccctggccctggccctggccccatccacatcggcggccccccaggctttgccagcagcagcggcaagccaggccccaccgtcatcaaggtgcagaacatgcccttcaccgtgtccattgatgagatcctggacttcttctacggctaccaggtgattcctggctctgtgtgcctgaagtacaatgagaagggcatgcccaccggggaggccatggtggcctttgagagcagagatgaggccacagctgctgtgattgacctgaatgaccggcccatcggcagcaggaaggtgaagctggtgctgggctag

SEQ ID NO: 76272 - DNA, 2799 bp, Artificial Sequence
  derived and/or modified sequence
atggctgtggtgatccggctgcagggcctgcccatcgtggccggcaccatggacatccgccacttcttcagcggcctgaccatcccagatggcggcgtgcacatcgtgggcggggagctgggggaggccttcatcgtgtttgccacagatgaagatgcccggctgggcatgatgaggactggaggcaccatcaagggcagcaaggtgaccctgctgctgagcagcaagacagagatgcagaacatgattgagctgagcagaagaagatttgaaacagccaacctggacatccccccagccaatgccagccgcagcggccccccacccagcagcggcatgagcagccgggtgaacctgcccaccaccgtgagcaacttcaacaaccccagccccagcgtggtgacagccaccacctctgtgcatgagagcaacaagaacatccagaccttcagcacagcctctgtgggcacagccccacccaacatgggcgccagctttggcagccccaccttcagcagcacagtgcccagcacagccagccccatgaacacagtgcccccaccacccatcccccccatcccagccatgcccagcctgccccccatgcccagcatcccccccatccctgtgcccccacctgtgcccaccctgccccctgtgccccctgtgccccccatcccccctgtgcccagcgtgccccccatgacccccctgccccccatgagcggcatgccacccctgaaccccccacctgtggcccccctgcctgctggcatgaatggcagcggggcccccatgaacctgaacaacaacctgaaccccatgttcctgggccccctgaaccctgtgaaccccatccagatgaacagccagagctctgtgaagcccctgcccatcaacccagatgacctgtatgtgtctgtgcacggcatgcccttcagcgccatggagaatgatgtgcgggacttcttccacggcctgcgggtggatgctgtgcacctgctgaaggaccacgtgggcagaaataatggaaatggcctggtgaagttcctgagcccccaggacacctttgaggccctgaagaggaacaggatgctgatgatccagagatatgtggaggtgtccccagccacagagcggcagtgggtggccgccggcggccacatcaccttcaagcagaacatgggccccagcggccagacccaccccccaccccagaccctgcccaggagcaagagccccagcggccagaagaggagccgcagccgcagcccccatgaggccggcttctgtgtgtacctgaagggcctgccctttgaagctgagaacaagcacgtgattgacttcttcaagaagctggacatcgtggaggacagcatctacatcgcctacggccccaacgggaaggccactggagagggctttgtggagttcagaaatgaggccgactacaaggccgccctgtgccgccacaagcagtacatgggcaaccgcttcatccaggtgcaccccatcaccaagaagggcatgctggagaagattgacatgatcaggaagaggctgcagaacttctcctatgaccagcgggagatgatcctgaacccagaaggagatgtgaacagcgccaaggtgtgtgcccacatcaccaacatccccttcagcatcaccaagatggatgtgctgcagttcctggagggcatccctgtggatgaaaatgctgtgcacgtgctggtggacaacaacggccagggcctgggccaggccctggtgcagttcaagaatgaagatgatgccaggaagtctgagcggctgcacaggaagaagctgaatggccgggaggcctttgtgcacgtggtgaccctggaggacatgagagaaattgagaagaaccccccagcccagggcaagaagggcctgaagatgcctgtgcccggcaacccagctgtgcccggcatgcccaatgccggcctgcccggggtgggcctgcccagcgctggcctgcccggggccggcctgcccagcacaggcctgcccggcagcgccatcaccagcgctggcctgcccggggccggcatgcccagcgctggcatccccagcgctggaggagaggagcacgccttcctgactgtgggcagcaaggaggccaacaatggaccacccttcaacttccctggcaactttggaggcagcaatgcctttggaccacccatccccccacctggcctgggcggcggggcctttggagatgcccggcccggcatgcccagcgtgggcaacagcggcctgcccggcctgggcctggatgtgcccggctttggaggcggccccaacaacctgagcggccccagcggctttggaggcggcccccagaactttggaaatggacctggcagcctgggcggccccccaggctttggaagtggccccccaggcctgggcagcgcccctggccacctgggcggccccccagcctttggacctggccctggccctggccctggccctggccccatccacatcggcggccccccaggctttgccagcagcagcggcaagccaggccccaccgtcatcaaggtgcagaacatgcccttcaccgtgtccattgatgagatcctggacttcttctacggctaccaggtgattcctggctctgtgtgcctgaagtacaatgagaagggcatgcccactggagaggccatggtggcctttgagagcagagatgaggccacagctgctgtgattgacctgaatgaccggcccatcggcagcaggaaggtgaagctggtgctgggctag

SEQ ID NO: 76273 - DNA, 876 bp, Artificial Sequence
  derived and/or modified sequence
atggctgtggtgatccggctgcagggcctgcccatcgtggccggcaccatggacatccgccacttcttcagcggcctgaccatcccagatggcggcgtgcacatcgtgggcggggagctgggggaggccttcatcgtgtttgccacagatgaagatgcccggctgggcatgatgaggactggaggcaccatcaagggcagcaaggtgaccctgctgctgagcagcaagacagagatgcagaacatgattgagctgagcagaagaagatttgaaacagccaacctggacatccccccagccaatgccagccgcagcggccccccacccagcagcggcatgagcagccgggtgaacctgcccaccaccgtgagcaacttcaacaaccccagccccagcgtggtgacagccaccacctctgtgcatgagagcaacaagaacatccagaccttcagcacagcctctgtgggcacagccccacccaacatgggcgccagctttggcagccccaccttcagcagcacagtgcccagcacagccagccccatgaacacagtgcccccaccacccatcccccccatcccagccatgcccagcctgccccccatgcccagcatcccccccatccctgtgcccccacctgtgcccaccctgccccctgtgccccctgtgccccccatcccccctgtgcccagcgtgccccccatgacccccctgccccccatgagcggcatgccacccctgaaccccccacctgtggcccccctgcctgctggcatgaatggcagcggggcccccatgaacctgaacaacaacctgaaccccatgttcctgggccccctgaaccctgtgaaccccatccagatgaacagccagtag

SEQ ID NO: 76274 - DNA, 432 bp, Artificial Sequence
  derived and/or modified sequence
atggctgtggtgatccggctgcagggcctgcccatcgtggccggcaccatggacatccgccacttcttcagcggcctgaccatcccagatggcggcgtgcacatcgtgggcggggagctgggggaggccttcatcgtgtttgccacagatgaagatgcccggctgggcatgatgaggactggaggcaccatcaagggcagcaaggtgaccctgctgctgagcagcaagacagagatgcagaacatgattgagctgagcagaagaagatttgaaacagccaacctggacatccccccagccaatgccagccgcagcggccccccacccagcagcggcatgagcagccgggtgaacctgcccaccaccgtgagcaacttcaacaaccccagccccagcgtggtgacagccaccacctctgtgcatgagagctag

SEQ ID NO: 76275 - DNA, 405 bp, Artificial Sequence
  derived and/or modified sequence
atggctgtggtgatccggctgcagggcctgcccatcgtggccggcaccatggacatccgccacttcttcagcggcctgaccatcccagatggcggcgtgcacatcgtgggcggggagctgggggaggccttcatcgtgtttgccacagatgaagatgcccggctgggcatgatgaggactggaggcaccatcaagggcagcaaggtgaccctgctgctgagcagcaagacagagatgcagaacatgattgagctgagcagaagaagatttgaaacagccaacctggacatccccccagccaatgccagccgcagcggccccccacccagcagcggcatgagcagccgggtgaacctgcccaccaccgtgagcaacttcaacaaccccagccccagcgtggtgtag

SEQ ID NO: 76276 - DNA, 2196 bp, Artificial Sequence
  derived and/or modified sequence
atgcccagcatcccccccatccccgtgcccccccccgtgcccaccttaccccccgtaccaccagtgccccccatccccccagtccccagcgtgccaccaatgacaccactcccccctatgtccggcatgccgccactgaatccacccccagtggccccactgcctgctggtatgaacggctcaggcgcccctatgaatctgaacaataatctcaaccccatgtttctgggtcctcttaatccagtaaatccaatacagatgaattcacagtcctctgtcaaacctcttccaattaatcctgatgacctgtatgtaagtgtgcatggtatgccatttagtgctatggagaacgatgtccgggatttcttccacggattacgggtggacgccgtgcatttgcttaaggatcatgtaggacggaataacggcaatggcctggtgaagtttcttagccctcaggatacgttcgaggccctgaagcggaataggatgttaatgatccaaaggtatgtagaagtttcccctgccaccgagaggcagtgggtagctgcgggcggacacatcacgtttaaacagaatatgggccctagcggtcaaacccatcctcccccacagacattaccgcgatctaagagcccatcaggtcaaaaacggtctaggagccgttcccctcacgaggctgggttttgcgtctacttgaagggattacccttcgaggccgaaaacaagcacgtcatcgacttttttaagaagttggacatagttgaagactctatctacattgcatatgggcctaacggcaaggctaccggagagggcttcgtcgagtttagaaacgaggccgattacaaggccgcactttgtaggcacaagcagtatatgggcaacagatttatccaagtccaccctattactaaaaagggaatgctggaaaagatagatatgatccgaaagagactgcagaatttttcctatgatcagcgcgaaatgattttaaatcccgagggagatgtgaacagtgccaaagtatgcgcccacatcaccaatattcccttctcgatcaccaaaatggacgtcctgcagtttctggaggggatcccggtggacgaaaacgccgtccatgtactagttgacaacaacggccaggggcttggccaggcattggtccagttcaaaaatgaggacgacgcccgtaaatctgagagattgcaccgtaaaaaattgaatgggagggaggctttcgtgcacgttgtgactctggaagatatgagggagatcgaaaagaatcccccagcccagggcaagaagggccttaagatgcctgtgccgggtaatccagctgtccccggcatgcccaatgcaggactcccaggcgtgggccttccttcagccgggctgccaggagccggattgcccagtactggcctgccgggctcagcgataacctccgcagggttgcctggggccggtatgccttctgcagggatcccctctgctgggggcgaagagcacgcttttctcaccgtgggctccaaagaggctaataatggcccaccttttaacttcccaggtaactttggcgggagcaacgcttttggaccgcctattcctcctcccgggctgggggggggcgcgttcggcgacgcaagaccaggaatgccgtcagtggggaatagtggacttccaggcctcggccttgacgtgccgggtttcggcggcggacccaacaatctaagcgggccatcgggattcggcggggggccacagaactttggtaacgggcccggaagcttggggggacctccgggatttgggtctggcccccccgggctaggttccgcccccgggcacctgggaggccctccagcctttggtcctggaccggggcccggccctggtccaggcccaattcacatcggaggcccccctgggtttgcctcgtccagtggtaagcctggacccacagtgataaaggtgcagaacatgcctttcacagtgagtatcgacgaaattctggactttttttatgggtatcaggtgatccccggctctgtctgcctgaaatacaatgagaagggcatgcccactggagaggctatggtcgcgtttgagtcacgagacgaggccaccgctgccgtgatagacctgaacgaccgccccattggcagtcgtaaagtcaagctggtgctgggatag

SEQ ID NO: 76277 - DNA, 2799 bp, Artificial Sequence
  derived and/or modified sequence
atggccgtggtgatccggctgcagggcctgcccatcgtggccggcactatggacatccgccattttttctcaggtctgactattcccgacggcggcgttcacattgtgggcggggaacttggagaggcctttattgtatttgcaacagacgaggacgcgcggttgggtatgatgagaaccggtgggactattaaaggaagcaaagtcactcttctgctgtcctccaagactgaaatgcagaacatgatcgagctatcacggcggagattcgaaacagccaatctagatattccacccgcgaacgcatccagaagcggcccacccccaagcagcgggatgtccagcagagtgaatctgccgaccaccgtgagcaactttaacaacccgtcaccatctgtagttaccgcaacaacctcagtgcatgagtccaacaagaacattcagacattttccaccgcctcagtgggcactgctcctcccaatatgggcgctagtttcgggagtccaaccttcagctccaccgtgccaagcaccgctagtcctatgaataccgtccctccacccccaattccccctatccccgcaatgccgagcttacctcctatgcccagcattcccccaattcctgttcctccacctgtgccaacgctgcccccagtccctcccgtaccacccataccccctgtgccatccgtgccccctatgacgccgctgccacccatgagtggaatgccccctctgaaccccccaccggtagccccactacctgctggcatgaatgggtccggggctcctatgaatctgaacaacaatctaaatcccatgttcctgggccctctgaatcctgtgaaccccatccagatgaactcccagtcatcggtgaaacccctcccaatcaaccccgacgatctgtatgtcagcgtgcatggcatgccgttcagtgcaatggagaacgacgtcagagattttttccacggactgcgagtcgatgcagtccacttactcaaagaccacgtggggcggaataacggcaacggcctggtgaaattccttagcccacaggacacattcgaagcactaaaacgtaaccggatgctgatgatccagcggtacgtggaggtaagccctgccactgagaggcagtgggtcgccgctggcggtcacatcacatttaagcaaaacatgggcccaagcggacagactcatcccccaccacagactcttcccagaagcaaatcaccttcaggccaaaagcggagtcgatcccggagcccacatgaggcaggattttgtgtttacctgaagggactcccctttgaggcagagaacaaacatgtgatagatttcttcaaaaagctggacatcgtggaggactccatctacattgcatatgggccaaatgggaaagccaccggcgagggcttcgtggagttccgcaacgaggctgactacaaagctgctttgtgccggcataaacagtacatgggaaaccgttttatacaggtgcatcctataacaaagaagggaatgttggagaagattgacatgattaggaaaagactacagaatttcagttacgaccaaagagagatgatactgaaccctgaaggagatgttaactctgcaaaggtttgcgcccatatcactaatattcctttttcgataaccaagatggacgtcctgcagtttctcgagggcattcccgtcgacgaaaacgcggtacatgtgcttgtggacaataacggccaaggactgggtcaggccctagtccagttcaaaaatgaagatgacgccaggaagagtgaacgcttgcatcgtaagaaactgaacggacgagaggcgttcgtgcacgttgttaccttggaagatatgagagagattgaaaaaaaccctccagcacaaggcaagaaggggttgaagatgcccgttccaggaaatcccgcggtgcctggaatgccaaatgccggattgccgggagtgggtcttccatccgccggtctccctggtgcaggcctacctagcaccggactgcccggttccgccatcaccagcgcgggccttccaggcgctggcatgcccagcgccggcataccgtccgcgggcggggaggagcacgccttcctcactgtcggctcaaaagaggctaacaatgggcccccattcaatttccccggcaatttcggagggtcgaacgcgttcggcccaccgattccaccccctggcctgggcggcggcgccttcggggatgcccgtcctggtatgccaagtgtgggtaacagcggattaccaggcctgggcctggacgtccctggatttgggggcggccccaacaatctgtctgggccctccgggttcggtggtggacctcaaaacttcgggaacgggccaggcagcctgggcgggcctccagggttcggtagcggcccaccgggactcgggtccgctcctgggcacctgggaggtccaccggccttcggtcctgggcccgggcccggtcccggtccaggtcccatccatattgggggcccaccaggattcgcgtcatctagcggtaagcccggacccacggtaataaaggtccagaacatgccattcacagtctcgattgacgaaattctggacttcttttatggataccaggtgattcccggtagtgtctgcctcaaatataatgaaaaagggatgcccaccggcgaggctatggtggcattcgagagcagagacgaagctacagccgccgtgatagacttaaacgataggcctattggttccagaaaggtcaagttggtcttgggctag

SEQ ID NO: 76278 - DNA, 2799 bp, Artificial Sequence
  derived and/or modified sequence
atggccgtggtgatccggctgcagggcctgcccatcgtggccggcaccatggatattaggcactttttctcaggcctgacgatccccgatggcggcgtgcacatcgtgggaggggaactgggtgaggcatttatcgtattcgctactgacgaagacgcccgcttgggaatgatgagaacgggtggcacaatcaagggcagcaaggtcactctgcttctgtccagcaagacagagatgcagaacatgatcgagttaagtaggcgccggttcgaaaccgccaacttagatatcccacccgcgaatgctagtaggagcgggcctcctccatcttcagggatgtcttcccgcgtcaatctaccaactacggtctccaatttcaacaacccaagccccagcgtggtcaccgctaccacctcagtacatgagtccaataagaacatacaaaccttttctacagcttctgtgggcacagcacctccaaatatgggcgcttcatttggatcccctacgttttcgtccaccgtcccgtctactgcatcacccatgaacactgtgccccccccacctattcctcctatcccggcaatgccctctctgccaccaatgccttcgatccccccaatcccagtgcccccacccgtgccgaccctcccacccgttccaccggtacctcctatccccccggtgcccagtgtcccccccatgacgcccttgccccccatgagcgggatgcctcccctcaatcctcctcctgtggctccccttccagcaggaatgaacggatccggagctcccatgaatctcaataacaatctaaacccaatgttcctcggacctctcaatcctgtcaatcccatccaaatgaacagccaaagctccgtgaaacctctgcccatcaatcccgatgatctctatgtctctgtgcacggaatgccttttagcgccatggagaatgatgtcagggatttttttcatggcctgcgtgtggacgccgtgcacctgctcaaagaccatgttggccggaacaatggtaacggactcgtgaagttcctttctccccaggacacgtttgaggcccttaagcgcaaccgtatgttgatgatacagcggtatgtggaggtgtcacctgctactgagcgccagtgggtcgccgcaggaggccatattacattcaagcaaaacatggggccttctggccagacccatcctccgccacaaactctccctagaagcaagagcccatccggtcagaaacgtagcaggtcacggagcccgcatgaggcgggattctgtgtatacctgaaaggtttgcccttcgaggcagagaataaacatgtgattgatttctttaagaaacttgacatcgtggaggattcaatttatatcgcatatggcccaaacggtaaagctacaggcgaagggttcgtggaatttcggaatgaagcagattacaaagccgcattgtgtagacataaacagtatatgggcaatcgatttatccaggtgcacccaattaccaagaagggtatgctcgaaaagattgatatgatcagaaaaaggctgcagaactttagctacgatcagcgggaaatgattctgaatcctgagggggacgtcaactctgctaaggtatgtgcacacatcactaatatccccttctccatcacaaagatggacgtgttgcagtttctggagggtattcctgtcgatgaaaatgcagtgcatgtgctggtggacaacaacggccagggcctcggacaggcactggtgcaatttaaaaatgaggacgacgcccggaaaagcgaaagactgcaccgcaagaagctcaacggaagagaggcatttgtgcacgtcgttaccttggaggacatgagggaaattgaaaagaacccccctgcccaggggaagaaggggctcaaaatgcctgtccccggcaatcctgcagtccccggtatgcccaacgctggtctgccaggcgtgggattgccgtccgctgggctccctggggctgggctccccagcacgggccttcccggctctgcaatcacctctgccggactgccgggtgccgggatgcccagcgctggcattccttctgccggcggggaagaacacgcctttttgacggtgggttccaaggaggccaataacggtcctccatttaactttccaggtaattttggagggagcaatgctttcggcccccctatccccccacctggtttgggcggtggggctttcggcgacgcccgacccggaatgccgagtgtcgggaattcaggtttacccggattgggcctcgatgtgccggggttcggtggcggccctaacaacctctcagggccatccggcttcggcggcggcccacagaacttcggcaatggacccggcagcctggggggaccaccaggcttcggtagtggccctcccgggttaggcagtgccccaggccacctgggtggaccccccgcatttggtcccggacccggacccgggcccggccccggtccaatacatattggcggccctccgggattcgcgtccagctcagggaagcccggaccaaccgtgattaaggtgcagaatatgcctttcaccgtttcgatagatgagatcctggacttcttttatgggtaccaggtaattccagggagcgtttgcctgaagtataatgagaagggcatgcctaccggcgaggcgatggtggccttcgagtcccgggacgaggccactgctgccgtcatagatctgaatgaccggcctatagggtcacggaaggttaaactcgtgttgggctag

SEQ ID NO: 76279 - DNA, 2799 bp, Artificial Sequence
  derived and/or modified sequence
atggccgtggtgatccggctgcagggcctgcccatcgtggccggcactatggatatacggcacttcttctccggactgaccatacccgatgggggagtgcacatcgtgggcggcgagcttggcgaagccttcatcgtcttcgctacggatgaagatgctagactcggcatgatgagaactgggggtactattaaagggtcaaaggtcactcttctgctgagcagcaagacagaaatgcagaatatgatagaactttcccggcgccgctttgaaacagccaatctggatattccccccgccaacgcttctcgctctggcccacctccgtcttccggcatgagctcgcgcgtgaacttacctactactgtttcaaattttaataaccccagtccgtcagtagtcaccgctacgacgtcagtccacgagagcaacaagaatatccagacattttccactgctagtgttgggacagcacccccaaacatgggggcttcctttggaagtcctactttcagcagtacagtaccctcaaccgctagtccaatgaatactgtgccccctcccccaatccctcccattccggctatgccctctttgcccccgatgcccagcatccccccgatcccagttccccctcccgtgccaacattgccgcccgttcccccggttccccccatcccccccgtgcccagcgtgccgccaatgacaccgcttccgcccatgtcaggtatgccacccttgaatcctccaccagtcgcacccctgccagctggtatgaacggttctggtgcacctatgaacttgaacaataacctgaacccgatgtttcttggacccctcaaccctgtgaatcctattcagatgaattcacaaagctccgtgaagcccctccctattaaccccgatgatctgtacgtgagtgtgcacgggatgccgttctccgcaatggagaatgatgttagagactttttccacgggttgcgcgtggacgctgtccacctgcttaaggaccatgtcggacgcaacaatggcaatggcctggtcaaattcctgtctccgcaggacacctttgaggctcttaaacgcaatcggatgctgatgatccaacgttacgtggaggtctcccctgctaccgagaggcagtgggtggctgccggaggtcatattacttttaagcagaacatgggcccttctgggcagactcacccacctcctcaaactctgcctagatcaaaaagccccagtggtcaaaaacgcagccggtcacgctcccctcacgaagcaggcttctgtgtgtatctgaagggactaccttttgaggctgaaaacaagcatgtgattgacttctttaaaaagctcgatatagtcgaggacagcatctatatcgcatacgggccaaacggaaaggctacaggggagggctttgtcgagtttaggaacgaggctgattacaaagcggctctatgccgtcataaacagtatatgggcaacagattcattcaggtgcaccctattacaaaaaaggggatgcttgagaagattgatatgatccgtaagcgattgcaaaatttctcttacgatcagagggaaatgattctcaatcctgaaggggacgttaactcagccaaggtgtgcgcccatattactaacatccctttcagtataaccaaaatggatgtgctgcaatttctggagggcatacccgtggacgagaacgcggtgcacgtgctggtggataacaacggccagggattgggacaggctctggtacaattcaagaacgaggatgatgctaggaagagcgagagactccataggaaaaagttgaacggacgtgaagctttcgtgcatgtggttactctggaggatatgcgcgagatcgaaaaaaaccctcctgctcaaggcaagaagggtctgaagatgcccgtgccggggaatccagcagtgccaggcatgcccaatgccggccttcccggagtaggacttcccagtgcaggcttgcccggagctggactgcccagcaccggacttccaggaagcgcaattacgagtgccgggctccctggagctggcatgccaagtgctggcatccctagcgctggaggcgaggagcacgcctttctgactgtggggagtaaggaagccaacaacggtcctcctttcaatttccctggaaacttcggagggagtaatgctttcgggccccccattccacctccgggtctcgggggtggagcttttggagacgcccggcctgggatgccatccgtgggcaatagtggcctcccgggactgggcctggatgtgccagggtttggaggaggccctaataacctgtctgggccttccgggttcggaggtggaccacagaatttcggcaacggtccgggctccctaggaggaccccctggtttcggatcaggccccccaggcctgggatctgcaccaggccatttgggcgggcccccagcattcggccctggaccgggtcctggaccgggaccagggcccatacacattggaggcccgccgggctttgcgtcctcatctggaaaacccggaccgacagtgatcaaggtgcagaacatgcccttcaccgtgagcatagacgagatcttggatttcttttacggctaccaagtgattccagggtctgtgtgcctgaaatataacgagaagggcatgcctaccggagaggcaatggtagcattcgaatcccgcgatgaggctacagccgcggtaatcgatcttaatgaccgccctatcggctcccggaaggttaagcttgtgctgggatag

SEQ ID NO: 76280 - DNA, 876 bp, Artificial Sequence
  derived and/or modified sequence
atggccgtggtgatccggctgcagggcctgcccatcgtggccggcactatggatatcagacattttttttcaggtctgaccatcccagatggtggcgtgcatattgttggaggtgagctcggagaagcattcatcgtgttcgccactgatgaagacgcccgcctggggatgatgcgcacaggaggcacaatcaaaggctcaaaggtgactctgcttttaagcagtaagacggaaatgcaaaatatgattgaactcagcagaagacggttcgagaccgccaacctcgatattcccccggcaaacgcgtctagatcgggtcctcccccaagttcgggcatgtctagccgtgtgaaccttccaacaacggtttcaaactttaataatcccagtcccagcgtggtaacagcaacaacttcagtgcatgaatcaaataagaacatccagactttcagtaccgcgagcgtgggcacagctcctcctaacatgggcgcgtcttttggctctcccacgttctcaagcaccgtgccaagcacagcctctcccatgaacaccgttccgccccccccgatccccccaatcccagcaatgccaagtctgccgccgatgcccagcatcccgcccataccggtcccacccccggtgcctaccctgcctcccgtgccccccgtgccacccatccctcccgtacccagtgtgcctccaatgacacccctgccaccaatgagcggtatgccgcccctcaatccccccccagtggcgcccttgcctgccgggatgaatggctccggagcacccatgaatctgaacaacaatctgaatcctatgtttctagggcctctcaatcccgtgaacccaattcaaatgaactctcagtag

SEQ ID NO: 76281 - DNA, 432 bp, Artificial Sequence
  derived and/or modified sequence
atggccgtggtgatccggctgcagggcctgcccatcgtggccggcacgatggacatccggcatttcttctccggactgactatccccgacggaggggtgcacatagtgggtggcgaattgggggaagctttcattgtgtttgctactgacgaggacgctcggctgggcatgatgcggaccggcggcactattaaggggtctaaggttactctactgctgagttcaaaaactgagatgcagaacatgatcgagctttcgcggaggcggttcgagacagctaacttagacatccctcccgctaacgccagccggagtggacctccccctagctctggaatgtcctcacgcgttaatctccccacgaccgtctctaattttaataaccccagcccatcagtggtcactgcaactacatcggtgcacgaatcttag

SEQ ID NO: 76282 - DNA, 405 bp, Artificial Sequence
  derived and/or modified sequence
atggccgtggtgatccggctgcagggcctgcccatcgtggccggcactatggatatccgtcacttcttttctggcctgaccattcctgacggcggagtccacatcgttgggggagaactgggggaagcgttcatcgttttcgcaaccgatgaggatgctagactcgggatgatgcggactggggggaccatcaagggaagcaaagtcacacttctgctgtcatctaagactgaaatgcagaatatgatcgaactgagtcgtaggcgctttgaaacggctaaccttgatatcccgcccgcaaatgcatctcgaagtgggccaccaccgtcgtcgggtatgtcctctagagtgaacttacctaccaccgtgagtaactttaacaatccaagccctagtgtagtgtag

SEQ ID NO: 76283 - DNA, 2196 bp, Artificial Sequence
  derived and/or modified sequence
atgcctagcataccacccattcccgttccgcctccggtgcccacacttcctcccgtgcctcctgtgccacccatcccccctgtgccctccgttccacccatgaccccacttccccctatgagtggcatgcctcctctgaatccaccccctgtggccccactgcccgctgggatgaacggaagcggcgctcctatgaacctcaacaacaaccttaacccgatgttcttgggccctctgaaccccgtgaatccaattcagatgaatagccagagctccgtcaagcccctaccgatcaaccctgacgatttgtacgtctctgtgcatggtatgcccttctctgcaatggagaatgatgttagggacttctttcatggcctccgggtggacgctgtccatctgcttaaggaccatgttgggaggaataatggaaacggccttgtgaagtttctgagcccacaagacacttttgaagccctaaagagaaatcggatgcttatgattcagagatatgtggaggtgagtcccgcaacagagcgtcagtgggttgccgcaggaggtcacatcacgtttaaacagaacatgggtccttccgggcagacacaccctccccctcagacactgccacggtccaagtcacctagtggacagaagcgatcccggagtcgatcccctcatgaggccggattttgtgtgtacctgaagggcttgcccttcgaagctgagaataaacacgtaatcgacttctttaaaaagcttgatattgtggaggattctatctacattgcctatggtcctaacggcaaggccacaggcgaaggtttcgttgagtttcggaatgaagctgattacaaggctgcactgtgtaggcacaaacagtacatggggaataggtttatccaggttcatcccatcaccaagaaggggatgctggagaaaatcgatatgattcggaagcgtctccagaatttttcttacgaccagagggaaatgatactaaacccggagggagacgttaactcggccaaagtttgcgcacacattaccaacattcctttctctatcaccaagatggacgtgctgcagtttctggaaggaatcccagtggacgaaaacgccgtgcacgtcctggtggacaataacggacaggggctagggcaggccctggtccagttcaaaaatgaggatgacgcccgaaaatccgagagactgcatcgtaagaaactcaacggtagggaagcttttgtgcatgtcgtaacattagaggacatgagggagatcgagaaaaacccccctgcccagggcaagaaggggctgaaaatgcctgtccctggtaacccagccgtgcccggaatgccgaacgcaggccttccgggagttggtctgccctctgccggacttccaggtgccggtcttcccagtacaggtctcccgggttccgcaatcaccagcgcaggtttgccaggtgcaggcatgccctcagcgggtataccttcagcaggcggagaagagcatgcatttctcaccgtgggatccaaagaggcaaataatggtcccccattcaatttccctgggaactttgggggaagcaacgcatttggccctccaattcccccacccggtctcggcggaggggcttttggagacgctcgccctggtatgccttcggtgggcaatagtggcctgcccggtctgggcctggatgtgcccggttttggaggaggacctaacaatttaagcggcccttccgggttcggaggtggcccacaaaattttggcaatgggcctggctcactgggcggtccgccaggcttcggaagcggacctcctgggttgggttccgccccagggcacctgggcggaccccctgcctttggccctggtcccggtcctggacctggccctgggcctatccatataggcggaccccctggtttcgctagctctagcggtaaacccggaccaaccgtcataaaagttcagaacatgcccttcaccgtttccattgacgaaatcctggattttttctatggataccaggtgatccccggatcagtgtgtctcaaatataatgagaaaggaatgcctactggagaagccatggtagcctttgagtcaagggatgaggctacagctgctgtgatcgatttgaacgatcggccaattgggtcgaggaaggttaaactggtcctgggatag

SEQ ID NO: 76284 - DNA, 2799 bp, Artificial Sequence
  derived and/or modified sequence
atggctgtggtgatcagactgcagggcctgccaatcgtagcaggcacaatggacatcaggcatttcttttctggactgacgatacccgacgggggtgtacacattgtaggaggggagctcggcgaagcatttatagtctttgctactgacgaagacgcaagactaggaatgatgcggaccgggggtaccatcaaaggtagcaaagttactctcttgctgagttccaaaacagaaatgcagaatatgatcgagctgagtaggaggcggttcgaaacggcgaatctggatataccacctgccaacgcttccaggtcgggcccacctccctcttccgggatgagcagtcgggtaaatctgcctacgacagtttcgaatttcaacaatccatcccctagcgtcgtcactgcaacgacctctgtccacgagagtaacaagaacattcagactttcagcacagccagtgtcggaactgcccctccaaacatgggtgctagcttcggcagccctacattctcctcaactgtgcctagcacagcttcacctatgaatacagtgcctccaccgcctatccctccaatcccagcaatgcctagcctgccacctatgccatctattcccccaatccctgttccacctcccgtcccgaccctgccacctgtgccccctgttcctccaattcctcctgtgccatccgtccctcccatgactcctctacctccaatgtcagggatgccacccctgaatcctcccccagtggcgcctctgcccgctgggatgaatggttctggggctccgatgaacttgaataataacctaaaccctatgttccttggtcccctgaacccagtgaatcccattcaaatgaactcacagtcttcggtcaagcccctgcccattaaccccgacgacctatatgttagcgttcacggaatgcctttttctgccatggaaaacgatgtaagagattttttccacggactgagggttgacgccgttcatctcttgaaggaccatgtaggtaggaataacgggaatggcttagtgaagtttctctctccgcaggacactttcgaggcactgaaacgaaacagaatgctgatgatccagaggtacgtcgaagtgtccccagccacagagaggcagtgggtcgccgctggtggacatattacgttcaagcagaatatggggcctagcggccagactcatccacctccacaaacattgcccaggtctaaatcaccctctggccagaaacgttccaggagtagaagcccccacgaagctggattctgcgtgtatctgaagggattacccttcgaagctgagaacaagcatgtaattgatttttttaagaagctcgatatcgtggaagattcgatttatattgcatacgggccaaacggcaaggctactggggagggtttcgtggagttccgaaatgaggccgactacaaggccgctctctgccgccacaaacagtacatgggcaatcgattcattcaggtgcacccgatcacgaaaaaggggatgctggagaagatcgacatgattcggaagagactccaaaattttagctacgaccagagagagatgatactgaatccggagggcgacgtaaacagcgcaaaagtttgcgcccatatcactaatatcccatttagcatcactaagatggatgttctgcagttcttggaggggatcccagtggatgagaatgccgtgcacgttctggtcgacaacaacggtcagggcttgggccaggccctagtccagttcaagaacgaagatgacgcgaggaagtcagaacggttgcacagaaagaagttaaacgggagagaagcctttgtacacgtggtcactctggaggacatgcgggagattgaaaagaatcccccagcccaggggaagaagggactaaagatgcccgtacccggaaatcccgctgtgccagggatgcccaacgcagggctcccaggcgtcgggctccccagtgcgggactaccaggtgcaggcctcccctcaaccggactccccggatcagcgattactagtgctggcctaccgggtgccggtatgccaagtgccggaatcccatctgccggaggggaagaacacgcatttttgaccgtggggagtaaggaggccaataatggacccccattcaatttcccgggaaacttcgggggatcgaacgcgtttggaccacccatccccccacccggactcggagggggtgctttcggagacgcgcgtcccggaatgccctctgtaggaaattcagggctgccgggactgggtctggacgtccccggattcggaggcggaccaaataacctgtctgggccttccggctttggtggtggccctcagaattttggcaatggccctgggagtctcggcggacccccaggatttggctccggccctccaggtctgggatctgcgccaggacatctggggggaccacccgctttcggccctggacctggcccaggtccagggccaggacccattcatattggcggaccccctgggttcgcatcctccagcggtaaaccgggacctaccgtgatcaaagtgcagaatatgccgttcactgtgagtatagatgagatcctggattttttttacggatatcaagttattcccggatcagtgtgccttaaatacaatgaaaagggcatgcctaccggcgaagccatggtggcgttcgaatctagagacgaggctactgccgctgtgatagacctgaacgacaggcccattggctcacggaaggtgaagttggtcctcggatag

SEQ ID NO: 76285 - DNA, 2799 bp, Artificial Sequence
  derived and/or modified sequence
atggctgtggtgatccgtctgcaaggtctgcctatcgtggccggtacaatggatatcagacactttttcagcgggctgaccattccagatggcggagttcacatcgtggggggagagctgggggaggctttcatcgtttttgctactgatgaggatgcccgtctgggcatgatgagaacaggcggtaccatcaagggaagcaaagtgaccctgctcctttccagcaaaactgagatgcaaaacatgattgaattatcacgccgtcgatttgaaacagctaatctggacatcccacctgcaaacgcatcccgctctgggccaccaccatcaagcgggatgtcaagccgcgtgaatctcccgacaaccgtctcaaatttcaataacccgagcccgtccgtagttacagctacaactagtgtgcatgagagtaacaaaaacatccaaactttcagtacagcgtcagtgggcacagctccacctaatatgggggcttccttcgggagccctacatttagtagcacggttcccagcaccgcttcaccaatgaatacggtgccccctcctccgatcccccctatcccagccatgccctctctgccaccaatgccttccattcctcccatccccgtgcctccacccgtccctactctgcctccagtgcctccagttccacctatcccccctgtgccttctgtgccaccaatgactccactccctcctatgagtggcatgccaccccttaacccacctccagtggcccctttgcccgcaggcatgaatgggtcaggcgcaccaatgaacctgaacaacaacctgaacccaatgtttttaggcccactgaatcctgtaaatccaattcagatgaacagtcagtctagtgttaagcctctccctataaatccagacgacctctatgtctccgttcatggtatgccattctctgccatggagaatgatgtcagagacttttttcacgggctgcgagtagacgccgttcatcttttgaaggatcacgtgggcaggaataacgggaacggattagtgaaatttctgtcgccgcaggacacctttgaagctcttaaacgcaatcgcatgctcatgattcagagatacgtagaagtctcccccgctacagaacgccagtgggtggcggcaggaggccatattacattcaagcagaacatgggcccatccggacaaacccatccccctccacagaccctgccaaggagtaagagcccatctgggcagaagcggagtaggtcccgaagcccccacgaggctggcttctgcgtgtaccttaaaggacttccctttgaagctgaaaacaagcacgtgatagactttttcaagaaactggatattgtagaagactctatttacatcgcttacggccctaacggcaaggccaccggtgaagggttcgttgaattcaggaatgaggccgactataaggccgctttgtgcagacataagcaatacatggggaatcggtttatacaagtgcatcccatcaccaagaagggcatgttggagaaaatagacatgatcagaaaaaggcttcagaatttttcttacgaccagagggagatgattcttaatccagagggggacgtcaactccgccaaagtctgcgcccatattactaatatacccttctccatcacaaagatggatgtgttgcagttcctcgaaggaatcccagtggatgagaacgccgtccatgtcctcgtggataataacggccagggattaggccaagcgctggtgcagtttaagaacgaagatgacgccagaaaatcagaacgtttacaccgtaaaaagttgaatggtcgagaagccttcgtccacgtggtaacactggaagacatgagagagatagagaaaaatccaccggctcaggggaaaaaggggctcaagatgccagtccctggcaaccccgcagtgcccggaatgccgaacgcaggtctacctggcgtgggtctcccctccgccggacttccaggcgcaggtctgccgtccactggcctcccaggctccgccattaccagcgcgggtttgccgggtgcaggtatgccaagcgctggcattccctcagccggaggagaggaacacgcgttcctcaccgtggggagcaaagaggccaataatggcccacctttcaacttccctggcaacttcggtggctccaacgccttcgggccaccgataccacctccagggttaggcggtggcgcattcggagatgccagacccggaatgccctctgtcggtaatagcggtctgcctgggcttggtctggatgtgcctggtttcggaggaggaccgaataacttgtctggccctagtggctttggcggtggacctcagaactttggaaatggacctggcagtttaggagggcctccgggatttgggagtggcccacctggcctgggaagcgccccaggacatctggggggaccaccagcattcgggcctgggcctggccctgggcctggccctggaccaatccacataggtggccctcccggattcgctagcagctctggtaaaccaggacctacagtaatcaaagtccagaacatgccatttactgtgtctatcgacgagattctggacttcttctatggataccaagtcattccgggatccgtttgtctgaaatataacgaaaaagggatgcctaccggagaagcaatggttgcatttgaatcaagagatgaagctaccgcagcggtcattgatttaaatgaccgcccaatcggttctcgaaaggtgaagctcgtgctggggtag

SEQ ID NO: 76286 - DNA, 2799 bp, Artificial Sequence
  derived and/or modified sequence
atggcagtggtgattagattgcaagggctcccaatcgtggccggaaccatggatattagacacttcttcagtggactaacaattcctgatggtggcgttcacattgtgggtggggaactcggcgaggcgtttattgtctttgcaacagacgaggacgccaggctgggcatgatgcgcaccggcggtaccatcaaagggtccaaagtcacactgcttttaagctctaaaaccgaaatgcagaatatgatagaattgtctcggaggcgctttgagaccgcaaacctggatatccctccggcaaacgcaagcaggtcggggcctccaccttccagcggtatgagcagcagagtgaatctacccacgacagtctccaactttaataacccttcacctagtgttgtgaccgctaccacgagcgtgcacgagagtaacaagaacatccagacctttagcacagcgtcagtgggtacggcgccacccaatatgggtgcaagcttcggctccccaaccttctcgtccactgttccctcaacagcttcccccatgaacacagtgcctccccctcctatcccccctattccagccatgccatctctgccaccaatgccttctatcccaccaatcccagtgcctccacctgtgcctactttgccccctgtgccaccagtccccccaattccgcctgtaccttcagtgccacccatgacaccactgccacccatgtccggtatgcctccgcttaatccaccccctgttgctccacttcctgccggaatgaacggttctggcgctccaatgaacctcaacaacaacctcaatcctatgttcctcggaccactgaatcccgtgaacccgatacagatgaactctcagagctcggtcaagccactccccattaatccagacgacctttacgtctcagtgcacggcatgcctttttctgccatggagaacgacgttcgagatttcttccatggtttgcgtgtggatgccgtccacctgttgaaagatcacgttggaaggaacaatggtaacgggctcgtgaagttccttagcccacaagacacgtttgaagctctgaaacgcaatagaatgctgatgatacagcgatatgtcgaggtgagtcccgcaactgaaaggcaatgggtggccgctggagggcacattacttttaaacagaatatgggaccatctggtcaaacgcacccccctccccagactctccccagaagcaagagccctagtggccaaaaacgttcaagatcgagatccccgcacgaggccggtttctgtgtctacctcaagggcctgccctttgaggcagagaacaagcatgtgatcgacttctttaagaaactggacatcgtggaagatagtatatatattgcctatggcccaaatggcaaagccacaggcgagggctttgtggagttccgtaacgaagccgactataaagcagcactctgtcggcataaacagtacatgggtaataggtttattcaggtacatcccattactaagaagggaatgctagagaagatagatatgatcaggaagcggttgcagaatttttcatacgaccagcgggaaatgattcttaatcctgagggggacgtaaactctgctaaggtttgcgcccatattaccaatattccattcagcatcacaaagatggatgtcctccaatttttggaggggatcccagtagacgaaaacgcagtgcatgtcctagtggacaacaatgggcagggcctagggcaggccctcgtgcagtttaagaatgaagacgatgcacgcaagtccgaacgactacaccgaaaaaaactgaacggaagagaggcctttgtgcacgtcgtgacactagaagatatgcgggagatcgagaaaaacccaccggctcaaggtaaaaaagggctgaagatgccggtccctggcaaccccgctgtccccggaatgcctaacgctggattgcccggtgtgggcctcccaagtgccggactccctggggctggcttgcccagcactggcctgcctggatctgccattacgagtgctggactgcctggggcaggaatgccctccgcgggaattcctagtgctgggggagaagagcacgcattcctgaccgtcggaagcaaggaggccaacaatgggcctccatttaatttccccggtaactttggtggttcgaacgccttcggaccccctatccccccacctggcctcgggggtggtgcttttggagacgcgagaccgggaatgccaagtgtcgggaactctggactacctgggttgggactggacgtaccaggtttcggcggaggccctaacaatttgagcggtccatccggcttcggcggtggccctcagaattttggaaacgggccaggatccctggggggaccccctggctttgggtccggccctccgggtctgggctccgcccctggacacctaggaggaccccctgcctttggcccagggcctgggccaggtccagggccaggcccaattcacatcggtggccctcctgggttcgcttcaagctccggcaagcccggtcctaccgttattaaggtccaaaacatgccctttaccgtatccattgacgagatattggattttttctacgggtatcaagtgatcccgggaagcgtgtgcctgaagtacaacgaaaaaggcatgcccacaggcgaagcaatggtggccttcgagtctcgggacgaggcaactgctgctgtgattgatttgaacgaccgcccaataggtagccggaaggtcaagctggtgctgggctag

SEQ ID NO: 76287 - DNA, 876 bp, Artificial Sequence
  derived and/or modified sequence
atggctgtagtcatacgcctacagggcctgcctatcgtggcaggtaccatggatattcggcatttcttcagtggcttgaccattcccgatgggggtgtgcatatagtgggaggggaactgggggaggcttttatcgtcttcgccaccgacgaagatgctcgcctgggcatgatgcgaacaggagggacaatcaagggctcgaaagttacactgcttctcagctccaagacagaaatgcagaacatgatcgaactttctcgcagacgattcgagaccgcgaatctggacatcccgcctgccaacgcatcccgatcaggccctcctccttcatccggaatgtcttccagggtgaacctcccaacaacagtctcaaacttcaacaatccttcaccctctgtggtgacagccaccacatccgtacacgagtcaaacaaaaacatacagaccttctcaaccgcatccgttggcacggccccaccaaatatgggcgctagttttggatcacctaccttttcctcaactgtaccatccacagcctcacccatgaatactgtccccccaccaccaatccctccaattccagctatgcccagcttgccccctatgcccagcattccccctattcctgtacctcctcccgtaccgacgctgccccctgtgccaccggtgccgcctattccaccagtcccatcagtgccgcctatgacacctctcccgccaatgagtggcatgccacccttaaacccccctcccgttgcacccctgcctgcaggaatgaacggctctggggctcccatgaacttaaataacaatctcaacccaatgttcctcggcccactgaatccagtgaacccaatccagatgaatagccagtag

SEQ ID NO: 76288 - DNA, 432 bp, Artificial Sequence
  derived and/or modified sequence
atggccgtggtgattaggctgcaggggctgcccatcgtcgcaggaactatggacatcaggcatttcttctccgggctcacaatacccgacgggggtgtccacattgtgggaggggagttaggtgaagcatttattgtttttgccaccgacgaggacgcgaggctggggatgatgcgcacagggggtactattaagggaagtaaagttacactgttgctgtcgtccaaaacggagatgcagaatatgatcgagctgtctcgccgaaggttcgagaccgccaacctggatatcccccctgccaacgcatcacgaagtggtcccccacctagctcaggtatgagctctagagtcaatctccctaccaccgtctcgaacttcaataacccttctccatccgtcgttacagccaccactagtgttcacgaatcctag

SEQ ID NO: 76289 - DNA, 405 bp, Artificial Sequence
  derived and/or modified sequence
atggcagtcgtgatcaggctgcaaggtttaccgattgtggcgggaactatggacattcggcattttttttccggccttacaatcccagacggcggagtgcacatcgtgggtggcgagctgggcgaagcctttattgtgttcgccacagacgaagatgctcggctaggcatgatgcgcaccggcggtacaattaaggggtctaaggttacactgttgctctcgtccaaaactgagatgcagaacatgatcgaattgtcccgccgaagattcgaaacagccaatctggatattcctcctgcaaacgcgagccgatctggaccaccgccatcctcaggcatgagcagtcgggtgaatctgcccactacagtgagcaacttcaacaacccgtctccctccgtggtctag
